(19) United States
(12) Patent Application Publication
(10) Pub. No.: US 2015/0052636 A1
(43) Pub. Date: Feb. 19, 2015

(54) Regulatory Nucleic Acid Molecules for Reliable Gene Expression in Plants

(71) Applicants: Julia Verena Hartig, Durham, NC (US); Maarten Hendrik Stuiver, Neustadt (DE); Josef Martin Kuhn, Limburgerhof (DE); Alrun Nora Burgmeier, Chapel Hill, NC (US)

(72) Inventors: Julia Verena Hartig, Durham, NC (US); Maarten Hendrik Stuiver, Neustadt (DE); Josef Martin Kuhn, Limburgerhof (DE); Alrun Nora Burgmeier, Chapel Hill, NC (US)

(73) Assignee: BASF Plant Science Company GmbH, Ludwigshafen (DE)

(21) Appl. No.: 14/344,955

(22) PCT Filed: Sep. 4, 2012
(86) PCT No.: PCT/IB2012/054549

§ 371 Date: Nov. 4, 2014

Related U.S. Application Data
(60) Provisional application No. 61/627,037, filed on Sep. 16, 2011.

(30) Foreign Application Priority Data
Sep. 15, 2011 (EP) 11181420.8

(51) Int. Cl. C12N 15/82

(52) U.S. Cl. CPC C12N 15/8216
USPC 800/287; 800/278; 435/320.1; 435/419; 800/298; 435/252.3; 435/254.11; 435/254.2

(57) ABSTRACT

The invention relates to methods and means for enhancing the reliability of expression in transgenic plants by reducing the coefficient of variation of expression and/or the number of no- or low-expressing plants in a population of plants.

### DESCRIPTION OF THE INVENTION

[0001] Efficient expression of a transgene is not only dependent on an optimal set of promoters and terminators. In a certain percentage of events the transgene is transcriptionally silent. In extreme cases, e.g. in transgenic cereals, up to 50% of events from a specific transgene can be silenced over successive generations (Vain et al., 1998). Several approaches have been investigated to prevent this negative effect on transgene expression.

[0002] Scaffold/Matrix Attachment Regions (S/MARs) have been experimentally defined as DNA elements that can attach to isolated eukaryotic nuclear matrix in an in vitro assay. S/MARs are at least 300 bp long but often exceed lengths of 1000 bp. Most S/MARs have an NT-content of 65% to more than 90%, though with little sequence conservation. They have been implicated as DNA domain-defining elements (Boulikas, 1995; Bode, 1995). A possible mode of action may be that they attach cis-regulatory elements (e.g. promoters and enhancers) to the nuclear matrix, where they become accessible to matrix-bound transcription factors (Cockerill et al., 1987; Bode et al. 2000). There have been reports that by positioning S/MARs upstream and downstream of a transgene, gene expression could be enhanced, possibly by blocking inhibitory position effects at the integration site (Lorence et al., 2004; Allen et al., 2005). Even though there are some reports where S/MARs had a positive effect on transgene expression in plants (Butaye et al., 2004, Oh et al., 2005, Torney et al., 2004, Xue et al., 2005), there is conflicting evidence concerning their effect on reducing variation between events (Liu and Tabe, 1998; Schoffel et al. 1993; Van der Greest and Hall, 1994; Mlynarova et al. 1995; Vain et al. 1999; De Bolle et al., 2007; Li et al, 2008).

[0003] Until today S/MARs remain highly elusive and cannot be reliably identified by bioinformatic means, with very little knowledge about associated effector proteins (De Bolle et al., 2007). Their length and their having to flank the transgene on both sides limit their usefulness in commercial plant transformation vectors. Moreover, the high NT-content makes normal methods of genetic manipulation difficult. According to the loop model of S/MAR regulation they exert influences on gene expression often over several thousand base-pairs.

[0004] Insulators are another type of DNA boundary element that has been reported to prevent position effects of surrounding chromatin on transgene expression. Interpretation of their mode of action varies between formation of individual chromatin domains that are able to block enhancer/promoter interaction to preventing the spread of heterochromatin into neighboring regions (Kuhn and Geyer, 2003; Gaszner and Felsenfeld, 2006).

[0005] Among the best studied insulators from animals are the gypsy and scs/scs′ insulators from Drosophila (Barolo at al., 2000; Markenstein et al., 2008) and the beta-globin HS4 insulator from chicken (Wang et al., 2009). There have been some successes in heterologously expressing animal insulators in plants to reduce the position effect on transgenes, leading to more reliable gene expression (Nagaya et al., 2001; She et al., 2010). However, the coefficient of variation could be reduced more pronouncedly (˜5-fold instead of ˜3-fold), if the heterologous insulator binding protein for the gypsy insulator was co-expressed (She et al., 2010). No efficient plant insulators have been identified so far. This is in part due to the fact that no sequence similarity can be found between known insulator elements (Sultana et al., 2011).

[0006] The necessity to include the insulator both upstream and downstream of the sequence intended for reliable expression and the need to co-express the heterologous binding protein limit the flexibility of use for commercial plant transformation.

[0007] Some authors have also pointed to a possible connection between both insulators and S/MARs: The insulator binding proteins CTCF in vertebrates and Su(Hw) in Drosophila have been reported to at least partially reside in the nuclear matrix (Byrd and Corces, 2003; Dunn et al., 2003; Yusufzai and Felsenfeld, 2004).

[0008] Introns have been reported in animals and various monocotyledonous (e.g. Callis et al., 1987; Vasil et al., 1989; Bruce et al., 1990; Lu et al., 2008) and dicotyledonous plants (e.g. Chung et al., 2006; Kim et al., 2006; Rose et al., 2008) to increase gene expression, also known as Intron Mediated Enhancement (IME). However, this current invention describes the novel influence of introns or nucleic acid molecules derived from or comprised in introns, on the reliability of gene expression. Reliable gene expression may be defined by a low percentage of non-expressers in the population of transgenic plants derived from transformation with one T-DNA construct. It follows that the absolute number of necessary events can be reduced since the probability to isolate plants exhibiting suitable expression is higher. Another definition of reliable gene expression is a reduced coefficient of variation of expression in a population of transgenic plants. Therefore the current invention has the ability to considerably reduce necessary time and costs for commercial plant transformation.

### DETAILED DESCRIPTION OF THE INVENTION

[0009] A first embodiment of the invention comprises a method for reducing the coefficient of variation of expression in a population of plants preferably independent plants, for example independent primary transformant plants comprising the steps of
[0010] a) providing a recombinant nucleic acid construct comprising at least one Reliability Enhancing Nucleic Acid (RENA) molecule selected from the group comprising
   [0011] i) the nucleic acid molecule having a sequence as defined in any of SEQ ID NO: 1 to 16 or 94 to 116666 or
   [0012] ii) a nucleic acid molecule having a sequence with an identity of 80% or more to any of the sequences as defined by SEQ ID NO:1 to 16 or 94 to 116666, preferably, the identity is 85% or more, more preferably the identity is 90% or more, even more preferably, the identity is 95% or more, 96% or more, 97% or more, 98% or more or 99% or more, in the most preferred embodiment, the identity is 100% to any of the sequences as defined by SEQ ID NO:1 to 16 or 94 to 116666 or
   [0013] iii) a fragment of 100 or more consecutive bases, preferably 150 or more consecutive bases, more preferably 200 consecutive bases or more even more preferably 250 or more consecutive bases of a nucleic acid molecule of i) or ii) or
   [0014] iv) a nucleic acid molecule of 100 nucleotides or more, 150 nucleotides or more, 200 nucleotides or more or 250 nucleotides or more, hybridizing under conditions equivalent to hybridization in 7% sodium dodecyl sulfate (SDS), 0.5 M NaPO₄, 1 mM EDTA at 50° C. with washing in 2×SSC, 0.1% SDS at 50° C. or 65° C., preferably 65° C. to a nucleic acid molecule comprising at least 50, preferably at least 100, more preferably at least 150, even more preferably at least 200, most preferably at least 250 consecutive nucleotides of a transcription enhancing nucleotide sequence described by SEQ ID NO:1 to 16 or 94 to 116666 or the complement thereof. Preferably, said nucleic acid molecule is hybridizing under conditions equivalent to hybridization in 7% sodium dodecyl sulfate (SDS), 0.5 M NaPO₄, 1 mM EDTA at 50° C. with washing in 1×SSC, 0.1% SDS at 50° C. or 65° C., preferably 65° C. to a nucleic acid molecule comprising at least 50, preferably at least 100, more preferably at least 150, even more preferably at least 200, most preferably at least 250 consecutive nucleotides of a transcription enhancing nucleotide sequence described by SEQ ID NO:1 to 16 or 94 to 116666 or the complement thereof, more preferably, said nucleic acid molecule is hybridizing under conditions equivalent to hybridization in 7% sodium dodecyl sulfate (SDS), 0.5 M NaPO₄, 1 mM EDTA at 50° C. with washing in 0.1×SSC, 0.1% SDS at 50° C. or 65° C., preferably 65° C. to a nucleic acid molecule comprising at least 50, preferably at least 100, more preferably at least 150, even more preferably at least 200, most preferably at least 250 consecutive nucleotides of a transcription enhancing nucleotide sequence described by any of the sequences as defined by SEQ ID NO:1 to 16 or 94 to 116666 or
   [0015] v) a nucleic acid molecule which is the complement or reverse complement of any of the previously mentioned nucleic acid molecules under i) to vi),
[0016] b) functionally linking the RENA molecule as defined under i) to v) to a promoter and/or a nucleic acid molecule of interest wherein at least the promoter is heterologous to at least one of the RENA molecules and
[0017] c) integrating the RENA molecule functionally linked to a promoter and/or a nucleic acid molecule of interest in the genome of plant cells, plants or part thereof and
[0018] d) regenerating plants, preferably independent primary transformant plants from the transgenic plant cells, plants or part thereof produced in step c),
[0019] wherein the molecules as defined under ii) to v) reduce the variation of expression by least 10%, preferably at least 20%, for example 30%, more preferably at least 40%, for example 50%, even more preferably 60%, 70% or 80%, even more preferably at least 90 or 95%, most preferably 100% of the corresponding nucleic acid molecule having the sequence of SEQ ID NO: 1 to 16 or 94 to 116666, and

[0020] wherein the population of plants exhibit an at least 10%, preferably at least 20%, for example 30%, more preferably at least 40%, for example 50%, even more preferably 60%, 70% or 80%, even more preferably at least 90% or 95%, most preferably 100% lower coefficient of variation of expression of the nucleic acid molecule of interest compared to a respective population comprising in their genome a respective recombinant nucleic acid construct not comprising the respective RENA molecule as defined in i) to v).

[0021] Preferably, the population of plants comprising the recombinant construct comprising the RENA molecule and the respective control population of plants are populations of independent primary transformant plants.

[0022] Preferably the RENA molecule is heterologous to both the promoter and the nucleic acid of interest to which it is functionally linked.

[0023] The coefficient of variation is defined as standard deviation of expression of the nucleic acid of interest within a population of plants, for example primary transformand plants, divided by the mean of expression of the respective nucleic acid of interest in the respective population of plants.

[0024] Reliable gene expression is defined by a low percentage of non- or low-expressers in the population of transgenic plants derived from transformation with one T-DNA comprising an expression construct comprising at least one RENA molecule functionally linked to a promoter and a nucleic acid of interest, wherein at least the promoter is heterologous to the RNEA molecule. It follows that the absolute number of necessary events can be reduced since the probability to get suitable expression is higher.

[0025] The term “integration into the genome” is to be understood as stable integration of a nucleic acid molecule into the genome of an organism so that the nucleic acid molecule may be inherited over various subsequent generations of the respective organism.

[0026] The term “population” is to be understood as a plurality of organisms, preferably plants, preferably of the same genus, that are grown under similar, preferably identical conditions. The individual organisms of the population may be grown at various time points, preferably at the same time.

[0027] The term “independent primary transformant” is to be understood as organisms, preferably plants regenerated in one or more transformation experiments derived from not identical transformation events. Hence, from each transformation event only one plant is regenerated. The organisms in a population of independent transformant plants are therefore no genotypic clones but are derived each from distinct transformation events.

[0028] Populations of plant derived from the primary transformant plants of 2^{nd}, 3^{rd} or any other generation derived from plants or populations produced according to a method of the invention are also exhibiting a reduced coefficient of variation and/or reduced number of low or non expressing plants. Hence, the methods of the invention may also be used for reducing the number of low- or non-expressing plants in subsequent generations therefore lowering the number of low-expressing or silenced plants in a population in the n+1 generation.

[0029] A population of primary transformant plants exhibiting a reduced coefficient of variation of expression of the nucleic acid molecule of interest which is functionally linked to the RENA molecule compared to a population of primary transformant plants comprising a comparable, preferably a recombinant expression construct which is identical despite that it is not comprising a recombinant RENA molecule is of advantage as the number of non expressing or low expressing plants in the population exhibiting a reduced coefficient of variation is reduced. The number of plants that need to be regenerated in a transformation process in order to isolate at least one plant exhibiting the desired expression level may thereby be reduced. Plant transformation and regeneration is a very laborious process especially if plant species or germplasms are concerned that are recalcitrant to transformation and/or regeneration. Hence a transformation process that requires reduced number of regeneration of T1 plants is highly valuable.

[0030] A person skilled in the art is aware of methods for rendering a unidirectional to a bidirectional promoter and of methods to use the complement or reverse complement of a promoter sequence for creating a promoter having the same promoter specificity as the original sequence. Such methods are for example described for constitutive as well as inducible promoters by Xie et al. (2001) “Bidirectionalization of polar promoters in plants” nature biotechnology 19, pages 677-679. The authors describe that it is sufficient to add a minimal promoter to the 5′ end of any given promoter to receive a promoter controlling expression in both directions with same properties such as promoter specificity and strength. Hence a promoter functionally linked to a RENA as described above is functional in complement or reverse complement and therefore the RENA is functional in complement or reverse complement too.

[0031] In principal the RENA may be functionally linked to any promoter such as tissue specific, inducible, developmental specific or constitutive promoters. The respective RENA will lead to an enhanced reliability of expression of the heterologous nucleic acid under the control of the respective promoter to which the at least one RENA is functionally linked to.

[0032] Preferably, the one or more RENA is functionally linked to any heterologous promoter and will enhance reliability of expression of the nucleic acid molecule under control of said promoter. Constitutive promoters to be used in any method of the invention may be derived from plants, for example monocotyledonous or dicotyledonous plants, from bacteria and/or viruses or may be synthetic promoters. Constitutive promoters to be used are for example the PcUbi-Promoter from P. crispum (WO 2003102198), the ZmUbi-Promoter from Zea maize, AtNit-promoter from the A. thaliana gene At3g44310 encoding nitrilase 1, the 34S-promoter from figwort mosaic virus, the 35S-promoter from tobacco mosaic virus, the nos and ocs-promoter derived from Agrobacteria, the ScBV-promoter (U.S. Pat. No. 5,994,123), the SUPER-promoter (Lee et al. 2007, Plant. Phys.), the AtFNR-promoter from the A. thaliana gene At5g66190 encoding the ferredoxin NADH reductase, the ptxA promoter from Pisum sativum (WO2005085450), the AtTPT-promoter from the A. thaliana gene At5g46110 encoding the triose phosphate translocator, the bidirectional AtOASTL-promoter from the A. thaliana genes At4g14880 and At4g14890, the PRO0194 promoter from the A. thaliana gene At1g13440 encoding the glyceraldehyde-3-phosphate dehydrogenase, the PRO0162 promoter from the A. thaliana gene At3g52930 encoding the fructose-bis-phosphate aldolase, the AHAS-promoter (WO2008124495) or the CaffeoylCoA-MT promoter and the OsCP12 from rice (WO2006084868).

[0033] The promoter of the invention functionally linked to a heterologous RENA may be employed in any plant comprising for example moss, fern, gymnosperm or angiosperm, for example monocotyledonous or dicotyledonous plant. In a preferred embodiment said promoter of the invention functionally linked to a RENA may be employed in monocotyledonous or dicotyledonous plants, preferably crop plant such as corn, soy, canola, cotton, potato, sugar beet, rice, wheat, sorghum, barley, musa, sugarcane, miscanthus and the like. In a preferred embodiment of the invention, said promoter which is functionally linked to a RENA may be employed in monocotyledonous crop plants such as corn, rice, wheat, sorghum, musa, miscanthus, sugarcane or barley. In an especially preferred embodiment the promoter functionally linked to a RENA may be employed in dicotyledonous crop plants such as soy, canola, cotton, sugar beet or potato.

[0034] Methods for quantifying expression are known in the art. For example, the promoter functionally linked to at least one RENA molecule may be functionally linked to a marker gene such as GUS, GFP or luciferase and the activity of the respective protein encoded by the respective marker gene may be determined in the plant or part thereof. As a representative example, the method for detecting luciferase is described in detail below. Other methods are for example measuring the steady state level or synthesis rate of RNA of the nucleic acid molecule controlled by the promoter by methods known in the art, for example Northern blot analysis, qPCR, run-on assays or other methods described in the art.

[0035] A skilled person is aware of various methods for functionally linking two or more nucleic acid molecules. Such methods may encompass restriction/ligation, ligase independent cloning, recombineering, recombination or synthesis. Other methods may be employed to functionally link two or more nucleic acid molecules.

[0036] The term “heterologous” with respect to a nucleic acid molecule or DNA refers to a nucleic acid molecule which is operably linked to, or is manipulated to become operably linked to, a second nucleic acid molecule to which it is not operably linked in nature, or to which it is operably linked at a different location in nature. For example, a RENA of the invention is in its natural environment functionally linked to its native promoter, whereas in the present invention it is linked to another promoter which might be derived from the same organism, a different organism or might be a synthetic promoter such as the SUPER-promoter. It may also mean that the RENA of the present invention is linked to its native promoter but the nucleic acid molecule under control of said promoter is heterologous to the promoter comprising its native RENA. It is in addition to be understood that the promoter and/or the nucleic acid molecule under the control of said promoter functionally linked to a RENA of the invention are heterologous to said RENA as their sequence has been manipulated by for example mutation such as insertions, deletions and the forth so that the natural sequence of the promoter and/or the nucleic acid molecule under control of said promoter is modified and therefore have become heterologous to a RENA of the invention. It may also be understood that the RENA is heterologous to the nucleic acid to which it is functionally linked when the RENA is functionally linked to its native promoter wherein the position of the RENA in relation to said promoter is changed so that the promoter exhibits enhanced reliability of expression after such manipulation.

[0037] A further embodiment of the invention is a method for producing a population of transgenic plants, preferably independent plants for example independent primary transformant plants with reduced percentage of low-expressing plants comprising the steps of
[0038] I) providing a recombinant nucleic acid construct comprising at least one RENA molecule as defined in above in i) to v) functionally linked to a promoter and/or a nucleic acid molecule of interest wherein at least the promoter is heterologous to the RENA molecule and
[0039] II) integrating said recombinant nucleic acid construct in the genome of plant cells, plants or parts thereof and
[0040] III) regenerating a population of independent primary transformant plants from the transgenic plant cells, plants or parts thereof produced in step II),

[0041] wherein the population of independent primary transformant plants has an at least 5% or 10%, preferably at least 20%, 25% or 30%, preferably at least 40% or 50%, more preferably at least 60%, 70% or 80%, even more preferably at least 90%, 95% or 100% reduced percentage of plants exhibiting low or non expression of the nucleic acid of interest compared to a population of plants, preferably independent primary transformant plants comprising in their genome a respective recombinant nucleic acid construct not comprising the respective RENA molecule as defined in i) to v).

[0042] Preferably the RENA molecule is heterologous to both the promoter and the nucleic acid of interest to which it is functionally linked.

[0043] The percentage of non- or low-expressers is calculated relative to the mean expression level of the nucleic acid of interest derived from the respective construct in a population of plants. In a preferred embodiment, the percentage of non- or low-expressers in a population is defined as an at least 5% or 10%, preferably at least 20%, 25% or 30%, preferably at least 40% or 50%, more preferably at least 60%, 70% or 80%, even more preferably at least 90%, 95% or 100% reduction of plants expressing lower than 5%, preferably lower than 10%, more preferably lower than 20% or 25%, even more preferably 30%, most preferably 40% or 50% of the mean.

[0044] A method for reducing the number of low expressing plants, preferably independent primary transformant plants, comprising the steps of
[0045] I) providing a recombinant nucleic acid construct comprising at least one RENA molecule as defined above under i) to v) functionally linked to a promoter and/or a nucleic acid molecule of interest wherein at least the promoter is heterologous to the RENA molecule and
[0046] II) integrating said recombinant nucleic acid construct in the genome of plant cells, plants or parts thereof and
[0047] III) regenerating independent primary transformant plants from the transgenic plant cells, plants or parts thereof produced in step II),

[0048] wherein the number of low expressing independent primary transformant plants is reduced by at least 5% or 10%, preferably at least 20%, 25% or 30%, preferably at least 40% or 50%, more preferably at least 60%, 70% or 80%, even more preferably at least 90%, 95% or 100% compared to a population of independent primary transformant plants comprising in their genome a respective recombinant nucleic acid not comprising the respective RENA molecule as defined above under i) to v) is a further embodiment of the invention.

[0049] The methods as described above, wherein the RENA molecule is comprised in an expression construct or vector functionally linked to a promoter and/or a nucleic acid molecule of interest wherein at least the promoter is heterologous to the at least one RENA molecule, preferably the RENA molecule is heterologous to both the promoter and the nucleic acid of interest is an additional embodiment of the invention.

[0050] The methods as described above wherein said at least one RENA is located 2500 bp or less, preferentially 2000 bp or less, more preferred 1500 bp or less, even more preferred 1000 bp or less and most preferred 500 bp or less away from the transcription start site of said heterologous nucleic acid molecule of interest to which it is functionally linked is also one embodiment of the invention. Preferably the at least one RENA is located upstream of the translational start site of the nucleic acid molecule to which it is functionally linked. In another embodiment of the invention the at least one RENA is located within a 5′UTR of the nucleic acid molecule of interest to which it is functionally linked. The 5′UTR may be homologous or heterologous to the promoter and/or nucleic acid of interest of the construct used in the methods of the invention.

[0051] A further embodiment of the invention is a recombinant expression construct comprising at least one RENA molecule as defined above under points i) to vi) functionally linked to a promoter and/or a nucleic acid molecule of interest wherein at least the promoter is heterologous to the RENA molecule. In one embodiment of the invention the RENA is heterologous to both the promoter and the nucleic acid of interest comprised in the construct of the invention.

[0052] A further embodiment of the invention is a method as described above or the recombinant expression construct as described above wherein the promoter is a constitutive promoter, a tissue-specific or tissue-preferential promoter, a developmental-specific or developmental-preferential promoter or an inducible promoter. A recombinant expression vector comprising one or more recombinant expression constructs as described above is also an embodiment of the invention.

[0053] A further embodiment of the invention is a transgenic cell or transgenic plant or part thereof, for example propagation material comprising
[0054] a) at least one RENA molecule as defined above under i) to v) which is functionally linked to a heterologous promoter and/or a heterologous nucleic acid of interest to be expressed or
[0055] b) a recombinant expression construct as described above or
[0056] c) a recombinant expression vector as described above.

[0057] The transgenic cell or transgenic plant or part thereof may be selected from the group consisting of bacteria, fungi, yeasts or plants.

[0058] Transgenic parts or propagation material as meant herein comprise all tissues and organs, for example leaf, stem and fruit as well as material that is useful for propagation and/or regeneration of plants such as cuttings, scions, layers, branches or shoots comprising the respective RENA functionally linked to a heterologous promoter and/or nucleic acid of interest, recombinant expression construct or recombinant vector.

[0059] A use of a RENA molecule as defined above under point i) to v) or the recombinant expression construct or recombinant expression vector as defined in above for reducing the coefficient of variation in a population of primary transformant plants or reducing the percentage of low-expressing plants in a population of primary transformant plants is a further embodiment of the invention.

[0060] A method for the production of an agricultural product by introducing a RENA molecule as defined above under point i) to v) or the recombinant construct or recombinant vector as defined above into a plant, growing the plant, harvesting and processing the plant or parts thereof is a further embodiment of the invention.

[0061] The method of the invention may be applied to any plant, for example gymnosperm or angiosperm, preferably angiosperm, for example dicotyledonous or monocotyledonous plants, preferably dicotyledonous plants. Preferred monocotyledonous plants are for example corn, wheat, rice, barley, sorghum, musa, sugarcane, miscanthus and brachypodium, especially preferred monocotyledonous plants are corn, wheat and rice. Preferred dicotyledonous plants are for example soy, rape seed, canola, linseed, cotton, potato, sugar beet, tagetes and Arabdopsis, especially preferred dicotyledonous plants are soy, rape seed, canola and potato.

[0062] The one or more RENA molecule may be introduced into the plant or part thereof by means of particle bombardment, protoplast electroporation, virus infection, Agrobacterium mediated transformation or any other approach known in the art. The RENA molecule may be introduced integrated for example into a plasmid or viral DNA or viral RNA. The RENA molecule may also be comprised on a BAC, YAC or artificial chromosome prior to introduction into the plant or part of the plant. It may be also introduced as a linear nucleic acid molecule comprising the RENA sequence wherein additional sequences may be present adjacent to the RENA sequence on the nucleic acid molecule. These sequences neighboring the RENA sequence may be from about 20 bp, for example 20 bp to several hundred base pairs, for example 100 bp or more and may facilitate integration into the genome for example by homologous recombination. Any other method for genome integration may be employed, such as targeted integration approaches, such as homologous recombination or random integration approaches, such as illegitimate recombination.

[0063] The endogenous expressed nucleic acid to which the RENA molecule may be functionally linked may be any nucleic acid, preferably any constitutively expressed nucleic acid molecule. The nucleic acid molecule may be a protein coding nucleic acid molecule or a non coding molecule such as antisense RNA, rRNA, tRNA, miRNA, ta-siRNA, siRNA, dsRNA, snRNA, snoRNA or any other noncoding RNA known in the art.

[0064] In another preferred embodiment said one or more RENA is functionally linked to a promoter close to the transcription start site of said heterologous nucleic acid molecule.

[0065] Close to the transcription start site as meant herein comprises functionally linking one or more RENA to a promoter 2500 bp or less, preferentially 2000 bp or less, more preferred 1500 bp or less, even more preferred 1000 bp or less and most preferred 500 bp or less away from the transcription start site of said heterologous nucleic acid molecule. It is to be understood that the RENA may be integrated upstream or downstream in the respective distance from the transcription start site of the respective promoter. Hence, the one or more RENA must not necessarily be included in the transcript of the respective heterologous nucleic acid under control of the promoter the one or more RENA is functionally linked to. Preferentially the one or more RENA is integrated downstream of the transcription start site of the respective promoter. The integration site downstream of the transcription start site may be in the 5′ UTR, the 3′ UTR, an exon or intron or it may replace an intron or partially or completely the 5′ UTR or 3′ UTR of the heterologous nucleic acid under the control of the promoter. Preferentially the one or more RENA is integrated in the 5′ UTR or an intron or the RENA is replacing an intron or a part or the complete 5′UTR, most preferentially it is integrated in the 5′UTR of the respective heterologous nucleic acid.

[0066] A further embodiment of the invention is the use of the RENA as defined above in i) to v) or the recombinant construct or recombinant vector as defined above for enhancing reliability of expression in plants or parts thereof.

[0067] In a preferred embodiment, the RENAs having SEQ ID 1 to 16, 93 to 4243, 16160 to 35773, 38106 to 110789 and their functional homologs as defined above under i) to v) are used in methods for reducing the coefficient of variation in a population of primary transformant dicotyledonous plants or methods for producing a population of primary transformant dicotyledonous plants with reduced percentage of low-expressing plants, the RENAs having SEQ ID 4244 to 16159, 35774 to 38105 and 11160 to 113579 and their functional homologs as defined above under i) to v) are used in methods for reducing the coefficient of variation in a population of primary transformant monocotyledonous plants or methods for producing a population of primary transformant monocotyledonous plants with reduced percentage of low-expressing plants. In an especially preferred embodiment, the RENAs are used in the plant family or plant genus, they are derived from: Arabidopsis thaliana: SEQ ID NO 1 to 15 and 94 to 4243, Petrosilenum crispum: SEQ ID NO 16, Zea mays: SEQ ID NO 4244 to 9134, Oryza sativa: SEQ ID NO 9135 to 13754, Brachypodium distachyon: SEQ ID NO 13755 to 16159, Glycine max: SEQ ID NO 16160 to 27745, Medicago truncatula: SEQ ID NO 27746 to 35773, Sorghum bicolor: SEQ ID NO 35774 to 38105, Arabidopsis lyrata: SEQ ID NO 38106 to 42162, Manihot esculentum: SEQ ID NO 42163 to 48459, Ricinus communis: SEQ ID NO 48460 to 52747, Populus trichocarpa: SEQ ID NO 52748 to 61982, Cucumis sativus: SEQ ID NO 61983 to 68543, Prunus persica: SEQ ID NO 68544 to 73752, Carica papaya: SEQ ID NO 73753 to 77766, Citrus sinensis: SEQ ID NO 77767 to 83845, Citrus clementina: SEQ ID NO 83846 to 89915, Eucalyptos grandes: SEQ ID NO 89916 to 95632, Vitis vinifera: SEQ ID NO 95633 to 100567, Mimulus guttatus: SEQ ID NO 100568 to 106070, Aquilegia coerula: SEQ ID NO 106071 to 110789, Setaria italica: SEQ ID NO 110790 to 113579, Selaginella moellendorfii: SEQ ID NO 113580 to 113761, Physcomitrella patens: SEQ ID NO 113762 to 116585 and Volvox carteri: 116586 to 116666.

### DEFINITIONS

[0068] Abbreviations: RENA—nucleic acid expression enhancing nucleic acid, GFP—green fluorescence protein, GUS—beta-Glucuronidase, BAP—6-benzylaminopurine; 2,4-D-2,4-dichlorophenoxyacetic acid; MS—Murashige and Skoog medium; NAA—1-naphtaleneacetic acid; MES, 2-(N-morpholino-ethanesulfonic acid, IAA indole acetic acid; Kan: Kanamycin sulfate; GA3—Gibberellic acid; Timentin™: ticarcillin disodium/clavulanate potassium, microl: Microliter.

[0069] It is to be understood that this invention is not limited to the particular methodology or protocols. It is also to be understood that the terminology used herein is for the purpose of describing particular embodiments only, and is not intended to limit the scope of the present invention which will be limited only by the appended claims. It must be noted that as used herein and in the appended claims, the singular forms “a,” “and,” and “the” include plural reference unless the context clearly dictates otherwise. Thus, for example, reference to “a vector” is a reference to one or more vectors and includes equivalents thereof known to those skilled in the art, and so forth. The term “about” is used herein to mean approximately, roughly, around, or in the region of. When the term “about” is used in conjunction with a numerical range, it modifies that range by extending the boundaries above and below the numerical values set forth. In general, the term “about” is used herein to modify a numerical value above and below the stated value by a variance of 20 percent, preferably 10 percent up or down (higher or lower). As used herein, the word “or” means any one member of a particular list and also includes any combination of members of that list. The words “comprise,” “comprising,” “include,” “including,” and “includes” when used in this specification and in the following claims are intended to specify the presence of one or more stated features, integers, components, or steps, but they do not preclude the presence or addition of one or more other features, integers, components, steps, or groups thereof. For clarity, certain terms used in the specification are defined and used as follows:

[0070] Coding region: As used herein the term “coding region” when used in reference to a structural gene refers to the nucleotide sequences which encode the amino acids found in the nascent polypeptide as a result of translation of a mRNA molecule. The coding region is bounded, in eukaryotes, on the 5′-side by the nucleotide triplet “ATG” which encodes the initiator methionine and on the 3′-side by one of the three triplets which specify stop codons (i.e., TAA, TAG, TGA). In addition to containing introns, genomic forms of a gene may also include sequences located on both the 5′- and 3′-end of the sequences which are present on the RNA transcript. These sequences are referred to as “flanking” sequences or regions (these flanking sequences are located 5′ or 3′ to the non-translated sequences present on the mRNA transcript). The 5′-flanking region may contain regulatory sequences such as promoters and enhancers which control or influence the transcription of the gene. The 3′-flanking region may contain sequences which direct the termination of transcription, post-transcriptional cleavage and polyadenylation.

[0071] Complementary: “Complementary” or “complementarity” refers to two nucleotide sequences which comprise antiparallel nucleotide sequences capable of pairing with one another (by the base-pairing rules) upon formation of hydrogen bonds between the complementary base residues in the antiparallel nucleotide sequences. For example, the sequence 5′-AGT-3′ is complementary to the sequence 5′-ACT-3′. Complementarity can be “partial” or “total.” “Partial” complementarity is where one or more nucleic acid bases are not matched according to the base pairing rules. “Total” or “complete” complementarity between nucleic acid molecules is where each and every nucleic acid base is matched with another base under the base pairing rules. The degree of complementarity between nucleic acid molecule strands has significant effects on the efficiency and strength of hybridization between nucleic acid molecule strands. A “complement” of a nucleic acid sequence as used herein refers to a nucleotide sequence whose nucleic acid molecules show total complementarity to the nucleic acid molecules of the nucleic acid sequence.

[0072] Double-stranded RNA: A “double-stranded RNA” molecule or “dsRNA” molecule comprises a sense RNA fragment of a nucleotide sequence and an antisense RNA fragment of the nucleotide sequence, which both comprise nucleotide sequences complementary to one another, thereby allowing the sense and antisense RNA fragments to pair and form a double-stranded RNA molecule.

[0073] Endogenous: An “endogenous” nucleotide sequence refers to a nucleotide sequence, which is present in the genome of the untransformed plant cell.

[0074] Enhanced expression: “enhance” or “increase” the expression of a nucleic acid molecule in a plant cell are used equivalently herein and mean that the level of expression of a nucleic acid molecule in a plant, part of a plant or plant cell is higher compared to a reference plant, part of the plant or plant cell. The terms “enhanced” or “increased” as used herein are synonymous and mean herein higher, preferably significantly higher expression of the nucleic acid molecule to be expressed. As used herein, an “enhancement” or “increase” of the level of an agent such as a protein, mRNA or RNA means that the level is increased relative to a substantially identical plant, part of a plant or plant cell grown under substantially identical conditions. As used herein, “enhancement” or “increase” of the level of an agent, such as for example a preRNA, mRNA, rRNA, tRNA, snoRNA, snRNA expressed by the target gene and/or of the protein product encoded by it, means that the level is increased 50% or more, for example 100% or more, preferably 200% or more, more preferably 5 fold or more, even more preferably 10 fold or more, most preferably 20 fold or more for example 50 fold relative to a cell or organism lacking a recombinant nucleic acid molecule of the invention. The enhancement or increase can be determined by methods with which the skilled worker is familiar. Thus, the enhancement or increase of the nucleic acid or protein quantity can be determined for example by an immunological detection of the protein. Moreover, techniques such as protein assay, fluorescence, Northern hybridization, nuclease protection assay, reverse transcription (quantitative RT-PCR), ELISA (enzyme-linked immunosorbent assay), Western blotting, radioimmunoassay (RIA) or other immunoassays and fluorescence-activated cell analysis (FACS) can be employed to measure a specific protein or RNA in a plant or plant cell. Depending on the type of the induced protein product, its activity or the effect on the phenotype of the organism or the cell may also be determined. Methods for determining the protein quantity are known to the skilled worker. Examples, which may be mentioned, are: the micro-Biuret method (Goa J (1953) Scand J Clin Lab Invest 5:218-222), the Folin-Ciocalteau method (Lowry O H et al. (1951) J Biol Chem 193:265-275) or measuring the absorption of CBB G-250 (Bradford M M (1976) Analyt Biochem 72:248-254). As one example for quantifying the activity of a protein, the detection of luciferase activity is described in the Examples below.

[0075] Expression: “Expression” refers to the biosynthesis of a gene product, preferably to the transcription and/or translation of a nucleotide sequence, for example an endogenous gene or a heterologous gene, in a cell. For example, in the case of a structural gene, expression involves transcription of the structural gene into mRNA and—optionally—the subsequent translation of mRNA into one or more polypeptides. In other cases, expression may refer only to the transcription of the DNA harboring an RNA molecule.

[0076] Expression construct: “Expression construct” as used herein mean a DNA sequence capable of directing expression of a particular nucleotide sequence in an appropriate part of a plant or plant cell, comprising a promoter functional in said part of a plant or plant cell into which it will be introduced, operatively linked to the nucleotide sequence of interest which is —optionally—operatively linked to termination signals. If translation is required, it also typically comprises sequences required for proper translation of the nucleotide sequence. The coding region may code for a protein of interest but may also code for a functional RNA of interest, for example RNAa, siRNA, snoRNA, snRNA, microRNA, ta-siRNA or any other noncoding regulatory RNA, in the sense or antisense direction. The expression construct comprising the nucleotide sequence of interest may be chimeric, meaning that one or more of its components is heterologous with respect to one or more of its other components. The expression construct may also be one, which is naturally occurring but has been obtained in a recombinant form useful for heterologous expression. Typically, however, the expression construct is heterologous with respect to the host, i.e., the particular DNA sequence of the expression construct does not occur naturally in the host cell and must have been introduced into the host cell or an ancestor of the host cell by a transformation event. The expression of the nucleotide sequence in the expression construct may be under the control of a promoter or of an inducible promoter, which initiates transcription only when the host cell is exposed to some particular external stimulus. In the case of a plant, the promoter can also be specific to a particular tissue or organ or stage of development.

[0077] Foreign: The term “foreign” refers to any nucleic acid molecule (e.g., gene sequence) which is introduced into the genome of a cell by experimental manipulations and may include sequences found in that cell so long as the introduced sequence contains some modification (e.g., a point mutation, the presence of a selectable marker gene, etc.) and is therefore distinct relative to the naturally-occurring sequence.

[0078] Functional linkage: The term “functional linkage” or “functionally linked” is to be understood as meaning, for example, the sequential arrangement of a regulatory element (e.g. a promoter) with a nucleic acid sequence to be expressed and, if appropriate, further regulatory elements (such as e.g., a terminator or a RENA) in such a way that each of the regulatory elements can fulfill its intended function to allow, modify, facilitate or otherwise influence expression of said nucleic acid sequence. As a synonym the wording “operable linkage” or “operably linked” may be used. The expression may result depending on the arrangement of the nucleic acid sequences in relation to sense or antisense RNA. To this end, direct linkage in the chemical sense is not necessarily required. Genetic control sequences such as, for example, enhancer sequences, can also exert their function on the target sequence from positions which are further away, or indeed from other DNA molecules. Preferred arrangements are those in which the nucleic acid sequence to be expressed recombinantly is positioned behind the sequence acting as promoter, so that the two sequences are linked covalently to each other. The distance between the promoter sequence and the nucleic acid sequence to be expressed recombinantly is preferably less than 200 base pairs, especially preferably less than 100 base pairs, very especially preferably less than 50 base pairs. In a preferred embodiment, the nucleic acid sequence to be transcribed is located behind the promoter in such a way that the transcription start is identical with the desired beginning of the chimeric RNA of the invention. Functional linkage, and an expression construct, can be generated by means of customary recombination and cloning techniques as described (e.g., in Maniatis T, Fritsch E F and Sambrook J (1989) Molecular Cloning: A Laboratory Manual, 2nd Ed., Cold Spring Harbor Laboratory, Cold Spring Harbor (NY); Silhavy et al. (1984) Experiments with Gene Fusions, Cold Spring Harbor Laboratory, Cold Spring Harbor (NY); Ausubel et al. (1987) Current Protocols in Molecular Biology, Greene Publishing Assoc. and Wiley Interscience; Gelvin et al. (Eds) (1990) Plant Molecular Biology Manual; Kluwer Academic Publisher, Dordrecht, The Netherlands). However, further sequences, which, for example, act as a linker with specific cleavage sites for restriction enzymes, or as a signal peptide, may also be positioned between the two sequences. The insertion of sequences may also lead to the expression of fusion proteins. Preferably, the expression construct, consisting of a linkage of a regulatory region for example a promoter and nucleic acid sequence to be expressed, can exist in a vector-integrated form and be inserted into a plant genome, for example by transformation.

[0079] Gene: The term “gene” refers to a region operably joined to appropriate regulatory sequences capable of regulating the expression of the gene product (e.g., a polypeptide or a functional RNA) in some manner. A gene includes untranslated regulatory regions of DNA (e.g., promoters, enhancers, repressors, etc.) preceding (up-stream) and following (downstream) the coding region (open reading frame, ORF) as well as, where applicable, intervening sequences (i.e., introns) between individual coding regions (i.e., exons). The term “structural gene” as used herein is intended to mean a DNA sequence that is transcribed into mRNA which is then translated into a sequence of amino acids characteristic of a specific polypeptide.

[0080] Genome and genomic DNA: The terms “genome” or “genomic DNA” is referring to the heritable genetic information of a host organism. Said genomic DNA comprises the DNA of the nucleus (also referred to as chromosomal DNA) but also the DNA of the plastids (e.g., chloroplasts) and other cellular organelles (e.g., mitochondria). Preferably the terms genome or genomic DNA is referring to the chromosomal DNA of the nucleus.

[0081] Heterologous: The term “heterologous” with respect to a nucleic acid molecule or DNA refers to a nucleic acid molecule which is operably linked to, or is manipulated to become operably linked to, a second nucleic acid molecule to which it is not operably linked in nature, or to which it is operably linked at a different location in nature. A heterologous expression construct comprising a nucleic acid molecule and one or more regulatory nucleic acid molecule (such as a promoter or a transcription termination signal) linked thereto for example is a constructs originating by experimental manipulations in which either a) said nucleic acid molecule, or b) said regulatory nucleic acid molecule or c) both (i.e. (a) and (b)) is not located in its natural (native) genetic environment or has been modified by experimental manipulations, an example of a modification being a substitution, addition, deletion, inversion or insertion of one or more nucleotide residues. Natural genetic environment refers to the natural chromosomal locus in the organism of origin, or to the presence in a genomic library. In the case of a genomic library, the natural genetic environment of the sequence of the nucleic acid molecule is preferably retained, at least in part. The environment flanks the nucleic acid sequence at least at one side and has a sequence of at least 50 bp, preferably at least 500 bp, especially preferably at least 1,000 bp, very especially preferably at least 5,000 bp, in length. A naturally occurring expression construct—for example the naturally occurring combination of a promoter with the corresponding gene—becomes a transgenic expression construct when it is modified by non-natural, synthetic “artificial” methods such as, for example, mutagenization. Such methods have been described (U.S. Pat. No. 5,565,350; WO 00/15815). For example a protein encoding nucleic acid molecule operably linked to a promoter, which is not the native promoter of this molecule, is considered to be heterologous with respect to the promoter. Preferably, heterologous DNA is not endogenous to or not naturally associated with the cell into which it is introduced, but has been obtained from another cell or has been synthesized. Heterologous DNA also includes an endogenous DNA sequence, which contains some modification, non-naturally occurring, multiple copies of an endogenous DNA sequence, or a DNA sequence which is not naturally associated with another DNA sequence physically linked thereto. Generally, although not necessarily, heterologous DNA encodes RNA or proteins that are not normally produced by the cell into which it is expressed.

[0082] Hybridization: The term “hybridization” as used herein includes “any process by which a strand of nucleic acid molecule joins with a complementary strand through base pairing.” (J. Coombs (1994) Dictionary of Biotechnology, Stockton Press, New York). Hybridization and the strength of hybridization (i.e., the strength of the association between the nucleic acid molecules) is impacted by such factors as the degree of complementarity between the nucleic acid molecules, stringency of the conditions involved, the Tm of the formed hybrid, and the G:C ratio within the nucleic acid molecules. As used herein, the term “Tm” is used in reference to the “melting temperature.” The melting temperature is the temperature at which a population of double-stranded nucleic acid molecules becomes half dissociated into single strands. The equation for calculating the Tm of nucleic acid molecules is well known in the art. As indicated by standard references, a simple estimate of the Tm value may be calculated by the equation: Tm=81.5+0.41(% G+C), when a nucleic acid molecule is in aqueous solution at 1 M NaCl [see e.g., Anderson and Young, Quantitative Filter Hybridization, in Nucleic Acid Hybridization (1985)]. Other references include more sophisticated computations, which take structural as well as sequence characteristics into account for the calculation of Tm. Stringent conditions, are known to those skilled in the art and can be found in Current Protocols in Molecular Biology, John Wiley & Sons, N.Y. (1989), 6.3.1-6.3.6.

[0083] “Identity”: “Identity” when used in respect to the comparison of two or more nucleic acid or amino acid molecules means that the sequences of said molecules share a certain degree of sequence similarity, the sequences being partially identical.

[0084] To determine the percentage identity (homology is herein used interchangeably) of two amino acid sequences or of two nucleic acid molecules, the sequences are written one underneath the other for an optimal comparison (for example gaps may be inserted into the sequence of a protein or of a nucleic acid in order to generate an optimal alignment with the other protein or the other nucleic acid).

[0085] The amino acid residues or nucleic acid molecules at the corresponding amino acid positions or nucleotide positions are then compared. If a position in one sequence is occupied by the same amino acid residue or the same nucleic acid molecule as the corresponding position in the other sequence, the molecules are homologous at this position (i.e. amino acid or nucleic acid “homology”as used in the present context corresponds to amino acid or nucleic acid “identity”. The percentage identity between the two sequences is a function of the number of identical positions shared by the sequences (i.e. % homology=number of identical positions/total number of positions ×100). The terms “homology” and “identity” are thus to be considered as synonyms.

[0086] For the determination of the percentage identity of two or more amino acids or of two or more nucleotide sequences several computer software programs have been developed. The identity of two or more sequences can be calculated with for example the software fasta, which presently has been used in the version fasta 3 (W. R. Pearson and D. J. Lipman, PNAS 85, 2444 (1988); W. R. Pearson, Methods in Enzymology 183, 63 (1990); W. R. Pearson and D. J. Lipman, PNAS 85, 2444 (1988); W. R. Pearson, Enzymology 183, 63 (1990)). Another useful program for the calculation of identities of different sequences is the standard blast program, which is included in the Biomax pedant software (Biomax, Munich, Federal Republic of Germany). This leads unfortunately sometimes to suboptimal results since blast does not always include complete sequences of the subject and the query. Nevertheless as this program is very efficient it can be used for the comparison of a huge number of sequences. The following settings are typically used for such a comparisons of sequences:

[0087] -p Program Name [String]; -d Database [String]; default=nr; -i Query File [File In]; default=stdin; -e Expectation value (E) [Real]; default=10.0; -m alignment view options: 0=pairwise; 1=query-anchored showing identities; 2=query-anchored no identities; 3=flat query-anchored, show identities; 4=flat query-anchored, no identities; 5=query-anchored no identities and blunt ends; 6=flat query-anchored, no identities and blunt ends; 7=XML Blast output; 8=tabular; 9 tabular with comment lines [Integer]; default=0; -o BLAST report Output File [File Out] Optional; default=stdout; -F Filter query sequence (DUST with blastn, SEG with others) [String]; default=T; -G Cost to open a gap (zero invokes default behavior) [Integer]; default=0; -E Cost to extend a gap (zero invokes default behavior) [Integer]; default=0; -X X dropoff value for gapped alignment (in bits) (zero invokes default behavior); blastn 30, megablast 20, tblastx 0, all others 15 [Integer]; default=0; -I Show GI's in deflines [T/F]; default=F; -q Penalty for a nucleotide mismatch (blastn only) [Integer]; default=−3; -r Reward for a nucleotide match (blastn only) [Integer]; default=1; -v Number of database sequences to show one-line descriptions for (V) [Integer]; default=500; -b Number of database sequence to show alignments for (B) [Integer]; default=250; -f Threshold for extending hits, default if zero; blastp 11, blastn 0, blastx 12, tblastn 13; tblastx 13, megablast 0 [Integer]; default=0; -g Perfom gapped alignment (not available with tblastx) [T/F]; default=T; -Q Query Genetic code to use [Integer]; default=1; -D DB Genetic code (for tblast[nx] only) [Integer]; default=1; -a Number of processors to use [Integer]; default=1; -O SeqAlign file [File Out] Optional; -J Believe the query defline [T/F]; default=F; -M Matrix [String]; default=BLOSUM62; —W Word size, default if zero (blastn 11, megablast 28, all others 3) [Integer]; default=0; -z Effective length of the database (use zero for the real size) [Real]; default=0; -K Number of best hits from a region to keep (off by default, if used a value of 100 is recommended) [Integer]; default=0; -P 0 for multiple hit, 1 for single hit [Integer]; default=0; -Y Effective length of the search space (use zero for the real size) [Real]; default=0; -S Query strands to search against database (for blast[nx], and tblastx); 3 is both, 1 is top, 2 is bottom [Integer]; default=3; -T Produce HTML output [T/F]; default=F; -I Restrict search of database to list of GI's [String] Optional; -U Use lower case filtering of FASTA sequence [T/F] Optional; default=F; -y X dropoff value for ungapped extensions in bits (0.0 invokes default behavior); blastn 20, megablast 10, all others 7 [Real]; default=0.0; -Z X dropoff value for final gapped alignment in bits (0.0 invokes default behavior); blastn/megablast 50, tblastx 0, all others 25 [Integer]; default=0; -R PSI-TBLASTN checkpoint file [File In] Optional; -n MegaBlast search [T/F]; default=F; -L Location on query sequence [String] Optional; -A Multiple Hits window size, default if zero (blastn/megablast 0, all others 40 [Integer]; default=0; -w Frame shift penalty (OOF algorithm for blastx) [Integer]; default=0; -t Length of the largest intron allowed in tblastn for linking HSPs (0 disables linking) [Integer]; default=0.

[0088] Results of high quality are reached by using the algorithm of Needleman and Wunsch or Smith and Waterman. Therefore programs based on said algorithms are preferred. Advantageously the comparisons of sequences can be done with the program PileUp (J. Mol. Evolution., 25, 351 (1987), Higgins et al., CABIOS 5, 151 (1989)) or preferably with the programs “Gap” and “Needle”, which are both based on the algorithms of Needleman and Wunsch (J. Mol. Biol. 48; 443 (1970)), and “BestFit”, which is based on the algorithm of Smith and Waterman (Adv. Appl. Math. 2; 482 (1981)). “Gap” and “BestFit” are part of the GCG software-package (Genetics Computer Group, 575 Science Drive, Madison, Wis., USA 53711 (1991); Altschul et al., (Nucleic Acids Res. 25, 3389 (1997)), “Needle” is part of the The European Molecular Biology Open Software Suite (EMBOSS) (Trends in Genetics 16 (6), 276 (2000)). Therefore preferably the calculations to determine the percentages of sequence identity are done with the programs “Gap” or “Needle” over the whole range of the sequences. The following standard adjustments for the comparison of nucleic acid sequences were used for “Needle”: matrix: EDNAFULL, Gap_penalty: 10.0, Extend_penalty: 0.5. The following standard adjustments for the comparison of nucleic acid sequences were used for “Gap”: gap weight: 50, length weight: 3, average match: 10.000, average mismatch: 0.000.

[0089] For example a sequence, which is said to have 80% identity with sequence SEQ ID NO: 1 at the nucleic acid level is understood as meaning a sequence which, upon comparison with the sequence represented by SEQ ID NO: 1 by the above program “Needle” with the above parameter set, has a 80% identity. Preferably the identity is calculated on the complete length of the query sequence, for example SEQ ID NO:1.

[0090] Intron: refers to sections of DNA (intervening sequences) within a gene that do not encode part of the protein that the gene produces, and that is spliced out of the mRNA that is transcribed from the gene before it is exported from the cell nucleus. Intron sequence refers to the nucleic acid sequence of an intron. Thus, introns are those regions of DNA sequences that are transcribed along with the coding sequence (exons) but are removed during the formation of mature mRNA. Introns can be positioned within the actual coding region or in either the 5′ or 3′ untranslated leaders of the pre-mRNA (unspliced mRNA). Introns in the primary transcript are excised and the coding sequences are simultaneously and precisely ligated to form the mature mRNA. The junctions of introns and exons form the splice site. The sequence of an intron begins with GU and ends with AG. Furthermore, in plants, two examples of AU-AC introns have been described: the fourteenth intron of the RecA-like protein gene and the seventh intron of the G5 gene from Arabidopsis thaliana are AT-AC introns. Pre-mRNAs containing introns have three short sequences that are —beside other sequences—essential for the intron to be accurately spliced. These sequences are the 5′ splice-site, the 3′ splice-site, and the branchpoint. mRNA splicing is the removal of intervening sequences (introns) present in primary mRNA transcripts and joining or ligation of exon sequences. This is also known as cis-splicing which joins two exons on the same RNA with the removal of the intervening sequence (intron). The functional elements of an intron is comprising sequences that are recognized and bound by the specific protein components of the spliceosome (e.g. splicing consensus sequences at the ends of introns). The interaction of the functional elements with the spliceosome results in the removal of the intron sequence from the premature mRNA and the rejoining of the exon sequences. Introns have three short sequences that are essential—although not sufficient—for the intron to be accurately spliced. These sequences are the 5′ splice site, the 3′ splice site and the branch point. The branchpoint sequence is important in splicing and splice-site selection in plants. The branchpoint sequence is usually located 10-60 nucleotides upstream of the 3′ splice site.

[0091] Isogenic: organisms (e.g., plants), which are genetically identical, except that they may differ by the presence or absence of a heterologous DNA sequence.

[0092] Isolated: The term “isolated” as used herein means that a material has been removed by the hand of man and exists apart from its original, native environment and is therefore not a product of nature. An isolated material or molecule (such as a DNA molecule or enzyme) may exist in a purified form or may exist in a non-native environment such as, for example, in a transgenic host cell. For example, a naturally occurring polynucleotide or polypeptide present in a living plant is not isolated, but the same polynucleotide or polypeptide, separated from some or all of the coexisting materials in the natural system, is isolated. Such polynucleotides can be part of a vector and/or such polynucleotides or polypeptides could be part of a composition, and would be isolated in that such a vector or composition is not part of its original environment. Preferably, the term “isolated” when used in relation to a nucleic acid molecule, as in “an isolated nucleic acid sequence” refers to a nucleic acid sequence that is identified and separated from at least one contaminant nucleic acid molecule with which it is ordinarily associated in its natural source. Isolated nucleic acid molecule is nucleic acid molecule present in a form or setting that is different from that in which it is found in nature. In contrast, non-isolated nucleic acid molecules are nucleic acid molecules such as DNA and RNA, which are found in the state they exist in nature. For example, a given DNA sequence (e.g., a gene) is found on the host cell chromosome in proximity to neighboring genes; RNA sequences, such as a specific mRNA sequence encoding a specific protein, are found in the cell as a mixture with numerous other mRNAs, which encode a multitude of proteins. However, an isolated nucleic acid sequence comprising for example SEQ ID NO: 1 includes, by way of example, such nucleic acid sequences in cells which ordinarily contain SEQ ID NO:1 where the nucleic acid sequence is in a chromosomal or extrachromosomal location different from that of natural cells, or is otherwise flanked by a different nucleic acid sequence than that found in nature. The isolated nucleic acid sequence may be present in single-stranded or double-stranded form. When an isolated nucleic acid sequence is to be utilized to express a protein, the nucleic acid sequence will contain at a minimum at least a portion of the sense or coding strand (i.e., the nucleic acid sequence may be single-stranded). Alternatively, it may contain both the sense and anti-sense strands (i.e., the nucleic acid sequence may be double-stranded).

[0093] Minimal Promoter: promoter elements, particularly a TATA element, that are inactive or that have greatly reduced promoter activity in the absence of upstream activation. In the presence of a suitable transcription factor, the minimal promoter functions to permit transcription.

[0094] RENA: see “Reliability enhancing nucleic acid”.

[0095] Non-coding: The term “non-coding” refers to sequences of nucleic acid molecules that do not encode part or all of an expressed protein. Non-coding sequences include but are not limited to introns, enhancers, promoter regions, 3′ untranslated regions, and 5′ untranslated regions.

[0096] Reliability enhancing nucleic acid (RENA): The term “reliability enhancing nucleic acid” refers to a sequence and/or a nucleic acid molecule of a specific sequence having the intrinsic property to enhance reliability of expression of a nucleic acid of interest under the control of a promoter to which the RENA is functionally linked. Unlike promoter sequences, the RENA as such is not able to drive expression. In order to fulfill the function of enhancing reliability of expression of a nucleic acid molecule functionally linked to the RENA, the RENA itself has to be functionally linked to a promoter. In distinction to enhancer sequences known in the art, the RENA is acting in cis but not in trans and has to be located close to the transcription start site of the nucleic acid to be expressed.

[0097] Nucleic acids and nucleotides: The terms “Nucleic Acids” and “Nucleotides” refer to naturally occurring or synthetic or artificial nucleic acid or nucleotides. The terms “nucleic acids” and “nucleotides” comprise deoxyribonucleotides or ribonucleotides or any nucleotide analogue and polymers or hybrids thereof in either single- or double-stranded, sense or antisense form. Unless otherwise indicated, a particular nucleic acid sequence also implicitly encompasses conservatively modified variants thereof (e.g., degenerate codon substitutions) and complementary sequences, as well as the sequence explicitly indicated. The term “nucleic acid” is used interchangeably herein with “gene”, “cDNA, “mRNA”, “oligonucleotide,” and “polynucleotide”. Nucleotide analogues include nucleotides having modifications in the chemical structure of the base, sugar and/or phosphate, including, but not limited to, 5-position pyrimidine modifications, 8-position purine modifications, modifications at cytosine exocyclic amines, substitution of 5-bromo-uracil, and the like; and 2′-position sugar modifications, including but not limited to, sugar-modified ribonucleotides in which the 2′-OH is replaced by a group selected from H, OR, R, halo, SH, SR, NH2, NHR, NR2, or CN. Short hairpin RNAs (shRNAs) also can comprise non-natural elements such as non-natural bases, e.g., ionosin and xanthine, non-natural sugars, e.g., 2′-methoxy ribose, or non-natural phosphodiester linkages, e.g., methylphosphonates, phosphorothioates and peptides.

[0098] Nucleic acid sequence: The phrase “nucleic acid sequence” refers to a single or double-stranded polymer of deoxyribonucleotide or ribonucleotide bases read from the 5′- to the 3′-end.

[0099] It includes chromosomal DNA, self-replicating plasmids, infectious polymers of DNA or RNA and DNA or RNA that performs a primarily structural role. “Nucleic acid sequence” also refers to a consecutive list of abbreviations, letters, characters or words, which represent nucleotides. In one embodiment, a nucleic acid can be a “probe” which is a relatively short nucleic acid, usually less than 100 nucleotides in length. Often a nucleic acid probe is from about 50 nucleotides in length to about 10 nucleotides in length. A “target region” of a nucleic acid is a portion of a nucleic acid that is identified to be of interest. A “coding region” of a nucleic acid is the portion of the nucleic acid, which is transcribed and translated in a sequence-specific manner to produce into a particular polypeptide or protein when placed under the control of appropriate regulatory sequences. The coding region is said to encode such a polypeptide or protein.

[0100] Oligonucleotide: The term “oligonucleotide” refers to an oligomer or polymer of ribonucleic acid (RNA) or deoxyribonucleic acid (DNA) or mimetics thereof, as well as oligonucleotides having non-naturally-occurring portions which function similarly. Such modified or substituted oligonucleotides are often preferred over native forms because of desirable properties such as, for example, enhanced cellular uptake, enhanced affinity for nucleic acid target and increased stability in the presence of nucleases. An oligonucleotide preferably includes two or more nucleomonomers covalently coupled to each other by linkages (e.g., phosphodiesters) or substitute linkages.

[0101] Overhang: An “overhang” is a relatively short single-stranded nucleotide sequence on the 5′- or 3′-hydroxyl end of a double-stranded oligonucleotide molecule (also referred to as an “extension,” “protruding end,” or “sticky end”).

[0102] Plant: is generally understood as meaning any eukaryotic single- or multi-celled organism or a cell, tissue, organ, part or propagation material (such as seeds or fruit) of same which is capable of photosynthesis. Included for the purpose of the invention are all genera and species of higher and lower plants of the Plant Kingdom. Annual, perennial, monocotyledonous and dicotyledonous plants are preferred. The term includes the mature plants, seed, shoots and seedlings and their derived parts, propagation material (such as seeds or microspores), plant organs, tissue, protoplasts, callus and other cultures, for example cell cultures, and any other type of plant cell grouping to give functional or structural units. Mature plants refer to plants at any desired developmental stage beyond that of the seedling. Seedling refers to a young immature plant at an early developmental stage. Annual, biennial, monocotyledonous and dicotyledonous plants are preferred host organisms for the generation of transgenic plants. The expression of genes is furthermore advantageous in all ornamental plants, useful or ornamental trees, flowers, cut flowers, shrubs or lawns. Plants which may be mentioned by way of example but not by limitation are angiosperms, bryophytes such as, for example, Hepaticae (liverworts) and Musci (mosses); Pteridophytes such as ferns, horsetail and club mosses; gymnosperms such as conifers, cycads, ginkgo and Gnetatae; algae such as Chlorophyceae, Phaeophpyceae, Rhodophyceae, Myxophyceae, Xanthophyceae, Bacillariophyceae (diatoms), and Euglenophyceae. Preferred are plants which are used for food or feed purpose such as the families of the Leguminosae such as pea, alfalfa and soya; Gramineae such as rice, maize, wheat, barley, sorghum, millet, rye, triticale, or oats; the family of the Umbelliferae, especially the genus Daucus, very especially the species carota (carrot) and Apium, very especially the species Graveolens dulce (celery) and many others; the family of the Solanaceae, especially the genus Lycopersicon, very especially the species esculentum (tomato) and the genus Solanum, very especially the species tuberosum (potato) and melongena (egg plant), and many others (such as tobacco); and the genus Capsicum, very especially the species annuum (peppers) and many others; the family of the Leguminosae, especially the genus Glycine, very especially the species max (soybean), alfalfa, pea, lucerne, beans or peanut and many others; and the family of the Cruciferae (Brassicacae), especially the genus Brassica, very especially the species napus (oil seed rape), campestris (beet), oleracea cv Tastie (cabbage), oleracea cv Snowball Y (cauliflower) and oleracea cv Emperor (broccoli); and of the genus Arabidopsis, very especially the species thaliana and many others; the family of the Compositae, especially the genus Lactuca, very especially the species sativa (lettuce) and many others; the family of the Asteraceae such as sunflower, Tagetes, lettuce or Calendula and many other; the family of the Cucurbitaceae such as melon, pumpkin/squash or zucchini, and linseed. Further preferred are cotton, sugar cane, hemp, flax, chillies, and the various tree, nut and wine species.

[0103] Polypeptide: The terms “polypeptide”, “peptide”, “oligopeptide”, “polypeptide”, “gene product”, “expression product” and “protein” are used interchangeably herein to refer to a polymer or oligomer of consecutive amino acid residues.

[0104] Pre-protein: Protein, which is normally targeted to a cellular organelle, such as a chloroplast, and still comprising its transit peptide.

[0105] Primary transcript: The term “primary transcript” as used herein refers to a premature RNA transcript of a gene. A “primary transcript” for example still comprises introns and/or is not yet comprising a polyA tail or a cap structure and/or is missing other modifications necessary for its correct function as transcript such as for example trimming or editing.

[0106] Promoter: The terms “promoter”, or “promoter sequence” are equivalents and as used herein, refer to a DNA sequence which when ligated to a nucleotide sequence of interest is capable of controlling the transcription of the nucleotide sequence of interest into RNA. Such promoters can for example be found in the following public databases http://www.grassius.org/grasspromdb.html, http://mendel.cs.rhul.ac.uk/mendel.php?topic=plantprom, http://ppdb.gene.nagoya-u.ac.jp/cgi-Promoters listed there may be addressed with the methods of the invention and are herewith included by reference. A promoter is located 5′ (i.e., upstream), proximal to the transcriptional start site of a nucleotide sequence of interest whose transcription into mRNA it controls, and provides a site for specific binding by RNA polymerase and other transcription factors for initiation of transcription. Said promoter comprises for example the at least 10 kb, for example 5 kb or 2 kb proximal to the transcription start site. It may also comprise the at least 1500 bp proximal to the transcriptional start site, preferably the at least 1000 bp, more preferably the at least 500 bp, even more preferably the at least 400 bp, the at least 300 bp, the at least 200 bp or the at least 100 bp. In a further preferred embodiment, the promoter comprises the at least 50 bp proximal to the transcription start site, for example, at least 25 bp. The promoter does not comprise exon and/or intron regions or 5′ untranslated regions. The promoter may for example be heterologous or homologous to the respective plant. A polynucleotide sequence is “heterologous to” an organism or a second polynucleotide sequence if it originates from a foreign species, or, if from the same species, is modified from its original form. For example, a promoter operably linked to a heterologous coding sequence refers to a coding sequence from a species different from that from which the promoter was derived, or, if from the same species, a coding sequence which is not naturally associated with the promoter (e.g. a genetically engineered coding sequence or an allele from a different ecotype or variety). Suitable promoters can be derived from genes of the host cells where expression should occur or from pathogens for this host cells (e.g., plants or plant pathogens like plant viruses). A plant specific promoter is a promoter suitable for regulating expression in a plant. It may be derived from a plant but also from plant pathogens or it might be a synthetic promoter designed by man. If a promoter is an inducible promoter, then the rate of transcription increases in response to an inducing agent. Also, the promoter may be regulated in a tissue-specific or tissue preferred manner such that it is only or predominantly active in transcribing the associated coding region in a specific tissue type(s) such as leaves, roots or meristem. The term “tissue specific” as it applies to a promoter refers to a promoter that is capable of directing selective expression of a nucleotide sequence of interest to a specific type of tissue (e.g., petals) in the relative absence of expression of the same nucleotide sequence of interest in a different type of tissue (e.g., roots). Tissue specificity of a promoter may be evaluated by, for example, operably linking a reporter gene to the promoter sequence to generate a reporter construct, introducing the reporter construct into the genome of a plant such that the reporter construct is integrated into every tissue of the resulting transgenic plant, and detecting the expression of the reporter gene (e.g., detecting mRNA, protein, or the activity of a protein encoded by the reporter gene) in different tissues of the transgenic plant. The detection of a greater level of expression of the reporter gene in one or more tissues relative to the level of expression of the reporter gene in other tissues shows that the promoter is specific for the tissues in which greater levels of expression are detected. The term “cell type specific” as applied to a promoter refers to a promoter, which is capable of directing selective expression of a nucleotide sequence of interest in a specific type of cell in the relative absence of expression of the same nucleotide sequence of interest in a different type of cell within the same tissue. The term “cell type specific” when applied to a promoter also means a promoter capable of promoting selective expression of a nucleotide sequence of interest in a region within a single tissue. Cell type specificity of a promoter may be assessed using methods well known in the art, e.g., GUS activity staining, GFP protein or immunohistochemical staining. The term “constitutive” when made in reference to a promoter or the expression derived from a promoter means that the promoter is capable of directing transcription of an operably linked nucleic acid molecule in the absence of a stimulus (e.g., heat shock, chemicals, light, etc.) in the majority of plant tissues and cells throughout substantially the entire lifespan of a plant or part of a plant. Typically, constitutive promoters are capable of directing expression of a transgene in substantially any cell and any tissue.

[0107] Promoter specificity: The term “specificity” when referring to a promoter means the pattern of expression conferred by the respective promoter. The specificity describes the tissues and/or developmental status of a plant or part thereof, in which the promoter is conferring expression of the nucleic acid molecule under the control of the respective promoter. Specificity of a promoter may also comprise the environmental conditions, under which the promoter may be activated or down-regulated such as induction or repression by biological or environmental stresses such as cold, drought, wounding or infection.

[0108] Purified: As used herein, the term “purified” refers to molecules, either nucleic or amino acid sequences that are removed from their natural environment, isolated or separated. “Substantially purified” molecules are at least 60% free, preferably at least 75% free, and more preferably at least 90% free from other components with which they are naturally associated. A purified nucleic acid sequence may be an isolated nucleic acid sequence.

[0109] Recombinant: The term “recombinant” with respect to nucleic acid molecules refers to nucleic acid molecules produced by recombinant DNA techniques. Recombinant nucleic acid molecules may also comprise molecules, which were isolated from their natural environment, such as their genomic localization in a wild type plant or the nucleic acids they are functionally linked in a wild type plant. The term also comprises nucleic acid molecules which as such does not exist in nature but are modified, changed, mutated or otherwise manipulated by man. Preferably, a “recombinant nucleic acid molecule” is a non-naturally occurring nucleic acid molecule that differs in sequence from a naturally occurring nucleic acid molecule by at least one nucleic acid. A “recombinant nucleic acid molecule” may also comprise a “recombinant construct” which comprises, preferably operably linked, a sequence of nucleic acid molecules not naturally occurring in that order. Preferred methods for producing said recombinant nucleic acid molecule may comprise cloning techniques, directed or non-directed mutagenesis, synthesis or recombination techniques.

[0110] Sense: The term “sense” is understood to mean a nucleic acid molecule having a sequence which is complementary or identical to a target sequence, for example a sequence which binds to a protein transcription factor and which is involved in the expression of a given gene. According to a preferred embodiment, the nucleic acid molecule comprises a gene of interest and elements allowing the expression of the said gene of interest.

[0111] Significant increase or decrease: An increase or decrease, for example in enzymatic activity or in gene expression, that is larger than the margin of error inherent in the measurement technique, preferably an increase or decrease by about 2-fold or greater of the activity of the control enzyme or expression in the control cell, more preferably an increase or decrease by about 5-fold or greater, and most preferably an increase or decrease by about 10-fold or greater.

[0112] Small nucleic acid molecules: “small nucleic acid molecules” are understood as molecules consisting of nucleic acids or derivatives thereof such as RNA or DNA. They may be double-stranded or single-stranded and are between about 15 and about 30 bp, for example between 15 and 30 bp, more preferred between about 19 and about 26 bp, for example between 19 and 26 bp, even more preferred between about 20 and about 25 bp for example between 20 and 25 bp. In a especially preferred embodiment the oligonucleotides are between about 21 and about 24 bp, for example between 21 and 24 bp. In a most preferred embodiment, the small nucleic acid molecules are about 21 bp and about 24 bp, for example 21 bp and 24 bp.

[0113] Substantially complementary: In its broadest sense, the term “substantially complementary”, when used herein with respect to a nucleotide sequence in relation to a reference or target nucleotide sequence, means a nucleotide sequence having a percentage of identity between the substantially complementary nucleotide sequence and the exact complementary sequence of said reference or target nucleotide sequence of at least 60%, more desirably at least 70%, more desirably at least 80% or 85%, preferably at least 90%, more preferably at least 93%, still more preferably at least 95% or 96%, yet still more preferably at least 97% or 98%, yet still more preferably at least 99% or most preferably 100% (the later being equivalent to the term “identical” in this context). Preferably identity is assessed over a length of at least 19 nucleotides, preferably at least 50 nucleotides, more preferably the entire length of the nucleic acid sequence to said reference sequence (if not specified otherwise below). Sequence comparisons are carried out using default GAP analysis with the University of Wisconsin GCG, SEQWEB application of GAP, based on the algorithm of Needleman and Wunsch (Needleman and Wunsch (1970) J Mol. Biol. 48: 443-453; as defined above). A nucleotide sequence “substantially complementary” to a reference nucleotide sequence hybridizes to the reference nucleotide sequence under low stringency conditions, preferably medium stringency conditions, most preferably high stringency conditions (as defined above).

[0114] Transgene: The term “transgene” as used herein refers to any nucleic acid sequence, which is introduced into the genome of a cell by experimental manipulations. A transgene may be an “endogenous DNA sequence,” or a “heterologous DNA sequence” (i.e., “foreign DNA”). The term “endogenous DNA sequence” refers to a nucleotide sequence, which is naturally found in the cell into which it is introduced so long as it does not contain some modification (e.g., a point mutation, the presence of a selectable marker gene, etc.) relative to the naturally-occurring sequence.

[0115] Transgenic: The term transgenic when referring to an organism means transformed, preferably stably transformed, with a recombinant DNA molecule that preferably comprises a suitable promoter operatively linked to a DNA sequence of interest.

[0116] Vector: As used herein, the term “vector” refers to a nucleic acid molecule capable of transporting another nucleic acid molecule to which it has been linked. One type of vector is a genomic integrated vector, or “integrated vector”, which can become integrated into the chromosomal DNA of the host cell. Another type of vector is an episomal vector, i.e., a nucleic acid molecule capable of extra-chromosomal replication. Vectors capable of directing the expression of genes to which they are operatively linked are referred to herein as “expression vectors”. In the present specification, “plasmid” and “vector” are used interchangeably unless otherwise clear from the context. Expression vectors designed to produce RNAs as described herein in vitro or in vivo may contain sequences recognized by any RNA polymerase, including mitochondrial RNA polymerase, RNA pol I, RNA pol II, and RNA pol III. These vectors can be used to transcribe the desired RNA molecule in the cell according to this invention. A plant transformation vector is to be understood as a vector suitable in the process of plant transformation.

[0117] Wild-type: The term “wild-type”, “natural” or “natural origin” means with respect to an organism that said organism is not changed, mutated, or otherwise manipulated by man. With respect to a polypeptide or nucleic acid sequence, that the polypeptide or nucleic acid sequence is naturally occurring or available in at least one naturally occurring organism which is not changed, mutated, or otherwise manipulated by man.

### EXAMPLES

### Chemicals and Common Methods

[0118] Unless indicated otherwise, cloning procedures carried out for the purposes of the present invention including restriction digest, agarose gel electrophoresis, purification of nucleic acids, Ligation of nucleic acids, transformation, selection and cultivation of bacterial cells were performed as described (Sambrook et al., 1989). Sequence analyses of recombinant DNA were performed with a laser fluorescence DNA sequencer (Applied Biosystems, Foster City, Calif., USA) using the Sanger technology (Sanger et al., 1977). Unless described otherwise, chemicals and reagents were obtained from Sigma Aldrich (Sigma Aldrich, St. Louis, USA), from Promega (Madison, Wis., USA), Duchefa (Haarlem, The Netherlands) or Invitrogen (Carlsbad, Calif., USA). Restriction endonucleases were from New England Biolabs (Ipswich, Mass., USA) or Roche Diagnostics GmbH (Penzberg, Germany). Oligonucleotides were synthesized by Eurofins MWG Operon (Ebersberg, Germany).

### Example 1

### Identification of Reliability Enhancing Nucleic Acids (RENAs)

[0119] 1.1 Identification of RENA Molecules from A. thaliana Genes

[0120] Using publicly available genomic DNA sequences (e.g. http://www.ncbi.nlm.nih.gov/genomes/PLANTS/PlantList.html) and transcript expression data (e.g. http://www.weigelworld.org/resources/microarray/AtGenExpress/), a set of 16 potential RENA candidates deriving from Arabidopsis thaliana transcripts were selected for detailed analyses. In addition, a putative RENA molecule deriving from parsley was also included in the analysis. The candidates were named as follows:

TABLE 1
Reliability Enhancing Nucleic Acid (RENA) candidates

| RENA | | | SEQ |
|---|---|---|---|
| name | Locus | Annotation | ID NO |
| RENA1 | At1g52370 | ribosomal protein L22 family protein | 1 |
| RENA2 | At1g03280 | transcription initiation factor IIE | 2 |
| | | (TFIIE) alpha subunit family protein | |
| RENA3 | At5g06960 | classic OBF5 (OCS-ELEMENT | 3 |
| | | BINDING FACTOR 5) | |
| RENA4 | At1g54290 | eukaryotic translation initiation factor | 4 |
| | | SUI1, putative | |
| RENA5 | At2g47170 | ADP-ribosylation factor 1 (ARF1) | 5 |
| RENA6 | At1g56070 | elongation factor 2, putative/EF-2, | 6 |
| | | putative | |
| RENA7 | At5g54760 | eukaryotic translation initiation factor | 7 |
| | | SUI1, putative | |
| RENA8 | At4g02890 | polyubiquitin (UBQ14) | 8 |
| RENA9 | At1g62290 | aspartyl protease family protein | 9 |
| RENA10 | At1g65090 | expressed protein | 10 |
| RENA11 | At2g27040 | PAZ domain-containing protein | 11 |
| RENA12 | At1g01170 | ozone-responsive stress-related | 12 |
| | | protein, putative | |
| RENA13 | At5g63190 | MA3 domain-containing protein | 13 |
| RENA14 | At5g07830 | glycosyl hydrolase family 79 | 14 |
| | | N-terminal domain-containing | |
| | | protein similar to | |
| | | beta-glucuronidase AtGUS2 | |
| RENA15 | At2g04520 | eukaryotic translation initiation factor | 15 |
| | | 1A, putative/elF-1A | |
| RENA16 | | Petroselinum crispum gene Pcubi4-2 | 16 |
| | | for polyubiquitin | |

[0121] 1.2 Isolation of the RENA Candidates

[0122] Genomic DNA was extracted from A. thaliana green tissue using the Qiagen DNeasy Plant Mini Kit (Qiagen, Hilden, Germany). For the putative RENA molecule with the SEQ ID NO16, DNA of the vector construct 1bxPcUbi4-2GUS (WO 2003102198) was used. Genomic DNA fragments containing putative RENA molecules were isolated by conventional polymerase chain reaction (PCR). The polymerase chain reaction comprised 16 sets of primers (Table 2). Primers were designed on the basis of the A. thaliana genome sequence with a multitude of RENA candidates. The nucleotide sequence of the vector construct 1bxPcUbi4-2GUS (WO 2003102198) was used for the design of primers (SEQ ID NO47 and NO48) for amplification of the RENA candidate with SEQ ID NO16 (Table 2). The polymerase chain reaction followed the protocol outlined by Phusion High Fidelity DNA Polymerase (Cat No F-540L, New England Biolabs, Ipswich, Mass., USA). The isolated DNA was used as template DNA in a PCR amplification using the following primers:

TABLE 2
Primer sequences

| | | | PCR |
|---|---|---|---|
| | | | yielding |
| | | SEQ ID | SEQ ID |
| Primer name | Sequence | NO | NO |
| RENA1_for | TATAGGTACCCGGGCATTTTCGTCTAAGC | 17 | 1 |
| RENA1_rev | TATACCATGGACCCTAAACCTTAGTCTATGCTTCT | 18 | |
| RENA2_for | TATAGGTACCTCTCTCCCCCTCTCTTGAACTT | 19 | 2 |
| RENA2_rev | TATACCATGGGCAGTATTAGGTTCGTGTTTGATAC | 20 | |
| RENA3_for | TATAGGTACCGTTAAGCTCAAAGAATCCGTTCT | 21 | 3 |
| RENA3_rev | TATACCATGGATCGTGGTACCCTAGATGGAGTA | 22 | |
| RENA4_for | TATAGGTACCCTCGAAACCCTAATCTCTTCTTG | 23 | 4 |
| RENA4_rev | TATACCATGGTACAAGGGACAGTAAATCGACAAG | 24 | |
| RENA5_for | tttttggtaccttagatctcgtgccgtcgtgcga | 25 | 5 |
| RENA5_rev | tttttccatggtttgatcaagcctgttcaca | 26 | |
| RENA6_for | tttttggtacctttctctcgttctcatctttctctct | 27 | 6 |
| RENA6_rev | taatagatatctttgtcaaacttttgattgtcacct | 28 | |
| RENA7_for | aaaaaggtacctcatcagatcttcaaaaccccaa | 29 | 7 |
| RENA7_rev | aaaaaccatggtgatttgagggtagtactaaccgggaa | 30 | |
| RENA8_for | tatatggtaccaaatcgttctttcaaatctctca | 31 | 8 |
| RENA8_rev | ttataccatggtctgtaattcacaaaaaactgaga | 32 | |
| RENA9_for | aataatggtacctggtgcttaaacactctggtgagt | 33 | 9 |
| RENA9_rev | aataatccatggtttgacctacaaaatcaaagcagtca | 34 | |
| RENA10_for | ttttttggtaccagttctttgctttcgaagttgc | 35 | 10 |
| RENA10_rev | ttttttccatggtactacgtactgttttcaattct | 36 | |
| RENA11_for | tatataggtaccagggtttcgtttttgtttca | 37 | 11 |
| RENA11_rev | tatataccatggttatctcctgctcaaagaaacca | 38 | |
| RENA12_for | tatataggtaccactgtttaagcttcactgtct | 39 | 12 |
| RENA12_rev | tatataccatggtttcttctaaagctgaaagt | 40 | |
| RENA13_for | ttttttggtacctttcacgatttggaatttga | 41 | 13 |
| RENA13_rev | ttttttccatggtctacaacattaaaacgaccatta | 42 | |
| RENA14_for | aataaaggtaccgtccagaattttctccattga | 43 | 14 |
| RENA14_rev | aataaaccatggtcttcactatccaaagctctca | 44 | |
| RENA15_for | ttttatggtacctagcttaatctcagattcgaatcgt | 45 | 15 |
| RENA15_rev | ttttatccatggtagtatctacataccaatcatacaaatg | 46 | |
| RENA16_for | tttatggtaccagccgcaagactcctttcagattct | 47 | 16 |
| RENA16_rev | aaattccatggtagctgtcaaaacaaaaacaaaaatcga | 48 | |

[0123] Amplification During the PCR was Carried Out with the Following Composition (50 Micro):

[0124] 3.00 microl A. thaliana genomic DNA (50 ng/microl genomic DNA, 5 ng/microl vector construct) 10.00 microl 5× Phusion HF Buffer

[0125] 4.00 microl dNTP (2.5 mM)

[0126] 2.50 microl for Primer (10 microM)

[0127] 2.50 microl rev Primer (10 microM)

[0128] 0.50 microl Phusion HF DNA Polymerase (2 U/microl)

[0129] A touch-down approach was employed for the PCR with the following parameters: 98.0° C. for 30 sec (1 cycle), 98.0° C. for 30 sec, 56.0° C. for 30 sec and 72.0° C. for 60 sec (4 cycles), 4 additional cycles each for 54.0° C., 51.0° C. and 49.0° C. annealing temperature, followed by 20 cycles with 98.0° C. for 30 sec, 46.0° C. for 30 sec and 72.0° C. for 60 sec (4 cycles) and 72.0° C. for 5 min. The amplification products was loaded on a 2% (w/v) agarose gel and separated at 80V. The PCR products were excised from the gel and purified with the Qiagen Gel Extraction Kit (Qiagen, Hilden, Germany). Following a DNA restriction digest with KpnI (10 U/microl) and NcoI (10 U/microl) or EcoRV (10 U/microl) restriction endonuclease, the digested products were again purified with the Qiagen Gel Extraction Kit (Qiagen, Hilden, Germany).

[0130] 1.3 Vector Construction with Potential RENA Molecules

[0131] Using the Multisite Gateway System (Invitrogen, Carlsbad, Calif., USA), the promoter::RENA::reporter-gene cassettes were assembled into binary constructs for plant transformation. In one set of reporter gene constructs the A. thaliana p-AtNit1 promoter (At3g44310, GenBank X86454; WO03008596, with the prefix p- denoting promoter) was used, in the other set of reporter gene constructs the A. thaliana p-AtPXR (At1g48130, GenBank AC023673.3; WO2006089950; with the prefix p- denoting promoter) seed specific promoter was used. Firefly luciferase (Promega, Madison, Wis., USA) was utilized as reporter protein for quantitatively determining the expression enhancing effects of the putative RENA molecules to be analyzed. The pENTR/A vector holding the p-AtNit1 promoter was cloned via site specific recombination (BP-reaction) between the pDONR/A vector and p-AtNit1 amplification products with primers p-AtNit1-for and p-AtNit1-rev (Table 3) on genomic DNA (see above) with site specific recombination sites at either end according to the manufacturers manual (Invitrogen, Carlsbad, Calif., USA). Positive pENTR/A clones underwent sequence analysis to ensure correctness of the p-AtNit1 promoter.

[0132] The pENTR/A vector holding the p-AtPXR promoter was cloned via site specific recombination (BP-reaction) between the pDONR/A vector and p-AtPXR amplification products with primers p-AtPXR-for and p-AtPXR-rev (Table 3) on genomic DNA (see above) with site specific recombination sites at either end according to the manufacturers manual (Invitrogen, Carlsbad, Calif., USA). Positive pENTR/A clones underwent sequence analysis to ensure correctness of p-AtPXR promoter.

TABLE 3
Primer sequences (p-AtNit1 and p-AtPXR)

| Primer name | Sequence | SEQ ID NO. |
|---|---|---|
| p-AtNit1-for | ggggacaactttgtatagaaaagttg | 73 |
| | tcgagaccagatgttttacacttga | |
| p-AtNit1-rev | ggggactgcttttttgtacaaacttg | 74 |
| | gacactcagagacttgagagaagca | |
| p-AtPXR-for | ggggacaactttgtatagaaaagttg | 75 |
| | gccacatcatgtttagacttatc | |
| p-AtPXR-rev | ggggactgcttttttgtacaaacttg | 76 |
| | tttaccttttatatttatatatag | |

[0133] An ENTR/B vector containing the firefly luciferase coding sequence (Promega, Madison, Wis., USA) followed by the t-nos nopaline synthase transcriptional terminator (Genbank V00087) was generated. RENA candidate PCR fragments (see above) were cloned separately upstream of the firefly luciferase coding sequence using KpnI and NcoI or EcoRV restriction enzymes. The resulting pENTR/B vectors are summarized in table 4, with promoter molecules having the prefix p-, coding sequences having the prefix c-, and terminator molecules having the prefix t-.

TABLE 4
All pENTR/B vectors plus and minus RENA candidates

| pENTR/B | Composition of the partial expression cassette |
|---|---|
| vector | SEQ ID NO::reporter gene::terminator |
| LJK1 | MCS::c-LUC::t-nos |
| LJH45 | SEQ ID NO1::c-LUC::t-nos |
| LJH46 | SEQ ID NO2::c-LUC::t-nos |
| LJH47 | SEQ ID NO3::c-LUC::t-nos |
| LJH48 | SEQ ID NO4::c-LUC::t-nos |
| LJK57 | SEQ ID NO5::c-LUC::t-nos |
| LJK44 | SEQ ID NO6::c-LUC::t-nos |
| LJK58 | SEQ ID NO7::c-LUC::t-nos |
| LJK47 | SEQ ID NO8::c-LUC::t-nos |
| LJK19 | SEQ ID NO9::c-LUC::t-nos |
| LJK20 | SEQ ID NO10::c-LUC::t-nos |
| LJK33 | SEQ ID NO11::c-LUC::t-nos |
| LJK36 | SEQ ID NO12::c-LUC::t-nos |
| LJK32 | SEQ ID NO13::c-LUC::t-nos |
| LJK22 | SEQ ID NO14::c-LUC::t-nos |
| LJK31 | SEQ ID NO15::c-LUC::t-nos |
| LJK4 | SEQ ID NO16::c-LUC::t-nos |

[0134] The pENTR/C vector was constructed by introduction of a gene expression cassette carrying a mutated AHAS gene driven by the parsley ubiquitin promoter PcUbi4-2, mediating tolerance to imidazolinone herbicides for detecting transgenic plant lines. By performing a site specific recombination (LR-reaction), the pENTR/A, pENTR/B and the pENTR/C carrying the selectable marker cassette were combined with the pSUN destination vector according to the manufacturers (Invitrogen, Carlsbad, Calif., USA) Multisite Gateway manual.

[0135] The reactions yielded 1 binary vector with p-AtNit1 promoter, the firefly luciferase coding sequence c-LUC, the t-nos terminator and the selectable marker cassette, as well as 1 binary vector with p-AtPXR promoter, the firefly luciferase coding sequence c-LUC, the t-nos terminator and the selectable marker cassette.

[0136] In addition the reaction yielded 14 vectors harboring the p-AtNit1 promoter together with SEQ ID NO1, NO2, NO3, NO4, NO5, NO6, NO7, NO8, NO9, NO10, NO11, NO12, NO13 or NO16 immediately upstream of the firefly luciferase coding sequence (Table 5), for which the combination with SEQ ID NO1 is given exemplary (SEQ ID NO79). Except for varying SEQ ID NO2 to NO13 and NO16, the nucleotide sequence is identical in vectors LJH60-63, LJK139, LJK141-144 and LJK311-315.

[0137] In addition the reaction yielded 7 vectors harboring the p-AtPXR promoter together with SEQ ID NO9, NO10, NO11, NO12, NO13, NO14 or NO15 immediately upstream of the firefly luciferase coding sequence (Table 5), for which the combination with SEQ ID NO9 is given exemplary (SEQ ID NO80). Except for varying SEQ ID NO10 to NO15, the nucleotide sequence is identical in vectors LJK156-162.

[0138] The resulting plant transformation vectors are summarized in table 5:

TABLE 5
Plant expression vectors for A. thaliana transformation

| plant | | |
|---|---|---|
| expression | Composition of the expression cassette | SEQ |
| vector | Promoter::SEQ ID NO::reporter gene::terminator | ID NO |
| LJK138 | p-AtNit1::-::c-LUC::t-nos | |
| LJH63 | p-AtNit1::SEQ ID NO1::c-LUC::t-nos | 79 |
| LJH60 | p-AtNit1::SEQ ID NO2::c-LUC::t-nos | |
| LJH61 | p-AtNit1::SEQ ID NO3::c-LUC::t-nos | |
| LJH62 | p-AtNit1::SEQ ID NO4::c-LUC::t-nos | |
| LJK143 | p-AtNit1::SEQ ID NO5::c-LUC::t-nos | |
| LJK141 | p-AtNit1::SEQ ID NO6::c-LUC::t-nos | |
| LJK144 | p-AtNit1::SEQ ID NO7::c-LUC::t-nos | |
| LJK142 | p-AtNit1::SEQ ID NO8::c-LUC::t-nos | |
| LJK139 | p-AtNit1::SEQ ID NO16::c-LUC::t-nos | |
| LJK148 | p-AtPXR::-::c-LUC::t-nos | |
| LJK156 | p-AtPXR::SEQ ID NO9::c-LUC::t-nos | 80 |
| LJK157 | p-AtPXR::SEQ ID NO10::c-LUC::t-nos | |
| LJK162 | p-AtPXR::SEQ ID NO11::c-LUC::t-nos | |
| LJK160 | p-AtPXR::SEQ ID NO12::c-LUC::t-nos | |
| LJK159 | p-AtPXR::SEQ ID NO13::c-LUC::t-nos | |
| LJK161 | p-AtPXR::SEQ ID NO14::c-LUC::t-nos | |
| LJK158 | p-AtPXR::SEQ ID NO15::c-LUC::t-nos | |
| LJK311 | p-AtNit::SEQ ID NO9::c-LUC::t-nos | |
| LJK312 | p-AtNit::SEQ ID NO10::c-LUC::t-nos | |
| LJK313 | p-AtNit::SEQ ID NO11::c-LUC::t-nos | |
| LJK314 | p-AtNit::SEQ ID NO12::c-LUC::t-nos | |
| LJK315 | p-AtNit::SEQ ID NO13::c-LUC::t-nos | |

[0139] All plant transformation vectors from table 5 were subsequently used to generate stable transgenic A. thaliana plants (see 2.1).

### Example 2

### Screening for RENA Molecules Enhancing Reliability of Gene Expression in Transgenic A. thaliana Plants

[0140] 2.1 Generation of Stable Transgenic A. thaliana Plants

[0141] Expression constructs from table 5 in example 1 containing RENA candidate molecules were stably transformed into Arabidopsis thaliana plants along with RENA-less control constructs. In order to generate transgenic A. thaliana plants, Agrobacterium tumefaciens (strain C58C1 pGV2260) was transformed with the various vector constructs described above. For A. thaliana transformation, the Floral Dip method was employed (Clough and Bent, 1998, Plant Journal 16: 735-743). T1 transgenic plants were selected by germinating and growing seedlings under imidazolinone herbicide selection.

[0142] 2.2 Plant Analysis

[0143] Leaf material of adult transgenic A. thaliana plants was sampled, frozen in liquid nitrogen and subjected to Luciferase reporter gene assays (amended protocol after Ow et al., 1986). After grinding the frozen tissue samples were resuspended in 800 microl of buffer I (0.1 M Phosphate buffer pH7.8, 1 mM DTT (Sigma Aldrich, St. Louis, Mo., USA), 0.05% Tween 20 (Sigma Aldrich, St. Louis, Mo., USA)) followed by centrifugation at 10 000 g for 10 min. 75 microl of the aqueous supernatant were transferred to 96-well plates. After addition of 25 microl of buffer II (80 mM gycine-glycyl (Carl Roth, Karlsruhe, Germany), 40 mM MgSO₄ (Duchefa, Haarlem, The Netherlands), 60 mM ATP (Sigma Aldrich, St. Louis, Mo., USA), pH 7.8) and D-Luciferin to a final concentration of 0.5 mM (Cat No: L-8220, BioSynth, Staad, Switzerland), luminescence was recorded in a MicroLumat Plus LB96V (Berthold Technologies, Bad Wildbad, Germany) yielding the unit relative light unit RLU per minute (RLU/min).

[0144] In order to normalize the luciferase activity between samples, the protein concentration was determined in the aqueous supernatant in parallel to the luciferase activity (adapted from Bradford, 1976, Anal. Biochem. 72, 248). 5 microl of the aqueous cell extract in buffer I were mixed with 250 microl of Bradford reagent (Sigma Aldrich, St. Louis, Mo., USA), incubated for 10 min at room temperature. Absorption was determined at 595 nm in a plate reader (Thermo Electron Corporation, Multiskan Ascent 354). The total protein amounts in the samples were calculated with a previously generated standard concentration curve. Values resulting from a ratio of RLU/min and mg protein/ml sample were averaged for transgenic plants harboring identical constructs and coefficient of variation was calculated to assess the impact of RENA molecule presence over RENA-less reporter gene constructs.

[0145] Constructs harboring RENAs with SEQ ID NO1-NO8 and NO16 under control of the p-AtNit1 promoter (LJH60-63, LJK139 and LJK141-144) show significantly higher reliability measured as a reduced coefficient of variation and a lower percentage of non- or low-expressers in the population of primary transformants than the RENA-less construct LJK138. Constructs harboring RENAs with SEQ ID NO9-NO15 under control of the p-AtPXR promoter (LJK156-LJK161) show significantly higher reliability measured as a reduced coefficient of variation and a lower percentage of non- or low-expressers in the population of primary transformants than the RENA-less construct LJK148.

[0146] Constructs harboring RENAs with SEQ ID NO9-NO13 under control of the p-AtNit1 promoter showed significantly higher reliability measured as a reduced coefficient of variation in leaves, flowers and siliques (FIG. 1). Table 6 shows an overview over the percentage of low-expressers calculated relative to the mean expression level of the respective construct in A. thaliana leaves.

TABLE 6
Percentage of low-expressers in a population (calculation
relative to mean expression value of the population);
A. thaliana leaves; p-AtNit1

| | Fraction of low expressers (<x% mean) | | | | | | |
|---|---|---|---|---|---|---|---|
| | 5% | 10% | 20% | 30% | 40% | 50% | 60% |
| | mean | mean | mean | mean | mean | mean | mean |
| LJK310 | 40 | 40 | 6.7 | 6.7 | 6.7 | 20 | 53.3 |
| LJK311 | 0 | 0 | 0 | 0 | 0 | 6.7 | 6.7 |
| LJK312 | 0 | 0 | 0 | 0 | 0 | 0 | 0 |
| LJK313 | 0 | 0 | 0 | 0 | 0 | 0 | 0 |
| LJK314 | 0 | 0 | 0 | 0 | 0 | 0 | 0 |
| LJK315 | 0 | 0 | 0 | 0 | 0 | 0 | 6.7 |

### Example 3

### Test of RENA Molecules for Enhanced Reliability of Gene Expression in Oilseed Rape Plants

[0147] This example illustrates that RENA molecules can be used across species to enhance reliability of gene expression in all tissues tested compared to a RENA-less promoter-only approach.

[0148] 3.1 Selection of RENA Constructs for B. napus Transformation

[0149] RENA molecules with SEQ ID NO5, NO6, NO7, NO8 and NO16 and a RENA-less control under control of the p-AtNit1 promoter were selected for determining enhanced reliability of gene expression in transgenic oilseed rape leaves, flowers and siliques. This corresponds to the expression constructs LJK138, LJK139, LJK141, LJK142, LJK143 and LJK144 in table 5.

[0150] RENA molecules with SEQ ID NO9, NO10, NO11, NO12, NO13, NO14 and NO15 and a RENA-less control under control of the seed specific p-AtPXR promoter were selected for determining enhanced reliability of gene expression in transgenic oilseed rape siliques. This corresponds to the expression constructs LJK148, LJK156, LJK157, LJK158, LJK159, LJK160 and LJK161 in table 5.

[0151] 3.2 Generation of Transgenic Rapeseed Plants (Amended Protocol According to Moloney et al., 1992, Plant Cell Reports, 8: 238-242).

[0152] In preparation for the generation of transgenic rapeseed plants, the binary vectors were transformed into Agrobacterium tumefaciens C58C1:pGV2260 (Deblaere et al., 1985, Nucl. Acids. Res. 13: 4777-4788). A 1:50 dilution of an overnight culture of Agrobacteria harboring the respective binary construct was grown in Murashige-Skoog Medium (Murashige and Skoog, 1962, Physiol. Plant 15, 473) supplemented with 3% saccharose (3MS-Medium). For the transformation of rapeseed plants, petioles or hypocotyledons of sterile plants were incubated with a 1:50 Agrobacterium solution for 5-10 minutes followed by a three-day co-incubation in darkness at 25° C. on 3 MS-Medium supplemented with 0.8% bacto-agar. After three days, the explants were transferred to MS-Medium containing 500 mg/l Claforan (Cefotaxime-Sodium), 100 nM Imazetapyr, 20 microM Benzylaminopurin (BAP) and 1.6 g/l Glucose in a 16 h light/8 h darkness light regime, which was repeated in weekly periods. Growing shoots were transferred to MS-Medium containing 2% saccharose, 250 mg/l Claforan and 0.8% Bacto-agar. After 3 weeks, the growth hormone 2-Indolbutyl acid was added to the medium to promote root formation. Shoots were transferred to soil following root development, grown for two weeks in a growth chamber and grown to maturity in greenhouse conditions.

[0153] 3.3 Plant Analysis

[0154] Tissue samples were collected from the generated transgenic plants from leaves, flowers and siliques, stored in a freezer at −80° C. subjected to a Luciferase reporter gene assay (amended protocol after Ow et al., 1986). After grinding the frozen tissue samples were resuspended in 800 microl of buffer I (0.1 M Phosphate buffer pH7.8, 1 mM DTT (Sigma Aldrich, St. Louis, Mo., USA), 0.05% Tween 20 (Sigma Aldrich, St. Louis, Mo., USA)) followed by centrifugation at 10 000 g for 10 min. 75 microl of the aqueous supernatant were transferred to 96-well plates. After addition of 25 microl of buffer II (80 mM glycine-glycyl (Carl Roth, Karlsruhe, Germany), 40 mM MgSO₄ (Duchefa, Haarlem, The Netherlands), 60 mM ATP (Sigma Aldrich, St. Louis, Mo., USA), pH 7.8) and D-Luciferin to a final concentration of 0.5 mM (Cat No: L-8220, BioSynth, Staad, Switzerland), luminescence was recorded in a MicroLumat Plus LB96V (Berthold Technologies, Bad Wildbad, Germany) yielding the unit relative light unit RLU per minute (RLU/min). In order to normalize the luciferase activity between samples, the protein concentration was determined in the aqueous supernatant in parallel to the luciferase activity (adapted from Bradford, 1976, Anal. Biochem. 72, 248). 5 microl of the aqueous cell extract in buffer I were mixed with 250 microl of Bradford reagent (Sigma Aldrich, St. Louis, Mo., USA), incubated for 10 min at room temperature. Absorption was determined at 595 nm in a plate reader (Thermo Electron Corporation, Multiskan Ascent 354). The total protein amounts in the samples were calculated with a previously generated standard concentration curve. Values resulting from a ratio of RLU/min and mg protein/ml sample were averaged for transgenic plants harboring identical constructs and coefficient of variation was calculated to assess the impact of RENA molecule presence over RENA-less reporter gene constructs.

[0155] 3.4 RENA Sequences Mediate Strongly Enhanced Reliability of Gene Expression in Oilseed Rape Plants

[0156] For assessing the potential of enhancing reliability of gene expression of selected RENA molecules (example 3.1) in oilseed rape plants, leafs, flowers and siliques harboring seeds of plants having identical developmental stages and which were grown under equal growth conditions were collected. The samples were taken from individual transgenic oilseed rape plant lines harboring either a promoter-only reporter gene construct or Luciferase reporter gene constructs containing a RENA (example 3.1). For seed-specific expression analysis 10 seeds were collected from each transgenic event, processed and analyzed for Luciferase activity as described above (Example 3.3).

[0157] RENA molecules with SEQ ID NO5, NO6, NO7, NO8 and NO16 under control of the p-AtNit1 promoter showed a reduced coefficient of variation and a reduced fraction of low expressers in B. napus leaves (table 7), and B. napus flowers (table 8) compared to a RENA-less control (LJK138).

[0158] RENA molecules with SEQ ID NO9, NO10, NO11, NO12, NO13, NO14 and NO15 under control of the seed specific p-AtPXR promoter showed a reduced coefficient of variation and a reduced fraction of low expressers in B. napus immature seeds (table 9) compared to a RENA-less control (LJK148).

TABLE 7
Coefficient of variation and fraction of low expressers (calculated as
the fraction of a population below 40% of mean expression
level of that population); OSR leaves; p-AtNit1

| | Coefficient of | fraction low expressers [%] |
|---|---|---|
| construct | variation | (<40% mean) |
| LJK138 | 0.91 | 21.62 |
| LJK139 | 0.58 | 8.57 |
| LJK141 | 0.79 | 13.16 |
| LJK142 | 0.49 | 10.53 |
| LJK143 | 0.80 | 8.57 |
| LJK144 | 0.71 | 7.69 |

TABLE 8
Coefficient of variation and fraction of low expressers (calculated as
the fraction of a population below 40% of mean expression
level of that population); OSR flowers; p-AtNit1

| | coefficient of | fraction low expressers |
|---|---|---|
| construct | variation | [%] (<40% mean) |
| LJK138 | 1.46 | 45.71 |
| LJK139 | 0.86 | 20.00 |
| LJK141 | 0.76 | 8.57 |
| LJK143 | 0.52 | 6.67 |
| LJK144 | 0.66 | 8.70 |

TABLE 9
Coefficient of variation and fraction of low expressers (calculated as
the fraction of a population below 40% of mean expression
level of that population); Immature OSR seeds; p-AtPXR

| | coefficient of | fraction low expressers |
|---|---|---|
| construct | variation | <40% of mean [%] |
| LJK148 | 1.22 | 42 |
| LJK156 | 0.66 | 21 |
| LJK157 | 0.89 | 26 |
| LJK158 | 0.65 | 17 |
| LJK159 | 0.97 | 20 |
| LJK160 | 0.80 | 30 |
| LJK161 | 0.83 | 36 |
| LJK162 | 0.59 | 15 |

[0159] 3.5 Test of RENA Sequences SEQ ID NO1 to NO4 in Rapeseed

[0160] RENA sequences with SEQ ID NO1 to 4 under control of the p-AtNit1 promoter (LJH60-63) are tested analogously in rapeseed plants. Significantly enhanced reliability of gene expression is measured in leaves, flowers and siliques.

### Example 4

### Analysis of Enhanced Reliability of Gene Expression in Soybean Plants

[0161] This example illustrates that RENA molecules can be used in a wide array of plant species and across species borders from different plant families to enhance reliability of gene expression in all tissues compared to a RENA-less promoter-only approach.

[0162] RENA sequence molecules with SEQ ID NO5, NO6, NO7, NO8 and NO16 and a RENA-less control under control of the p-AtNit1 promoter were selected for determining enhanced reliability of gene expression in transgenic soybean leaves and embryos. Plant expression vectors LJK138, LJK139, LJK141, LJK142, LJK143 and LJK144 (table 5) were used for stable soybean transformation.

[0163] RENA molecules with SEQ ID NO9, NO10, NO11, NO12, NO13, NO14 and NO15 and a RENA-less control under control of the seed specific p-AtPXR promoter were selected for determining enhanced reliability of gene expression in transgenic soybean embryos. This corresponds to the expression constructs LJK148, LJK156, LJK157, LJK158, LJK159, LJK160 and LJK161 in table 5.

[0164] 4.1 Generation of Transgenic Soybean Plants (Amended Protocol According to WO2005/121345; Olhoft et al., 2007).

[0165] Soybean seed germination, propagation, A. rhizogenes and axillary meristem explant preparation, and inoculations were done as previously described (WO2005/121345; Olhoft et al., 2007) with the exception that the constructs LJK138, LJK139, LJK141, LJK142, LJK143, LJK144, LJK148, LJK156, LJK157, LJK158, LJK159, LJK160 and LJK161 each contained a mutated AHAS gene driven by the parsley ubiquitin promoter PcUbi4-2, mediating tolerance to imidazolinone herbicides for selection.

[0166] 4.2 RENA Sequences Mediate Strongly Enhanced Reliability of Gene Expression in Soybean Plants

[0167] Tissue samples were collected from the generated transgenic plants from leaves and seeds. The tissue samples were processed and analyzed as described above (cp. example 3.3)

[0168] In comparison to the p-AtNit1 promoter-only RENA-less reporter gene construct (LJK138), the five tested RENA molecules LJK139, LJK141, LJK142, LJK143 and LJK144 all mediated enhanced reliability of gene expression in leaves (table 10) and 12 mm embryos (table 11) measured as a reduced coefficient of variation and a reduced fraction of low expressers in the transgenic population.

[0169] In comparison to the seed specific p-AtPXR promoter-only RENA-less reporter gene construct (LJK148), the six tested RENA molecules LJK156, LJK157, LJK158, LJK159, LJK160 and LJK161 all mediated enhanced reliability of gene expression in 12 mm embryos (table 12) measured as a reduced coefficient of variation and a reduced fraction of low expressers in the transgenic population.

TABLE 10
Coefficient of variation and fraction of low expressers (calculated as
the fraction of a population below 40% of mean expression
level of that population); Soybean; leaves; p-AtNit1

| Construct | coefficient of variation | fraction low expressers (<40% mean) |
|---|---|---|
| LJK 138 | 0.92 | 16.67 |
| LJK 139 | 0.34 | 0.00 |
| LJK 141 | 0.57 | 9.09 |
| LJK 142 | 0.52 | 0.00 |
| LJK 143 | 0.81 | 8.33 |
| LJK 144 | 0.86 | 8.33 |

TABLE 11
Coefficient of variation and fraction of low expressers (calculated as
the fraction of a population below 40% of mean expression
level of that population); Soybean; 12 mm embryo; p-AtNit1

| Construct | coefficient of variation | fraction low expressers (<40% mean) |
|---|---|---|
| LJK 138 | 1.33 | 50 |
| LJK 139 | 0.65 | 40 |
| LJK 141 | 0.67 | 15 |
| LJK 142 | 0.96 | 30 |
| LJK 143 | 0.32 | 25 |
| LJK 144 | 0.48 | 0 |

TABLE 12
Coefficient of variation and fraction of low expressers (calculated as
the fraction of a population below 40% of mean expression
level of that population); Soybean; 12 mm embryo; p-AtPXR

| Construct | coefficient of variation | fraction low expressers (<40% mean) |
|---|---|---|
| LJK 148 | 1.41 | 45 |
| LJK 156 | 0.74 | 15 |
| LJK 157 | 0.54 | 15 |
| LJK 158 | 0.50 | 10 |
| LJK 159 | 0.72 | 25 |
| LJK 160 | 0.78 | 15 |
| LJK 161 | 0.63 | 20 |

[0170] 4.3 Test of RENA Sequences SEQ ID NO1 to 4 in Soybean Plants

[0171] RENA sequences with SEQ ID NO1 to 4 under control of the p-AtNit1 promoter (LJH60-63) are tested analogously in soybean plants. Significantly enhanced reliability of gene expression is measured in leaves and embryos.

### Example 5

### Analysis of RENA Activity in Monocotyledonous Plants

[0172] This example describes the analysis of RENA sequences with SEQ ID NO1-NO16 in monocotyledonous plants.

[0173] 5.1 Vector Construction

[0174] For analyzing RENA sequences with SEQ ID NO1-NO16 in monocotyledonous plants, two different pUC-based expression vectors are used. The first expression vector harbors an expression cassette composed of the RENA-less, constitutive monocotyledonous promoter p-Ubi from Z. mais combined with a coding sequence of the beta-Glucuronidase (GUS) gene followed by the nopaline synthase (NOS) transcriptional terminator. The second expression vector harbors an expression cassette composed of the RENA-less, seed specific monocotyledonous promoter p-KG86 from Z. mais combined with a coding sequence of the beta-Glucuronidase (GUS) gene followed by the nopaline synthase (NOS) transcriptional terminator.

[0175] Genomic DNA is extracted from A. thaliana green tissue using the Qiagen DNeasy Plant Mini Kit (Qiagen, Hilden, Germany). Genomic DNA fragments containing RENA molecules are isolated by conventional polymerase chain reaction (PCR). Primers are designed on the basis of the A. thaliana genome sequence with a multitude of RENA candidates. The reaction comprises 12 sets of primers (Table 13) and follows the protocol outlined by Phusion High Fidelity DNA Polymerase (Cat No F-540L, New England Biolabs, Ipswich, Mass., USA) using the following primers:

TABLE 13
Primer sequences

| | | SEQ ID | PCR yielding |
|---|---|---|---|
| Primer name | Sequence | NO | SEQ ID NO |
| RENA5_forII | tttttggcgcgccttagatctcgtgccgtcgtgcga | 49 | 5 |
| RENA5_revII | tttttggcgcgcctttgatcaagcctgttcaca | 50 | |
| RENA6_forII | tttttggcgcgcctttctctcgttctcatctttctctct | 51 | 6 |
| RENA6_revII | taataggcgcgcctttgtcaaacttttgattgtcacct | 52 | |
| RENA7_forII | aaaaaggcgcgcctcatcagatcttcaaaaccccaa | 53 | 7 |
| RENA7_revII | aaaaaggcgcgcctgatttgagggtagtactaaccgggaa | 54 | |
| RENA8_forII | tatatggcgcgccaaatcgttctttcaaatctctca | 55 | 8 |
| RENA8_revII | ttataggcgcgcctctgtaattcacaaaaaactgaga | 56 | |
| RENA9_forII | aataatggcgcgcctggtgcttaaacactctggtgagt | 57 | 9 |
| RENA9_revII | aataatggcgcgcctttgacctacaaaatcaaagcagtca | 58 | |
| RENA10_forII | ttttttggcgcgccagttctttgctttcgaagttgc | 59 | 10 |
| RENA10_revII | ttttttggcgcgcctactacgtactgttttcaattct | 60 | |
| RENA11_forII | tatataggcgcgccagggtttcgtttttgtttca | 61 | 11 |
| RENA11_revII | tatataggcgcgccttatctcctgctcaaagaaacca | 62 | |
| RENA12_forII | tatataggcgcgccactgtttaagcttcactgtct | 63 | 12 |
| RENA12_revII | tatataggcgcgcctttcttctaaagctgaaagt | 64 | |
| RENA13_forII | ttttttggcgcgcctttcacgatttggaatttga | 65 | 13 |
| RENA13_revII | ttttttggcgcgcctctacaacattaaaacgaccatta | 66 | |
| RENA14_forII | aataaaggcgcgccgtccagaattttctccattga | 67 | 14 |
| RENA14_revII | aataaaggcgcgcctcttcactatccaaagctctca | 68 | |
| RENA15_forII | ttttatggcgcgcctagcttaatctcagattcgaatcgt | 69 | 15 |
| RENA15_revII | ttttatggcgcgcctagtatctacataccaatcatacaaatg | 70 | |
| RENA16_forII | ttttttggcgcgccttaagaaatcctctcttctcct | 71 | 16 |
| RENA16_revII | ttttttggcgcgccctgcacatacataacatatca | 72 | |

[0176] Amplification during the PCR and purification of the amplification products is carried out as detailed above (example 1.2). Following a DNA restriction digest with AscI (10 U/microl) restriction endonuclease, the digested products are purified with the Qiagen Gel Extraction Kit (Qiagen, Hilden, Germany).

[0177] RENA PCR fragments (see above) are cloned separately upstream of the beta-Glucuronidase coding sequence using AscI restriction sites. The reaction yields one binary vector with the p-Ubi promoter, the beta-Glucuronidase coding sequence c-GUS and the t-nos terminator and one binary vector with the p-KG86 promoter, the beta-Glucuronidase coding sequence c-GUS and the t-nos terminator

[0178] In addition the reaction yields five vectors harboring SEQ ID NO5-8 and NO16 under the control of the p-Ubi promoter, immediately upstream of the beta-Glucuronidase coding sequence (Table 14), for which the combination with SEQ ID NO16 is given exemplary (SEQ ID NO82). Except for varying SEQ ID NO5-NO8, the nucleotide sequence is identical in the vectors (Table 14). The resulting vectors are summarized in table 14, with promoter molecules having the prefix p-, coding sequences having the prefix c-, and terminator molecules having the prefix t-.

[0179] In addition the reaction yields seven vectors harboring SEQ ID NO9-NO15 under the control of the p-KG86 promoter, immediately upstream of the beta-Glucuronidase coding sequence (Table 14), for which the combination with SEQ ID NO9 is given exemplary (SEQ ID NO81). Except for varying SEQ ID NO10-NO15, the nucleotide sequence is identical in the vectors (Table 14). The resulting vectors are summarized in table 14, with promoter molecules having the prefix p-, coding sequences having the prefix c-, and terminator molecules having the prefix t-.

TABLE 14
Plant expression vectors

| plant | | |
|---|---|---|
| expression | Composition of the expression cassette | SEQ ID |
| vector | Promoter::SEQ ID NO::reporter gene::terminator | NO |
| RTP2940 | p-Ubi::—::c-GUS::t-nos | |
| LJK361 | p-Ubi::SEQ ID NO16::c-GUS::t-nos | 82 |
| LJK362 | p-Ubi::SEQ ID NO5::c-GUS::t-nos | |
| LJK363 | p-Ubi::SEQ ID NO6::c-GUS::t-nos | |
| LJK364 | p-Ubi::SEQ ID NO7::c-GUS::t-nos | |
| LJK365 | p-Ubi::SEQ ID NO8::c-GUS::t-nos | |
| RTP2933 | p-KG86::—::c-GUS::t-nos | |
| LJK351 | p-KG86::SEQ ID NO9::c-GUS::t-nos | 81 |
| LJK352 | p-KG86::SEQ ID NO10::c-GUS::t-nos | |
| LJK353 | p-KG86::SEQ ID NO11::c-GUS::t-nos | |
| LJK354 | p-KG86::SEQ ID NO12::c-GUS::t-nos | |
| LJK355 | p-KG86::SEQ ID NO13::c-GUS::t-nos | |
| LJK356 | p-KG86::SEQ ID NO14::c-GUS::t-nos | |
| LJK357 | p-KG86::SEQ ID NO15::c-GUS::t-nos | |

[0180] The resulting vectors are used to analyze RENA molecules in experiments outlined below (Example 5.2).

[0181] 5.2 Analysis of RENA Molecules Enhancing Reliability of Gene Expression in Monocotyledonous Plant Tissues

[0182] These experiments are performed by bombardment of monocotyledonous plant tissues or culture cells (Example 5.2.1), by PEG-mediated (or similar methodology) introduction of DNA to plant protoplasts (Example 5.2.2), or by Agrobacterium-mediated transformation (Example 5.3.3). The target tissue for these experiments can be plant tissues (e.g. leaf tissue), cultured plant cells (e.g. maize Black Mexican Sweetcorn (BMS), or plant embryos for Agrobacterium protocols.

[0183] 5.2.1 Transient Assay Using Micro Projectile Bombardment

[0184] The plasmid constructs are isolated using Qiagen plasmid kit (cat#12143). DNA is precipitated onto 0.6 micrometer gold particles (Bio-Rad cat#165-2262) according to the protocol described by Sanford et al. (1993) (Optimizing the biolistic process for different biological applications. Methods in Enzymology, 217: 483-509) and accelerated onto target tissues (e.g. two week old maize leaves, BMS cultured cells, etc.) using a PDS-1000/He system device (Bio-Rad). All DNA precipitation and bombardment steps are performed under sterile conditions at room temperature. Black Mexican Sweet corn (BMS) suspension cultured cells are propagated in BMS cell culture liquid medium [Murashige and Skoog (MS) salts (4.3 g/L), 3% (w/v) sucrose, myoinositol (100 mg/L), 3 mg/L 2.4-dichlorophenoxyacetic acid (2,4-D), casein hydrolysate (1 g/L), thiamine (10 mg/L) and L-proline (1.15 g/L), pH 5.8]. Every week 10 mL of a culture of stationary cells are transferred to 40 mL of fresh medium and cultured on a rotary shaker operated at 110 rpm at 27° C. in a 250 mL flask.

[0185] 60 mg of gold particles in a siliconized Eppendorf tube are resuspended in 100% ethanol followed by centrifugation for 30 seconds. The pellet is rinsed once in 100% ethanol and twice in sterile water with centrifugation after each wash. The pellet is finally resuspended in 1 mL sterile 50% glycerol. The gold suspension is then divided into 50 microL aliquots and stored at 4° C. The following reagents are added to one aliquot: 5 microL of 1 microg/microL total DNA, 50 microL 2.5 M CaCl₂, 20 microL 0.1 M spermidine, free base. The DNA solution is vortexed for 1 minute and placed at −80° C. for 3 min followed by centrifugation for 10 seconds. The supernatant is removed. The pellet is carefully resuspended in 1 mL 100% ethanol by flicking the tube followed by centrifugation for 10 seconds. The supernatant is removed and the pellet is carefully resuspended in 50 microL of 100% ethanol and placed at −80° C. until used (30 min to 4 hr prior to bombardment). If gold aggregates are visible in the solution the tubes are sonicated for one second in a water bath sonicator just prior to use.

[0186] For bombardment, two-week-old maize leaves are cut into pieces approximately 1 cm in length and placed ad-axial side up on osmotic induction medium M-N-6-702 [N6 salts (3.96 g/L), 3% (w/v) sucrose, 1.5 mg/L 2,4-dichlorophenoxyacetic acid (2,4-D), casein hydrolysate (100 mg/L), and L-proline (2.9 g/L), MS vitamin stock solution (1 mL/L), 0.2 M mannitol, 0.2 M sorbitol, pH 5.8]. The pieces are incubated for 1-2 hours.

[0187] In the case of BMS cultured cells, one-week-old suspension cells are pelleted at 1000 g in a Beckman/Coulter Avanti J25 centrifuge and the supernatant is discarded. Cells are placed onto round ash-free No 42 Whatman filters as a 1/16 inch thick layer using a spatula. The filter papers holding the plant materials are placed on osmotic induction media at 27° C. in darkness for 1-2 hours prior to bombardment. Just before bombardment the filters are removed from the medium and placed onto on a stack of sterile filter paper to allow the calli surface to partially dry.

[0188] Each plate is shot with 6 microL of gold-DNA solution twice, at 1,800 psi for the leaf materials and at 1,100 psi for the BMS cultured cells. To keep the position of plant materials, a sterilized wire mesh screen is laid on top of the sample. Following bombardment, the filters holding the samples are transferred onto M-N6-702 medium lacking mannitol and sorbitol and incubated for 2 days in darkness at 27° C. prior to transient assays.

[0189] The transient transformation via micro projectile bombardment of other monocotyledonous plants are carried out using, for example, a technique described in Wang et al., 1988 (Transient expression of foreign genes in rice, wheat and soybean cells following particle bombardment. Plant Molecular Biology, 11 (4), 433-439), Christou, 1997 (Rice transformation: bombardment. Plant Mol Biol. 35 (1-2)).

[0190] Expression levels of the expressed genes in the constructs described above (example 5.1) are determined by GUS staining, quantification of luminescence/fluorescence, RT-PCR and protein abundance (detection by specific antibodies) using the protocols in the art. GUS staining is done by incubating the plant materials in GUS solution [100 mM NaHPO4, 10 mM EDTA, 0.05% Triton X100, 0.025% X-Gluc solution (5-bromo-4-chloro-3-indolyl-beta-D-glucuronic acid dissolved in DMSO), 10% methanol, pH 7.0] at 37° C. for 16-24 hours. Plant tissues are vacuum-infiltrated 2 times for 15 minutes to aid even staining. Analyses of luciferase activities are performed as described above (example 2 and 3.3).

[0191] In comparison to the constitutive p-Ubi promoter-only RENA-less reporter gene construct, the constructs carrying RENA molecules SEQ ID NO5-NO8 and NO16 under control of the p-Ubi promoter all mediate strongly enhanced reliability of gene expression in these assays.

[0192] In comparison to the seed-specific p-KG86 promoter-only RENA-less reporter gene construct, the constructs carrying RENA molecules SEQ ID NO9-NO15 under control of the p-KG86 promoter all mediate strongly enhanced reliability of gene expression in these assays.

[0193] 5.2.2 Transient Assay Using Protoplasts

[0194] Isolation of protoplasts is conducted by following the protocol developed by Sheen (1990) (Metabolic Repression of Transcription in Higher Plants. The Plant Cell 2 (10), 1027-1038). Maize seedlings are kept in the dark at 25° C. for 10 days and illuminated for 20 hours before protoplast preparation. The middle part of the leaves are cut to 0.5 mm strips (about 6 cm in length) and incubated in an enzyme solution containing 1% (w/v) cellulose RS, 0.1% (w/v) macerozyme R10 (both from Yakult Honsha, Nishinomiya, Japan), 0.6 M mannitol, 10 mM MES (pH 5.7), 1 mM CaCl₂, 1 mM MgCl₂, 10 mM beta-mercaptoethanol, and 0.1% BSA (w/v) for 3 hr at 23° C. followed by gentle shaking at 80 rpm for 10 min to release protoplasts. Protoplasts are collected by centrifugation at 100×g for 2 min, washed once in cold 0.6 M mannitol solution, centrifuged, and resuspended in cold 0.6 M mannitol (2×10⁶/mL).

[0195] A total of 50 microg plasmid DNA in a total volume of 100 microL sterile water is added into 0.5 mL of a suspension of maize protoplasts (1×10⁶ cells/mL) and mixed gently. 0.5 mL PEG solution (40% PEG 4,000, 100 mM CaNO₃, 0.5 mannitol) is added and pre-warmed at 70° C. with gentle shaking followed by addition of 4.5 mL MM solution (0.6 M mannitol, 15 mM MgCl₂, and 0.1% MES). This mixture is incubated for 15 minutes at room temperature. The protoplasts are washed twice by pelleting at 600 rpm for 5 min and resuspending in 1.0 mL of MMB solution [0.6 M mannitol, 4 mM Mes (pH 5.7), and brome mosaic virus (BMV) salts (optional)] and incubated in the dark at 25° C. for 48 hr. After the final wash step, the protoplasts are collected in 3 mL MMB medium, and incubated in the dark at 25° C. for 48 hr.

[0196] The transient transformation of protoplasts of other monocotyledonous plants are carried out using, for example, a technique described in Hodges et al., 1991 (Transformation and regeneration of rice protoplasts. Biotechnology in agriculture No. 6, Rice Biotechnology. International Rice Research Institute, ISBN: 0-85198-712-5) or Lee et al., 1990 (Transient gene expression in wheat (Triticum aestivum) protoplasts. Biotechnology in agriculture and forestry 13—Wheat. Springer Verlag, ISBN-10: 3540518096).

[0197] Expression levels of the expressed genes in the constructs described above (Example 5.1) are determined by GUS staining, quantification of luminescence/fluorescence, RT-PCR or protein abundance (detection by specific antibodies) using the protocols in the art. GUS staining is done by incubating the plant materials in GUS solution [100 mM NaHPO₄, 10 mM EDTA, 0.05% Triton X100, 0.025% X-Gluc solution (5-bromo-4-chloro-3-indolyl-beta-D-glucuronic acid dissolved in DMSO), 10% methanol, pH 7.0] at 37° C. for 16-24 hours. Analyses of luciferase activities are performed as described above (Example 2 and 3.3).

[0198] In comparison to the constitutive p-Ubi promoter-only RENA-less reporter gene construct, the constructs carrying RENA molecules SEQ ID NO5-NO8 and NO16 under control of the p-Ubi promoter all mediate strongly enhanced reliability of gene expression in these assays.

[0199] In comparison to the seed-specific p-KG86 promoter-only RENA-less reporter gene construct, the constructs carrying RENA molecules SEQ ID NO9-NO15 under control of the p-KG86 promoter all mediate strongly enhanced reliability of gene expression in these assays.

[0200] 5.2.3 Transformation and Regeneration of Monocotyledonous Crop Plants

[0201] The Agrobacterium-mediated plant transformation using standard transformation and regeneration techniques may also be carried out for the purposes of transforming crop plants (Gelvin and Schilperoort, 1995, Plant Molecular Biology Manual, 2nd Edition, Dordrecht: Kluwer Academic Publ. ISBN 0-7923-2731-4; Glick and Thompson (1993) Methods in Plant Molecular Biology and Biotechnology, Boca Raton: CRC Press, ISBN 0-8493-5164-2). The transformation of maize or other monocotyledonous plants can be carried out using, for example, a technique described in U.S. Pat. No. 5,591,616. The transformation of plants using particle bombardment, polyethylene glycol-mediated DNA uptake or via the silicon carbonate fiber technique is described, for example, by Freeling & Walbot (1993) “The maize handbook” ISBN 3-540-97826-7, Springer Verlag N.Y.).

[0202] Expression levels of the expressed genes in the constructs described above (Example 5.1) are determined by GUS staining, quantification of luminescence or fluorescence, RT-PCR, protein abundance (detection by specific antibodies) using the protocols in the art. GUS staining is done by incubating the plant materials in GUS solution [100 mM NaHPO₄, 10 mM EDTA, 0.05% Triton X100, 0.025% X-Gluc solution (5-bromo-4-chloro-3-indolyl-beta-D-glucuronic acid dissolved in DMSO), 10% methanol, pH 7.0] at 37° C. for 16-24 hours. Plant tissues are vacuum-infiltrated 2 times for 15 minutes to aid even staining. Analyses of luciferase activities are performed as described above (Examples 2 and 3.3).

[0203] In comparison to the constitutive p-Ubi promoter-only RENA-less reporter gene construct, the constructs carrying RENA molecules SEQ ID NO5-NO8 and NO16 under control of the p-Ubi promoter all mediate strongly enhanced reliability of gene expression in these assays.

[0204] In comparison to the seed-specific p-KG86 promoter-only RENA-less reporter gene construct, the constructs carrying RENA molecules SEQ ID NO9-NO15 under control of the p-KG86 promoter all mediate strongly enhanced reliability of gene expression in these assays.

[0205] 5.2.4 Test of RENA Sequences SEQ ID NO1 to 4 in Monocotyledonous Plants

[0206] RENA sequences with SEQ ID NO1 to NO4 under control of the p-AtNit1 promoter are tested analogously (cp. Examples 5.2.1; 5.2.2 and 5.2.3) in monocotyledonous plants. Significantly enhanced reliability of gene expression is measured in these assays compared to RENA-less control constructs.

### Example 6

### Quantitative Analysis of RENA Activity in Corn Plants

[0207] This example describes the analysis of RENA sequences with SEQ ID NO5, NO9, NO10 and NO16 in corn plants.

[0208] 6.1 Vector Construction

[0209] For analyzing RENA sequences with SEQ ID NO5 and NO16 in monocotyledonous plants quantitatively, a pUC-based expression vector harboring an expression cassette composed of the RENA-less, constitutive monocotyledonous promoter p-Ubi from Z. mais was combined with a coding sequence of the firefly luciferase (LUC) gene (Promega, Madison, Wis., USA) followed by the nopaline synthase (NOS) transcriptional terminator.

[0210] For analyzing RENA sequences with SEQ ID NO9 and NO10 in monocotyledonous plants quantitatively, a pUC-based expression vector harboring an expression cassette composed of the RENA-less, seed specific monocotyledonous promoter p-KG86 from Z. mais was combined with a coding sequence of the firefly luciferase (LUC) gene (Promega, Madison, Wis., USA) followed by the nopaline synthase (NOS) transcriptional terminator.

[0211] Genomic DNA was extracted from A. thaliana green tissue using the Qiagen DNeasy Plant Mini Kit (Qiagen, Hilden, Germany). Genomic DNA fragments containing RENA molecules were isolated by conventional polymerase chain reaction (PCR). Primers were designed on the basis of the A. thaliana genome sequence with a multitude of RENA candidates. The reaction comprised 4 sets of primers (Table 15) and followed the protocol outlined by Phusion High Fidelity DNA Polymerase (Cat No F-540L, New England Biolabs, Ipswich, Mass., USA) using the following primers:

TABLE 15
Primer sequences

| | | SEQ | PCR |
|---|---|---|---|
| | | ID | yielding |
| Primer name | Sequence | NO | SEQ ID NO |
| RENA5_forIII | atatacgcgtttagatctcgtgccgtcg | 86 | 5 |
| RENA5_revIII | atatggcgcgcctttgatcaagcctgttcaca | 87 | |
| RENA16_forIII | atatacgcgtttaagaaatcctctcttctcctc | 88 | 16 |
| RENA16_revIII | atatggcgcgccctgcacatacataacatatcaagatc | 89 | |
| RENA9_forIII | atatacgcgtggtgcttaaacactctggtgagt | 90 | 9 |
| RENA9_revIII | atatggcgcgcctttgacctacaaaatcaaagcagtca | 91 | |
| RENA10_forIII | atatacgcgtagttctttgctttcgaagttgc | 92 | 10 |
| RENA10_revIII | atatggcgcgcctactacgtactgttttcaattct | 93 | |

[0212] Amplification during the PCR and purification of the amplification products was carried out as detailed above (example 1.2). Following a DNA restriction digest with MluI (10 U/microl) and AscI (10 U/microl) restriction endonucleases, the digested products were purified with the Qiagen Gel Extraction Kit (Qiagen, Hilden, Germany).

[0213] RENA PCR fragments (see above) were cloned separately upstream of the firefly luciferase coding sequence using AscI restriction sites. The reaction yielded one binary vector with the p-Ubi promoter, the firefly luciferase coding sequence c-LUC and the t-nos terminator and one binary vector with the p-KG86 promoter, the firefly luciferase coding sequence c-LUC and the t-nos terminator

[0214] In addition the reaction yielded two vectors harboring SEQ ID NO5 and NO16 under control of the p-Ubi promoter, immediately upstream of the firefly luciferase coding sequence (Table 16), for which the combination with SEQ ID NO16 is given exemplary (SEQ ID NO83). Except for varying SEQ ID NO5, the nucleotide sequence is identical in the vectors (Table 16).

[0215] In addition the reaction yielded two vectors harboring SEQ ID NO9 and NO10 under control of the p-KG86 promoter, immediately upstream of the firefly luciferase coding sequence (Table 16), for which the combination with SEQ ID NO9 is given exemplary (SEQ ID NO84). Except for varying SEQ ID NO10, the nucleotide sequence is identical in the vectors (Table 16).

[0216] The resulting vectors are summarized in table 16, with promoter molecules having the prefix p-, coding sequences having the prefix c-, and terminator molecules having the prefix t-.

TABLE 16
Plant expression vectors

| plant | | |
|---|---|---|
| expression | Composition of the expression cassette | SEQ ID |
| vector | Promoter::SEQ ID NO::reporter gene::terminator | NO |
| LJK309 | p-Ubi::—::c-LUC::t-nos | |
| LJK327 | p-Ubi::SEQ ID NO16::c-LUC::t-nos | 83 |
| LJK326 | p-Ubi::SEQ ID NO5::c-LUC::t-nos | |
| RTP5679 | p-KG86::—::c-LUC::t-nos | |
| RTP5683 | p-KG86::SEQ ID NO9::c-LUC::t-nos | 84 |
| RTP5684 | p-KG86::SEQ ID NO10::c-LUC::t-nos | |

[0217] The resulting vectors were used to analyze RENA molecules in experiments outlined below (Example 6.2).

[0218] 6.2 Generation of Transgenic Maize Plants

[0219] Maize germination, propagation, A. tumefaciens preparation and inoculations were done as previously described (WO2006136596, US20090249514) with the exception that the constructs LJK309, LJK326, LJK327, RTP5679, RTP5683 and RTP5684 (cp. example 6.1) each contained a mutated AHAS gene driven by the corn ubiquitin promoter p-Ubi, mediating tolerance to imidazolinone herbicides for selection.

[0220] 6.3 RENA Sequences Mediate Strongly Enhanced Reliability of Gene Expression in Corn Plants

[0221] Tissue samples were collected from the generated transgenic plants from leaves and kernels.

[0222] The tissue samples were processed and analyzed as described above (cp. example 3.3)

[0223] In comparison to the constitutive p-Ubi promoter-only RENA-less reporter gene construct (LJK309), the two tested RENA molecules under control of the p-Ubi promoter SEQ ID NO5 and NO16 (LJK326, LJK327) mediated strongly enhanced reliability of gene expression in leaves (Table 17), and kernels (Table 18).

[0224] In comparison to the seed-specific p-KG86 promoter-only RENA-less reporter gene construct (RTP5679), the two tested RENA molecules under control of the p-KG86 promoter SEQ ID NO9 and NO10 (RTP5683, RTP5684) mediated strongly enhanced reliability of gene expression in maize kernels (Table 19).

TABLE 17
Coefficient of variation and fraction of low expressers (calculated as
the fraction of a population below 40% of mean expression
level of that population); Maize leaves; p-Ubi

| | Coefficient of | fraction low expressers |
|---|---|---|
| construct | variation | (<40% mean) |
| LJK309 | 2.21 | 31.82 |
| LJK326 | 0.85 | 17.39 |
| LJK327 | 0.64 | 28.57 |

TABLE 18
Coefficient of variation and fraction of low expressers (calculated as
the fraction of a population below 40% of mean expression
level of that population); Maize kernels; p-Ubi

| | Coefficient of | fraction low expressers |
|---|---|---|
| construct | variation | (<40% mean) |
| LJK309 | 1.54 | 40.91 |
| LJK326 | 0.45 | 4.55 |
| LJK327 | 0.46 | 10.53 |

TABLE 19
Coefficient of variation and fraction of low expressers (calculated as
the fraction of a population below 40% of mean expression
level of that population); Maize kernels; p-KG68

| | Coefficient of | fraction low expressers |
|---|---|---|
| construct | variation | (<40% mean) |
| RTP5679 | 2.12 | 63.64 |
| RTP5683 | 0.98 | 15.79 |
| RTP5684 | 0.60 | 15.79 |

[0225] 6.4 Test of RENA Sequences SEQ ID NO1 to NO4 and NO6 to NO8 and NO12 to NO15 Under Control of the p-Ubi Promoter and SEQ ID NO11 to NO15 Under Control of the p-KG86 Promoter in Corn Plants

[0226] RENA sequences with SEQ ID NO1 to NO4 and NO6 to NO8 and NO12 to NO15 under control of the p-Ubi promoter are tested analogously in corn plants. Significantly enhanced reliability of gene expression is measured in leaves and kernels.

[0227] RENA sequences with SEQ ID NO11 to NO15 under control of the p-KG86 promoter are tested analogously in corn plants. Significantly enhanced reliability of gene expression is measured in kernels.

### Example 7

### Quantitative Analysis of RENA Activity in Rice Plants

[0228] This example describes the analysis of RENA sequences with SEQ ID NO9, NO10 and NO16 in rice plants.

[0229] 7.1 Vector Construction

[0230] For analyzing RENA sequences with SEQ ID NO16 in rice plants quantitatively, pENTR/B vectors LJK1 and LJK4 (compare example 1.3) were combined with a destination vector harboring the constitutive Sugarcane Bacilliform Virus promoter (p-ScBV) upstream of the recombination site using site specific recombination (LR-reaction) according to the manufacturers (Invitrogen, Carlsbad, Calif., USA) Gateway manual. The reactions yielded one binary vector with p-ScBV promoter, the firefly luciferase coding sequence c-LUC and the t-nos terminator as well as one vector harboring SEQ ID NO16 immediately upstream of the firefly luciferase coding sequence (Table 20).

[0231] For analyzing RENA sequences with SEQ ID NO9 and NO10 in rice plants quantitatively, pENTR/B vectors LJK1, LJK19 and LJK20 (compare example 1.3) were combined with a destination vector harboring the seed preferred rice prolamin RP6 promoter (p-RP6) upstream of the recombination site using site specific recombination (LR-reaction) according to the manufacturers (Invitrogen, Carlsbad, Calif., USA) Gateway manual. The reactions yielded one binary vector with p-RP6 promoter, the firefly luciferase coding sequence c-LUC and the t-nos terminator as well as 2 vector harboring SEQ ID NO9 or NO10 immediately upstream of the firefly luciferase coding sequence (Table 20), for which the sequence of the reporter gene expression cassette is given exemplary for the combination with SEQ ID NO9 (SEQ ID NO85). Except for varying SEQ ID NO10, the nucleotide sequence is identical in the vectors (Table 20).

[0232] The resulting vectors are summarized in table 20, with promoter molecules having the prefix p-, coding sequences having the prefix c-, and terminator molecules having the prefix t-.

TABLE 20
Plant expression vectors

| plant | | |
|---|---|---|
| expression | Composition of the expression cassette | SEQ ID |
| vector | Promoter::SEQ ID NO::reporter gene::terminator | NO |
| CD30963 | p-ScBV::—::c-LUC::t-nos | |
| CD30964 | p-ScBV::SEQ ID NO16::c-LUC::t-nos | |
| CD30977 | p-RP6::—::c-LUC::t-nos | |
| CD30971 | p-RP6::SEQ ID NO9::c-LUC::t-nos | 85 |
| CD30972 | p-RP6::SEQ ID NO10::c-LUC::t-nos | |

[0233] The resulting vectors were used to analyze RENA molecules in experiments outlined below (Example 7.2).

[0234] 7.2 Generation of Transgenic Rice Plants

[0235] The Agrobacterium containing the respective expression vector was used to transform Oryza sativa plants. Mature dry seeds of the rice japonica cultivar Nipponbare were dehusked. Sterilization was carried out by incubating for one minute in 70% ethanol, followed by 30 minutes in 0.2% HgCl2, followed by a 6 times 15 minutes wash with sterile distilled water. The sterile seeds were then germinated on a medium containing 2,4-D (callus induction medium). After incubation in the dark for four weeks, embryogenic, scutellum-derived calli were excised and propagated on the same medium. After two weeks, the calli were multiplied or propagated by subculture on the same medium for another 2 weeks. Embryogenic callus pieces were sub-cultured on fresh medium 3 days before co-cultivation (to boost cell division activity).

[0236] Agrobacterium strain LBA4404 containing the respective expression vector was used for co-cultivation. Agrobacterium was inoculated on AB medium with the appropriate antibiotics and cultured for 3 days at 28° C. The bacteria were then collected and suspended in liquid co-cultivation medium to a density (OD₆₀₀) of about 1. The suspension was then transferred to a Petri dish and the calli immersed in the suspension for 15 minutes. The callus tissues were then blotted dry on a filter paper and transferred to solidified, co-cultivation medium and incubated for 3 days in the dark at 25° C. Co-cultivated calli were grown on 2.4-D-containing medium for 4 weeks in the dark at 28° C. in the presence of a selection agent. During this period, rapidly growing resistant callus islands developed. After transfer of this material to a regeneration medium and incubation in the light, the embryogenic potential was released and shoots developed in the next four to five weeks. Shoots were excised from the calli and incubated for 2 to 3 weeks on an auxin-containing medium from which they were transferred to soil. Hardened shoots were grown under high humidity and short days in a greenhouse.

[0237] Approximately 35 independent TO rice transformants were generated for one construct. The primary transformants were transferred from a tissue culture chamber to a greenhouse. After a quantitative PCR analysis to verify copy number of the T-DNA insert, only single copy transgenic plants that exhibited tolerance to the selection agent were kept for harvest of T1 seed. Seeds were then harvested three to five months after transplanting. The method yielded single locus transformants at a rate of over 50% (Aldemita and Hodges 1996, Chan et al. 1993, Hiei et al. 1994).

[0238] 7.3 RENA Sequences Mediate Strongly Enhanced Reliability of Gene Expression in Rice Plants

[0239] Tissue samples were collected from the generated transgenic plants from leaves and kernels. The tissue samples were processed and analyzed as described above (cp. example 3.3)

[0240] In comparison to the constitutive p-ScBV promoter-only RENA-less reporter gene construct (CD30963), the tested RENA molecule SEQ ID NO 16 under control of the p-ScBV promoter (CD30964) mediated strongly enhanced reliability of gene expression measured as a reduced coefficient of variation and a reduced fraction of low expressers in leaves (table 21) and seeds (table 22).

[0241] In comparison to the seed preferred p-RP6 promoter-only RENA-less reporter gene construct (CD30977), the tested RENA molecules SEQ ID NO9 and NO10 under control of the p-RP6 promoter (CD30971 and CD30972) mediated strongly enhanced reliability of gene expression measured as a reduced coefficient of variation and a reduced fraction of low expressers in seeds (table 23).

TABLE 21
Coefficient of variation and fraction of low expressers (calculated as
the fraction of a population below 40% of mean expression
level of that population); Rice leaves; p-ScBV

| | | coefficient of | fraction low expressers |
|---|---|---|---|
| construct | Promoter | variation | (<40% mean) |
| CD30963 | p-ScBV | 3.09 | 71.43 |
| CD30964 | p-ScBV | 0.56 | 5.00 |

TABLE 22
Coefficient of variation and fraction of low expressers (calculated as
the fraction of a population below 40% of mean expression
level of that population); Rice seeds; p-ScBV

| | | coefficient of | fraction low expressers |
|---|---|---|---|
| construct | Promoter | variation | (<40% mean) |
| CD30963 | p-ScBV | 2.37 | 57.14 |
| CD30964 | p-ScBV | 0.47 | 5.88 |

TABLE 23
Coefficient of variation and fraction of low expressers (calculated as
the fraction of a population below 40% of mean expression
level of that population); Rice seeds; p-RP6

| | | coefficient of | fraction low expressers |
|---|---|---|---|
| construct | Promoter | variation | (<40% mean) |
| CD30977 | P-RP6 | 2.94 | 81.25 |
| CD30971 | P-RP6 | 0.53 | 16.67 |
| CD30972 | P-RP6 | 0.54 | 11.76 |

[0242] 7.4 Test of RENA Sequences SEQ ID NO1 to NO8 and SEQ ID NO11 to NO15 in Rice Plants

[0243] RENA sequences with SEQ ID NO1 to NO8 under control of the p-ScBV promoter are tested analogously in rice plants. Significantly enhanced reliability of gene expression is measured in leaves, and seeds.

[0244] RENA sequences with SEQ ID NO11 to NO15 under control of the p-RP6 promoter are tested analogously in rice plants. Significantly enhanced reliability of gene expression is measured in seeds.

### Example 8

### Identification of Reliability Enhancing Nucleic Acids (RENA) from Other Species

[0245] 8.1 Identification of RENAs in Publicly Available Genomes

[0246] RENA sequences are identified from publicly available genomic DNA sequences (e.g. http://www.ncbi.nlm.nih.gov/genomes/PLANTS/PlantList.html) of the following organisms: Zea mays, Oryza sativa, Brachypodium distachyon, Glycine max, Medicago truncatula, Sorghum bicolor, Arabidopsis lyrata, Manihot esculenta, Ricinus communis, Populus trichocarpa, Cucumis sativus, Prunus persica, Carica papaya, Citrus sinensis, Citrus clementina, Eucalyptus grandis, vinifera, Mimulus guttatus, Aqullega coerulea, Setaria italica, Selaginella moellendorffii, Physcomitrella patens, Chlamydomonas reinhardtii, Volvox carteri.

[0247] 8.2 Isolation of RENA Sequences

[0248] Genomic DNA is extracted from green tissue of the respective organisms using the Qiagen DNeasy Plant Mini Kit (Qiagen, Hilden, Germany). Primer design, PCR amplification and purification for RENA sequences SEQ ID NO 94 to 116666 is performed analogously to the description in example 1.2.

[0249] 8.3 Vector Construction

[0250] Using the Multisite Gateway System (Invitrogen, Carlsbad, Calif., USA), the promoter::RENA::reporter-gene cassettes for RENA sequences SEQ ID NO 94 to 116666 are assembled into binary constructs for plant transformation as described in example 1.3. The resulting plant transformation vectors are used in the subsequent experiments.

[0251] 8.4 Analysis of RENA Sequences

[0252] 8.4.1 Analysis of RENA Molecules Enhancing Reliability of Gene Expression in Stably Transgenic A. thaliana

[0253] For RENA sequences SEQ ID NO 94 to 116666 the respective transformation vectors are used to generate transgenic A. thaliana plants analogously to the description in example 2.1. Transgenic plants are then analysed (compare example 2.2). All tested RENA sequences (SEQ ID NO 94 to 116666) cause significantly enhanced reliability of luciferase reporter gene expression when coupled with the reporter gene compared to the RENA-less control in stably transgenic A. thaliana assays of leaves, flowers and siliques.

[0254] 8.4.2 Analysis of RENA Molecules Enhancing Reliability of Gene Expression in Soybean Plants

[0255] RENA sequences with SEQ ID NO 94 to 116666 are tested in soybean plants (compare example 4). Significant enhancement of gene expression is measured in leaves, flowers and embryos.

[0256] 8.4.3 Analysis of RENA Molecules Enhancing Reliability of Gene Expression in Monocotyledonous Plants

[0257] RENA sequences with SEQ ID NO 94 to 116666 are tested in monocotyledonous plants (compare example 5).

[0258] 8.4.3.1 Transient Assays for Analysis in Monocotyledonous Plants

[0259] As described in example 5.2, transformation vectors containing RENA sequences SEQ ID NO 94 to 116666 are used to transiently transfect monocotyledonous plants. In both the microprojectile bombardment (compare example 5.2.1) and the transient protoplast assay (compare example 5.2.2) the RENA molecules mediate strongly enhanced reliability of gene expression in comparison to the constitutive p-Ubi promoter-only RENA-less reporter gene construct.

[0260] 8.4.3.2 Assays for Analysis in Monocotyledonous Plants

[0261] RENA sequences with SEQ ID NO 94 to 116666 are tested in stably transgenic monocotyledonous plants (compare example 5.2.3). Significant enhanced reliability of gene expression is measured in all described assay (cp. Example 5.2.1, 5.2.2 and 5.2.3).

[0262] 8.4.4 Analysis of RENA Molecules Enhancing Reliability of Gene Expression in Corn Plants

[0263] RENA sequences with SEQ ID NO 94 to 116666 are tested in corn plants (compare example 6).

[0264] Significantly enhanced reliability of gene expression is measured in leaves and kernels.

[0265] 8.4.5 Analysis of RENA Molecules Enhancing Reliability of Gene Expression in Rice Plants

[0266] RENA sequences with SEQ ID NO 94 to 116666 are tested in rice plants (compare example 7). Significantly enhanced reliability of gene expression is measured in leaves and seeds.

### FIGURE LEGENDS

[0267] FIG. 1: Bar graph showing the coefficient of variation of a luciferase reporter gene activity in A. thaliana leaves.

[0268] Tissues of 15 independent transgenic plants were analyzed. Relative light units (RLU) of independent transgenic oilseed rape plant lines harboring RENA-less (LJK310) or RENA-containing reporter gene constructs (LJK311-LJK315) under the control of the p-AtNit1 promoter were calculated by normalizing against the protein content of each sample. Mean as well as standard deviation were calculated. Coefficient of variation was calculated from the standard deviation divided by the mean of expression. Coefficient of variation serves as an indicator for reliability of gene expression independent from level of expression. A) leaf tissue, B) flowers, C) siliques.

1. A method for reducing the coefficient of variation of expression in a population of plants comprising the steps of:
a) providing a recombinant nucleic acid comprising at least one Reliability Enhancing Nucleic Acid (RENA) molecule selected from the group consisting of:
i) a nucleic acid molecule having a sequence selected from SEQ ID NOS: 1 to 16 or 94 to 116666;
ii) a nucleic acid molecule having a sequence with an identity of at least 80% to a sequence selected from SEQ ID NOS: 1 to 16 or 94 to 116666;
iii) a fragment of at least 100 consecutive bases of a nucleic acid molecule of i) or ii) which has reliability enhancing activity as the corresponding nucleic acid molecule having the sequence of selected from SEQ ID NOS: 1 to 16 or 94 to 116666;
iv) a nucleic acid molecule hybridizing under conditions equivalent to hybridization in 7% sodium dodecyl sulfate (SDS), 0.5 M NaPO₄, 1 mM EDTA at 50° C. with washing in 2×SSC, 0.1% SDS at 50° C. to a nucleic acid molecule comprising at least 50 consecutive nucleotides of the complement of a reliability enhancing nucleic acid having a sequence selected from SEQ ID NOS: 1 to 16 or 94 to 116666; or
v) a nucleic acid molecule which is the complement or reverse complement of any of the previously mentioned nucleic acid molecules under i) to iv);
b) functionally linking the RENA molecule as defined under i) to v) to a promoter and/or a nucleic acid molecule of interest wherein at least the promoter is heterologous to the RENA molecule;
c) integrating the RENA molecule functionally linked to a promoter and/or a nucleic acid molecule of interest in the genome of plant cells, plants or parts thereof; and
d) regenerating a population of plants from the transgenic plant cells, plants or parts thereof produced in step c);
wherein the molecules as defined under ii) to v) reduce the variation of expression at by least 10% of the corresponding nucleic acid molecule having the sequence selected from SEQ ID NOS: 1 to 16 or 94 to 116666; and
wherein the population of independent primary transformant plants exhibit an at least 10% lower coefficient of variation of expression of the nucleic acid molecule of interest compared to a population of independent primary transformant plants comprising in their genome a respective recombinant nucleic acid construct not comprising the respective RENA molecule as defined in i) to v).

2. A method for producing a population of plants with reduced percentage of low-expressing plants comprising the steps of:
a) providing a recombinant nucleic acid construct comprising at least one RENA molecule selected from the group consisting of:
i) a nucleic acid molecule having a sequence selected from SEQ ID NOS: 1 to 16 or 94 to 116666;
ii) a nucleic acid molecule having a sequence with an identity of at least 80% to a sequence selected from SEQ ID NOS: 1 to 16 or 94 to 116666;
iii) a fragment of at least 100 consecutive bases of a nucleic acid molecule of i) or ii) which has reliability enhancing activity as the corresponding nucleic acid molecule having the sequence selected from SEQ ID NOS: 1 to 16 or 94 to 116666;
iv a nucleic acid molecule hybridizing under conditions equivalent to hybridization in 7% sodium dodecyl sulfate (SDS), 0.5 M NaPO₄, 1 mM EDTA at 50° C. with washing in 2×SSC, 0.1% SDS at 50° C. to a nucleic acid molecule comprising at least 50 consecutive nucleotides of the complement of a reliability enhancing nucleic acid having a sequence selected from SEQ ID NOS: 1 to 16 or 94 to 116666; and
v) a nucleic acid molecule which is the complement or reverse complement of any of the previously mentioned nucleic acid molecules under i) to iv);
functionally linked to a promoter and/or a nucleic acid molecule of interest wherein at least the promoter is heterologous to the RENA molecule;
b) integrating said recombinant nucleic acid construct in the genome of plant cells, plants or parts thereof; and
c) regenerating a population of independent primary transformant plants from the transgenic plant cells, plants or parts thereof produced in step b);
wherein the population of plants has an at least 5% reduced percentage of plants exhibiting low expression of the nucleic acid of interest compared to a population of plants comprising in their genome a respective recombinant nucleic acid construct not comprising the respective RENA molecule as defined in a) i) to v).

3. A method for reducing the number of low expressing plants in a population of independent primary transformant plants, comprising the steps of
a) providing a recombinant nucleic acid construct comprising at least one RENA molecule selected from the group consisting of:
i) a nucleic acid molecule having a sequence selected from SEQ ID NOS: 1 to 16 or 94 to 116666;
ii) a nucleic acid molecule having a sequence with an identity of at least 80% to a sequence selected from SEQ ID NOS: 1 to 16 or 94 to 116666;
iii) a fragment of at least 100 consecutive bases of a nucleic acid molecule of i) or ii) which has reliability enhancing activity as the corresponding nucleic acid molecule having the sequence selected from SEQ ID NOS: 1 to 16 or 94 to 116666;
iv) a nucleic acid molecule hybridizing under conditions equivalent to hybridization in 7% sodium dodecyl sulfate (SDS), 0.5 M NaPO₄, 1 mM EDTA at 50° C. with washing in 2×SSC, 0.1% SDS at 50° C. to a nucleic acid molecule comprising at least 50 consecutive nucleotides of the complement of a reliability enhancing nucleic acid having a sequence selected from SEQ ID NOS: 1 to 16 or 94 to 116666; and
v) a nucleic acid molecule which is the complement or reverse complement of any of the previously mentioned nucleic acid molecules under i) to iv);
functionally linked to a promoter and/or a nucleic acid molecule of interest wherein at least the promoter is heterologous to the RENA molecule;
b) integrating said recombinant nucleic acid construct in the genome of plant cells, plants or parts thereof; and
c) regenerating independent primary transformant plants from the transgenic plant cells, plants or parts thereof produced in step b);
wherein the number of low expressing independent primary transformant plants is reduced by at least 5% compared to a population of independent primary transformant plants comprising in their genome a respective recombinant nucleic acid not comprising the respective RENA molecule as defined in a) i) to v).

4. The methods of claim 1, wherein the RENA molecule is comprised in an expression construct or vector functionally linked to a promoter and/or a nucleic acid molecule of interest wherein at least the promoter is heterologous to the at least one RENA molecule.

5. The method of claim 1, wherein said at least one RENA molecule is located 2500 bp or less away from the transcription start site of said heterologous nucleic acid molecule of interest to which it is functionally linked.

6. The method of claim 5, wherein said at least one RENA molecule is located upstream of the translational start site of the nucleic acid molecule to which it is functionally linked.

7. The method of claim 6, wherein said at least one RENA molecule is located within a 5′UTR of the nucleic acid molecule of interest to which it is functionally linked.

8. A recombinant expression construct comprising at least one RENA molecule selected from the group consisting of:
i) a nucleic acid molecule having a sequence selected from SEQ ID NOS: 1 to 16 or 94 to 116666;
ii) a nucleic acid molecule having a sequence with an identity of at least 80% to a sequence selected from SEQ ID NOS: 1 to 16 or 94 to 116666;
iii) a fragment of at least 100 consecutive bases of a nucleic acid molecule of i) or ii) which has reliability enhancing activity as the corresponding nucleic acid molecule having the sequence selected from SEQ ID NOS: 1 to 16 or 94 to 116666;
iv) a nucleic acid molecule hybridizing under conditions equivalent to hybridization in 7% sodium dodecyl sulfate (SDS), 0.5 M NaPO₄, 1 mM EDTA at 50° C. with washing in 2×SSC, 0.1% SDS at 50° C. to a nucleic acid molecule comprising at least 50 consecutive nucleotides of the complement of a reliability enhancing nucleic acid having a sequence selected from SEQ ID NOS: 1 to 16 or 94 to 116666; and
v) a nucleic acid molecule which is the complement or reverse complement of any of the previously mentioned nucleic acid molecules under i) to iv);
functionally linked to a promoter and/or a nucleic acid molecule of interest wherein at least the promoter is heterologous to the RENA molecule.

9. The method of claim 1, wherein the promoter is a constitutive promoter, a tissue-specific or tissue-preferential promoter, a developmental-specific or developmental-preferential promoter or an inducible promoter.

10. A recombinant expression vector comprising one or more recombinant expression constructs of claim 8.

11. A transgenic cell or transgenic plant or part thereof comprising:
at least one RENA molecule selected from the group consisting of:
i) a nucleic acid molecule having a sequence selected from SEQ ID NOS: 1 to 16 or 94 to 116666;
ii) a nucleic acid molecule having a sequence with an identity of at least 80% to a sequence selected from SEQ ID NOS: 1 to 16 or 94 to 116666;
iii) a fragment of at least 100 consecutive bases of a nucleic acid molecule of i) or ii) which has reliability enhancing activity as the corresponding nucleic acid molecule having the sequence selected from SEQ ID NOS: 1 to 16 or 94 to 116666;
iv) a nucleic acid molecule hybridizing under conditions equivalent to hybridization in 7% sodium dodecyl sulfate (SDS), 0.5 M NaPO₄, 1 mM EDTA at 50° C. with washing in 2×SSC, 0.1% SDS at 50° C. to a nucleic acid molecule comprising at least 50 consecutive nucleotides of the complement of a reliability enhancing nucleic acid having a sequence selected from SEQ ID NOS: 1 to 16 or 94 to 116666; and
v) a nucleic acid molecule which is the complement or reverse complement of any of the previously mentioned nucleic acid molecules under i) to iv);
functionally linked to a heterologous promoter and/or a heterologous nucleic acid of interest to be expressed.

12. The transgenic cell or transgenic plant or part thereof of claim 11 selected from the group consisting of bacteria, fungi, yeasts or plants.

13. (canceled)

14. A method for the production of an agricultural product by introducing a RENA molecule selected from the group consisting of:
i) a nucleic acid molecule having a sequence selected from SEQ ID NOS: 1 to 16 or 94 to 116666;
ii) a nucleic acid molecule having a sequence with an identity of at least 80% to a sequence selected from SEQ ID NOS: 1 to 16 or 94 to 116666;
iii) a fragment of at least 100 consecutive bases of a nucleic acid molecule of i) or ii) which has reliability enhancing activity as the corresponding nucleic acid molecule having the sequence selected from SEQ ID NOS: 1 to 16 or 94 to 116666;
iv) a nucleic acid molecule hybridizing under conditions equivalent to hybridization in 7% sodium dodecyl sulfate (SDS), 0.5 M NaPO₄, 1 mM EDTA at 50° C. with washing in 2×SSC, 0.1% SDS at 50° C. to a nucleic acid molecule comprising at least 50 consecutive nucleotides of the complement of a reliability enhancing nucleic acid having a sequence selected from SEQ ID NOS: 1 to 16 or 94 to 116666; and
v) a nucleic acid molecule which is the complement or reverse complement of any of the previously mentioned nucleic acid molecules under i) to iv);
into a plant, growing the plant, harvesting and processing the plant or parts thereof.

15. The method of claim 4, wherein the RENA molecule is heterologous to both the promoter and the nucleic acid of interest.

16. The recombinant expression construct of claim 8, wherein the RENA molecule is heterologous to both the promoter and the nucleic acid of interest.

17. A transgenic cell or transgenic plant or part thereof comprising the recombinant expression construct of claim 8.

18. A transgenic cell or transgenic plant or part thereof comprising the recombinant expression vector of claim 10.

19. A method for the production of an agricultural product by introducing the recombinant expression construct of claim 8 into a plant, growing the plant, harvesting and processing the plant or parts thereof.

20. A method for the production of an agricultural product by introducing the recombinant expression vector of claim 10 into a plant, growing the plant, harvesting and processing the plant or parts thereof.

The application's sequence listing, which the Patent Office published only in electronic form, follows.

SEQUENCE LISTING (116666 sequences)

SEQ ID NO: 1 - DNA, 495 bp, Arabidopsis thaliana
cgggcattttcgtctaagcttaggttatcttcatccccagttactttgattttttttttttttttcttctcgtcgtgttgtttgttgtggaaatagttatcggccatttctttattttattcttgacagtttgttttgatggttagggtttttagaatttaactcgtatttgacccatttgggttgtgatcgaattttaaatctcttcgaataatgggtgcgttgctttgattactcggttcttatattgttgaaagctagaatcaatttgaatttgaatcaactccactagtgcattggtccctttcgtgcaactcctttgtctgaatcttatacatagatttagaatagtagatccactcatgttgattttttcattacttattagtaaagtctctaatgcatgtcttacatctaagtttagctctacttattttgttcaagattgtttttttaccatcttctgcagaagaagcatagactaaggtttagggt

SEQ ID NO: 2 - DNA, 503 bp, Arabidopsis thaliana
tctctccccctctcttgaactttccggtaagcttcgtcgattttcctgttggacaagtgattgtaaaagtagatagttttgattaacctagatatctccattcttgtagaaacttcacctatagctcagtcgggtctgattgttacttcgaattgagtcgattgatctgccttataaaccctaatttcgtggtccttgtgcactctcacagtttccgaacccttattcttgattttctgaatttcctgagctctctcttgttactaatttgatttgaaagatggatttgggagtcaattcttctcatcgatggctctgggttttgaaattgagttcgttgtttctatgatttttgagcaaatatcatctccgttggttacttttagtgtgtttaagtttttgaacagctaatctctgttagttacttatacggtgattgatctgttttcagtttattctctgtatcaatgcagattttgtatcaaacacgaacctaatactgc

SEQ ID NO: 3 - DNA, 671 bp, Arabidopsis thaliana
gttaagctcaaagaatccgttcttttcaggtgagtctcttcttcaatagtcttaggggttttagttcttcagttttcttattctgcctctgctttcatgattgtttttttccattgaagattttgacctttgagggaattttttcctttttgctttatgtacgtgttaaggatccaaaatcattatttcggacactatttaaacgaattggttgagatttgatgttatgaagcttgaattttgtgtcttttactctgtttccggggctagtttgctaaattctgaatcttttagctctacttcagtctaatgttcagattagttactgtttcacctcacggagagctttacgctatagaagtccgttggttctcatttcaaatcatataggcgtgcttattgtttactttgattctctggctttgaatactcaaagttcttgaggtcattggttgcttcacagctatgtgttaagtttagtggtttggatctttatgttagtgtgacataaatagggtgatgtatcgtatcattgtttccactttcttgattctacttaatgcgttggtttttggcttaaaaatatgttttctttctctataactctaatcttttgtttatgtttaccatcttacttttgacagtctttactccatctagggtaccacgat

SEQ ID NO: 4 - DNA, 527 bp, Arabidopsis thaliana
ctcgaaaccctaatctcttcttgatcaggtgatactttctctctttctgctgaatgattgtttcctgttgatttgcttgttcgaaaaagtttttatttagagatttgtaggtcattttattttctgatctgaatgcagctctttttggttcaaaatatatactctgggttttgtttcttcgcaaaatgataatgtttgattgttttttctttcagaagaaattgactccaaaactagatatgttatttattctgtagaaaatggtatcgaattttagatacagatactatattttttgttttgatttttgattttggaatcttgtgatatgtttacgcaatggagacttttgcagaaaatggtttctttattatttgttatatgaatctttgattatctgaataagacattgctaggataaccagtgtcacttttttttacgttatgtaacttgaaatcatttttggactcgtaattctaacattctgtttttgttctcaggccttgtcgatttactgtcccttgta

SEQ ID NO: 5 - DNA, 519 bp, Arabidopsis thaliana
ttagatctcgtgccgtcgtgcgacgttgttttccggtacgtttattcctgttgattccttctctgtctctctcgattcactgctacttctgtttggattcctttcgcgcgatctctggatccgtgcgttattcattggctcgtcgttttcagatctgttgcgtttcttctgttttctgttatgagtggatgcgttttcttgtgattcgcttgtttgtaatgctggatctgtatctgcgtcgtgggaattcaaagtgatagtagttgatattttttccagatcaggcatgttctcgtataatcaggtctaatggttgatgattctgcggaattatagatctaagatcttgattgatttagatttgaggatatgaatgagattcgtaggtccacaaaggtcttgttatctctgctgctagatagatgattatccaattgcgtttcgtagttatttttatggattcaaggaattgcgtgtaattgagagttttactctgttttgtgaacaggcttgatcaaa

SEQ ID NO: 6 - DNA, 618 bp, Arabidopsis thaliana
ctttctctcgttctcatctttctctctaaggttagtcccttgtgtagatcctctcttcatcgattcaatttcatcttccttggtttgatttaggaattttgtcacgatttggtgtttagatgatggagtcttgctgttgatctatgtttatagcactttgtttccatggttctgttgtttcttaccgtttgttgtgcatcgatctggttttggtagatccctcgtagataataatctgaatatgtcaaagttttcttacaagtctgttgtgttttcagttttgattgatattgttatccatgtagtagtcgatcatccaaaaactggttcagtgtgattctccgatcatcgccgctgattttatatttatcatcatgtatagatttgcaggttttattttgttcgttgtgtgtttttgttctttgttaaatttaacctctatgcatttgatgtacatgtttttgtgttggtctcagtttctcttattctgtataagctaagctaaagtctccatggttagtgtctgtttagtattaaaatatttcaatttgctaattctttatgtttttgtgatgatattgcagagattttgtaggtgacaatcaaaagtttgacaaa

SEQ ID NO: 7 - DNA, 772 bp, Arabidopsis thaliana
tcatcagatcttcaaaaccccaaaatttgcaaatcaggtaataactttctccgtatgtatctcttcgatcaccgattgtctgtttctttgtttgcttttctcgatccgttattgaatttttgagttcgtcgttaaattttgattacatcaatttttcttttcgattcgattcagagagattgaattgcaaattatgtgccagatcttcgtgttctgtatctgattccggatcttggttattagttttttttttgttgttggaatgaattcaacaacgatgattttgatttggtcaattgattttttaatgctatagttttaaccttataggaatgtaattgaactggatcagctttacttgaattgtttggatctagattattcagacaacatctttttaactaaattgaaacatatttgtgtttgtgttcttgatgatcatgtgaatttggtagcataattttcttgttgagatgatttctgagatgggtttttgtagtttaattttcttactcgatgaaccatctcgtgcaccttgcaaaatcttttgttctatatctcattgttcgatatcaaactaatgaggttaacgttttttggtgagacgaccagttatgtaacatgttgttaactatcttcatgtttgaatcgattttgattggatgttttcatgttctatcatattctgcggttttgaatcttctgaattctaacgtgaggttatccttcttgtgcagatctcagcttcccggttagtactaccctcaaatca

SEQ ID NO: 8 - DNA, 332 bp, Arabidopsis thaliana
aaatcgttctttcaaatctctcaatcgggatcaaggtaaatttctgggttcttattcagtttcttcgattattttccattcgatcgcaatttcgtccctgttctttgagtttgattcggttaatctttgatcggagataaatatctgagtttcatcgctagatctcatctatattctgaactagggttcgtagatttcacagatttgtatatttaggcgtcgattctttgaatttgatccgatatgtgatttatattcagatctggtggtagcttttttaatcggatttgagattatccaagcgattaatctcagttttttgtgaattacag

SEQ ID NO: 9 - DNA, 847 bp, Arabidopsis thaliana
tggtgcttaaacactctggtgagttctagtacttctgctatgatcgatctcattaccatttcttaaatttctctccctaaatattccgagttcttgatttttgataacttcaggttttctctttttgataaatctggtctttccatttttttttttttgtggttaatttagtttcctatgttcttcgattgtattatgcatgatctgtgtttggattctgttagattatgtattggtgaatatgtatgtgtttttgcatgtctggttttggtcttaaaaatgttcaaatctgatgatttgattgaagcttttttagtgttggtttgattcttctcaaaactactgttaatttactatcatgttttccaactttgattcatgatgacacttttgttctgctttgttataaaattttggttggtttgattttgtaattatagtgtaattttgttaggaatgaacatgttttaatactctgttttcgatttgtcacacattcgaattattaatcgataatttaactgaaaattcatggttctagatcttgttgtcatcagattatttgtttcgataattcatcaaatatgtagtccttttgctgatttgcgactgtttcattttttctcaaaattgttttttgttaagtttatctaacagttatcgttgtcaaaagtctctttcattttgcaaaatcttctttttttttttgtttgtaactttgttttttaagctacacatttagtctgtaaaatagcatcgaggaacagttgtcttagtagacttgcatgttcttgtaacttctatttgtttcagtttgttgatgactgctttgattttgtaggtcaaa

SEQ ID NO: 10 - DNA, 455 bp, Arabidopsis thaliana
agttctttgctttcgaagttgccgcaacctaaacaggtttttccttcttctttcttcttattaactacgaccttgtcctttgcctatgtaaaattactaggttttcatcagttacactgattaagttcgttatagtggaagataaaatgccctcaaagcattttgcaggatatctttgatttttcaaagatatggaactgtagagtttgatagtgttcttgaatgtggttgcatgaagtttttttggtctgcatgttattttttcctcgaaatatgttttgagtccaacaagtgattcacttgggattcagaaagttgttttctcaatatgtaacagtttttttctatggagaaaaatcatagggaccgttggttttggcttctttaattttgagctcagattaaacccattttacccggtgttcttggcagaattgaaaacagtacgtagtacc

SEQ ID NO: 11 - DNA, 758 bp, Arabidopsis thaliana
agggtttcgtttttgtttcatcgataaactcaaaggtgatgattttagggtcttgtgagtgtgcttttttgtttgattctactgtagggtttatgttctttagctcataggttttgtgtatttcttagaaatgtggcttctttaatctctgggtttgtgactttttgtgtggtttctgtgtttttcatatcaaaaacctattttttccgagtttttttttacaaattcttactctcaagcttgaatacttcacatgcagtgttcttttgtagattttagagttaatgtgttaaaaagtttggatttttcttgcttatagagcttcttcactttgattttgtgggtttttttgttttaaaggtgagatttttgatgaggtttttgcttcaaagatgtcacctttctgggtttgtcttttgaataaagctatgaactgtcacatggctgacgcaattttgttactatgtcatgaaagctgacgtttttccgtgttatacatgtttgcttacacttgcatgcgtcaaaaaaattggggctttttagttttagtcaaagattttacttctcttttgggatttatgaaggaaagttgcaaactttctcaaattttaccatttttgctttgatgtttgtttagattgcgacagaacaaactcatatatgttgaaatttttgcttggttttgtataggattgtgtcttttgcttataaatgttgaaatctgaactttttttttgtttggtttctttgagcaggag

SEQ ID NO: 12 - DNA, 252 bp, Arabidopsis thaliana
actgtttaagcttcactgtctctgaatcggcaaaggtaaacgtatcaattattctacaaacccttttatttttcttttgaattaccgtcttcattggttatatgataacttgataagtaaagcttcaataattgaatttgatctgtgtttttttggccttaatactaaatccttacataagctttgttgcttctcctcttgtgagttgagtgttaagttgtaataatggttcactttcagctttagaagaaa

SEQ ID NO: 13 - DNA, 377 bp, Arabidopsis thaliana
tttcacgatttggaatttgattcctgcgatcacaggtatgacaggttagattttgttttgtatagttgtatacatacttctttgtgatgttttgtttacttaatcgaatttttggagtgttttaaggtctctcgtttagaaatcgtggaaaatatcactgtgtgtgtgttcttatgattcacagtgtttatgggtttcatgttctttgttttatcattgaatgggaagaaatttcgttgggatacaaatttctcatgttcttactgatcgttattaggagtttggggaaaaaggaagagtttttttggttggttcgagtgattatgaggttatttctgtatttgatttatgagttaatggtcgttttaatgttgtag

SEQ ID NO: 14 - DNA, 718 bp, Arabidopsis thaliana
gtccagaattttctccattgaagctggattctaaggtcagttcttacttctttatctcaatctgatgattccatatcgaaagtcttactttttcacttcaatttcaatctgatgattctaagatctttgattcgaggtcgatctctgatagttactacatgtttctgggtttatttatttttaatccatatagtaattaaaaactcttatgaggtttaattatggttacttgagaatttgcaatcgtcatctttctttgactcctatccattttttggtttttcctttgtttaatttctgtttcataattgtaattgtaaattaaccaaaacaaattgatcagaaacctttttcctatggaatatttatcacacgcaagcctgtgagttgtgactctgtaatcacttccttgttctggtaatttcagtggttaaggctctccttttttctgatgttgtcagcaaaagttagtttttcttcttctttaatgggttaattacacctaaatctctggttattaaacaatccagaaagaaaaaaagtttattccttcctctatgtatatagtttcacatgcaagcatcacttgtttgttctgacaaattgcagagttttgagttctgtttttttttttttctaatgttttgtctttaagaaagttctgtttttttttctgcaggaaagttatcaaaagttttgagagctttggatagtgaag

SEQ ID NO: 15 - DNA, 495 bp, Arabidopsis thaliana
ctagcttaatctcagattcgaatcgttccatagtggtgagcttcgtgttcttctttcgtctcttactcctgattctcgattttagggttttcagtaattgcgtcggcggcgaaagtctttatcgccgatcgatcttccttatctagaaattattgatcagaaactgttgggttttgtttgattcttgtcaagttttgatttttcatgcgaaattgctcaatcccaattcaaagttacgatttttattgaaaaccctagattggtttcttcaagtttgtcactttgattcaatctaatagcttagcttaatcgttaagtctcttttttggttttaggtttcatttgcgatttaaaggttcttgttttggtatttgttttgctttggtcctttaagtttgagaggcttatgtagattataagagagaagagtattgctttgcatgtttaaaggaagaacttttaactgaacatttgtatgattggtatgtagatact

SEQ ID NO: 16 - DNA, 623 bp, Arabidopsis thaliana
ttaagaaatcctctcttctcctcttcattttcaaggtaaatctctctctctctctctctctctgttattccttgttttaattaggtatgtattattgctagtttgttaatctgcttatcttatgtatgccttatgtgaatatctttatcttgttcatctcatccgtttagaagctataaatttgttgatttgactgtgtatctacacgtggttatgtttatatctaatcagatatgaatttcttcatattgttgcgtttgtgtgtaccaatccgaaatcgttgatttttttcatttaatcgtgtagctaattgtacgtatacatatggatctacgtatcaattgttcatctgtttgtgtttgtatgtatacagatctgaaaacatcacttctctcatctgattgtgttgttacatacatagatatagatctgttatatcattttttttattaattgtgtatatatatatgtgcatagatctggattacatgattgtgattatttacatgattttgttatttacgtatgtatatatgtagatctggactttttggagttgttgacttgattgtatttgtgtgtgtatatgtgtgttctgatcttgatatgttatgtatgtgcag

SEQ ID NO: 17 - DNA, 29 bp, artificial
  synthetic sequence
tataggtacccgggcattttcgtctaagc

SEQ ID NO: 18 - DNA, 35 bp, artificial
  synthetic sequence
tataccatggaccctaaaccttagtctatgcttct

SEQ ID NO: 19 - DNA, 32 bp, artificial
  synthetic sequence
tataggtacctctctccccctctcttgaactt

SEQ ID NO: 20 - DNA, 35 bp, artificial
  synthetic sequence
tataccatgggcagtattaggttcgtgtttgatac

SEQ ID NO: 21 - DNA, 33 bp, artificial
  synthetic sequence
tataggtaccgttaagctcaaagaatccgttct

SEQ ID NO: 22 - DNA, 33 bp, artificial
  synthetic sequence
tataccatggatcgtggtaccctagatggagta

SEQ ID NO: 23 - DNA, 33 bp, artificial
  synthetic sequence
tataggtaccctcgaaaccctaatctcttcttg

SEQ ID NO: 24 - DNA, 34 bp, artificial
  synthetic sequence
tataccatggtacaagggacagtaaatcgacaag

SEQ ID NO: 25 - DNA, 34 bp, artificial
  synthetic sequence
tttttggtaccttagatctcgtgccgtcgtgcga

SEQ ID NO: 26 - DNA, 31 bp, artificial
  synthetic sequence
tttttccatggtttgatcaagcctgttcaca

SEQ ID NO: 27 - DNA, 37 bp, artificial
  synthetic sequence
tttttggtacctttctctcgttctcatctttctctct

SEQ ID NO: 28 - DNA, 36 bp, artificial
  synthetic sequence
taatagatatctttgtcaaacttttgattgtcacct

SEQ ID NO: 29 - DNA, 34 bp, artificial
  synthetic sequence
aaaaaggtacctcatcagatcttcaaaaccccaa

SEQ ID NO: 30 - DNA, 38 bp, artificial
  synthetic sequence
aaaaaccatggtgatttgagggtagtactaaccgggaa

SEQ ID NO: 31 - DNA, 34 bp, artificial
  synthetic sequence
tatatggtaccaaatcgttctttcaaatctctca

SEQ ID NO: 32 - DNA, 35 bp, artificial
  synthetic sequence
ttataccatggtctgtaattcacaaaaaactgaga

SEQ ID NO: 33 - DNA, 36 bp, artificial
  synthetic sequence
aataatggtacctggtgcttaaacactctggtgagt

SEQ ID NO: 34 - DNA, 38 bp, artificial
  synthetic sequence
aataatccatggtttgacctacaaaatcaaagcagtca

SEQ ID NO: 35 - DNA, 34 bp, artificial
  synthetic sequence
ttttttggtaccagttctttgctttcgaagttgc

SEQ ID NO: 36 - DNA, 35 bp, artificial
  synthetic sequence
ttttttccatggtactacgtactgttttcaattct

SEQ ID NO: 37 - DNA, 32 bp, artificial
  synthetic sequence
tatataggtaccagggtttcgtttttgtttca

SEQ ID NO: 38 - DNA, 35 bp, artificial
  synthetic sequence
tatataccatggttatctcctgctcaaagaaacca

SEQ ID NO: 39 - DNA, 33 bp, artificial
  synthetic sequence
tatataggtaccactgtttaagcttcactgtct

SEQ ID NO: 40 - DNA, 32 bp, artificial
  synthetic sequence
tatataccatggtttcttctaaagctgaaagt

SEQ ID NO: 41 - DNA, 32 bp, artificial
  synthetic sequence
ttttttggtacctttcacgatttggaatttga

SEQ ID NO: 42 - DNA, 36 bp, artificial
  synthetic sequence
ttttttccatggtctacaacattaaaacgaccatta

SEQ ID NO: 43 - DNA, 33 bp, artificial
  synthetic sequence
aataaaggtaccgtccagaattttctccattga

SEQ ID NO: 44 - DNA, 34 bp, artificial
  synthetic sequence
aataaaccatggtcttcactatccaaagctctca

SEQ ID NO: 45 - DNA, 37 bp, artificial
  synthetic sequence
ttttatggtacctagcttaatctcagattcgaatcgt

SEQ ID NO: 46 - DNA, 40 bp, artificial
  synthetic sequence
ttttatccatggtagtatctacataccaatcatacaaatg

SEQ ID NO: 47 - DNA, 36 bp, artificial
  synthetic sequence
tttatggtaccagccgcaagactcctttcagattct

SEQ ID NO: 48 - DNA, 39 bp, artificial
  synthetic sequence
aaattccatggtagctgtcaaaacaaaaacaaaaatcga

SEQ ID NO: 49 - DNA, 36 bp, artificial
  synthetic sequence
tttttggcgcgccttagatctcgtgccgtcgtgcga

SEQ ID NO: 50 - DNA, 33 bp, artificial
  synthetic sequence
tttttggcgcgcctttgatcaagcctgttcaca

SEQ ID NO: 51 - DNA, 39 bp, artificial
  synthetic sequence
tttttggcgcgcctttctctcgttctcatctttctctct

SEQ ID NO: 52 - DNA, 38 bp, artificial
  synthetic sequence
taataggcgcgcctttgtcaaacttttgattgtcacct

SEQ ID NO: 53 - DNA, 36 bp, artificial
  synthetic sequence
aaaaaggcgcgcctcatcagatcttcaaaaccccaa

SEQ ID NO: 54 - DNA, 40 bp, artificial
  synthetic sequence
aaaaaggcgcgcctgatttgagggtagtactaaccgggaa

SEQ ID NO: 55 - DNA, 36 bp, artificial
  synthetic sequence
tatatggcgcgccaaatcgttctttcaaatctctca

SEQ ID NO: 56 - DNA, 37 bp, artificial
  synthetic sequence
ttataggcgcgcctctgtaattcacaaaaaactgaga

SEQ ID NO: 57 - DNA, 38 bp, artificial
  synthetic sequence
aataatggcgcgcctggtgcttaaacactctggtgagt

SEQ ID NO: 58 - DNA, 40 bp, artificial
  synthetic sequence
aataatggcgcgcctttgacctacaaaatcaaagcagtca

SEQ ID NO: 59 - DNA, 36 bp, artificial
  synthetic sequence
ttttttggcgcgccagttctttgctttcgaagttgc

SEQ ID NO: 60 - DNA, 37 bp, artificial
  synthetic sequence
ttttttggcgcgcctactacgtactgttttcaattct

SEQ ID NO: 61 - DNA, 34 bp, artificial
  synthetic sequence
tatataggcgcgccagggtttcgtttttgtttca

SEQ ID NO: 62 - DNA, 37 bp, artificial
  synthetic sequence
tatataggcgcgccttatctcctgctcaaagaaacca

SEQ ID NO: 63 - DNA, 35 bp, artificial
  synthetic sequence
tatataggcgcgccactgtttaagcttcactgtct

SEQ ID NO: 64 - DNA, 34 bp, artificial
  synthetic sequence
tatataggcgcgcctttcttctaaagctgaaagt

SEQ ID NO: 65 - DNA, 34 bp, artificial
  synthetic sequence
ttttttggcgcgcctttcacgatttggaatttga

SEQ ID NO: 66 - DNA, 38 bp, artificial
  synthetic sequence
ttttttggcgcgcctctacaacattaaaacgaccatta

SEQ ID NO: 67 - DNA, 35 bp, artificial
  synthetic sequence
aataaaggcgcgccgtccagaattttctccattga

SEQ ID NO: 68 - DNA, 36 bp, artificial
  synthetic sequence
aataaaggcgcgcctcttcactatccaaagctctca

SEQ ID NO: 69 - DNA, 39 bp, artificial
  synthetic sequence
ttttatggcgcgcctagcttaatctcagattcgaatcgt

SEQ ID NO: 70 - DNA, 42 bp, artificial
  synthetic sequence
ttttatggcgcgcctagtatctacataccaatcatacaaatg

SEQ ID NO: 71 - DNA, 36 bp, artificial
  synthetic sequence
ttttttggcgcgccttaagaaatcctctcttctcct

SEQ ID NO: 72 - DNA, 35 bp, artificial
  synthetic sequence
ttttttggcgcgccctgcacatacataacatatca

SEQ ID NO: 73 - DNA, 51 bp, artificial
  synthetic sequence
ggggacaactttgtatagaaaagttgtcgagaccagatgttttacacttga

SEQ ID NO: 74 - DNA, 51 bp, artificial
  synthetic sequence
ggggactgcttttttgtacaaacttggacactcagagacttgagagaagca

SEQ ID NO: 75 - DNA, 49 bp, artificial
  synthetic sequence
ggggacaactttgtatagaaaagttggccacatcatgtttagacttatc

SEQ ID NO: 76 - DNA, 50 bp, artificial
  synthetic sequence
ggggactgcttttttgtacaaacttgtttaccttttatatttatatatag

SEQ ID NO: 77 - DNA, 33 bp, artificial
  synthetic sequence
aaaaaggtaccatgacttcgaaagtttatgatc

SEQ ID NO: 78 - DNA, 34 bp, artificial
  synthetic sequence
aaattgagctcttattgttcatttttgagaactc

SEQ ID NO: 79 - DNA, 13806 bp, artificial
  vector sequence
ctatacaaagttgatagcttggcgtaatcgatgtaccgatatcaatttaaattggccggccgagctccctgcagggggcccggcgcgcctctagattaattaaaggccttagttactaatcagtgatcagattgtcgtttcccgccttcagtttaaactatcagtgtttgacaggatatattggcgggtaaacctaagagaaaagagcgtttattagaataatcggatatttaaaagggcgtgaaaaggtttatccgttcgtccatttgtatgtcaatatccatgataagtcgcgctgtatgtgtttgtttgaatattcatggaacgcagtggcggttttcatggcttgttatgactgtttttttggggtacagtctatgcctcgggcatccaagcagcaagcgcgttacgccgtgggtcgatgtttgatgttatggagcagcaacgatgttacgcagcagggcagtcgccctaaaacaaagttaaacatcatgggtgaagcggtcatcgccgaggtgtccacccagctgtcggaagtcgtgggtgtcatcgagcgccacctcgaaccgaccctcctcgccgtgcatctgtatggtagcgccgttgacggcggccttaagccccattcggacatcgacctgcttgtcaccgttaccgtccgtctcgacgagaccacgcgccgcgcgcttatcaacgaccttctggaaacgtccgcctcccccggcgagagcgaaatcctgcgcgcggttgaggtgacgattgtggtgcacgatgacatcatcccctggcgctatccggccaaacgcgaactccagttcggcgaatggcagcgtaatgatattctggcgggtatctttgaaccggccaccatcgacattgatctggcgatcctgctcaccaaggcccgggagcatagcgtggccctcgtcggccccgcggccgaggaacttttcgacccggtgccggaacaggatctgttcgaagcactgaacgagacgctgaccctgtggaactccccgccggattgggcgggcgatgagcgcaatgtggtccttacgctgagccggatttggtactcggcggttaccggcaagatcgcgccgaaggatgtcgccgccgactgggcgatggagcgccttccggcgcaataccagcccgtgatcctcgaagcgcgccaagcctatctgggccaagaagaagaccgtctcgcgtcccgggccgaccagctcgaagaatttgtccactatgtcaagggcgagatcacgaaggtcgttggcaaataatgtctagctagaaattcgttcaagccgacgccgcttcgcggcgcggcttaactcaagcgttagatgcactaagcacataattgctcacagccaaactatcgatgagttgaaggaccccgtagaaaagatcaaaggatcttcttgagatcctttttttctgcgcgtaatctgctgcttgcaaacaaaaaaaccaccgctaccagcggtggtttgtttgccggatcaagagctaccaactctttttccgaaggtaactggcttcagcagagcgcagataccaaatactgtccttctagtgtagccgtagttaggccaccacttcaagaactctgtagcaccgcctacatacctcgctctgctaatcctgttaccagtggctgctgccagtggcgataagtcgtgtcttaccgggttggactcaagacgatagttaccggataaggcgcagcggtcgggctgaacggggggttcgtgcacacagcccagcttggagcgaacgacctacaccgaactgagatacctacagcgtgagctatgagaaagcgccacgcttcccgaagggagaaaggcggacaggtatccggtaagcggcagggtcggaacaggagagcgcacgagggagcttccagggggaaacgcctggtatctttatagtcctgtcgggtttcgccacctctgacttgagcgtcgatttttgtgatgctcgtcaggggggcggagcctatggaaaaacgccagcaacgcggcctttttacggttcctggccttttgctggccttttgctcacatgttctttcctgcgttatcccctgattctgtggataaccgtattaccgcctttgagtgagctgataccgctcgccgcagccgaacgaccgagcgcagcgagtcagtgagcgaggaagcggaagagcgcctgatgcggtattttctccttacgcatctgtgcggtatttcacaccgcataggccgcgataggccgacgcgaagcggcggggcgtagggagcgcagcgaccgaagggtaggcgctttttgcagctcttcggctgtgcgctggccagacagttatgcacaggccaggcgggttttaagagttttaataagttttaaagagttttaggcggaaaaatcgccttttttctcttttatatcagtcacttacatgtgtgaccggttcccaatgtacggctttgggttcccaatgtacgggttccggttcccaatgtacggctttgggttcccaatgtacgtgctatccacaggaaagagaccttttcgacctttttcccctgctagggcaatttgccctagcatctgctccgtacattaggaaccggcggatgcttcgccctcgatcaggttgcggtagcgcatgactaggatcgggccagcctgccccgcctcctccttcaaatcgtactccggcaggtcatttgacccgatcagcttgcgcacggtgaaacagaacttcttgaactctccggcgctgccactgcgttcgtagatcgtcttgaacaaccatctggcttctgccttgcctgcggcgcggcgtgccaggcggtagagaaaacggccgatgccggggtcgatcaaaaagtaatcggggtgaaccgtcagcacgtccgggttcttgccttctgtgatctcgcggtacatccaatcagcaagctcgatctcgatgtactccggccgcccggtttcgctctttacgatcttgtagcggctaatcaaggcttcaccctcggataccgtcaccaggcggccgttcttggccttcttggtacgctgcatggcaacgtgcgtggtgtttaaccgaatgcaggtttctaccaggtcgtctttctgctttccgccatcggctcgccggcagaacttgagtacgtccgcaacgtgtggacggaacacgcggccgggcttgtctcccttcccttcccggtatcggttcatggattcggttagatgggaaaccgccatcagtaccaggtcgtaatcccacacactggccatgccggcggggcctgcggaaacctctacgtgcccgtctggaagctcgtagcggatcacctcgccagctcgtcggtcacgcttcgacagacggaaaacggccacgtccatgatgctgcgactatcgcgggtgcccacgtcatagagcatcggaacgaaaaaatctggttgctcgtcgcccttgggcggcttcctaatcgacggcgcaccggctgccggcggttgccgggattctttgcggattcgatcagcggccccttgccacgattcaccggggcgtgcttctgcctcgatgcgttgccgctgggcggcctgcgcggccttcaacttctccaccaggtcatcacccagcgccgcgccgatttgtaccgggccggatggtttgcgaccgctcacgccgattcctcgggcttgggggttccagtgccattgcagggccggcagacaacccagccgcttacgcctggccaaccgcccgttcctccacacatggggcattccacggcgtcggtgcctggttgttcttgattttccatgccgcctcctttagccgctaaaattcatctactcatttattcatttgctcatttactctggtagctgcgcgatgtattcagatagcagctcggtaatggtcttgccttggcgtaccgcgtacatcttcagcttggtgtgatcctccgccggcaactgaaagttgacccgcttcatggctggcgtgtctgccaggctggccaacgttgcagccttgctgctgcgtgcgctcggacggccggcacttagcgtgtttgtgcttttgctcattttctctttacctcattaactcaaatgagttttgatttaatttcagcggccagcgcctggacctcgcgggcagcgtcgccctcgggttctgattcaagaacggttgtgccggcggcggcagtgcctgggtagctcacgcgctgcgtgatacgggactcaagaatgggcagctcgtacccggccagcgcctcggcaacctcaccgccgatgcgcgtgcctttgatcgcccgcgacacgacaaaggccgcttgtagccttccatccgtgacctcaatgcgctgcttaaccagctccaccaggtcggcggtggcccaaatgtcgtaagggcttggctgcaccggaatcagcacgaagtcggctgccttgatcgcggacacagccaagtccgccgcctggggcgctccgtcgatcactacgaagtcgcgccggccgatggccttcacgtcgcggtcaatcgtcgggcggtcgatgccgacaacggttagcggttgatcttcccgcacggccgcccaatcgcgggcactgccctggggatcggaatcgactaacagaacatcggccccggcgagttgcagggcgcgggctagatgggttgcgatggtcgtcttgcctgacccgcctttctggttaagtacagcgataaccttcatgcgttccccttgcgtatttgtttatttactcatcgcatcatatacgcagcgaccgcatgacgcaagctgttttactcaaatacacatcacctttttagatgatcagtgattttgtgccgagctgccggtcggggagctgttggctggctggtggcaggatatattgtggtgtaaacaaattgacgcttagacaacttaataacacattgcggacgtctttaatgtactgaatttagttactgatcactgattaagtctagatattgtttttgtttcacataaatgtcgttttggattattcatgtaatattttaaactaaagtacaatttttgactactttagtttactagttaagcttttatttttttgactaaccattgaatgatgaagagatcaacgcatcatatttacaacttacatagtcttttggaagtgtaaattgctaatactacctaaaatatatctataattaactaatattttttcgtcaattataatagatcaattaaaaggctatcaaaaggaaaaaaatgaaatccacatcctgccatcataacctcatgctggaaaaagaaatgaaaaaatataaaaaatttcttttgtttattaaatttacaactttaatactagtttcttttctattttttaaaagcttttgtcacttacttaaaaaaaaaaaactttttgaaatattcctacttccaatgtctgattagtgcttctggatttcctttttggatcatgtgaatcctaaatcagaaaaattcatataatacccaattcagtatattttcatacttcaatttacaagagttctctatgtttttagcttctttcttttaagccaaatgttttaagcatcttttatacattaaaataatttagtgttgagttgagattttttttttttttttttggatttacttgttcaaaatctgaaaaaatgtttacagaaggttaaaatgaaccaaaaggcatatcaagctagattttgaattaccctatttcatcgtatacacaaaactgataatgtggacacagttgattttacttctcgatgacatcgtagttttatttaatttggaaaccacggcccatatgagcacatttcaattaaaaaccaatggtaagagcattttccatgcaagattcgagagatattaacccagtgactgttaaaacagcttagaaccctaataacgaatttcaattactcaatttaccattcgcatttcgcaataaccaaactgagccagtcacaaggagtaaaccgaaccggattatttatttataaaatgaaagaaaggaaaccaaacaacaacagcagtagtagtctgacgtaaaccaaaaagcaggcagatcaacaactaaaagaaactcaaattaccaaaacaaacaggaaattgcaaactaagtttttttaccatatgcatacaaagaccataaaaggttctgataatcaccggtttcatctctcagtatttaatccggccatctccttccgttatgacatcgttgaaagtgccaccattcgggatcatcggcaacacatgttcttggtgcggacaaatcacatccaacaggtaaggtcctggtgtatccagcattgtctgaatagcttctcggagatctgctttctttgtcaccctcgccgctggaatcccgcaagctgctgcaaacagcaacatgttcgggaatatctcgtcctcctgagccggatccccgagaaatgtgtgagctcggttagctttgtagaaccgatcttcccattgcataaccatgccaagatgctggttgtttaataaaagtaccttcactggaagattctctacacgaatagtggctagctcttgcacattcattataaagcttccatctccgtcaatatccacaactatcgcatcagggttagcaacagacgctccaatcgcagcaggaagtccaaatcccatagctccaaggcctcctgatgatagccactgccttggtttcttgtaattgtagaactgcgccgcccacatttgatgttgcccgacaccagtacttattatggcttttccatcagtcaactcatcaaggaccttaatcgcatactgtggaggaatagcttccccaaacgtcttaaagctcaacggaaacttctgtttctgtacgttcaactcattcctccaaactccaaaatcaagcttaagctcctccgctcggttctcaagaaccttattcatcccttgcaaagccagcttaacatcaccacacacagacacatgaggagtcttattcttcccaatctcagccgagtcaatatcaatatgaacaatcttagccctactagcaaaagcctcaagcttacccgtgacacgatcatcaaaccttaccccaaacgccaacaacaaatcactatgctccacagcgtaatttgcatacacagtcccatgcattccaagcatatgtaacgacaactcatcatcacaaggataagatcccagccccatcaacgtactcgcaacagggatccccgtaagctcaacaaacctacccaattcatcgctagaattcaaacaaccaccaccaacatacaacacaggcttcttagactcagaaatcaacctaacaatctgctccaaatgagaatcttccggaggtttaggcatcctagacatataaccaggtaatctcatagcctgttcccaattaggaatcgcaagctgttgttgaatatctttaggaacatcaaccaaaacaggtccaggtctaccagaagtagctaaaaagaaagcttcctcaataatcctagggatatcttcaacatccatcacaagatagttatgcttcgtaatcgaacgcgttacctcaacaatcggagtctcttgaaacgcatctgtaccaatcatacgacgagggacttgtcctgtgattgctacaagaggaacactatctaacaacgcatcggctaatccgctaacgagatttgtagctccgggacctgaagtggctatacagatacctggtttacctgaggatcgagcgtatccttctgctgcgaatacacctccttgttcgtgacgaggaaggacgttacggattgaggaagagcgggttaaggcttggtgaatctccattgatgtacctccagggtaagcgaatacggtttctacgccttgacgttctaaagcttcgacgaggatatcagcgcctttgcggggttgatctggagcgaatcgggagatgaatgtttcgggtttggtaggtttggttggagagggagtggttgtgacattggtggttgtgttgagcacggcggagatggaggagggagagctggatttgataccgcggcggcgggaggaggaggatgatttgttggggtttagggagaatgggagggagaatctggagattggtaatggtgatttggaggaggaaggagatggtttggtggagaaggagatcgaagaagatgttgttgttgttgttgttgccgccgccatggttcagctgcacatacataacatatcaagatcagaacacacatatacacacacaaatacaatcaagtcaacaactccaaaaagtccagatctacatatatacatacgtaaataacaaaatcatgtaaataatcacaatcatgtaatccagatctatgcacatatatatatacacaattaataaaaaaaatgatataacagatctatatctatgtatgtaacaacacaatcagatgagagaagtgatgttttcagatctgtatacatacaaacacaaacagatgaacaattgatacgtagatccatatgtatacgtacaattagctacacgattaaatgaaaaaaatcaacgatttcggattggtacacacaaacgcaacaatatgaagaaattcatatctgattagatataaacataaccacgtgtagatacacagtcaaatcaacaaatttatagcttctaaacggatgagatgaacaagataaagatattcacataaggcatacataagataagcagattaacaaactagcaataatacatacctaattaaaacaaggaataacagagagagagagagagagagagatttaccttgaaaatgaagaggagaagagaggatttcttaaaattgggggtagagaaagaaagatgatgaattgtgagaaaggagagatagaagggggggttgtatatataggctgtagaagattatttttgtgtttgaggcggtgaaggaagaggggatctgactatgacacgtttgcggttacgtatttcgataggagtctttcaacgcttaacgccgttactctatatgaccgtttgggccgtaacggggccgtttgttaacgctgatgttgattcttttctttctttctttcttccttttttaaagaagcaattgtacaatcgttgctagctgtcaaacggataattcggatacggatatgcctatattcatatccgtaatttttggattcgaattgactgcgatcgccaattgacgcgtactagtgtacaagcttgcggccgcgaattcggtacatccggccagtgaattatcaactatgtataataaagttgccatgattacgccaagcttgcatgcccatatgctcgaggcggccgcagatatcagatctggtcgacctagaggatccccgggtaccccactttgtacaagaaagctgggtccatgattacgccaagcttgaattcccgatctagtaacatagatgacaccgcgcgcgataatttatcctagtttgcgcgctatattttgttttctatcgcgtattaaatgtataattgcgggactctaatcataaaaacccatctcataaataacgtcatgcattacatgttaattattacatgcttaacgtaattcaacagaaattatatgataatcatcgcaagaccggcaacaggattcaatcttaagaaactttattgccaaatgtttgaacgatcggggaaattcgagcccatatgctcgagttacacggcgatctttccgcccttcttggcctttatgaggatctctctgatttttcttgcgtcgagttttccggtaagacctttcggtacttcgtccacaaacacaactcctccgcgcaactttttcgcggttgttacttgactggcgacgtaatccacgatctctttttccgtcatcgtctttccgtgctccaaaacaacaacggcggcgggaagttcaccggcgtcatcgtcgggaagacctgcgacacctgcgtcgaagatgttggggtgttggagcaagatggattccaattcagcgggagccacctgatagcctttgtacttaatcagagacttcaggcggtcaacgatgaagaagtgttcgtcttcgtcccagtaagctatgtctccagaatgtagccatccatccttgtcaatcaaggcgttggtcgcttccggattgtttacataaccggacataatcataggacctctcacacacagttcgcctctttgattaacgcccagcgttttcccggtatccagatccacaaccttcgcttcaaaaaatggaacaactttaccgaccgcgcccggtttatcatccccctcgggtgtaatcagaatagctgatgtagtctcagtgagcccatatccttgcctgatacctggcagatggaacctcttggcaaccgcttccccgacttccttagagaggggagcgccaccagaagcaatttcgtgtaaattagataaatcgtatttgtcaatcagagtgcttttggcgaagaaggagaatagggttggcaccagcagcgcactttgaatcttgtaatcctgaaggctcctcagaaacagctcttcttcaaatctatacattaagacgactcgaaatccacatatcaaatatccgagtgtagtaaacattccaaaaccgtgatggaatggaacaacacttaaaatcgcagtatccggaatgatttgattgccaaaaataggatctctggcatgcgagaatctcacgcaggcagttctatgaggcagagcgacacctttaggcagaccagtagatccagaggagttcatgatcagtgcaattgtcttgtccctatcgaaggactctggcacaaaatcgtattcattaaaaccgggaggtagatgagatgtgacgaacgtgtacatcgactgaaatccctggtaatccgttttagaatccatgataataattttttggatgattgggagctttttttgcacgttcaaaattttttgcaacccctttttggaaacgaacaccacggtaggctgcgaaatgcccatactgttgagcaattcacgttcattataaatgtcgttcgcgggcgcaactgcaactccgataaataacgcgcccaacaccggcataaagaattgaagagagttttcactgcatacgacgattctgtgatttgtattcagcccatatcgtttcatagcttctgccaaccgaacggacatttcgaagtactcagcgtaagtgatgtccacctcgatatgtgcatctgtaaaagcaattgttccaggaaccagggcgtatctcttcatagccttatgcagttgctctccagcggttccatcttccagcggatagaatggcgccgggcctttctttatgtttttggcgtcttccatggaccctaaaccttagtctatgcttcttctgcagaagatggtaaaaaaacaatcttgaacaaaataagtagagctaaacttagatgtaagacatgcattagagactttactaataagtaatgaaaaaatcaacatgagtggatctactattctaaatctatgtataagattcagacaaaggagttgcacgaaagggaccaatgcactagtggagttgattcaaattcaaattgattctagctttcaacaatataagaaccgagtaatcaaagcaacgcacccattattcgaagagatttaaaattcgatcacaacccaaatgggtcaaatacgagttaaattctaaaaaccctaaccatcaaaacaaactgtcaagaataaaataaagaaatggccgataactatttccacaacaaacaacacgacgagaagaaaaaaaaaaaaaaaatcaaagtaactggggatgaagataacctaagcttagacgaaaatgcccgggtaccagcctgcttttttgtacaaacttgactcgagtctttgttttttactttggttcatgacactcagagacttgagagaagcaatatatagacttttttttgttttttttttgtggtcacgtttattttcctattggagacggtaacgaagatcgaacctgtggtggaaatgaaacaaggtgggactagcccacgtggtttcttttctctgcattgatttgtttttgttttttttgtaaagttcacatcaaacctactaataattgagaagaaaaataaaatctattgattgattaaaccagccgatgctttatgtctgaatataaaaaagaagtgaaaaccccgtttaagaattacaacggtggtttacaaagtatttggacacaataaatccaaacgaaataaaacaaaatggagaactaccaaataaaaaacaaataaaaaacttaaaagaatttattccattttttttcccgtagaatttattcttttatggattccttaaatccatatttgatgcattttgattcctcataataggtaataatatatactatgttatagatatgtttctaattcgtattaacctacctttttttggtcgtacgattctacctaataatattgaacggaattgatgttttggaccacttagaaagtattttttttttggtttgtcttagctgtatttcattaaatataaatttaaataagaaatgtcataaataaaatttgacgtatagattttttaaatccattttatgttatttaatatttgaaatgtgagtttggctcctatttaatcttaggatgggttaatactaagttttccttaatgaattatctcagagaaactggattaaataaactaaaaaatagatcaatgtgttttggtccggtcaaatatctttggatttactattattggcgaaaagaaagtctcatatagtaaatcatattcctacaagagaaatcaaaatttttgaattaacatggattgtatagtttcttatataaccaattagttcgcatcaagaaaaccaaaccccaattaataatcaaacgggcttggtaggaatatttcattgcagctttcagataaaagaaaaaaacacacactcaagtcttttatttcatctttcttacttgcaggaactcaaattccactttgccacttttctttacaaataaacacaaattgtcaatgaaacgaaatagtctttttatgcaaacactgtttgtcttttttcgatcacgtttctgattgtgacagccatccatatatatagggaatgtaaaacaacaacatgtgaagtcacatatacgtaatggtttagcatagcttctattttcgttgtcaatattagtcattccaaaacatttttaagaaaaataaattaatatatgtatattcttggaactaatgtatgtggaaatacagtaacttaattattaaacattctaaatgcaaatatgcaaagaaaaaaaagaaaagaacacaactgaaatcaaagccagattcataataattggctacatggttgtagaatgtagggtaacacaacatccagaattgaacactcaaattggatgatagatggataatctttagatacaagagaattggttctcttccattattaacgaaaataaagaaaaaaagtttagcataaaagtttgaaactcaacataacattttgaacttgactccttcataggagtgacatgaactgacgaatcacaaccgattacttgtttgagtcatcttccgctttctccaccttcgaaatgaatgtgaccggtttcttcgggtgctcatttacggtcaagtgtaaaacatctggtctcgagtaatgtccaaccgaatcgaagtacaacttagctcttgctacatcaccaagatcttgatgcaactttt

SEQ ID NO: 80 - DNA, 14901 bp, artificial
  vector sequence
gacatacaaatggacgaacggataaaccttttcacgcccttttaaatatccgattattctaataaacgctcttttctcttaggtttacccgccaatatatcctgtcaaacactgatagtttaaactgaaggcgggaaacgacaatcagatctagtaggaaacagctatgaccatgattacgccaagctatcgattacgccaagctatcaactttgtatagaaaagttggccacatcatgtttagacttatctccataaagaaaaccactcatcaaagctaatacaaaagctctagtgtgacacttcaacgtcacttcatcaggatcagcaggtaaattccgaaaattctcacgcagccacgctaaggacacatgagaaccatgaagatccttgggacctggcctatgaccaagcaaatcctcacataaatcagcccagttgtattttgtactaccagttactgcaggtccatcgacacgtagacccaacaaaatattcacatcttgtaaagtcacagtgatctctccagcaggaagatgaaaagtatgcgtttcgggtctccatctctccaccaaagctgttatcagagcataatcaagttgtataaaggcaaccttgtaaactccatatagaccaaactctatcaacttttgacacacgagaggatccagaggccaatctcgcatccccaataacttgtgccgacatgtcagttcacgaggaggaacctgaatgtgaagtataacggtaaaaaggaaataattaaaacaacggaagcaaaacaagaaacaagatgaaatgagaaactagtaacacacctcatcttcccatatagcagctgatctatgctcatgttgccacaccaatatagattgatcaactggaccaggatccaaatcaaagtttaatagactttgcacctccatctatataatatatcacaggacaataaacacaatgatcagtgattatacaacatcaaagaaaacttgtaattctgggaatataactgagaaatgagaattaaagattcataatttgaacacaagaaatcctaaactggtacgaaagaaaaattgctcaacaaaaaaatcaagctaattactcgtatacaaagacacgaagaactaatacaagaaacaagaaacaacaaaccacaaagagattgaaccaatccaaattcgacaacataaaccaagtgtgtgggtgattggaatcagaggacgtaccaaagaaaagcgtccgtgatcaacaaaaaccaaaaagagacgtttgaaataaaccagaggaagacgaagaataattaagcaaagagaagcgttaagcgggagcgagaaaggaaacgagagaaagagagagcttccagatccgacagaagttttcggcttcttctttttcgtttaagaacttctgatcctcctaggtctgtccgaagaactaatctttttgaggtaacgacgccgtttttctcaaaacatgggcccattaaccatagtctcggcccaaacgaaacttaatacgacaatgtttgggtgtaaacgcaaagattttgtcgattatcacaagtaaaaaaataaatacaaacacttgagtctctctagacatcgtgcatcgccttagctttaagttttttctcgaaacaaaagagttattttatttgaactttgaagattatacgaagacacgtggcgtgaacccaattcataacaacgccacgctatactcttttgcatgcacctcaatttgaacatcatcaagtctctctctctttttctgactttgatccacgaacctaaccagcttgcgatctctatttaatcggtcctcgacgcaacttcaacttctactacatccattcacatcaaatcaatacagaaagttttttctatatataaatataaaaggtaaacaagtttgtacaaaaaagcaggctggtacctggtgcttaaacactctggtgagttctagtacttctgctatgatcgatctcattaccatttcttaaatttctctccctaaatattccgagttcttgatttttgataacttcaggttttctctttttgataaatctggtctttccatttttttttttttgtggttaatttagtttcctatgttcttcgattgtattatgcatgatctgtgtttggattctgttagattatgtattggtgaatatgtatgtgtttttgcatgtctggttttggtcttaaaaatgttcaaatctgatgatttgattgaagcttttttagtgttggtttgattcttctcaaaactactgttaatttactatcatgttttccaactttgattcatgatgacacttttgttctgctttgttataaaattttggttggtttgattttgtaattatagtgtaattttgttaggaatgaacatgttttaatactctgttttcgatttgtcacacattcgaattattaatcgataatttaactgaaaattcatggttctagatcttgttgtcatcagattatttgtttcgataattcatcaaatatgtagtccttttgctgatttgcgactgtttcattttttctcaaaattgttttttgttaagtttatctaacagttatcgttgtcaaaagtctctttcattttgcaaaatcttctttttttttttgtttgtaactttgttttttaagctacacatttagtctgtaaaatagcatcgaggaacagttgtcttagtagacttgcatgttcttgtaacttctatttgtttcagtttgttgatgactgctttgattttgtaggtcaaaccatggaagacgccaaaaacataaagaaaggcccggcgccattctatccgctggaagatggaaccgctggagagcaactgcataaggctatgaagagatacgccctggttcctggaacaattgcttttacagatgcacatatcgaggtggacatcacttacgctgagtacttcgaaatgtccgttcggttggcagaagctatgaaacgatatgggctgaatacaaatcacagaatcgtcgtatgcagtgaaaactctcttcaattctttatgccggtgttgggcgcgttatttatcggagttgcagttgcgcccgcgaacgacatttataatgaacgtgaattgctcaacagtatgggcatttcgcagcctaccgtggtgttcgtttccaaaaaggggttgcaaaaaattttgaacgtgcaaaaaaagctcccaatcatccaaaaaattattatcatggattctaaaacggattaccagggatttcagtcgatgtacacgttcgtcacatctcatctacctcccggttttaatgaatacgattttgtgccagagtccttcgatagggacaagacaattgcactgatcatgaactcctctggatctactggtctgcctaaaggtgtcgctctgcctcatagaactgcctgcgtgagattctcgcatgccagagatcctatttttggcaatcaaatcattccggatactgcgattttaagtgttgttccattccatcacggttttggaatgtttactacactcggatatttgatatgtggatttcgagtcgtcttaatgtatagatttgaagaagagctgtttctgaggagccttcaggattacaagattcaaagtgcgctgctggtgccaaccctattctccttcttcgccaaaagcactctgattgacaaatacgatttatctaatttacacgaaattgcttctggtggcgctcccctctctaaggaagtcggggaagcggttgccaagaggttccatctgccaggtatcaggcaaggatatgggctcactgagactacatcagctattctgattacacccgagggggatgataaaccgggcgcggtcggtaaagttgttccattttttgaagcgaaggttgtggatctggataccgggaaaacgctgggcgttaatcaaagaggcgaactgtgtgtgagaggtcctatgattatgtccggttatgtaaacaatccggaagcgaccaacgccttgattgacaaggatggatggctacattctggagacatagcttactgggacgaagacgaacacttcttcatcgttgaccgcctgaagtctctgattaagtacaaaggctatcaggtggctcccgctgaattggaatccatcttgctccaacaccccaacatcttcgacgcaggtgtcgcaggtcttcccgacgatgacgccggtgaacttcccgccgccgttgttgttttggagcacggaaagacgatgacggaaaaagagatcgtggattacgtcgccagtcaagtaacaaccgcgaaaaagttgcgcggaggagttgtgtttgtggacgaagtaccgaaaggtcttaccggaaaactcgacgcaagaaaaatcagagagatcctcataaaggccaagaagggcggaaagatcgccgtgtaactcgagcatatgggctcgaatttccccgatcgttcaaacatttggcaataaagtttcttaagattgaatcctgttgccggtcttgcgatgattatcatataatttctgttgaattacgttaagcatgtaataattaacatgtaatgcatgacgttatttatgagatgggtttttatgattagagtcccgcaattatacatttaatacgcgatagaaaacaaaatatagcgcgcaaactaggataaattatcgcgcgcggtgtcatctatgttactagatcgggaattcaagcttggcgtaatcatggacccagctttcttgtacaaagtggggtaccaattcgaatccaaaaattacggatatgaatataggcatatccgtatccgaattatccgtttgacagctagcaacgattgtacaattgcttctttaaaaaaggaagaaagaaagaaagaaaagaatcaacatcagcgttaacaaacggccccgttacggcccaaacggtcatatagagtaacggcgttaagcgttgaaagactcctatcgaaatacgtaaccgcaaacgtgtcatagtcagatcccctcttccttcaccgcctcaaacacaaaaataatcttctacagcctatatatacaacccccccttctatctctcctttctcacaattcatcatctttctttctctacccccaattttaagaaatcctctcttctcctcttcattttcaaggtaaatctctctctctctctctctctctgttattccttgttttaattaggtatgtattattgctagtttgttaatctgcttatcttatgtatgccttatgtgaatatctttatcttgttcatctcatccgtttagaagctataaatttgttgatttgactgtgtatctacacgtggttatgtttatatctaatcagatatgaatttcttcatattgttgcgtttgtgtgtaccaatccgaaatcgttgatttttttcatttaatcgtgtagctaattgtacgtatacatatggatctacgtatcaattgttcatctgtttgtgtttgtatgtatacagatctgaaaacatcacttctctcatctgattgtgttgttacatacatagatatagatctgttatatcattttttttattaattgtgtatatatatatgtgcatagatctggattacatgattgtgattatttacatgattttgttatttacgtatgtatatatgtagatctggactttttggagttgttgacttgattgtatttgtgtgtgtatatgtgtgttctgatcttgatatgttatgtatgtgcagctgaaccatggcggcggcaacaacaacaacaacaacatcttcttcgatctccttctccaccaaaccatctccttcctcctccaaatcaccattaccaatctccagattctccctcccattctccctaaaccccaacaaatcatcctcctcctcccgccgccgcggtatcaaatccagctctccctcctccatctccgccgtgctcaacacaaccaccaatgtcacaaccactccctctccaaccaaacctaccaaacccgaaacattcatctcccgattcgctccagatcaaccccgcaaaggcgctgatatcctcgtcgaagctttagaacgtcaaggcgtagaaaccgtattcgcttaccctggaggtacatcaatggagattcaccaagccttaacccgctcttcctcaatccgtaacgtccttcctcgtcacgaacaaggaggtgtattcgcagcagaaggatacgctcgatcctcaggtaaaccaggtatctgtatagccacttcaggtcccggagctacaaatctcgttagcggattagccgatgcgttgttagatagtgttcctcttgtagcaatcacaggacaagtccctcgtcgtatgattggtacagatgcgtttcaagagactccgattgttgaggtaacgcgttcgattacgaagcataactatcttgtgatggatgttgaagatatccctaggattattgaggaagctttctttttagctacttctggtagacctggacctgttttggttgatgttcctaaagatattcaacaacagcttgcgattcctaattgggaacaggctatgagattacctggttatatgtctaggatgcctaaacctccggaagattctcatttggagcagattgttaggttgatttctgagtctaagaagcctgtgttgtatgttggtggtggttgtttgaattctagcgatgaattgggtaggtttgttgagcttacggggatccctgttgcgagtacgttgatggggctgggatcttatccttgtgatgatgagttgtcgttacatatgcttggaatgcatgggactgtgtatgcaaattacgctgtggagcatagtgatttgttgttggcgtttggggtaaggtttgatgatcgtgtcacgggtaagcttgaggcttttgctagtagggctaagattgttcatattgatattgactcggctgagattgggaagaataagactcctcatgtgtctgtgtgtggtgatgttaagctggctttgcaagggatgaataaggttcttgagaaccgagcggaggagcttaagcttgattttggagtttggaggaatgagttgaacgtacagaaacagaagtttccgttgagctttaagacgtttggggaagctattcctccacagtatgcgattaaggtccttgatgagttgactgatggaaaagccataataagtactggtgtcgggcaacatcaaatgtgggcggcgcagttctacaattacaagaaaccaaggcagtggctatcatcaggaggccttggagctatgggatttggacttcctgctgcgattggagcgtctgttgctaaccctgatgcgatagttgtggatattgacggagatggaagctttataatgaatgtgcaagagctagccactattcgtgtagagaatcttccagtgaaggtacttttattaaacaaccagcatcttggcatggttatgcaatgggaagatcggttctacaaagctaaccgagctcacacatttctcggggatccggctcaggaggacgagatattcccgaacatgttgctgtttgcagcagcttgcgggattccagcggcgagggtgacaaagaaagcagatctccgagaagctattcagacaatgctggatacaccaggaccttacctgttggatgtgatttgtccgcaccaagaacatgtgttgccgatgatcccgaatggtggcactttcaacgatgtcataacggaaggagatggccggattaaatactgagagatgaaaccggtgattatcagaaccttttatggtctttgtatgcatatggtaaaaaaacttagtttgcaatttcctgtttgttttggtaatttgagtttcttttagttgttgatctgcctgctttttggtttacgtcagactactactgctgttgttgtttggtttcctttctttcattttataaataaataatccggttcggtttactccttgtgactggctcagtttggttattgcgaaatgcgaatggtaaattgagtaattgaaattcgttattagggttctaagctgttttaacagtcactgggttaatatctctcgaatcttgcatggaaaatgctcttaccattggtttttaattgaaatgtgctcatatgggccgtggtttccaaattaaataaaactacgatgtcatcgagaagtaaaatcaactgtgtccacattatcagttttgtgtatacgatgaaatagggtaattcaaaatctagcttgatatgccttttggttcattttaaccttctgtaaacattttttcagattttgaacaagtaaatccaaaaaaaaaaaaaaaaaatctcaactcaacactaaattattttaatgtataaaagatgcttaaaacatttggcttaaaagaaagaagctaaaaacatagagaactcttgtaaattgaagtatgaaaatatactgaattgggtattatatgaatttttctgatttaggattcacatgatccaaaaaggaaatccagaagcactaatcagacattggaagtaggaatatttcaaaaagttttttttttttaagtaagtgacaaaagcttttaaaaaatagaaaagaaactagtattaaagttgtaaatttaataaacaaaagaaattttttatattttttcatttctttttccagcatgaggttatgatggcaggatgtggatttcatttttttccttttgatagccttttaattgatctattataattgacgaaaaaatattagttaattatagatatattttaggtagtattagcaatttacacttccaaaagactatgtaagttgtaaatatgatgcgttgatctcttcatcattcaatggttagtcaaaaaaataaaagcttaactagtaaactaaagtagtcaaaaattgtactttagtttaaaatattacatgaataatccaaaacgacatttatgtgaaacaaaaacaatatctagagtcgacttaattaaactagtggcgcgccaattgactagtaggcctatcgattaattaaggccgcctcgagcatatgggcatgcaagcttggcgtaatcatggcaactttattatacatagttgataattcactggccggatctgcttggtaataattgtcattagattgtttttatgcatagatgcactcgaaatcagccaattttagacaagtatcaaacggatgttaattcagtacattaaagacgtccgcaatgtgttattaagttgtctaagcgtcaatttgtttacaccacaatatatcctgccaccagccagccaacagctccccgaccggcagctcggcacaaaatcaccacgcgttaccaccacgccggccggccgcatggtgttgaccgtgttcgccggcattgccgagttcgagcgttccctaatcatcgaccgcacccggagcgggcgcgaggccgccaaggcccgaggcgtgaagtttggcccccgccctaccctcaccccggcacagatcgcgcacgcccgcgagctgatcgaccaggaaggccgcaccgtgaaagaggcggctgcactgcttggcgtgcatcgctcgaccctgtaccgcgcacttgagcgcagcgaggaagtgacgcccaccgaggccaggcggcgcggtgccttccgtgaggacgcattgaccgaggccgacgccctggcggccgccgagaatgaacgccaagaggaacaagcatgaaaccgcaccaggacggccaggacgaaccgtttttcattaccgaagagatcgaggcggagatgatcgcggccgggtacgtgttcgagccgcccgcgcacgtctcaaccgtgcggctgcatgaaatcctggccggtttgtctgatgccaagctggcggcctggccggccagcttggccgctgaagaaaccgagcgccgccgtctaaaaaggtgatgtgtatttgagtaaaacagcttgcgtcatgcggtcgctgcgtatatgatgcgatgagtaaataaacaaatacgcaaggggaacgcatgaaggttatcgctgtacttaaccagaaaggcgggtcaggcaagacgaccatcgcaacccatctagcccgcgccctgcaactcgccggggccgatgttctgttagtcgattccgatccccagggcagtgcccgcgattgggcggccgtgcgggaagatcaaccgctaaccgttgtcggcatcgaccgcccgacgattgaccgcgacgtgaaggccatcggccggcgcgacttcgtagtgatcgacggagcgccccaggcggcggacttggctgtgtccgcgatcaaggcagccgacttcgtgctgattccggtgcagccaagcccttacgacatatgggccaccgccgacctggtggagctggttaagcagcgcattgaggtcacggatggaaggctacaagcggcctttgtcgtgtcgcgggcgatcaaaggcacgcgcatcggcggtgaggttgccgaggcgctggccgggtacgagctgcccattcttgagtcccgtatcacgcagcgcgtgagctacccaggcactgccgccgccggcacaaccgttcttgaatcagaacccgagggcgacgctgcccgcgaggtccaggcgctggccgctgaaattaaatcaaaactcatttgagttaatgaggtaaagagaaaatgagcaaaagcacaaacacgctaagtgccggccgtccgagcgcacgcagcagcaaggctgcaacgttggccagcctggcagacacgccagccatgaagcgggtcaactttcagttgccggcggaggatcacaccaagctgaagatgtacgcggtacgccaaggcaagaccattaccgagctgctatctgaatacatcgcgcagctaccagagtaaatgagcaaatgaataaatgagtagatgaattttagcggctaaaggaggcggcatggaaaatcaagaacaaccaggcaccgacgccgtggaatgccccatgtgtggaggaacgggcggttggccaggcgtaagcggctgggttgtctgccggccctgcaatggcactggaacccccaagcccgaggaatcggcgtgagcggtcgcaaaccatccggcccggtacaaatcggcgcggcgctgggtgatgacctggtggagaagttgaaggccgcgcaggccgcccagcggcaacgcatcgaggcagaagcacgccccggtgaatcgtggcaagcggccgctgatcgaatccgcaaagaatcccggcaaccgccggcagccggtgcgccgtcgattaggaagccgcccaagggcgacgagcaaccagattttttcgttccgatgctctatgacgtgggcacccgcgatagtcgcagcatcatggacgtggccgttttccgtctgtcgaagcgtgaccgacgagctggcgaggtgatccgctacgagcttccagacgggcacgtagaggtttccgcagggccggccggcatggccagtgtgtgggattacgacctggtactgatggcggtttcccatctaaccgaatccatgaaccgataccgggaagggaagggagacaagcccggccgcgtgttccgtccacacgttgcggacgtactcaagttctgccggcgagccgatggcggaaagcagaaagacgacctggtagaaacctgcattcggttaaacaccacgcacgttgccatgcagcgtacgaagaaggccaagaacggccgcctggtgacggtatccgagggtgaagccttgattagccgctacaagatcgtaaagagcgaaaccgggcggccggagtacatcgagatcgagctagctgattggatgtaccgcgagatcacagaaggcaagaacccggacgtgctgacggttcaccccgattactttttgatcgatcccggcatcggccgttttctctaccgcctggcacgccgcgccgcaggcaaggcagaagccagatggttgttcaagacgatctacgaacgcagtggcagcgccggagagttcaagaagttctgtttcaccgtgcgcaagctgatcgggtcaaatgacctgccggagtacgatttgaaggaggaggcggggcaggctggcccgatcctagtcatgcgctaccgcaacctgatcgagggcgaagcatccgccggttcctaatgtacggagcagatgctagggcaaattgccctagcaggggaaaaaggtcgaaaaggtctctttcctgtggatagcacgtacattgggaacccaaagccgtacattgggaaccggaacccgtacattgggaacccaaagccgtacattgggaaccggtcacacatgtaagtgactgatataaaagagaaaaaaggcgatttttccgcctaaaactctttaaaacttattaaaactcttaaaacccgcctggcctgtgcataactgtctggccagcgcacagccgaagagctgcaaaaagcgcctacccttcggtcgctgcgctccctacgccccgccgcttcgcgtcggcctatcgcggccgctggccgctcaaaaatggctggcctacggccaggcaatctaccagggcgcggacaagccgcgccgtcgccactcgaccgccggcgcccacatcaaggcaccctgcctcgcgcgtttcggtgatgacggtgaaaacctctgacacatgcagctcccggagacggtcacagcttgtctgtaagcggatgccgggagcagacaagcccgtcagggcgcgtcagcgggtgttggcgggtgtcggggcgcagccatgacccagtcacgtagcgatagcggagtgtatactggcttaactatgcggcatcagagcagattgtactgagagtgcaccatatgcggtgtgaaataccgcacagatgcgtaaggagaaaataccgcatcaggcgctcttccgcttcctcgctcactgactcgctgcgctcggtcgttcggctgcggcgagcggtatcagctcactcaaaggcggtaatacggttatccacagaatcaggggataacgcaggaaagaacatgtgagcaaaaggccagcaaaaggccaggaaccgtaaaaaggccgcgttgctggcgtttttccataggctccgcccccctgacgagcatcacaaaaatcgacgctcaagtcagaggtggcgaaacccgacaggactataaagataccaggcgtttccccctggaagctccctcgtgcgctctcctgttccgaccctgccgcttaccggatacctgtccgcctttctcccttcgggaagcgtggcgctttctcatagctcacgctgtaggtatctcagttcggtgtaggtcgttcgctccaagctgggctgtgtgcacgaaccccccgttcagcccgaccgctgcgccttatccggtaactatcgtcttgagtccaacccggtaagacacgacttatcgccactggcagcagccactggtaacaggattagcagagcgaggtatgtaggcggtgctacagagttcttgaagtggtggcctaactacggctacactagaaggacagtatttggtatctgcgctctgctgaagccagttaccttcggaaaaagagttggtagctcttgatccggcaaacaaaccaccgctggtagcggtggtttttttgtttgcaagcagcagattacgcgcagaaaaaaaggatctcaagaagatcctttgatcttttctacggggtctgacgctcagtggaacgaaaactcacgttaagggattttggtcatgcatgatatatctcccaatttgtgtagggcttattatgcacgcttaaaaataataaaagcagacttgacctgatagtttggctgtgagcaattatgtgcttagtgcatctaacgcttgagttaagccgcgccgcgaagcggcgtcggcttgaacgaatttctagctagacattatttgccgactaccttggtgatctcgcctttcacgtagtggacaaattcttccaactgatctgcgcgcgaggccaagcgatcttcttcttgtccaagataagcctgtctagcttcaagtatgacgggctgatactgggccggcaggcgctccattgcccagtcggcagcgacatccttcggcgcgattttgccggttactgcgctgtaccaaatgcgggacaacgtaagcactacatttcgctcatcgccagcccagtcgggcggcgagttccatagcgttaaggtttcatttagcgcctcaaatagatcctgttcaggaaccggatcaaagagttcctccgccgctggacctaccaaggcaacgctatgttctcttgcttttgtcagcaagatagccagatcaatgtcgatcgtggctggctcgaagatacctgcaagaatgtcattgcgctgccattctccaaattgcagttcgcgcttagctggataacgccacggaatgatgtcgtcgtgcacaacaatggtgacttctacagcgcggagaatctcgctctctccaggggaagccgaagtttccaaaaggtcgttgatcaaagctcgccgcgttgtttcatcaagccttacggtcaccgtaaccagcaaatcaatatcactgtgtggcttcaggccgccatccactgcggagccgtacaaatgtacggccagcaacgtcggttcgagatggcgctcgatgacgccaactacctctgatagttgagtcgatacttcggcgatcaccgcttcccccatgatgtttaactttgttttagggcgactgccctgctgcgtaacatcgttgctgctccataacatcaaacatcgacccacggcgtaacgcgcttgctgcttggatgcccgaggcatagactgtaccccaaaaaaacagtcataacaagccatgaaaaccgccactgcgttccatg

SEQ ID NO: 81 - DNA, 14495 bp, artificial
  vector sequence
gtgattttgtgccgagctgccggtcggggagctgttggctggctggtggcaggatatattgtggtgtaaacaaattgacgcttagacaacttaataacacattgcggacgtctttaatgtactgaatttagttactgatcactgattaagtactgatatcggtaccaagcttccgcggctgcagtgcagcgtgacccggtcgtgcccctctctagagataatgagcattgcatgtctaagttataaaaaattaccacatattttttttgtcacacttgtttgaagtgcagtttatctatctttatacatatatttaaactttactctacgaataatataatctatagtactacaataatatcagtgttttagagaatcatataaatgaacagttagacatggtctaaaggacaattgagtattttgacaacaggactctacagttttatctttttagtgtgcatgtgttctcctttttttttgcaaatagcttcacctatataatacttcatccattttattagtacatccatttagggtttagggttaatggtttttatagactaatttttttagtacatctattttattctattttagcctctaaattaagaaaactaaaactctattttagtttttttatttaatagtttagatataaaatagaataaaataaagtgactaaaaattaaacaaataccctttaagaaattaaaaaaactaaggaaacatttttcttgtttcgagtagataatgccagcctgttaaacgccgtcgacgagtctaacggacaccaaccagcgaaccagcagcgtcgcgtcgggccaagcgaagcagacggcacggcatctctgtcgctgcctctggacccctctcgagagttccgctccaccgttggacttgctccgctgtcggcatccagaaattgcgtggcggagcggcagacgtgagccggcacggcaggcggcctcctcctcctctcacggcaccggcagctacgggggattcctttcccaccgctccttcgctttcccttcctcgcccgccgtaataaatagacaccccctccacaccctctttccccaacctcgtgttgttcggagcgcacacacacacaaccagatctcccccaaatccacccgtcggcacctccgcttcaaggtacgccgctcgtcctccccccccccccccctctctaccttctctagatcggcgttccggtccatggttagggcccggtagttctacttctgttcatgtttgtgttagatccgtgtttgtgttagatccgtgctgctagcgttcgtacacggatgcgacctgtacgtcagacacgttctgattgctaacttgccagtgtttctctttggggaatcctgggatggctctagccgttccgcagacgggatcgatttcatgattttttttgtttcgttgcatagggtttggtttgcccttttcctttatttcaatatatgccgtgcacttgtttgtcgggtcatcttttcatgcttttttttgtcttggttgtgatgatgtggtctggttgggcggtcgttctagatcggagtagaattctgtttcaaactacctggtggatttattaattttggatctgtatgtgtgtgccatacatattcatagttacgaattgaagatgatggatggaaatatcgatctaggataggtatacatgttgatgcgggttttactgatgcatatacagagatgctttttgttcgcttggttgtgatgatgtggtgtggttgggcggtcgttcattcgttctagatcggagtagaatactgtttcaaactacctggtgtatttattaattttggaactgtatgtgtgtgtcatacatcttcatagttacgagtttaagatggatggaaatatcgatctaggataggtatacatgttgatgtgggttttactgatgcatatacatgatggcatatgcagcatctattcatatgctctaaccttgagtacctatctattataataaacaagtatgttttataattatttcgatcttgatatacttggatgatggcatatgcagcagctatatgtggatttttttagccctgccttcatacgctatttatttgcttggtactgtttcttttgtcgatgctcaccctgttgtttggtgttacttctgcagcccgggggatccactagttctagaaaccatggccaccgccgccgccgcgtctaccgcgctcactggcgccactaccgctgcgcccaaggcgaggcgccgggcgcacctcctggccacccgccgcgccctcgccgcgcccatcaggtgctcagcggcgtcacccgccatgccgatggctcccccggccaccccgctccggccgtggggccccaccgatccccgcaagggcgccgacatcctcgtcgagtccctcgagcgctgcggcgtccgcgacgtcttcgcctaccccggcggcacgtccatggagatccaccaggcactcacccgctcccccgtcatcgccaaccacctcttccgccacgagcaaggggaggcctttgcggcctccggctacgcgcgctcctcgggccgcgtcggcgtctgcatcgccacctccggccccggcgccaccaaccttgtctccgcgctcgccgacgcgctgctcgattccgtccccatggtcgccatcacgggacaggtgccgcgacgcatgattggcaccgacgccttccaggagacgcccatcgtcgaggtcacccgctccatcaccaagcacaactacctggtcctcgacgtcgacgacatcccccgcgtcgtgcaggaggctttcttcctcgcctcctctggtcgaccggggccggtgcttgtcgacatccccaaggacatccagcagcagatggcggtgcctgtctgggacaagcccatgagtctgcctgggtacattgcgcgccttcccaagccccctgcgactgagttgcttgagcaggtgctgcgtcttgttggtgaatcccggcgccctgttctttatgttggcggtggctgcgcagcatctggtgaggagttgcgacgctttgtggagctgactggaatcccggtcacaactactcttatgggcctcggcaacttccccagcgacgacccactgtctctgcgcatgctaggtatgcatggcacggtgtatgcaaattatgcagtggataaggccgatctgttgcttgcacttggtgtgcggtttgatgatcgtgtgacagggaagattgaggcttttgcaagcagggctaagattgtgcacgttgatattgatccggctgagattggcaagaacaagcagccacatgtgtccatctgtgcagatgttaagcttgctttgcagggcatgaatgctcttcttgaaggaagcacatcaaagaagagctttgactttggctcatggaacgatgagttggatcagcagaagagggaattcccccttgggtataaaacatctaatgaggagatccagccacaatatgctattcaggttcttgatgagctgacgaaaggcgaggccatcatcggcacaggtgttgggcagcaccagatgtgggcggcacagtactacacttacaagcggccaaggcagtggttgtcttcagctggtcttggggctatgggatttggtttgccggctgctgctggtgcttctgtggccaacccaggtgttactgttgttgacatcgatggagatggtagctttctcatgaacgttcaggagctagctatgatccgaattgagaacctcccggtgaaggtctttgtgctaaacaaccagcacctggggatggtggtgcagtgggaggacaggttctataaggccaacagagcgcacacatacttgggaaacccagagaatgaaagtgagatatatccagatttcgtgacgatcgccaaagggttcaacattccagcggtccgtgtgacaaagaagaacgaagtccgcgcagcgataaagaagatgctcgagactccagggccgtacctcttggatataatcgtcccacaccaggagcatgtgttgcctatgatccctaatggtggggctttcaaggatatgatcctggatggtgatggcaggactgtgtactgatctaaaatccagcaagcaactgatctaaaatccagcaagcaccgcctccctgctagtacaagggtgatatgtttttatctgtgtgatgttctcctgtattctatctttttttgtaggccgtcagctatctgttatggtaatcctatgtagcttccgaccttgtaattgtgtagtctgttgttttccttctggcatgtgtcataagagatcatttaagtgccttttgctacatataaataagataataagcactgctatgcagtggttctgaattggcttctgttgccaaatttaagtgtccaactggtccttgcttttgttttcgctatttttttccttttttagttattattatattggtaatttcaactcaacatatgatgtatggaataatgctagggctgcaatttcaaactattttacaaaccagaatggcattttcgtggtttgaggggagtgaaaaaaaatgaggcatttgactgaattagttacctgatccattttcgtggtttggatcattggaattaaattccattctaataatagtaattttggcatatatcaattaagttaattcggttttatgcaaaatatatttgtatactattattatcaagatgtcggagatatttatatgctacatttttactatacaggagtgagatgaagagtgtcatgtaagttacacagtagaaacaaattctattaatgcataaaatcatttccatcatccaccctatgaatttgagatagacctatatctaaactttgaaaagtggttgaatatcaaattccaaattaaataagttattttattgagtgaattctaatttctctaaaacgaagggatctaaacgccctctaaagctaatttggaaactcaaactttcttagcattggaggggattgagaaaaaatattaattcattttcatctcaatcattcaatctccaaagagatttgagttccttattagtctgttccatgcatcaaatcggctcaatgtgtcattatttgccatgacgattgacgagttgttctggggcctagcgctttccacgccgatgtgctggggcctggtcctggagaagacagcttgatatttaaagctatcaattgtttcaattgattcccacttcatttttctaaatgtagaaaacggtgacgtataagaaaaagaatgaattaggacttttattccgtacactaatctagagcggcccaagcttgtacactagtacgcgtcaattgatttaaatttaattaatcccgtgtccgtcaatgtgatactactagcatagtactagtaccatgcatacacacagcaggtcggccgcctggatggatcgatgatgatactacatcatcctgtcatccatccaggcgatctagaaggggcgtggctagctagcaaactgtgaccggtttttctacgccgataataatactttgtcatggtacagacgtacagtactggttatatatatctgtagatttcaactgaaaagctaggatagctagattaattcctgagaaacacagataaaattcgagcttggctatagatgacaaaacggaagacgcatgcattggacgacgtatgcaatgcgagcgcgtctcgtgtcgtcccgtccaagtctggcgatctcacgccacgtgctcaacagctcaaggactgttcgtcaccagcgttaaattcattgaagggatgacgcatttcggcatttgtcattgcttgtagctatatatatatatccaacagatttctctcaagcttttgtatgcgtgaatgtaaagtctagcttatacgacagcacgtgcagatatattaacgtcattattaggtggagagcaagatgcatgatctggtagaaattgtcgaaaacacaagagagagtgaagtgcacacttctggtataggagtgtatacgccgctggttggtgggcaatgcgcgccgcaatattggccaatgaaacctagcaacgcccactcgccacgccccatgaatggcccccgcacggcagcgagccagccagtgcccgcgcgcggcccagccggagtcggcggaacgcgccacgggggacgaggcgcccgagggccgaggcagcgcggcatggcaagcaagccgaagcgggcaagcgacctgcatgcagcccctgcccctcgccctcgtcagtcgtcccagcctcccactggaatccacccaacccgcccttcctctccaaagcacgcgccccgcgactcgcctccgcctacgtgtcggcagcgtccccgccggtcgcccacgtaccccgccccgttctcccacgtgcccctccctctgcgcgcgtccgattggctgacccgcccttcttaagccgcgccagcctcctgtccgggccccaacgccgtgctccgtcgtcgtctccgcccccagagtgatcgagcccactgacctggcccccgagcctcagctcgtgagtccggcgcgcctggtgcttaaacactctggtgagttctagtacttctgctatgatcgatctcattaccatttcttaaatttctctccctaaatattccgagttcttgatttttgataacttcaggttttctctttttgataaatctggtctttccatttttttttttttgtggttaatttagtttcctatgttcttcgattgtattatgcatgatctgtgtttggattctgttagattatgtattggtgaatatgtatgtgtttttgcatgtctggttttggtcttaaaaatgttcaaatctgatgatttgattgaagcttttttagtgttggtttgattcttctcaaaactactgttaatttactatcatgttttccaactttgattcatgatgacacttttgttctgctttgttataaaattttggttggtttgattttgtaattatagtgtaattttgttaggaatgaacatgttttaatactctgttttcgatttgtcacacattcgaattattaatcgataatttaactgaaaattcatggttctagatcttgttgtcatcagattatttgtttcgataattcatcaaatatgtagtccttttgctgatttgcgactgtttcattttttctcaaaattgttttttgttaagtttatctaacagttatcgttgtcaaaagtctctttcattttgcaaaatcttctttttttttttgtttgtaactttgttttttaagctacacatttagtctgtaaaatagcatcgaggaacagttgtcttagtagacttgcatgttcttgtaacttctatttgtttcagtttgttgatgactgctttgattttgtaggtcaaaggcgcgccggatccccgggtggtcagtcccttatgttacgtcctgtagaaaccccaacccgtgaaatcaaaaaactcgacggcctgtgggcattcagtctggatcgcgaaaactgtggaattgatcagcgttggtgggaaagcgcgttacaagaaagccgggcaattgctgtgccaggcagttttaacgatcagttcgccgatgcagatattcgtaattatgcgggcaacgtctggtatcagcgcgaagtctttataccgaaaggttgggcaggccagcgtatcgtgctgcgtttcgatgcggtcactcattacggcaaagtgtgggtcaataatcaggaagtgatggagcatcagggcggctatacgccatttgaagccgatgtcacgccgtatgttattgccgggaaaagtgtacgtaagtttctgcttctacctttgatatatatataataattatcattaattagtagtaatataatatttcaaatatttttttcaaaataaaagaatgtagtatatagcaattgcttttctgtagtttataagtgtgtatattttaatttataacttttctaatatatgaccaaaatttgttgatgtgcaggtatcaccgtttgtgtgaacaacgaactgaactggcagactatcccgccgggaatggtgattaccgacgaaaacggcaagaaaaagcagtcttacttccatgatttctttaactatgccggaatccatcgcagcgtaatgctctacaccacgccgaacacctgggtggacgatatcaccgtggtgacgcatgtcgcgcaagactgtaaccacgcgtctgttgactggcaggtggtggccaatggtgatgtcagcgttgaactgcgtgatgcggatcaacaggtggttgcaactggacaaggcactagcgggactttgcaagtggtgaatccgcacctctggcaaccgggtgaaggttatctctatgaactgtgcgtcacagccaaaagccagacagagtgtgatatctacccgcttcgcgtcggcatccggtcagtggcagtgaagggcgaacagttcctgattaaccacaaaccgttctactttactggctttggtcgtcatgaagatgcggacttgcgtggcaaaggattcgataacgtgctgatggtgcacgaccacgcattaatggactggattggggccaactcctaccgtacctcgcattacccttacgctgaagagatgctcgactgggcagatgaacatggcatcgtggtgattgatgaaactgctgctgtcggctttaacctctctttaggcattggtttcgaagcgggcaacaagccgaaagaactgtacagcgaagaggcagtcaacggggaaactcagcaagcgcacttacaggcgattaaagagctgatagcgcgtgacaaaaaccacccaagcgtggtgatgtggagtattgccaacgaaccggatacccgtccgcaaggtgcacgggaatatttcgcgccactggcggaagcaacgcgtaaactcgacccgacgcgtccgatcacctgcgtcaatgtaatgttctgcgacgctcacaccgataccatcagcgatctctttgatgtgctgtgcctgaaccgttattacggatggtatgtccaaagcggcgatttggaaacggcagagaaggtactggaaaaagaacttctggcctggcaggagaaactgcatcagccgattatcatcaccgaatacggcgtggatacgttagccgggctgcactcaatgtacaccgacatgtggagtgaagagtatcagtgtgcatggctggatatgtatcaccgcgtctttgatcgcgtcagcgccgtcgtcggtgaacaggtatggaatttcgccgattttgcgacctcgcaaggcatattgcgcgttggcggtaacaagaaagggatcttcactcgcgaccgcaaaccgaagtcggcggcttttctgctgcaaaaacgctggactggcatgaacttcggtgaaaaaccgcagcagggaggcaaacaatgaatcaacaactctcctggcgcaccatcgtcggctacagcctcgggaattgctaccgagctcctgcaggcctaggatcgttcaaacatttggcaataaagtttcttaagattgaatcctgttgccggtcttgcgatgattatcatataatttctgttgaattacgttaagcatgtaataattaacatgtaatgcatgacgttatttatgagatgggtttttatgattagagtcccgcaattatacatttaatacgcgatagaaaacaaaatatagcgcgcaaactaggataaattatcgcgcgcggtgtcatctatgttactagatcggccggccgtttaaacttagttactaatcagtgatcagattgtcgtttcccgccttcactttaaactatcagtgtttgacaggatatattggcgggtaaacctaagagaaaagagcgtttattagaataatcggatatttaaaagggcgtgaaaaggtttatccgttcgtccatttgtatgtcaatattgggggggggggaaagccacgttgtgtctcaaaatctctgatgttacattgcacaagataaaaatatatcatcatgaacaataaaactgtctgcttacataaacagtaatacaaggggtgttcgccaccatgagccatatccagcgtgaaacctcgtgctcccgcccgcgcctcaattccaatatggatgccgacctttatggctacaagtgggcgcgcgacaacgtcggccagtcgggcgcgaccatttatcggctttatggcaaacccgatgccccggaactgttcctgaagcacggcaaaggcagcgtcgcaaacgatgtcaccgatgagatggtccgcctgaactggcttaccgagttcatgccgctgccgacgattaagcatttcatccgtaccccggacgatgcctggctcttgaccacggccattccgggcaaaacggcctttcaggtccttgaagagtacccggactccggtgagaatatcgtggacgccctcgcggtcttcctccgccgtttgcatagcatccccgtgtgcaactgccccttcaactcggaccgggttttccgcctggcacaggcccagtcgcgcatgaataacggcctcgttgacgcgagcgatttcgacgatgaacggaatggctggccggtggaacaggtttggaaggaaatgcacaaactgcttccgttctcgccggattcggtggtcacgcatggtgatttttccctggataatctgatctttgacgagggcaagctgatcggctgcatcgacgtgggtcgcgtcggtatcgccgaccgctatcaggacctggcgatcttgtggaattgcctcggcgagttctcgccctcgctccagaagcgcctgttccagaagtacggcatcgacaacccggatatgaacaagctccagttccacctcatgctggacgaatttttttgaacagaattggttaattggttgtaacactggcagagcattacgctgacttgacgggacggcggctttgttgaataaatcgaacttttgctgagttgaaggatcgatgagttgaaggaccccgtagaaaagatcaaaggatcttcttgagatcctttttttctgcgcgtaatctgctgcttgcaaacaaaaaaaccaccgctaccagcggtggtttgtttgccggatcaagagctaccaactctttttccgaaggtaactggcttcagcagagcgcagataccaaatactgtccttctagtgtagccgtagttaggccaccacttcaagaactctgtagcaccgcctacatacctcgctctgctaatcctgttaccagtggctgctgccagtggcgataagtcgtgtcttaccgggttggactcaagacgatagttaccggataaggcgcagcggtcgggctgaacggggggttcgtgcacacagcccagcttggagcgaacgacctacaccgaactgagatacctacagcgtgagctatgagaaagcgccacgcttcccgaagggagaaaggcggacaggtatccggtaagcggcagggtcggaacaggagagcgcacgagggagcttccagggggaaacgcctggtatctttatagtcctgtcgggtttcgccacctctgacttgagcgtcgatttttgtgatgctcgtcaggggggcggagcctatggaaaaacgccagcaacgcggcctttttacggttcctggccttttgctggccttttgctcacatgttctttcctgcgttatcccctgattctgtggataaccgtattaccgcctttgagtgagctgataccgctcgccgcagccgaacgaccgagcgcagcgagtcagtgagcgaggaagcggaagagcgcctgatgcggtattttctccttacgcatctgtgcggtatttcacaccgcataggccgcgataggccgacgcgaagcggcggggcgtagggagcgcagcgaccgaagggtaggcgctttttgcagctcttcggctgtgcgctggccagacagttatgcacaggccaggcgggttttaagagttttaataagttttaaagagttttaggcggaaaaatcgccttttttctcttttatatcagtcacttacatgtgtgaccggttcccaatgtacggctttgggttcccaatgtacgggttccggttcccaatgtacggctttgggttcccaatgtacgtgctatccacaggaaagagaccttttcgacctttttcccctgctagggcaatttgccctagcatctgctccgtacattaggaaccggcggatgcttcgccctcgatcaggttgcggtagcgcatgactaggatcgggccagcctgccccgcctcctccttcaaatcgtactccggcaggtcatttgacccgatcagcttgcgcacggtgaaacagaacttcttgaactctccggcgctgccactgcgttcgtagatcgtcttgaacaaccatctggcttctgccttgcctgcggcgcggcgtgccaggcggtagagaaaacggccgatgccggggtcgatcaaaaagtaatcggggtgaaccgtcagcacgtccgggttcttgccttctgtgatctcgcggtacatccaatcagcaagctcgatctcgatgtactccggccgcccggtttcgctctttacgatcttgtagcggctaatcaaggcttcaccctcggataccgtcaccaggcggccgttcttggccttcttggtacgctgcatggcaacgtgcgtggtgtttaaccgaatgcaggtttctaccaggtcgtctttctgctttccgccatcggctcgccggcagaacttgagtacgtccgcaacgtgtggacggaacacgcggccgggcttgtctcccttcccttcccggtatcggttcatggattcggttagatgggaaaccgccatcagtaccaggtcgtaatcccacacactggccatgccggcggggcctgcggaaacctctacgtgcccgtctggaagctcgtagcggatcacctcgccagctcgtcggtcacgcttcgacagacggaaaacggccacgtccatgatgctgcgactatcgcgggtgcccacgtcatagagcatcggaacgaaaaaatctggttgctcgtcgcccttgggcggcttcctaatcgacggcgcaccggctgccggcggttgccgggattctttgcggattcgatcagcggccccttgccacgattcaccggggcgtgcttctgcctcgatgcgttgccgctgggcggcctgcgcggccttcaacttctccaccaggtcatcacccagcgccgcgccgatttgtaccgggccggatggtttgcgaccgctcacgccgattcctcgggcttgggggttccagtgccattgcagggccggcagacaacccagccgcttacgcctggccaaccgcccgttcctccacacatggggcattccacggcgtcggtgcctggttgttcttgattttccatgccgcctcctttagccgctaaaattcatctactcatttattcatttgctcatttactctggtagctgcgcgatgtattcagatagcagctcggtaatggtcttgccttggcgtaccgcgtacatcttcagcttggtgtgatcctccgccggcaactgaaagttgacccgcttcatggctggcgtgtctgccaggctggccaacgttgcagccttgctgctgcgtgcgctcggacggccggcacttagcgtgtttgtgcttttgctcattttctctttacctcattaactcaaatgagttttgatttaatttcagcggccagcgcctggacctcgcgggcagcgtcgccctcgggttctgattcaagaacggttgtgccggcggcggcagtgcctgggtagctcacgcgctgcgtgatacgggactcaagaatgggcagctcgtacccggccagcgcctcggcaacctcaccgccgatgcgcgtgcctttgatcgcccgcgacacgacaaaggccgcttgtagccttccatccgtgacctcaatgcgctgcttaaccagctccaccaggtcggcggtggcccaaatgtcgtaagggcttggctgcaccggaatcagcacgaagtcggctgccttgatcgcggacacagccaagtccgccgcctggggcgctccgtcgatcactacgaagtcgcgccggccgatggccttcacgtcgcggtcaatcgtcgggcggtcgatgccgacaacggttagcggttgatcttcccgcacggccgcccaatcgcgggcactgccctggggatcggaatcgactaacagaacatcggccccggcgagttgcagggcgcgggctagatgggttgcgatggtcgtcttgcctgacccgcctttctggttaagtacagcgataaccttcatgcgttccccttgcgtatttgtttatttactcatcgcatcatatacgcagcgaccgcatgacgcaagctgttttactcaaatacacatcacctttttagatgatca

SEQ ID NO: 82 - DNA, 14019 bp, artificial
  vector sequence
gtgattttgtgccgagctgccggtcggggagctgttggctggctggtggcaggatatattgtggtgtaaacaaattgacgcttagacaacttaataacacattgcggacgtctttaatgtactgaatttagttactgatcactgattaagtactgatatcggtaccaagcttccgcggctgcagtgcagcgtgacccggtcgtgcccctctctagagataatgagcattgcatgtctaagttataaaaaattaccacatattttttttgtcacacttgtttgaagtgcagtttatctatctttatacatatatttaaactttactctacgaataatataatctatagtactacaataatatcagtgttttagagaatcatataaatgaacagttagacatggtctaaaggacaattgagtattttgacaacaggactctacagttttatctttttagtgtgcatgtgttctcctttttttttgcaaatagcttcacctatataatacttcatccattttattagtacatccatttagggtttagggttaatggtttttatagactaatttttttagtacatctattttattctattttagcctctaaattaagaaaactaaaactctattttagtttttttatttaatagtttagatataaaatagaataaaataaagtgactaaaaattaaacaaataccctttaagaaattaaaaaaactaaggaaacatttttcttgtttcgagtagataatgccagcctgttaaacgccgtcgacgagtctaacggacaccaaccagcgaaccagcagcgtcgcgtcgggccaagcgaagcagacggcacggcatctctgtcgctgcctctggacccctctcgagagttccgctccaccgttggacttgctccgctgtcggcatccagaaattgcgtggcggagcggcagacgtgagccggcacggcaggcggcctcctcctcctctcacggcaccggcagctacgggggattcctttcccaccgctccttcgctttcccttcctcgcccgccgtaataaatagacaccccctccacaccctctttccccaacctcgtgttgttcggagcgcacacacacacaaccagatctcccccaaatccacccgtcggcacctccgcttcaaggtacgccgctcgtcctccccccccccccccctctctaccttctctagatcggcgttccggtccatggttagggcccggtagttctacttctgttcatgtttgtgttagatccgtgtttgtgttagatccgtgctgctagcgttcgtacacggatgcgacctgtacgtcagacacgttctgattgctaacttgccagtgtttctctttggggaatcctgggatggctctagccgttccgcagacgggatcgatttcatgattttttttgtttcgttgcatagggtttggtttgcccttttcctttatttcaatatatgccgtgcacttgtttgtcgggtcatcttttcatgcttttttttgtcttggttgtgatgatgtggtctggttgggcggtcgttctagatcggagtagaattctgtttcaaactacctggtggatttattaattttggatctgtatgtgtgtgccatacatattcatagttacgaattgaagatgatggatggaaatatcgatctaggataggtatacatgttgatgcgggttttactgatgcatatacagagatgctttttgttcgcttggttgtgatgatgtggtgtggttgggcggtcgttcattcgttctagatcggagtagaatactgtttcaaactacctggtgtatttattaattttggaactgtatgtgtgtgtcatacatcttcatagttacgagtttaagatggatggaaatatcgatctaggataggtatacatgttgatgtgggttttactgatgcatatacatgatggcatatgcagcatctattcatatgctctaaccttgagtacctatctattataataaacaagtatgttttataattatttcgatcttgatatacttggatgatggcatatgcagcagctatatgtggatttttttagccctgccttcatacgctatttatttgcttggtactgtttcttttgtcgatgctcaccctgttgtttggtgttacttctgcagcccgggggatccactagttctagaaaccatggccaccgccgccgccgcgtctaccgcgctcactggcgccactaccgctgcgcccaaggcgaggcgccgggcgcacctcctggccacccgccgcgccctcgccgcgcccatcaggtgctcagcggcgtcacccgccatgccgatggctcccccggccaccccgctccggccgtggggccccaccgatccccgcaagggcgccgacatcctcgtcgagtccctcgagcgctgcggcgtccgcgacgtcttcgcctaccccggcggcacgtccatggagatccaccaggcactcacccgctcccccgtcatcgccaaccacctcttccgccacgagcaaggggaggcctttgcggcctccggctacgcgcgctcctcgggccgcgtcggcgtctgcatcgccacctccggccccggcgccaccaaccttgtctccgcgctcgccgacgcgctgctcgattccgtccccatggtcgccatcacgggacaggtgccgcgacgcatgattggcaccgacgccttccaggagacgcccatcgtcgaggtcacccgctccatcaccaagcacaactacctggtcctcgacgtcgacgacatcccccgcgtcgtgcaggaggctttcttcctcgcctcctctggtcgaccggggccggtgcttgtcgacatccccaaggacatccagcagcagatggcggtgcctgtctgggacaagcccatgagtctgcctgggtacattgcgcgccttcccaagccccctgcgactgagttgcttgagcaggtgctgcgtcttgttggtgaatcccggcgccctgttctttatgttggcggtggctgcgcagcatctggtgaggagttgcgacgctttgtggagctgactggaatcccggtcacaactactcttatgggcctcggcaacttccccagcgacgacccactgtctctgcgcatgctaggtatgcatggcacggtgtatgcaaattatgcagtggataaggccgatctgttgcttgcacttggtgtgcggtttgatgatcgtgtgacagggaagattgaggcttttgcaagcagggctaagattgtgcacgttgatattgatccggctgagattggcaagaacaagcagccacatgtgtccatctgtgcagatgttaagcttgctttgcagggcatgaatgctcttcttgaaggaagcacatcaaagaagagctttgactttggctcatggaacgatgagttggatcagcagaagagggaattcccccttgggtataaaacatctaatgaggagatccagccacaatatgctattcaggttcttgatgagctgacgaaaggcgaggccatcatcggcacaggtgttgggcagcaccagatgtgggcggcacagtactacacttacaagcggccaaggcagtggttgtcttcagctggtcttggggctatgggatttggtttgccggctgctgctggtgcttctgtggccaacccaggtgttactgttgttgacatcgatggagatggtagctttctcatgaacgttcaggagctagctatgatccgaattgagaacctcccggtgaaggtctttgtgctaaacaaccagcacctggggatggtggtgcagtgggaggacaggttctataaggccaacagagcgcacacatacttgggaaacccagagaatgaaagtgagatatatccagatttcgtgacgatcgccaaagggttcaacattccagcggtccgtgtgacaaagaagaacgaagtccgcgcagcgataaagaagatgctcgagactccagggccgtacctcttggatataatcgtcccacaccaggagcatgtgttgcctatgatccctaatggtggggctttcaaggatatgatcctggatggtgatggcaggactgtgtactgatctaaaatccagcaagcaactgatctaaaatccagcaagcaccgcctccctgctagtacaagggtgatatgtttttatctgtgtgatgttctcctgtattctatctttttttgtaggccgtcagctatctgttatggtaatcctatgtagcttccgaccttgtaattgtgtagtctgttgttttccttctggcatgtgtcataagagatcatttaagtgccttttgctacatataaataagataataagcactgctatgcagtggttctgaattggcttctgttgccaaatttaagtgtccaactggtccttgcttttgttttcgctatttttttccttttttagttattattatattggtaatttcaactcaacatatgatgtatggaataatgctagggctgcaatttcaaactattttacaaaccagaatggcattttcgtggtttgaggggagtgaaaaaaaatgaggcatttgactgaattagttacctgatccattttcgtggtttggatcattggaattaaattccattctaataatagtaattttggcatatatcaattaagttaattcggttttatgcaaaatatatttgtatactattattatcaagatgtcggagatatttatatgctacatttttactatacaggagtgagatgaagagtgtcatgtaagttacacagtagaaacaaattctattaatgcataaaatcatttccatcatccaccctatgaatttgagatagacctatatctaaactttgaaaagtggttgaatatcaaattccaaattaaataagttattttattgagtgaattctaatttctctaaaacgaagggatctaaacgccctctaaagctaatttggaaactcaaactttcttagcattggaggggattgagaaaaaatattaattcattttcatctcaatcattcaatctccaaagagatttgagttccttattagtctgttccatgcatcaaatcggctcaatgtgtcattatttgccatgacgattgacgagttgttctggggcctagcgctttccacgccgatgtgctggggcctggtcctggagaagacagcttgatatttaaagctatcaattgtttcaattgattcccacttcatttttctaaatgtagaaaacggtgacgtataagaaaaagaatgaattaggacttttattccgtacactaatctagagcggcccaagcttgtacactagtacgcgtcaattgatttaaatttaattaatgcagtgcagcgtgacccggtcgtgcccctctctagagataatgagcattgcatgtctaagttataaaaaattaccacatattttttttgtcacacttgtttgaagtgcagtttatctatctttatacatatatttaaactttactctacgaataatataatctatagtactacaataatatcagtgttttagagaatcatataaatgaacagttagacatggtctaaaggacaattgagtattttgacaacaggactctacagttttatctttttagtgtgcatgtgttctcctttttttttgcaaatagcttcacctatataatacttcatccattttattagtacatccatttagggtttagggttaatggtttttatagactaatttttttagtacatctattttattctattttagcctctaaattaagaaaactaaaactctattttagtttttttatttaatagtttagatataaaatagaataaaataaagtgactaaaaattaaacaaataccctttaagaaattaaaaaaactaaggaaacatttttcttgtttcgagtagataatgccagcctgttaaacgccgtcgacgagtctaacggacaccaaccagcgaaccagcagcgtcgcgtcgggccaagcgaagcagacggcacggcatctctgtcgctgcctctggacccctctcgagagttccgctccaccgttggacttgctccgctgtcggcatccagaaattgcgtggcggagcggcagacgtgagccggcacggcaggcggcctcctcctcctctcacggcaccggcagctacgggggattcctttcccaccgctccttcgctttcccttcctcgcccgccgtaataaatagacaccccctccacaccctctttccccaacctcgtgttgttcggagcgcacacacacacaaccagatcggcgcgccttaagaaatcctctcttctcctcttcattttcaaggtaaatctctctctctctctctctctctgttattccttgttttaattaggtatgtattattgctagtttgttaatctgcttatcttatgtatgccttatgtgaatatctttatcttgttcatctcatccgtttagaagctataaatttgttgatttgactgtgtatctacacgtggttatgtttatatctaatcagatatgaatttcttcatattgttgcgtttgtgtgtaccaatccgaaatcgttgatttttttcatttaatcgtgtagctaattgtacgtatacatatggatctacgtatcaattgttcatctgtttgtgtttgtatgtatacagatctgaaaacatcacttctctcatctgattgtgttgttacatacatagatatagatctgttatatcattttttttattaattgtgtatatatatatgtgcatagatctggattacatgattgtgattatttacatgattttgttatttacgtatgtatatatgtagatctggactttttggagttgttgacttgattgtatttgtgtgtgtatatgtgtgttctgatcttgatatgttatgtatgtgcagggcgcgccggatccccgggtggtcagtcccttatgttacgtcctgtagaaaccccaacccgtgaaatcaaaaaactcgacggcctgtgggcattcagtctggatcgcgaaaactgtggaattgatcagcgttggtgggaaagcgcgttacaagaaagccgggcaattgctgtgccaggcagttttaacgatcagttcgccgatgcagatattcgtaattatgcgggcaacgtctggtatcagcgcgaagtctttataccgaaaggttgggcaggccagcgtatcgtgctgcgtttcgatgcggtcactcattacggcaaagtgtgggtcaataatcaggaagtgatggagcatcagggcggctatacgccatttgaagccgatgtcacgccgtatgttattgccgggaaaagtgtacgtaagtttctgcttctacctttgatatatatataataattatcattaattagtagtaatataatatttcaaatatttttttcaaaataaaagaatgtagtatatagcaattgcttttctgtagtttataagtgtgtatattttaatttataacttttctaatatatgaccaaaatttgttgatgtgcaggtatcaccgtttgtgtgaacaacgaactgaactggcagactatcccgccgggaatggtgattaccgacgaaaacggcaagaaaaagcagtcttacttccatgatttctttaactatgccggaatccatcgcagcgtaatgctctacaccacgccgaacacctgggtggacgatatcaccgtggtgacgcatgtcgcgcaagactgtaaccacgcgtctgttgactggcaggtggtggccaatggtgatgtcagcgttgaactgcgtgatgcggatcaacaggtggttgcaactggacaaggcactagcgggactttgcaagtggtgaatccgcacctctggcaaccgggtgaaggttatctctatgaactgtgcgtcacagccaaaagccagacagagtgtgatatctacccgcttcgcgtcggcatccggtcagtggcagtgaagggcgaacagttcctgattaaccacaaaccgttctactttactggctttggtcgtcatgaagatgcggacttgcgtggcaaaggattcgataacgtgctgatggtgcacgaccacgcattaatggactggattggggccaactcctaccgtacctcgcattacccttacgctgaagagatgctcgactgggcagatgaacatggcatcgtggtgattgatgaaactgctgctgtcggctttaacctctctttaggcattggtttcgaagcgggcaacaagccgaaagaactgtacagcgaagaggcagtcaacggggaaactcagcaagcgcacttacaggcgattaaagagctgatagcgcgtgacaaaaaccacccaagcgtggtgatgtggagtattgccaacgaaccggatacccgtccgcaaggtgcacgggaatatttcgcgccactggcggaagcaacgcgtaaactcgacccgacgcgtccgatcacctgcgtcaatgtaatgttctgcgacgctcacaccgataccatcagcgatctctttgatgtgctgtgcctgaaccgttattacggatggtatgtccaaagcggcgatttggaaacggcagagaaggtactggaaaaagaacttctggcctggcaggagaaactgcatcagccgattatcatcaccgaatacggcgtggatacgttagccgggctgcactcaatgtacaccgacatgtggagtgaagagtatcagtgtgcatggctggatatgtatcaccgcgtctttgatcgcgtcagcgccgtcgtcggtgaacaggtatggaatttcgccgattttgcgacctcgcaaggcatattgcgcgttggcggtaacaagaaagggatcttcactcgcgaccgcaaaccgaagtcggcggcttttctgctgcaaaaacgctggactggcatgaacttcggtgaaaaaccgcagcagggaggcaaacaatgaatcaacaactctcctggcgcaccatcgtcggctacagcctcgggaattgctaccgagctcctgcaggcctaggatcgttcaaacatttggcaataaagtttcttaagattgaatcctgttgccggtcttgcgatgattatcatataatttctgttgaattacgttaagcatgtaataattaacatgtaatgcatgacgttatttatgagatgggtttttatgattagagtcccgcaattatacatttaatacgcgatagaaaacaaaatatagcgcgcaaactaggataaattatcgcgcgcggtgtcatctatgttactagatcggccggccgtttaaacttagttactaatcagtgatcagattgtcgtttcccgccttcactttaaactatcagtgtttgacaggatatattggcgggtaaacctaagagaaaagagcgtttattagaataatcggatatttaaaagggcgtgaaaaggtttatccgttcgtccatttgtatgtcaatattgggggggggggaaagccacgttgtgtctcaaaatctctgatgttacattgcacaagataaaaatatatcatcatgaacaataaaactgtctgcttacataaacagtaatacaaggggtgttcgccaccatgagccatatccagcgtgaaacctcgtgctcccgcccgcgcctcaattccaatatggatgccgacctttatggctacaagtgggcgcgcgacaacgtcggccagtcgggcgcgaccatttatcggctttatggcaaacccgatgccccggaactgttcctgaagcacggcaaaggcagcgtcgcaaacgatgtcaccgatgagatggtccgcctgaactggcttaccgagttcatgccgctgccgacgattaagcatttcatccgtaccccggacgatgcctggctcttgaccacggccattccgggcaaaacggcctttcaggtccttgaagagtacccggactccggtgagaatatcgtggacgccctcgcggtcttcctccgccgtttgcatagcatccccgtgtgcaactgccccttcaactcggaccgggttttccgcctggcacaggcccagtcgcgcatgaataacggcctcgttgacgcgagcgatttcgacgatgaacggaatggctggccggtggaacaggtttggaaggaaatgcacaaactgcttccgttctcgccggattcggtggtcacgcatggtgatttttccctggataatctgatctttgacgagggcaagctgatcggctgcatcgacgtgggtcgcgtcggtatcgccgaccgctatcaggacctggcgatcttgtggaattgcctcggcgagttctcgccctcgctccagaagcgcctgttccagaagtacggcatcgacaacccggatatgaacaagctccagttccacctcatgctggacgaatttttttgaacagaattggttaattggttgtaacactggcagagcattacgctgacttgacgggacggcggctttgttgaataaatcgaacttttgctgagttgaaggatcgatgagttgaaggaccccgtagaaaagatcaaaggatcttcttgagatcctttttttctgcgcgtaatctgctgcttgcaaacaaaaaaaccaccgctaccagcggtggtttgtttgccggatcaagagctaccaactctttttccgaaggtaactggcttcagcagagcgcagataccaaatactgtccttctagtgtagccgtagttaggccaccacttcaagaactctgtagcaccgcctacatacctcgctctgctaatcctgttaccagtggctgctgccagtggcgataagtcgtgtcttaccgggttggactcaagacgatagttaccggataaggcgcagcggtcgggctgaacggggggttcgtgcacacagcccagcttggagcgaacgacctacaccgaactgagatacctacagcgtgagctatgagaaagcgccacgcttcccgaagggagaaaggcggacaggtatccggtaagcggcagggtcggaacaggagagcgcacgagggagcttccagggggaaacgcctggtatctttatagtcctgtcgggtttcgccacctctgacttgagcgtcgatttttgtgatgctcgtcaggggggcggagcctatggaaaaacgccagcaacgcggcctttttacggttcctggccttttgctggccttttgctcacatgttctttcctgcgttatcccctgattctgtggataaccgtattaccgcctttgagtgagctgataccgctcgccgcagccgaacgaccgagcgcagcgagtcagtgagcgaggaagcggaagagcgcctgatgcggtattttctccttacgcatctgtgcggtatttcacaccgcataggccgcgataggccgacgcgaagcggcggggcgtagggagcgcagcgaccgaagggtaggcgctttttgcagctcttcggctgtgcgctggccagacagttatgcacaggccaggcgggttttaagagttttaataagttttaaagagttttaggcggaaaaatcgccttttttctcttttatatcagtcacttacatgtgtgaccggttcccaatgtacggctttgggttcccaatgtacgggttccggttcccaatgtacggctttgggttcccaatgtacgtgctatccacaggaaagagaccttttcgacctttttcccctgctagggcaatttgccctagcatctgctccgtacattaggaaccggcggatgcttcgccctcgatcaggttgcggtagcgcatgactaggatcgggccagcctgccccgcctcctccttcaaatcgtactccggcaggtcatttgacccgatcagcttgcgcacggtgaaacagaacttcttgaactctccggcgctgccactgcgttcgtagatcgtcttgaacaaccatctggcttctgccttgcctgcggcgcggcgtgccaggcggtagagaaaacggccgatgccggggtcgatcaaaaagtaatcggggtgaaccgtcagcacgtccgggttcttgccttctgtgatctcgcggtacatccaatcagcaagctcgatctcgatgtactccggccgcccggtttcgctctttacgatcttgtagcggctaatcaaggcttcaccctcggataccgtcaccaggcggccgttcttggccttcttggtacgctgcatggcaacgtgcgtggtgtttaaccgaatgcaggtttctaccaggtcgtctttctgctttccgccatcggctcgccggcagaacttgagtacgtccgcaacgtgtggacggaacacgcggccgggcttgtctcccttcccttcccggtatcggttcatggattcggttagatgggaaaccgccatcagtaccaggtcgtaatcccacacactggccatgccggcggggcctgcggaaacctctacgtgcccgtctggaagctcgtagcggatcacctcgccagctcgtcggtcacgcttcgacagacggaaaacggccacgtccatgatgctgcgactatcgcgggtgcccacgtcatagagcatcggaacgaaaaaatctggttgctcgtcgcccttgggcggcttcctaatcgacggcgcaccggctgccggcggttgccgggattctttgcggattcgatcagcggccccttgccacgattcaccggggcgtgcttctgcctcgatgcgttgccgctgggcggcctgcgcggccttcaacttctccaccaggtcatcacccagcgccgcgccgatttgtaccgggccggatggtttgcgaccgctcacgccgattcctcgggcttgggggttccagtgccattgcagggccggcagacaacccagccgcttacgcctggccaaccgcccgttcctccacacatggggcattccacggcgtcggtgcctggttgttcttgattttccatgccgcctcctttagccgctaaaattcatctactcatttattcatttgctcatttactctggtagctgcgcgatgtattcagatagcagctcggtaatggtcttgccttggcgtaccgcgtacatcttcagcttggtgtgatcctccgccggcaactgaaagttgacccgcttcatggctggcgtgtctgccaggctggccaacgttgcagccttgctgctgcgtgcgctcggacggccggcacttagcgtgtttgtgcttttgctcattttctctttacctcattaactcaaatgagttttgatttaatttcagcggccagcgcctggacctcgcgggcagcgtcgccctcgggttctgattcaagaacggttgtgccggcggcggcagtgcctgggtagctcacgcgctgcgtgatacgggactcaagaatgggcagctcgtacccggccagcgcctcggcaacctcaccgccgatgcgcgtgcctttgatcgcccgcgacacgacaaaggccgcttgtagccttccatccgtgacctcaatgcgctgcttaaccagctccaccaggtcggcggtggcccaaatgtcgtaagggcttggctgcaccggaatcagcacgaagtcggctgccttgatcgcggacacagccaagtccgccgcctggggcgctccgtcgatcactacgaagtcgcgccggccgatggccttcacgtcgcggtcaatcgtcgggcggtcgatgccgacaacggttagcggttgatcttcccgcacggccgcccaatcgcgggcactgccctggggatcggaatcgactaacagaacatcggccccggcgagttgcagggcgcgggctagatgggttgcgatggtcgtcttgcctgacccgcctttctggttaagtacagcgataaccttcatgcgttccccttgcgtatttgtttatttactcatcgcatcatatacgcagcgaccgcatgacgcaagctgttttactcaaatacacatcacctttttagatgatca

SEQ ID NO: 83 - DNA, 13590 bp, artificial
  vector sequence
gtgattttgtgccgagctgccggtcggggagctgttggctggctggtggcaggatatattgtggtgtaaacaaattgacgcttagacaacttaataacacattgcggacgtctttaatgtactgaatttagttactgatcactgattaagtactgatatcggtaccaagcttccgcggctgcagtgcagcgtgacccggtcgtgcccctctctagagataatgagcattgcatgtctaagttataaaaaattaccacatattttttttgtcacacttgtttgaagtgcagtttatctatctttatacatatatttaaactttactctacgaataatataatctatagtactacaataatatcagtgttttagagaatcatataaatgaacagttagacatggtctaaaggacaattgagtattttgacaacaggactctacagttttatctttttagtgtgcatgtgttctcctttttttttgcaaatagcttcacctatataatacttcatccattttattagtacatccatttagggtttagggttaatggtttttatagactaatttttttagtacatctattttattctattttagcctctaaattaagaaaactaaaactctattttagtttttttatttaatagtttagatataaaatagaataaaataaagtgactaaaaattaaacaaataccctttaagaaattaaaaaaactaaggaaacatttttcttgtttcgagtagataatgccagcctgttaaacgccgtcgacgagtctaacggacaccaaccagcgaaccagcagcgtcgcgtcgggccaagcgaagcagacggcacggcatctctgtcgctgcctctggacccctctcgagagttccgctccaccgttggacttgctccgctgtcggcatccagaaattgcgtggcggagcggcagacgtgagccggcacggcaggcggcctcctcctcctctcacggcaccggcagctacgggggattcctttcccaccgctccttcgctttcccttcctcgcccgccgtaataaatagacaccccctccacaccctctttccccaacctcgtgttgttcggagcgcacacacacacaaccagatctcccccaaatccacccgtcggcacctccgcttcaaggtacgccgctcgtcctccccccccccccccctctctaccttctctagatcggcgttccggtccatggttagggcccggtagttctacttctgttcatgtttgtgttagatccgtgtttgtgttagatccgtgctgctagcgttcgtacacggatgcgacctgtacgtcagacacgttctgattgctaacttgccagtgtttctctttggggaatcctgggatggctctagccgttccgcagacgggatcgatttcatgattttttttgtttcgttgcatagggtttggtttgcccttttcctttatttcaatatatgccgtgcacttgtttgtcgggtcatcttttcatgcttttttttgtcttggttgtgatgatgtggtctggttgggcggtcgttctagatcggagtagaattctgtttcaaactacctggtggatttattaattttggatctgtatgtgtgtgccatacatattcatagttacgaattgaagatgatggatggaaatatcgatctaggataggtatacatgttgatgcgggttttactgatgcatatacagagatgctttttgttcgcttggttgtgatgatgtggtgtggttgggcggtcgttcattcgttctagatcggagtagaatactgtttcaaactacctggtgtatttattaattttggaactgtatgtgtgtgtcatacatcttcatagttacgagtttaagatggatggaaatatcgatctaggataggtatacatgttgatgtgggttttactgatgcatatacatgatggcatatgcagcatctattcatatgctctaaccttgagtacctatctattataataaacaagtatgttttataattatttcgatcttgatatacttggatgatggcatatgcagcagctatatgtggatttttttagccctgccttcatacgctatttatttgcttggtactgtttcttttgtcgatgctcaccctgttgtttggtgttacttctgcagcccgggggatccactagttctagaaaccatggccaccgccgccgccgcgtctaccgcgctcactggcgccactaccgctgcgcccaaggcgaggcgccgggcgcacctcctggccacccgccgcgccctcgccgcgcccatcaggtgctcagcggcgtcacccgccatgccgatggctcccccggccaccccgctccggccgtggggccccaccgatccccgcaagggcgccgacatcctcgtcgagtccctcgagcgctgcggcgtccgcgacgtcttcgcctaccccggcggcacgtccatggagatccaccaggcactcacccgctcccccgtcatcgccaaccacctcttccgccacgagcaaggggaggcctttgcggcctccggctacgcgcgctcctcgggccgcgtcggcgtctgcatcgccacctccggccccggcgccaccaaccttgtctccgcgctcgccgacgcgctgctcgattccgtccccatggtcgccatcacgggacaggtgccgcgacgcatgattggcaccgacgccttccaggagacgcccatcgtcgaggtcacccgctccatcaccaagcacaactacctggtcctcgacgtcgacgacatcccccgcgtcgtgcaggaggctttcttcctcgcctcctctggtcgaccggggccggtgcttgtcgacatccccaaggacatccagcagcagatggcggtgcctgtctgggacaagcccatgagtctgcctgggtacattgcgcgccttcccaagccccctgcgactgagttgcttgagcaggtgctgcgtcttgttggtgaatcccggcgccctgttctttatgttggcggtggctgcgcagcatctggtgaggagttgcgacgctttgtggagctgactggaatcccggtcacaactactcttatgggcctcggcaacttccccagcgacgacccactgtctctgcgcatgctaggtatgcatggcacggtgtatgcaaattatgcagtggataaggccgatctgttgcttgcacttggtgtgcggtttgatgatcgtgtgacagggaagattgaggcttttgcaagcagggctaagattgtgcacgttgatattgatccggctgagattggcaagaacaagcagccacatgtgtccatctgtgcagatgttaagcttgctttgcagggcatgaatgctcttcttgaaggaagcacatcaaagaagagctttgactttggctcatggaacgatgagttggatcagcagaagagggaattcccccttgggtataaaacatctaatgaggagatccagccacaatatgctattcaggttcttgatgagctgacgaaaggcgaggccatcatcggcacaggtgttgggcagcaccagatgtgggcggcacagtactacacttacaagcggccaaggcagtggttgtcttcagctggtcttggggctatgggatttggtttgccggctgctgctggtgcttctgtggccaacccaggtgttactgttgttgacatcgatggagatggtagctttctcatgaacgttcaggagctagctatgatccgaattgagaacctcccggtgaaggtctttgtgctaaacaaccagcacctggggatggtggtgcagtgggaggacaggttctataaggccaacagagcgcacacatacttgggaaacccagagaatgaaagtgagatatatccagatttcgtgacgatcgccaaagggttcaacattccagcggtccgtgtgacaaagaagaacgaagtccgcgcagcgataaagaagatgctcgagactccagggccgtacctcttggatataatcgtcccacaccaggagcatgtgttgcctatgatccctaatggtggggctttcaaggatatgatcctggatggtgatggcaggactgtgtactgatctaaaatccagcaagcaactgatctaaaatccagcaagcaccgcctccctgctagtacaagggtgatatgtttttatctgtgtgatgttctcctgtattctatctttttttgtaggccgtcagctatctgttatggtaatcctatgtagcttccgaccttgtaattgtgtagtctgttgttttccttctggcatgtgtcataagagatcatttaagtgccttttgctacatataaataagataataagcactgctatgcagtggttctgaattggcttctgttgccaaatttaagtgtccaactggtccttgcttttgttttcgctatttttttccttttttagttattattatattggtaatttcaactcaacatatgatgtatggaataatgctagggctgcaatttcaaactattttacaaaccagaatggcattttcgtggtttgaggggagtgaaaaaaaatgaggcatttgactgaattagttacctgatccattttcgtggtttggatcattggaattaaattccattctaataatagtaattttggcatatatcaattaagttaattcggttttatgcaaaatatatttgtatactattattatcaagatgtcggagatatttatatgctacatttttactatacaggagtgagatgaagagtgtcatgtaagttacacagtagaaacaaattctattaatgcataaaatcatttccatcatccaccctatgaatttgagatagacctatatctaaactttgaaaagtggttgaatatcaaattccaaattaaataagttattttattgagtgaattctaatttctctaaaacgaagggatctaaacgccctctaaagctaatttggaaactcaaactttcttagcattggaggggattgagaaaaaatattaattcattttcatctcaatcattcaatctccaaagagatttgagttccttattagtctgttccatgcatcaaatcggctcaatgtgtcattatttgccatgacgattgacgagttgttctggggcctagcgctttccacgccgatgtgctggggcctggtcctggagaagacagcttgatatttaaagctatcaattgtttcaattgattcccacttcatttttctaaatgtagaaaacggtgacgtataagaaaaagaatgaattaggacttttattccgtacactaatctagagcggcccaagcttgtacactagtacgcgtcaattgatttaaatttaattaatgcagtgcagcgtgacccggtcgtgcccctctctagagataatgagcattgcatgtctaagttataaaaaattaccacatattttttttgtcacacttgtttgaagtgcagtttatctatctttatacatatatttaaactttactctacgaataatataatctatagtactacaataatatcagtgttttagagaatcatataaatgaacagttagacatggtctaaaggacaattgagtattttgacaacaggactctacagttttatctttttagtgtgcatgtgttctcctttttttttgcaaatagcttcacctatataatacttcatccattttattagtacatccatttagggtttagggttaatggtttttatagactaatttttttagtacatctattttattctattttagcctctaaattaagaaaactaaaactctattttagtttttttatttaatagtttagatataaaatagaataaaataaagtgactaaaaattaaacaaataccctttaagaaattaaaaaaactaaggaaacatttttcttgtttcgagtagataatgccagcctgttaaacgccgtcgacgagtctaacggacaccaaccagcgaaccagcagcgtcgcgtcgggccaagcgaagcagacggcacggcatctctgtcgctgcctctggacccctctcgagagttccgctccaccgttggacttgctccgctgtcggcatccagaaattgcgtggcggagcggcagacgtgagccggcacggcaggcggcctcctcctcctctcacggcaccggcagctacgggggattcctttcccaccgctccttcgctttcccttcctcgcccgccgtaataaatagacaccccctccacaccctctttccccaacctcgtgttgttcggagcgcacacacacacaaccagatcggcgcgtttaagaaatcctctcttctcctcttcattttcaaggtaaatctctctctctctctctctctctgttattccttgttttaattaggtatgtattattgctagtttgttaatctgcttatcttatgtatgccttatgtgaatatctttatcttgttcatctcatccgtttagaagctataaatttgttgatttgactgtgtatctacacgtggttatgtttatatctaatcagatatgaatttcttcatattgttgcgtttgtgtgtaccaatccgaaatcgttgatttttttcatttaatcgtgtagctaattgtacgtatacatatggatctacgtatcaattgttcatctgtttgtgtttgtatgtatacagatctgaaaacatcacttctctcatctgattgtgttgttacatacatagatatagatctgttatatcattttttttattaattgtgtatatatatatgtgcatagatctggattacatgattgtgattatttacatgattttgttatttacgtatgtatatatgtagatctggactttttggagttgttgacttgattgtatttgtgtgtgtatatgtgtgttctgatcttgatatgttatgtatgtgcagggcgcgccaccatggaagacgccaaaaacataaagaaaggcccggcgccattctatccgctggaagatggaaccgctggagagcaactgcataaggctatgaagagatacgccctggttcctggaacaattgcttttacagatgcacatatcgaggtggacatcacttacgctgagtacttcgaaatgtccgttcggttggcagaagctatgaaacgatatgggctgaatacaaatcacagaatcgtcgtatgcagtgaaaactctcttcaattctttatgccggtgttgggcgcgttatttatcggagttgcagttgcgcccgcgaacgacatttataatgaacgtgaattgctcaacagtatgggcatttcgcagcctaccgtggtgttcgtttccaaaaaggggttgcaaaaaattttgaacgtgcaaaaaaagctcccaatcatccaaaaaattattatcatggattctaaaacggattaccagggatttcagtcgatgtacacgttcgtcacatctcatctacctcccggttttaatgaatacgattttgtgccagagtccttcgatagggacaagacaattgcactgatcatgaactcctctggatctactggtctgcctaaaggtgtcgctctgcctcatagaactgcctgcgtgagattctcgcatgccagagatcctatttttggcaatcaaatcattccggatactgcgattttaagtgttgttccattccatcacggttttggaatgtttactacactcggatatttgatatgtggatttcgagtcgtcttaatgtatagatttgaagaagagctgtttctgaggagccttcaggattacaagattcaaagtgcgctgctggtgccaaccctattctccttcttcgccaaaagcactctgattgacaaatacgatttatctaatttacacgaaattgcttctggtggcgctcccctctctaaggaagtcggggaagcggttgccaagaggttccatctgccaggtatcaggcaaggatatgggctcactgagactacatcagctattctgattacacccgagggggatgataaaccgggcgcggtcggtaaagttgttccattttttgaagcgaaggttgtggatctggataccgggaaaacgctgggcgttaatcaaagaggcgaactgtgtgtgagaggtcctatgattatgtccggttatgtaaacaatccggaagcgaccaacgccttgattgacaaggatggatggctacattctggagacatagcttactgggacgaagacgaacacttcttcatcgttgaccgcctgaagtctctgattaagtacaaaggctatcaggtggctcccgctgaattggaatccatcttgctccaacaccccaacatcttcgacgcaggtgtcgcaggtcttcccgacgatgacgccggtgaacttcccgccgccgttgttgttttggagcacggaaagacgatgacggaaaaagagatcgtggattacgtcgccagtcaagtaacaaccgcgaaaaagttgcgcggaggagttgtgtttgtggacgaagtaccgaaaggtcttaccggaaaactcgacgcaagaaaaatcagagagatcctcataaaggccaagaagggcggaaagatcgccgtgtaacctgcaggcctaggatcgttcaaacatttggcaataaagtttcttaagattgaatcctgttgccggtcttgcgatgattatcatataatttctgttgaattacgttaagcatgtaataattaacatgtaatgcatgacgttatttatgagatgggtttttatgattagagtcccgcaattatacatttaatacgcgatagaaaacaaaatatagcgcgcaaactaggataaattatcgcgcgcggtgtcatctatgttactagatcggccggccgtttaaacttagttactaatcagtgatcagattgtcgtttcccgccttcactttaaactatcagtgtttgacaggatatattggcgggtaaacctaagagaaaagagcgtttattagaataatcggatatttaaaagggcgtgaaaaggtttatccgttcgtccatttgtatgtcaatattgggggggggggaaagccacgttgtgtctcaaaatctctgatgttacattgcacaagataaaaatatatcatcatgaacaataaaactgtctgcttacataaacagtaatacaaggggtgttcgccaccatgagccatatccagcgtgaaacctcgtgctcccgcccgcgcctcaattccaatatggatgccgacctttatggctacaagtgggcgcgcgacaacgtcggccagtcgggcgcgaccatttatcggctttatggcaaacccgatgccccggaactgttcctgaagcacggcaaaggcagcgtcgcaaacgatgtcaccgatgagatggtccgcctgaactggcttaccgagttcatgccgctgccgacgattaagcatttcatccgtaccccggacgatgcctggctcttgaccacggccattccgggcaaaacggcctttcaggtccttgaagagtacccggactccggtgagaatatcgtggacgccctcgcggtcttcctccgccgtttgcatagcatccccgtgtgcaactgccccttcaactcggaccgggttttccgcctggcacaggcccagtcgcgcatgaataacggcctcgttgacgcgagcgatttcgacgatgaacggaatggctggccggtggaacaggtttggaaggaaatgcacaaactgcttccgttctcgccggattcggtggtcacgcatggtgatttttccctggataatctgatctttgacgagggcaagctgatcggctgcatcgacgtgggtcgcgtcggtatcgccgaccgctatcaggacctggcgatcttgtggaattgcctcggcgagttctcgccctcgctccagaagcgcctgttccagaagtacggcatcgacaacccggatatgaacaagctccagttccacctcatgctggacgaatttttttgaacagaattggttaattggttgtaacactggcagagcattacgctgacttgacgggacggcggctttgttgaataaatcgaacttttgctgagttgaaggatcgatgagttgaaggaccccgtagaaaagatcaaaggatcttcttgagatcctttttttctgcgcgtaatctgctgcttgcaaacaaaaaaaccaccgctaccagcggtggtttgtttgccggatcaagagctaccaactctttttccgaaggtaactggcttcagcagagcgcagataccaaatactgtccttctagtgtagccgtagttaggccaccacttcaagaactctgtagcaccgcctacatacctcgctctgctaatcctgttaccagtggctgctgccagtggcgataagtcgtgtcttaccgggttggactcaagacgatagttaccggataaggcgcagcggtcgggctgaacggggggttcgtgcacacagcccagcttggagcgaacgacctacaccgaactgagatacctacagcgtgagctatgagaaagcgccacgcttcccgaagggagaaaggcggacaggtatccggtaagcggcagggtcggaacaggagagcgcacgagggagcttccagggggaaacgcctggtatctttatagtcctgtcgggtttcgccacctctgacttgagcgtcgatttttgtgatgctcgtcaggggggcggagcctatggaaaaacgccagcaacgcggcctttttacggttcctggccttttgctggccttttgctcacatgttctttcctgcgttatcccctgattctgtggataaccgtattaccgcctttgagtgagctgataccgctcgccgcagccgaacgaccgagcgcagcgagtcagtgagcgaggaagcggaagagcgcctgatgcggtattttctccttacgcatctgtgcggtatttcacaccgcataggccgcgataggccgacgcgaagcggcggggcgtagggagcgcagcgaccgaagggtaggcgctttttgcagctcttcggctgtgcgctggccagacagttatgcacaggccaggcgggttttaagagttttaataagttttaaagagttttaggcggaaaaatcgccttttttctcttttatatcagtcacttacatgtgtgaccggttcccaatgtacggctttgggttcccaatgtacgggttccggttcccaatgtacggctttgggttcccaatgtacgtgctatccacaggaaagagaccttttcgacctttttcccctgctagggcaatttgccctagcatctgctccgtacattaggaaccggcggatgcttcgccctcgatcaggttgcggtagcgcatgactaggatcgggccagcctgccccgcctcctccttcaaatcgtactccggcaggtcatttgacccgatcagcttgcgcacggtgaaacagaacttcttgaactctccggcgctgccactgcgttcgtagatcgtcttgaacaaccatctggcttctgccttgcctgcggcgcggcgtgccaggcggtagagaaaacggccgatgccggggtcgatcaaaaagtaatcggggtgaaccgtcagcacgtccgggttcttgccttctgtgatctcgcggtacatccaatcagcaagctcgatctcgatgtactccggccgcccggtttcgctctttacgatcttgtagcggctaatcaaggcttcaccctcggataccgtcaccaggcggccgttcttggccttcttggtacgctgcatggcaacgtgcgtggtgtttaaccgaatgcaggtttctaccaggtcgtctttctgctttccgccatcggctcgccggcagaacttgagtacgtccgcaacgtgtggacggaacacgcggccgggcttgtctcccttcccttcccggtatcggttcatggattcggttagatgggaaaccgccatcagtaccaggtcgtaatcccacacactggccatgccggcggggcctgcggaaacctctacgtgcccgtctggaagctcgtagcggatcacctcgccagctcgtcggtcacgcttcgacagacggaaaacggccacgtccatgatgctgcgactatcgcgggtgcccacgtcatagagcatcggaacgaaaaaatctggttgctcgtcgcccttgggcggcttcctaatcgacggcgcaccggctgccggcggttgccgggattctttgcggattcgatcagcggccccttgccacgattcaccggggcgtgcttctgcctcgatgcgttgccgctgggcggcctgcgcggccttcaacttctccaccaggtcatcacccagcgccgcgccgatttgtaccgggccggatggtttgcgaccgctcacgccgattcctcgggcttgggggttccagtgccattgcagggccggcagacaacccagccgcttacgcctggccaaccgcccgttcctccacacatggggcattccacggcgtcggtgcctggttgttcttgattttccatgccgcctcctttagccgctaaaattcatctactcatttattcatttgctcatttactctggtagctgcgcgatgtattcagatagcagctcggtaatggtcttgccttggcgtaccgcgtacatcttcagcttggtgtgatcctccgccggcaactgaaagttgacccgcttcatggctggcgtgtctgccaggctggccaacgttgcagccttgctgctgcgtgcgctcggacggccggcacttagcgtgtttgtgcttttgctcattttctctttacctcattaactcaaatgagttttgatttaatttcagcggccagcgcctggacctcgcgggcagcgtcgccctcgggttctgattcaagaacggttgtgccggcggcggcagtgcctgggtagctcacgcgctgcgtgatacgggactcaagaatgggcagctcgtacccggccagcgcctcggcaacctcaccgccgatgcgcgtgcctttgatcgcccgcgacacgacaaaggccgcttgtagccttccatccgtgacctcaatgcgctgcttaaccagctccaccaggtcggcggtggcccaaatgtcgtaagggcttggctgcaccggaatcagcacgaagtcggctgccttgatcgcggacacagccaagtccgccgcctggggcgctccgtcgatcactacgaagtcgcgccggccgatggccttcacgtcgcggtcaatcgtcgggcggtcgatgccgacaacggttagcggttgatcttcccgcacggccgcccaatcgcgggcactgccctggggatcggaatcgactaacagaacatcggccccggcgagttgcagggcgcgggctagatgggttgcgatggtcgtcttgcctgacccgcctttctggttaagtacagcgataaccttcatgcgttccccttgcgtatttgtttatttactcatcgcatcatatacgcagcgaccgcatgacgcaagctgttttactcaaatacacatcacctttttagatgatca

SEQ ID NO: 84 - DNA, 14065 bp, artificial
  vector sequence
gtgattttgtgccgagctgccggtcggggagctgttggctggctggtggcaggatatattgtggtgtaaacaaattgacgcttagacaacttaataacacattgcggacgtctttaatgtactgaatttagttactgatcactgattaagtactgatatcggtaccaagcttccgcggctgcagtgcagcgtgacccggtcgtgcccctctctagagataatgagcattgcatgtctaagttataaaaaattaccacatattttttttgtcacacttgtttgaagtgcagtttatctatctttatacatatatttaaactttactctacgaataatataatctatagtactacaataatatcagtgttttagagaatcatataaatgaacagttagacatggtctaaaggacaattgagtattttgacaacaggactctacagttttatctttttagtgtgcatgtgttctcctttttttttgcaaatagcttcacctatataatacttcatccattttattagtacatccatttagggtttagggttaatggtttttatagactaatttttttagtacatctattttattctattttagcctctaaattaagaaaactaaaactctattttagtttttttatttaatagtttagatataaaatagaataaaataaagtgactaaaaattaaacaaataccctttaagaaattaaaaaaactaaggaaacatttttcttgtttcgagtagataatgccagcctgttaaacgccgtcgacgagtctaacggacaccaaccagcgaaccagcagcgtcgcgtcgggccaagcgaagcagacggcacggcatctctgtcgctgcctctggacccctctcgagagttccgctccaccgttggacttgctccgctgtcggcatccagaaattgcgtggcggagcggcagacgtgagccggcacggcaggcggcctcctcctcctctcacggcaccggcagctacgggggattcctttcccaccgctccttcgctttcccttcctcgcccgccgtaataaatagacaccccctccacaccctctttccccaacctcgtgttgttcggagcgcacacacacacaaccagatctcccccaaatccacccgtcggcacctccgcttcaaggtacgccgctcgtcctccccccccccccccctctctaccttctctagatcggcgttccggtccatggttagggcccggtagttctacttctgttcatgtttgtgttagatccgtgtttgtgttagatccgtgctgctagcgttcgtacacggatgcgacctgtacgtcagacacgttctgattgctaacttgccagtgtttctctttggggaatcctgggatggctctagccgttccgcagacgggatcgatttcatgattttttttgtttcgttgcatagggtttggtttgcccttttcctttatttcaatatatgccgtgcacttgtttgtcgggtcatcttttcatgcttttttttgtcttggttgtgatgatgtggtctggttgggcggtcgttctagatcggagtagaattctgtttcaaactacctggtggatttattaattttggatctgtatgtgtgtgccatacatattcatagttacgaattgaagatgatggatggaaatatcgatctaggataggtatacatgttgatgcgggttttactgatgcatatacagagatgctttttgttcgcttggttgtgatgatgtggtgtggttgggcggtcgttcattcgttctagatcggagtagaatactgtttcaaactacctggtgtatttattaattttggaactgtatgtgtgtgtcatacatcttcatagttacgagtttaagatggatggaaatatcgatctaggataggtatacatgttgatgtgggttttactgatgcatatacatgatggcatatgcagcatctattcatatgctctaaccttgagtacctatctattataataaacaagtatgttttataattatttcgatcttgatatacttggatgatggcatatgcagcagctatatgtggatttttttagccctgccttcatacgctatttatttgcttggtactgtttcttttgtcgatgctcaccctgttgtttggtgttacttctgcagcccgggggatccactagttctagaaaccatggccaccgccgccgccgcgtctaccgcgctcactggcgccactaccgctgcgcccaaggcgaggcgccgggcgcacctcctggccacccgccgcgccctcgccgcgcccatcaggtgctcagcggcgtcacccgccatgccgatggctcccccggccaccccgctccggccgtggggccccaccgatccccgcaagggcgccgacatcctcgtcgagtccctcgagcgctgcggcgtccgcgacgtcttcgcctaccccggcggcacgtccatggagatccaccaggcactcacccgctcccccgtcatcgccaaccacctcttccgccacgagcaaggggaggcctttgcggcctccggctacgcgcgctcctcgggccgcgtcggcgtctgcatcgccacctccggccccggcgccaccaaccttgtctccgcgctcgccgacgcgctgctcgattccgtccccatggtcgccatcacgggacaggtgccgcgacgcatgattggcaccgacgccttccaggagacgcccatcgtcgaggtcacccgctccatcaccaagcacaactacctggtcctcgacgtcgacgacatcccccgcgtcgtgcaggaggctttcttcctcgcctcctctggtcgaccggggccggtgcttgtcgacatccccaaggacatccagcagcagatggcggtgcctgtctgggacaagcccatgagtctgcctgggtacattgcgcgccttcccaagccccctgcgactgagttgcttgagcaggtgctgcgtcttgttggtgaatcccggcgccctgttctttatgttggcggtggctgcgcagcatctggtgaggagttgcgacgctttgtggagctgactggaatcccggtcacaactactcttatgggcctcggcaacttccccagcgacgacccactgtctctgcgcatgctaggtatgcatggcacggtgtatgcaaattatgcagtggataaggccgatctgttgcttgcacttggtgtgcggtttgatgatcgtgtgacagggaagattgaggcttttgcaagcagggctaagattgtgcacgttgatattgatccggctgagattggcaagaacaagcagccacatgtgtccatctgtgcagatgttaagcttgctttgcagggcatgaatgctcttcttgaaggaagcacatcaaagaagagctttgactttggctcatggaacgatgagttggatcagcagaagagggaattcccccttgggtataaaacatctaatgaggagatccagccacaatatgctattcaggttcttgatgagctgacgaaaggcgaggccatcatcggcacaggtgttgggcagcaccagatgtgggcggcacagtactacacttacaagcggccaaggcagtggttgtcttcagctggtcttggggctatgggatttggtttgccggctgctgctggtgcttctgtggccaacccaggtgttactgttgttgacatcgatggagatggtagctttctcatgaacgttcaggagctagctatgatccgaattgagaacctcccggtgaaggtctttgtgctaaacaaccagcacctggggatggtggtgcagtgggaggacaggttctataaggccaacagagcgcacacatacttgggaaacccagagaatgaaagtgagatatatccagatttcgtgacgatcgccaaagggttcaacattccagcggtccgtgtgacaaagaagaacgaagtccgcgcagcgataaagaagatgctcgagactccagggccgtacctcttggatataatcgtcccacaccaggagcatgtgttgcctatgatccctaatggtggggctttcaaggatatgatcctggatggtgatggcaggactgtgtactgatctaaaatccagcaagcaactgatctaaaatccagcaagcaccgcctccctgctagtacaagggtgatatgtttttatctgtgtgatgttctcctgtattctatctttttttgtaggccgtcagctatctgttatggtaatcctatgtagcttccgaccttgtaattgtgtagtctgttgttttccttctggcatgtgtcataagagatcatttaagtgccttttgctacatataaataagataataagcactgctatgcagtggttctgaattggcttctgttgccaaatttaagtgtccaactggtccttgcttttgttttcgctatttttttccttttttagttattattatattggtaatttcaactcaacatatgatgtatggaataatgctagggctgcaatttcaaactattttacaaaccagaatggcattttcgtggtttgaggggagtgaaaaaaaatgaggcatttgactgaattagttacctgatccattttcgtggtttggatcattggaattaaattccattctaataatagtaattttggcatatatcaattaagttaattcggttttatgcaaaatatatttgtatactattattatcaagatgtcggagatatttatatgctacatttttactatacaggagtgagatgaagagtgtcatgtaagttacacagtagaaacaaattctattaatgcataaaatcatttccatcatccaccctatgaatttgagatagacctatatctaaactttgaaaagtggttgaatatcaaattccaaattaaataagttattttattgagtgaattctaatttctctaaaacgaagggatctaaacgccctctaaagctaatttggaaactcaaactttcttagcattggaggggattgagaaaaaatattaattcattttcatctcaatcattcaatctccaaagagatttgagttccttattagtctgttccatgcatcaaatcggctcaatgtgtcattatttgccatgacgattgacgagttgttctggggcctagcgctttccacgccgatgtgctggggcctggtcctggagaagacagcttgatatttaaagctatcaattgtttcaattgattcccacttcatttttctaaatgtagaaaacggtgacgtataagaaaaagaatgaattaggacttttattccgtacactaatctagagcggcccaagcttgtacactagtacgcgtcaattgatttaaatttaattaatcccgtgtccgtcaatgtgatactactagcatagtactagtaccatgcatacacacagcaggtcggccgcctggatggatcgatgatgatactacatcatcctgtcatccatccaggcgatctagaaggggcgtggctagctagcaaactgtgaccggtttttctacgccgataataatactttgtcatggtacagacgtacagtactggttatatatatctgtagatttcaactgaaaagctaggatagctagattaattcctgagaaacacagataaaattcgagcttggctatagatgacaaaacggaagacgcatgcattggacgacgtatgcaatgcgagcgcgtctcgtgtcgtcccgtccaagtctggcgatctcacgccacgtgctcaacagctcaaggactgttcgtcaccagcgttaaattcattgaagggatgacgcatttcggcatttgtcattgcttgtagctatatatatatatccaacagatttctctcaagcttttgtatgcgtgaatgtaaagtctagcttatacgacagcacgtgcagatatattaacgtcattattaggtggagagcaagatgcatgatctggtagaaattgtcgaaaacacaagagagagtgaagtgcacacttctggtataggagtgtatacgccgctggttggtgggcaatgcgcgccgcaatattggccaatgaaacctagcaacgcccactcgccacgccccatgaatggcccccgcacggcagcgagccagccagtgcccgcgcgcggcccagccggagtcggcggaacgcgccacgggggacgaggcgcccgagggccgaggcagcgcggcatggcaagcaagccgaagcgggcaagcgacctgcatgcagcccctgcccctcgccctcgtcagtcgtcccagcctcccactggaatccacccaacccgcccttcctctccaaagcacgcgccccgcgactcgcctccgcctacgtgtcggcagcgtccccgccggtcgcccacgtaccccgccccgttctcccacgtgcccctccctctgcgcgcgtccgattggctgacccgcccttcttaagccgcgccagcctcctgtccgggccccaacgccgtgctccgtcgtcgtctccgcccccagagtgatcgagcccactgacctggcccccgagcctcagctcgtgagtccggcgcgtggtgcttaaacactctggtgagttctagtacttctgctatgatcgatctcattaccatttcttaaatttctctccctaaatattccgagttcttgatttttgataacttcaggttttctctttttgataaatctggtctttccatttttttttttttgtggttaatttagtttcctatgttcttcgattgtattatgcatgatctgtgtttggattctgttagattatgtattggtgaatatgtatgtgtttttgcatgtctggttttggtcttaaaaatgttcaaatctgatgatttgattgaagcttttttagtgttggtttgattcttctcaaaactactgttaatttactatcatgttttccaactttgattcatgatgacacttttgttctgctttgttataaaattttggttggtttgattttgtaattatagtgtaattttgttaggaatgaacatgttttaatactctgttttcgatttgtcacacattcgaattattaatcgataatttaactgaaaattcatggttctagatcttgttgtcatcagattatttgtttcgataattcatcaaatatgtagtccttttgctgatttgcgactgtttcattttttctcaaaattgttttttgttaagtttatctaacagttatcgttgtcaaaagtctctttcattttgcaaaatcttctttttttttttgtttgtaactttgttttttaagctacacatttagtctgtaaaatagcatcgaggaacagttgtcttagtagacttgcatgttcttgtaacttctatttgtttcagtttgttgatgactgctttgattttgtaggtcaaaggcgcgccaccatggaagacgccaaaaacataaagaaaggcccggcgccattctatccgctggaagatggaaccgctggagagcaactgcataaggctatgaagagatacgccctggttcctggaacaattgcttttacagatgcacatatcgaggtggacatcacttacgctgagtacttcgaaatgtccgttcggttggcagaagctatgaaacgatatgggctgaatacaaatcacagaatcgtcgtatgcagtgaaaactctcttcaattctttatgccggtgttgggcgcgttatttatcggagttgcagttgcgcccgcgaacgacatttataatgaacgtgaattgctcaacagtatgggcatttcgcagcctaccgtggtgttcgtttccaaaaaggggttgcaaaaaattttgaacgtgcaaaaaaagctcccaatcatccaaaaaattattatcatggattctaaaacggattaccagggatttcagtcgatgtacacgttcgtcacatctcatctacctcccggttttaatgaatacgattttgtgccagagtccttcgatagggacaagacaattgcactgatcatgaactcctctggatctactggtctgcctaaaggtgtcgctctgcctcatagaactgcctgcgtgagattctcgcatgccagagatcctatttttggcaatcaaatcattccggatactgcgattttaagtgttgttccattccatcacggttttggaatgtttactacactcggatatttgatatgtggatttcgagtcgtcttaatgtatagatttgaagaagagctgtttctgaggagccttcaggattacaagattcaaagtgcgctgctggtgccaaccctattctccttcttcgccaaaagcactctgattgacaaatacgatttatctaatttacacgaaattgcttctggtggcgctcccctctctaaggaagtcggggaagcggttgccaagaggttccatctgccaggtatcaggcaaggatatgggctcactgagactacatcagctattctgattacacccgagggggatgataaaccgggcgcggtcggtaaagttgttccattttttgaagcgaaggttgtggatctggataccgggaaaacgctgggcgttaatcaaagaggcgaactgtgtgtgagaggtcctatgattatgtccggttatgtaaacaatccggaagcgaccaacgccttgattgacaaggatggatggctacattctggagacatagcttactgggacgaagacgaacacttcttcatcgttgaccgcctgaagtctctgattaagtacaaaggctatcaggtggctcccgctgaattggaatccatcttgctccaacaccccaacatcttcgacgcaggtgtcgcaggtcttcccgacgatgacgccggtgaacttcccgccgccgttgttgttttggagcacggaaagacgatgacggaaaaagagatcgtggattacgtcgccagtcaagtaacaaccgcgaaaaagttgcgcggaggagttgtgtttgtggacgaagtaccgaaaggtcttaccggaaaactcgacgcaagaaaaatcagagagatcctcataaaggccaagaagggcggaaagatcgccgtgtaacctgcaggcctaggatcgttcaaacatttggcaataaagtttcttaagattgaatcctgttgccggtcttgcgatgattatcatataatttctgttgaattacgttaagcatgtaataattaacatgtaatgcatgacgttatttatgagatgggtttttatgattagagtcccgcaattatacatttaatacgcgatagaaaacaaaatatagcgcgcaaactaggataaattatcgcgcgcggtgtcatctatgttactagatcggccggccgtttaaacttagttactaatcagtgatcagattgtcgtttcccgccttcactttaaactatcagtgtttgacaggatatattggcgggtaaacctaagagaaaagagcgtttattagaataatcggatatttaaaagggcgtgaaaaggtttatccgttcgtccatttgtatgtcaatattgggggggggggaaagccacgttgtgtctcaaaatctctgatgttacattgcacaagataaaaatatatcatcatgaacaataaaactgtctgcttacataaacagtaatacaaggggtgttcgccaccatgagccatatccagcgtgaaacctcgtgctcccgcccgcgcctcaattccaatatggatgccgacctttatggctacaagtgggcgcgcgacaacgtcggccagtcgggcgcgaccatttatcggctttatggcaaacccgatgccccggaactgttcctgaagcacggcaaaggcagcgtcgcaaacgatgtcaccgatgagatggtccgcctgaactggcttaccgagttcatgccgctgccgacgattaagcatttcatccgtaccccggacgatgcctggctcttgaccacggccattccgggcaaaacggcctttcaggtccttgaagagtacccggactccggtgagaatatcgtggacgccctcgcggtcttcctccgccgtttgcatagcatccccgtgtgcaactgccccttcaactcggaccgggttttccgcctggcacaggcccagtcgcgcatgaataacggcctcgttgacgcgagcgatttcgacgatgaacggaatggctggccggtggaacaggtttggaaggaaatgcacaaactgcttccgttctcgccggattcggtggtcacgcatggtgatttttccctggataatctgatctttgacgagggcaagctgatcggctgcatcgacgtgggtcgcgtcggtatcgccgaccgctatcaggacctggcgatcttgtggaattgcctcggcgagttctcgccctcgctccagaagcgcctgttccagaagtacggcatcgacaacccggatatgaacaagctccagttccacctcatgctggacgaatttttttgaacagaattggttaattggttgtaacactggcagagcattacgctgacttgacgggacggcggctttgttgaataaatcgaacttttgctgagttgaaggatcgatgagttgaaggaccccgtagaaaagatcaaaggatcttcttgagatcctttttttctgcgcgtaatctgctgcttgcaaacaaaaaaaccaccgctaccagcggtggtttgtttgccggatcaagagctaccaactctttttccgaaggtaactggcttcagcagagcgcagataccaaatactgtccttctagtgtagccgtagttaggccaccacttcaagaactctgtagcaccgcctacatacctcgctctgctaatcctgttaccagtggctgctgccagtggcgataagtcgtgtcttaccgggttggactcaagacgatagttaccggataaggcgcagcggtcgggctgaacggggggttcgtgcacacagcccagcttggagcgaacgacctacaccgaactgagatacctacagcgtgagctatgagaaagcgccacgcttcccgaagggagaaaggcggacaggtatccggtaagcggcagggtcggaacaggagagcgcacgagggagcttccagggggaaacgcctggtatctttatagtcctgtcgggtttcgccacctctgacttgagcgtcgatttttgtgatgctcgtcaggggggcggagcctatggaaaaacgccagcaacgcggcctttttacggttcctggccttttgctggccttttgctcacatgttctttcctgcgttatcccctgattctgtggataaccgtattaccgcctttgagtgagctgataccgctcgccgcagccgaacgaccgagcgcagcgagtcagtgagcgaggaagcggaagagcgcctgatgcggtattttctccttacgcatctgtgcggtatttcacaccgcataggccgcgataggccgacgcgaagcggcggggcgtagggagcgcagcgaccgaagggtaggcgctttttgcagctcttcggctgtgcgctggccagacagttatgcacaggccaggcgggttttaagagttttaataagttttaaagagttttaggcggaaaaatcgccttttttctcttttatatcagtcacttacatgtgtgaccggttcccaatgtacggctttgggttcccaatgtacgggttccggttcccaatgtacggctttgggttcccaatgtacgtgctatccacaggaaagagaccttttcgacctttttcccctgctagggcaatttgccctagcatctgctccgtacattaggaaccggcggatgcttcgccctcgatcaggttgcggtagcgcatgactaggatcgggccagcctgccccgcctcctccttcaaatcgtactccggcaggtcatttgacccgatcagcttgcgcacggtgaaacagaacttcttgaactctccggcgctgccactgcgttcgtagatcgtcttgaacaaccatctggcttctgccttgcctgcggcgcggcgtgccaggcggtagagaaaacggccgatgccggggtcgatcaaaaagtaatcggggtgaaccgtcagcacgtccgggttcttgccttctgtgatctcgcggtacatccaatcagcaagctcgatctcgatgtactccggccgcccggtttcgctctttacgatcttgtagcggctaatcaaggcttcaccctcggataccgtcaccaggcggccgttcttggccttcttggtacgctgcatggcaacgtgcgtggtgtttaaccgaatgcaggtttctaccaggtcgtctttctgctttccgccatcggctcgccggcagaacttgagtacgtccgcaacgtgtggacggaacacgcggccgggcttgtctcccttcccttcccggtatcggttcatggattcggttagatgggaaaccgccatcagtaccaggtcgtaatcccacacactggccatgccggcggggcctgcggaaacctctacgtgcccgtctggaagctcgtagcggatcacctcgccagctcgtcggtcacgcttcgacagacggaaaacggccacgtccatgatgctgcgactatcgcgggtgcccacgtcatagagcatcggaacgaaaaaatctggttgctcgtcgcccttgggcggcttcctaatcgacggcgcaccggctgccggcggttgccgggattctttgcggattcgatcagcggccccttgccacgattcaccggggcgtgcttctgcctcgatgcgttgccgctgggcggcctgcgcggccttcaacttctccaccaggtcatcacccagcgccgcgccgatttgtaccgggccggatggtttgcgaccgctcacgccgattcctcgggcttgggggttccagtgccattgcagggccggcagacaacccagccgcttacgcctggccaaccgcccgttcctccacacatggggcattccacggcgtcggtgcctggttgttcttgattttccatgccgcctcctttagccgctaaaattcatctactcatttattcatttgctcatttactctggtagctgcgcgatgtattcagatagcagctcggtaatggtcttgccttggcgtaccgcgtacatcttcagcttggtgtgatcctccgccggcaactgaaagttgacccgcttcatggctggcgtgtctgccaggctggccaacgttgcagccttgctgctgcgtgcgctcggacggccggcacttagcgtgtttgtgcttttgctcattttctctttacctcattaactcaaatgagttttgatttaatttcagcggccagcgcctggacctcgcgggcagcgtcgccctcgggttctgattcaagaacggttgtgccggcggcggcagtgcctgggtagctcacgcgctgcgtgatacgggactcaagaatgggcagctcgtacccggccagcgcctcggcaacctcaccgccgatgcgcgtgcctttgatcgcccgcgacacgacaaaggccgcttgtagccttccatccgtgacctcaatgcgctgcttaaccagctccaccaggtcggcggtggcccaaatgtcgtaagggcttggctgcaccggaatcagcacgaagtcggctgccttgatcgcggacacagccaagtccgccgcctggggcgctccgtcgatcactacgaagtcgcgccggccgatggccttcacgtcgcggtcaatcgtcgggcggtcgatgccgacaacggttagcggttgatcttcccgcacggccgcccaatcgcgggcactgccctggggatcggaatcgactaacagaacatcggccccggcgagttgcagggcgcgggctagatgggttgcgatggtcgtcttgcctgacccgcctttctggttaagtacagcgataaccttcatgcgttccccttgcgtatttgtttatttactcatcgcatcatatacgcagcgaccgcatgacgcaagctgttttactcaaatacacatcacctttttagatgatca

SEQ ID NO: 85 - DNA, 14959 bp, artificial
  vector sequence
ttgtacaaagtggtgatatcacaagcccgggcggtcttctagggataacagggtaattatatccctctagatcacaagcccgggcggtcttctacgatgattgagtaataatgtgtcacgcatcaccatgggtggcagtgtcagtgtgagcaatgacctgaatgaacaattgaaatgaaaagaaaaaaagtactccatctgttccaaattaaaattggttttaaccttttaataggtttatacaataattgatatatgttttctgtatatgtctaatttgttatcatccgggcggtcttctagggataacagggtaattatatccctctagacaacacacaacaaataagagaaaaaacaaataatattaatttgagaatgaacaaaaggaccatatcattcattaactcttctccatccacttccatttcacagttcgatagcgaaaaccgaataaaaaacacagtaaattacaagcacaacaaatggtacaagaaaaacagttttcccaatgccataatactcgactcgagttcctgcaggtaccaaaagcttagcttgagcttggatcagattgtcgtttcccgccttcagtttaaactatcagtgtttgacaggatatattggcgggtaaacctaagagaaaagagcgtttattagaataatcggatatttaaaagggcgtgaaaaggtttatccgttcgtccatttgtatgtgcatgccaaccacagggttcccctcgggatcaaagtatgaagagatcgaggcggagatgatcgcggccgggtacgtgttcgagccgcccgcgcacgtctcaaccgtgcggctgcatgaaatcctggccggtttgtctgatgccaagctggcggcctggccggccagcttggccgctgaagaaaccgagcgccgccgtctaaaaaggtgatgtgtatttgagtaaaacagcttgcgtcatgcggtcgctgcgtatatgatgcgatgagtaaataaacaaatacgcaaggggaacgcatgaaggttatcgctgtacttaaccagaaaggcgggtcaggcaagacgaccatcgcaacccatctagcccgcgccctgcaactcgccggggccgatgttctgttagtcgattccgatccccagggcagtgcccgcgattgggcggccgtgcgggaagatcaaccgctaaccgttgtcggcatcgaccgcccgacgattgaccgcgacgtgaaggccatcggccggcgcgacttcgtagtgatcgacggagcgccccaggcggcggacttggctgtgtccgcgatcaaggcagccgacttcgtgctgattccggtgcagccaagcccttacgacatatgggccaccgccgacctggtggagctggttaagcagcgcattgaggtcacggatggaaggctacaagcggcctttgtcgtgtcgcgggcgatcaaaggcacgcgcatcggcggtgaggttgccgaggcgctggccgggtacgagctgcccattcttgagtcccgtatcacgcagcgcgtgagctacccaggcactgccgccgccggcacaaccgttcttgaatcagaacccgagggcgacgctgcccgcgaggtccaggcgctggccgctgaaattaaatcaaaactcatttgagttaatgaggtaaagagaaaatgagcaaaagcacaaacacgctaagtgccggccgtccgagcgcacgcagcagcaaggctgcaacgttggccagcctggcagacacgccagccatgaagcgggtcaactttcagttgccggcggaggatcacaccaagctgaagatgtacgcggtacgccaaggcaagaccattaccgagctgctatctgaatacatcgcgcagctaccagagtaaatgagcaaatgaataaatgagtagatgaattttagcggctaaaggaggcggcatggaaaatcaagaacaaccaggcaccgacgccgtggaatgccccatgtgtggaggaacgggcggttggccaggcgtaagcggctgggttgtctgccggccctgcaatggcactggaacccccaagcccgaggaatcggcgtgagcggtcgcaaaccatccggcccggtacaaatcggcgcggcgctgggtgatgacctggtggagaagttgaaggccgcgcaggccgcccagcggcaacgcatcgaggcagaagcacgccccggtgaatcgtggcaagcggccgctgatcgaatccgcaaagaatcccggcaaccgccggcagccggtgcgccgtcgattaggaagccgcccaagggcgacgagcaaccagattttttcgttccgatgctctatgacgtgggcacccgcgatagtcgcagcatcatggacgtggccgttttccgtctgtcgaagcgtgaccgacgagctggcgaggtgatccgctacgagcttccagacgggcacgtagaggtttccgcagggccggccggcatggccagtgtgtgggattacgacctggtactgatggcggtttcccatctaaccgaatccatgaaccgataccgggaagggaagggagacaagcccggccgcgtgttccgtccacacgttgcggacgtactcaagttctgccggcgagccgatggcggaaagcagaaagacgacctggtagaaacctgcattcggttaaacaccacgcacgttgccatgcagcgtacgaagaaggccaagaacggccgcctggtgacggtatccgagggtgaagccttgattagccgctacaagatcgtaaagagcgaaaccgggcggccggagtacatcgagatcgagctagctgattggatgtaccgcgagatcacagaaggcaagaacccggacgtgctgacggttcaccccgattactttttgatcgatcccggcatcggccgttttctctaccgcctggcacgccgcgccgcaggcaaggcagaagccagatggttgttcaagacgatctacgaacgcagtggcagcgccggagagttcaagaagttctgtttcaccgtgcgcaagctgatcgggtcaaatgacctgccggagtacgatttgaaggaggaggcggggcaggctggcccgatcctagtcatgcgctaccgcaacctgatcgagggcgaagcatccgccggttcctaatgtacggagcagatgctagggcaaattgccctagcaggggaaaaaggtcgaaaaggtctctttcctgtggatagcacgtacattgggaacccaaagccgtacattgggaaccggaacccgtacattgggaacccaaagccgtacattgggaaccggtcacacatgtaagtgactgatataaaagagaaaaaaggcgatttttccgcctaaaactctttaaaacttattaaaactcttaaaacccgcctggcctgtgcataactgtctggccagcgcacagccgaagagctgcaaaaagcgcctacccttcggtcgctgcgctccctacgccccgccgcttcgcgtcggcctatcgcggccgctggccgctcaaaaatggctggcctacggccaggcaatctaccagggcgcggacaagccgcgccgtcgccactcgaccgccggcgcccacatcaaggcaccctgcctcgcgcgtttcggtgatgacggtgaaaacctctgacacatgcagctcccggagacggtcacagcttgtctgtaagcggatgccgggagcagacaagcccgtcagggcgcgtcagcgggtgttggcgggtgtcggggcgcagccatgacccagtcacgtagcgatagcggagtgtatactggcttaactatgcggcatcagagcagattgtactgagagtgcaccatatgcggtgtgaaataccgcacagatgcgtaaggagaaaataccgcatcaggcgctcttccgcttcctcgctcactgactcgctgcgctcggtcgttcggctgcggcgagcggtatcagctcactcaaaggcggtaatacggttatccacagaatcaggggataacgcaggaaagaacatgtgagcaaaaggccagcaaaaggccaggaaccgtaaaaaggccgcgttgctggcgtttttccataggctccgcccccctgacgagcatcacaaaaatcgacgctcaagtcagaggtggcgaaacccgacaggactataaagataccaggcgtttccccctggaagctccctcgtgcgctctcctgttccgaccctgccgcttaccggatacctgtccgcctttctcccttcgggaagcgtggcgctttctcatagctcacgctgtaggtatctcagttcggtgtaggtcgttcgctccaagctgggctgtgtgcacgaaccccccgttcagcccgaccgctgcgccttatccggtaactatcgtcttgagtccaacccggtaagacacgacttatcgccactggcagcagccactggtaacaggattagcagagcgaggtatgtaggcggtgctacagagttcttgaagtggtggcctaactacggctacactagaaggacagtatttggtatctgcgctctgctgaagccagttaccttcggaaaaagagttggtagctcttgatccggcaaacaaaccaccgctggtagcggtggtttttttgtttgcaagcagcagattacgcgcagaaaaaaaggatctcaagaagatcctttgatcttttctacggggtctgacgcttagtggaacgaaaactcacgttaagggattttggtcatgcatgatatatctcccaatttgtgtagggcttattatgcacgcttaaaaataataaaagcagacttgacctgatagtttggctgtgagcaattatgtgcttagtgcatctaacgcttgagttaagccgcgccgcgaagcggcgtcggcttgaacgaatttctagctagacattatttgccgactaccttggtgatctcgcctttcacgtagtggacaaattcttccaactgatctgcgcgcgaggccaagcgatcttcttcttgtccaagataagcctgtctagcttcaagtatgacgggctgatactgggccggcaggcgctccattgcccagtcggcagcgacatccttcggcgcgattttgccggttactgcgctgtaccaaatgcgggacaacgtaagcactacatttcgctcatcgccagcccagtcgggcggcgagttccatagcgttaaggtttcatttagcgcctcaaatagatcctgttcaggaaccggatcaaagagttcctccgccgctggacctaccaaggcaacgctatgttctcttgcttttgtcagcaagatagccagatcaatgtcgatcgtggctggctcgaagatacctgcaagaatgtcattgcgctgccattctccaaattgcagttcgcgcttagctggataacgccacggaatgatgtcgtcgtgcacaacaatggtgacttctacagcgcggagaatctcgctctctccaggggaagccgaagtttccaaaaggtcgttgatcaaagctcgccgcgttgtttcatcaagccttacggtcaccgtaaccagcaaatcaatatcactgtgtggcttcaggccgccatccactgcggagccgtacaaatgtacggccagcaacgtcggttcgagatggcgctcgatgacgccaactacctctgatagttgagtcgatacttcggcgatcaccgcttcccccatgatgtttaactttgttttagggcgactgccctgctgcgtaacatcgttgctgctccataacatcaaacatcgacccacggcgtaacgcgcttgctgcttggatgcccgaggcatagactgtaccccaaaaaaacagtcataacaagccatgaaaaccgccactgcgccgttaccaccgctgcgttcggtcaaggttctggaccagttgcgtgagcgcatacgctacttgcattacagcttacgaaccgaacaggcttatgtccactgggttcgtgcccgaattgatcacaggcagcaacgctctgtcatcgttacaatcaacatgctaccctccgcgagatcatccgtgtttcaaacccggcagcttagttgccgttcttccgaatagcatcggtaacatgagcaaagtctgccgccttacaacggctctcccgctgacgccgtcccggactgatgggctgcctgtatcgagtggtgattttgtgccgagctgccggtcggggagctgttggctggctggtggcaggatatattgtggtgtaaacaaattgacgcttagacaacttaataacacattgcggacgtttttaatgtactgaattaacgccgaattgaattcaagagctcaaggatcctaactataacggtcctaaggtagcgaaggcgcgccgaattcgaggggatcgagcccctgctgagcctcgacatgttgtcgcaaaattcgccctggacccgcccaacgatttgtcgtcactgtcaaggtttgacctgcacttcatttggggcccacatacaccaaaaaaatgctgcataattctcggggcagcaagtcggttacccggccgccgtgctggaccgggttgaatggtgcccgtaactttcggtagagcggacggccaatactcaacttcaaggaatctcacccatgcgcgccggcggggaaccggagttcccttcagtgagcgttattagttcgccgctcggtgtgtcgtagatactagcccctggggcacttttgaaatttgaataagatttatgtaatcagtcttttaggtttgaccggttctgccgctttttttaaaattggatttgtaataataaaacgcaattgtttgttattgtggcgctctatcatagatgtcgctataaacctattcagcacaatatattgttttcattttaatattgtacatataagtagtagggtacaatcagtaaattgaacggagaatattattcataaaaatacgatagtaacgggtgatatattcattagaatgaaccgaaaccggcggtaaggatctgagctacacatgctcaggttttttacaacgtgcacaacagaattgaaagcaaatatcatgcgatcataggcgtctcgcatatctcattaaagcagggggtgggcgaagaactccagcatgagatccccgcgctggaggatcatccagccggcgtcccggaaaacgattccgaagcccaacctttcatagaaggcggcggtggaatcgaaatctcgtgatggcaggttgggcgtcgcttggtcggtcatttcgaaccccagagtcccgctcagaagaactcgtcaagaaggcgatagaaggcgatgcgctgcgaatcgggagcggcgataccgtaaagcacgaggaagcggtcagcccattcgccgccaagctcttcagcaatatcacgggtagccaacgctatgtcctgatagcggtccgccacacccagccggccacagtcgatgaatccagaaaagcggccattttccaccatgatattcggcaagcaggcatcgccatgggtcacgacgagatcctcgccgtcgggcatgcgcgccttgagcctggcgaacagttcggctggcgcgagcccctgatgctcttcgtccagatcatcctgatcgacaagaccggcttccatccgagtacgtgctcgctcgatgcgatgtttcgcttggtggtcgaatgggcaggtagccggatcaagcgtatgcagccgccgcattgcatcagccatgatggatactttctcggcaggagcaaggtgagatgacaggagatcctgccccggcacttcgcccaatagcagccagtcccttcccgcttcagtgacaacgtcgagcacagctgcgcaaggaacgcccgtcgtggccagccacgatagccgcgctgcctcgtcctgcagttcattcagggcaccggacaggtcggtcttgacaaaaagaaccgggcgcccctgcgctgacagccggaacacggcggcatcagagcagccgattgtctgttgtgcccagtcatagccgaatagcctctccacccaagcggccggagaacctgcgtgcaatccatcttgttcaatccacatgatcaaacgttttgaggacgcgagaggattcgattcgacgacgagagcctcgcgagattggggagaaatttttcgggggtggagctgatgcgaggagaggagatgagggggctggtatttatggcggttgggtggtgggaggagtcccgtgccgtgacgtctccgtctgcttggagaatccgccacgctgaaaccaccgcggtttccgggaagacgaggcgggcgagcgagcggttgggaaatttcgagaagatgccgtttgtctccgtttggtacacgtctcgttgatttttttttagtgaattacgctttggaccacattttattatctaagggtgtgtttggttgtaagccacactttgccacagtttgccacgcctaaggttaggcaaatttgacaggtgtttggttgtagccacagttgtggcaagatttccctctaacaaattaagtcccacgtgtcaatggctcaaaaaagtgtggcaagattcccttaggcttagtaagttgtggctaacaatttgatcacctcaccttagacaaggtgtggcaacttttgttggcaagtaatggtaaagtatggctgggaaccaaacagcccctaagttttactttggactacctttaaacatatcttttcactttgaactagataaatttgctattgttgcgatttggattttttttttctcgtgcaatcaacgaccttaaacacatcagctctagtatacggccgatctcctctatatatggttcatatgtttgccgaaagggaagttagacatgacgaaaagttgttcatggtagtccaaaccacaacccggcccaatttgaaaagataggtttaagggtggtccaaattgaaacttgggtaataaaaggtggatcaaagtgcaatttacttttttttactgtaatttcttctggctggtttgttggtcgccgttaggaccgggtgacgccgtcaaccccgcgcctccgtattcgctgacgtggggtggcgcgctggcttccgccttgacccgaatttgttttccttccgttaaaaaaatggttttccttttcttaaaaaggaaatagtttgttttttaagtctgtgtattaggattattacacttgaattttggtatatgtgtaggataatttactgcatgtttataatagagttgtactatagatgaaataacccaatttttggtataattcgtgtttggttggaggtcaaaataacaggttattttgtgaagaaaaaactccgtagtatagtaccatatccatcatgaatacacatactgcctagacgagtgattaggatgaatccatgttatattcctcaaaataatataaaccacttgatcttatgatcttatccaatctgttcatataaactggagatataagatggtgcatttcccttttgatttcttttgttgacggccatgagataggttgcatccactgcatttatattttggaccaatacaatgcacctattgatacatggggacagctcaactaaccatgatgcaaaatgctggttggtgaccagttcttggcattatgataatgataggattaaaaaaaacagtgcaatgtctcggaaagaaaccatgacaaagggtacatgttgcattccagtttctaatgataaaattatgtgccagcaattcaaaaatcatgcgtgttccctacgcaccattctttgcaataaacaagtgcatgcacaatatgattgtgctaaggttcaagaacttgttgcagtggctaagcttggcgcgcctcgcgaccacctttaattaagtgaagagcaggagcttgcatgcctgcaggctctagaggatcccccctcagaagaccagagggctattgagacttttcaacaaagggtaatatcgggaaacctcctcggattccattgcccagctatctgtcacttcatcgaaaggacagtagaaaaggaaggtggctcctacaaatgccatcattgcgataaaggaaaggctatcgttcaagatgcctctaccgacagtggtcccaaagatggacccccacccacgaggaacatcgtggaaaaagaagacgttccaaccacgtcttcaaagcaagtggattgatgtgatatctccactgacgtaagggatgacgcacaatcccactatccttcgcaagacccttcctctatataaggaagttcatttcatttggagaggacaggcttcttgagatccttcaacaattaccaacaacaacaaacaacaaacaacattacaattactatttacaattacagtcgactctagaggatccatggtgagcaagggcgaggagctgttcaccggggtggtgcccatcctggtcgagctggacggcgacgtaaacggccacaagttcagcgtgtccggcgagggcgagggcgatgccacctacggcaagctgaccctgaagttcatctgcaccaccggcaagctgcccgtgccctggcccaccctcgtgaccaccttcacctacggcgtgcagtgcttcagccgctaccccgaccacatgaagcagcacgacttcttcaagtccgccatgcccgaaggctacgtccaggagcgcaccatcttcttcaaggacgacggcaactacaagacccgcgccgaggtgaagttcgagggcgacaccctggtgaaccgcatcgagctgaagggcatcgacttcaaggaggacggcaacatcctggggcacaagctggagtacaactacaacagccacaacgtctatatcatggccgacaagcagaagaacggcatcaaggtgaacttcaagatccgccacaacatcgaggacggcagcgtgcagctcgccgaccactaccagcagaacacccccatcggcgacggccccgtgctgctgcccgacaaccactacctgagcacccagtccgccctgagcaaagaccccaacgagaagcgcgatcacatggtcctgctggagttcgtgaccgccgccgggatcactcacggcatggacgagctgtacaagtaaagcggccgcccggctgcagatcgttcaaacatttggcaataaagtttcttaagattgaatcctgttgccggtcttgcgatgattatcatataatttctgttgaattacgttaagcatgtaataattaacatgtaatgcatgacgttatttatgagatgggtttttatgattagagtcccgcaattatacatttaatacgcgatagaaaacaaaatatagcgcgcaaactaggataaattatcgcgcgcggtgtcatctatgttactagatccgatgataagctgtcaaacatgagaattcctttcgtcgacccacgtgttgctgaggtatttaaatcttctacatcggcttaggtgtagcaacacgactttattattattattattattattattattattttacaaaaatataaaatagatcagtccctcaccacaagtagagcaagttggtgagttattgtaaagttctacaaagctaatttaaaagttattgcattaacttatttcatattacaaacaagagtgtcaatggaacaatgaaaaccatatgacatactataattttgtttttattattgaaattatataattcaaagagaataaatccacatagccgtaaagttctacatgtggtgcattaccaaaatatatatagcttacaaaacatgacaagcttagtttgaaaaattgcaatccttatcacattgacacataaagtgagtgatgagtcataatattatttttcttgctacccatcatgtatatatgatagccacaaagttactttgatgatgatatcaaagaacatttttaggtgcacctaacagaatatccaaataatatgactcacttagatcataatagagcatcaagtaaaactaacactctaaagcaaccgatgggaaagcatctataaatagacaagcacaatgaaaatcctcatcatccttcaccacaattcaaatattatagttgaagcatagtagtaatttaaatcaactagggatatcacaagtttgtacaaaaaagcaggctggtacctggtgcttaaacactctggtgagttctagtacttctgctatgatcgatctcattaccatttcttaaatttctctccctaaatattccgagttcttgatttttgataacttcaggttttctctttttgataaatctggtctttccatttttttttttttgtggttaatttagtttcctatgttcttcgattgtattatgcatgatctgtgtttggattctgttagattatgtattggtgaatatgtatgtgtttttgcatgtctggttttggtcttaaaaatgttcaaatctgatgatttgattgaagcttttttagtgttggtttgattcttctcaaaactactgttaatttactatcatgttttccaactttgattcatgatgacacttttgttctgctttgttataaaattttggttggtttgattttgtaattatagtgtaattttgttaggaatgaacatgttttaatactctgttttcgatttgtcacacattcgaattattaatcgataatttaactgaaaattcatggttctagatcttgttgtcatcagattatttgtttcgataattcatcaaatatgtagtccttttgctgatttgcgactgtttcattttttctcaaaattgttttttgttaagtttatctaacagttatcgttgtcaaaagtctctttcattttgcaaaatcttctttttttttttgtttgtaactttgttttttaagctacacatttagtctgtaaaatagcatcgaggaacagttgtcttagtagacttgcatgttcttgtaacttctatttgtttcagtttgttgatgactgctttgattttgtaggtcaaaccatggaagacgccaaaaacataaagaaaggcccggcgccattctatccgctggaagatggaaccgctggagagcaactgcataaggctatgaagagatacgccctggttcctggaacaattgcttttacagatgcacatatcgaggtggacatcacttacgctgagtacttcgaaatgtccgttcggttggcagaagctatgaaacgatatgggctgaatacaaatcacagaatcgtcgtatgcagtgaaaactctcttcaattctttatgccggtgttgggcgcgttatttatcggagttgcagttgcgcccgcgaacgacatttataatgaacgtgaattgctcaacagtatgggcatttcgcagcctaccgtggtgttcgtttccaaaaaggggttgcaaaaaattttgaacgtgcaaaaaaagctcccaatcatccaaaaaattattatcatggattctaaaacggattaccagggatttcagtcgatgtacacgttcgtcacatctcatctacctcccggttttaatgaatacgattttgtgccagagtccttcgatagggacaagacaattgcactgatcatgaactcctctggatctactggtctgcctaaaggtgtcgctctgcctcatagaactgcctgcgtgagattctcgcatgccagagatcctatttttggcaatcaaatcattccggatactgcgattttaagtgttgttccattccatcacggttttggaatgtttactacactcggatatttgatatgtggatttcgagtcgtcttaatgtatagatttgaagaagagctgtttctgaggagccttcaggattacaagattcaaagtgcgctgctggtgccaaccctattctccttcttcgccaaaagcactctgattgacaaatacgatttatctaatttacacgaaattgcttctggtggcgctcccctctctaaggaagtcggggaagcggttgccaagaggttccatctgccaggtatcaggcaaggatatgggctcactgagactacatcagctattctgattacacccgagggggatgataaaccgggcgcggtcggtaaagttgttccattttttgaagcgaaggttgtggatctggataccgggaaaacgctgggcgttaatcaaagaggcgaactgtgtgtgagaggtcctatgattatgtccggttatgtaaacaatccggaagcgaccaacgccttgattgacaaggatggatggctacattctggagacatagcttactgggacgaagacgaacacttcttcatcgttgaccgcctgaagtctctgattaagtacaaaggctatcaggtggctcccgctgaattggaatccatcttgctccaacaccccaacatcttcgacgcaggtgtcgcaggtcttcccgacgatgacgccggtgaacttcccgccgccgttgttgttttggagcacggaaagacgatgacggaaaaagagatcgtggattacgtcgccagtcaagtaacaaccgcgaaaaagttgcgcggaggagttgtgtttgtggacgaagtaccgaaaggtcttaccggaaaactcgacgcaagaaaaatcagagagatcctcataaaggccaagaagggcggaaagatcgccgtgtaactcgagcatatgggctcgaatttccccgatcgttcaaacatttggcaataaagtttcttaagattgaatcctgttgccggtcttgcgatgattatcatataatttctgttgaattacgttaagcatgtaataattaacatgtaatgcatgacgttatttatgagatgggtttttatgattagagtcccgcaattatacatttaatacgcgatagaaaacaaaatatagcgcgcaaactaggataaattatcgcgcgcggtgtcatctatgttactagatcgggaattcaagcttggcgtaatcatggacccagctttc

SEQ ID NO: 86 - DNA, 28 bp, artificial
  synthetic sequence
atatacgcgtttagatctcgtgccgtcg

SEQ ID NO: 87 - DNA, 32 bp, artificial
  synthetic sequence
atatggcgcgcctttgatcaagcctgttcaca

SEQ ID NO: 88 - DNA, 33 bp, artificial
  synthetic sequence
atatacgcgtttaagaaatcctctcttctcctc

SEQ ID NO: 89 - DNA, 38 bp, artificial
  synthetic sequence
atatggcgcgccctgcacatacataacatatcaagatc

SEQ ID NO: 90 - DNA, 33 bp, artificial
  synthetic sequence
atatacgcgtggtgcttaaacactctggtgagt

SEQ ID NO: 91 - DNA, 38 bp, artificial
  synthetic sequence
atatggcgcgcctttgacctacaaaatcaaagcagtca

SEQ ID NO: 92 - DNA, 32 bp, artificial
  synthetic sequence
atatacgcgtagttctttgctttcgaagttgc

SEQ ID NO: 93 - DNA, 35 bp, artificial
  synthetic sequence
atatggcgcgcctactacgtactgttttcaattct

SEQ ID NO: 94 - DNA, 517 bp, Arabidopsis thaliana
  Intron number 1 from transcript AT1G03280.1 (locus AT1G032 80) derived from phytozome v7.0 (chr-ID Chr1; pos 803083 t o 803599)
ccgtcgtgttctctccccctctcttgaactttccggtaagcttcgtcgattttcctgttggacaagtgattgtaaaagtagatagttttgattaacctagatatctccattcttgtagaaacttcacctatagctcagtcgggtctgattgttacttcgaattgagtcgattgatctgccttataaaccctaatttcgtggtccttgtgcactctcacagtttccgaacccttattcttgattttctgaatttcctgagctctctcttgttactaatttgatttgaaagatggatttgggagtcaattcttctcatcgatggctctgggttttgaaattgagttcgttgtttctatgatttttgagcaaatatcatctccgttggttacttttagtgtgtttaagtttttgaacagctaatctctgttagttacttatacggtgattgatctgttttcagtttattctctgtatcaatgcagattttgtatcaaacacgaacctaatactgcttcct

SEQ ID NO: 95 - DNA, 505 bp, Arabidopsis thaliana
  Intron number 1 from transcript AT1G52370.2 (locus AT1G523 70) derived from phytozome v7.0 (chr-ID Chr1; pos 19506548 to 19507052)
ccgggcattttcgtctaagcttaggttatcttcatccccagttactttgattttttttttttttttcttctcgtcgtgttgtttgttgtggaaatagttatcggccatttctttattttattcttgacagtttgttttgatggttagggtttttagaatttaactcgtatttgacccatttgggttgtgatcgaattttaaatctcttcgaataatgggtgcgttgctttgattactcggttcttatattgttgaaagctagaatcaatttgaatttgaatcaactccactagtgcattggtccctttcgtgcaactcctttgtctgaatcttatacatagatttagaatagtagatccactcatgttgattttttcattacttattagtaaagtctctaatgcatgtcttacatctaagtttagctctacttattttgttcaagattgtttttttaccatcttctgcagaagaagcatagactaaggtttagggtagaatataa

SEQ ID NO: 96 - DNA, 565 bp, Arabidopsis thaliana
  Intron number 1 from transcript AT1G52370.1 (locus AT1G523 70) derived from phytozome v7.0 (chr-ID Chr1; pos 19506488 to 19507052)
ttttttttccgcttctctgctactgctccttcgcggtaagtctttcccattttctcctcgccgggcattttcgtctaagcttaggttatcttcatccccagttactttgattttttttttttttttcttctcgtcgtgttgtttgttgtggaaatagttatcggccatttctttattttattcttgacagtttgttttgatggttagggtttttagaatttaactcgtatttgacccatttgggttgtgatcgaattttaaatctcttcgaataatgggtgcgttgctttgattactcggttcttatattgttgaaagctagaatcaatttgaatttgaatcaactccactagtgcattggtccctttcgtgcaactcctttgtctgaatcttatacatagatttagaatagtagatccactcatgttgattttttcattacttattagtaaagtctctaatgcatgtcttacatctaagtttagctctacttattttgttcaagattgtttttttaccatcttctgcagaagaagcatagactaaggtttagggtagaatataa

SEQ ID NO: 97 - DNA, 322 bp, Arabidopsis thaliana
  Intron number 1 from transcript AT1G48830.2 (locus AT1G488 30) derived from phytozome v7.0 (chr-ID Chr1; pos 18060936 to 18061257 reverse strand)
gcggattagcctcaggtgcgttttgtttcgttctcttctgttatattctcttggatcttaatttcagagatgggtttctttgtttgttctctatttgttgtatttcgcggtaaaatttaatgtttgattgttgcattgatctgtgatatgatgaacttttcagtaaagttactttcttttggtctgggttgtgatcaatgctagatgcttattaagtgttttgtgtgtgttgagcttaaagtatcatttttgttgattattgaaatgtttttgatccagagtgctctgatcaaggttttggaggttgcatttgagtgaggag

SEQ ID NO: 98 - DNA, 334 bp, Arabidopsis thaliana
  Intron number 1 from transcript AT1G48830.1 (locus AT1G488 30) derived from phytozome v7.0 (chr-ID Chr1; pos 18060944 to 18061277 reverse strand)
attagcttcagtatccattggcggattagcctcaggtgcgttttgtttcgttctcttctgttatattctcttggatcttaatttcagagatgggtttctttgtttgttctctatttgttgtatttcgcggtaaaatttaatgtttgattgttgcattgatctgtgatatgatgaacttttcagtaaagttactttcttttggtctgggttgtgatcaatgctagatgcttattaagtgttttgtgtgtgttgagcttaaagtatcatttttgttgattattgaaatgtttttgatccagagtgctctgatcaaggttttggaggttgcatttga

SEQ ID NO: 99 - DNA, 746 bp, Arabidopsis thaliana
  Intron number 1 from transcript AT1G61580.1 (locus AT1G615 80) derived from phytozome v7.0 (chr-ID Chr1; pos 22722403 to 22723148 reverse strand)
acattaatatctctactcatatcgccgacttaaaggtacataaagtttctcttgattctttcgatcttgcttcaggaatcaggacactggttcatctcttacctcatttgattttcatcattaggtttcaatttatgtgcgctttgtctgttaaattttcgtaatttgccttggttgatcatagtttcacattctctagctgcttaagttttgtagtatgttgtaaaaatgtgtgttttgattatgatatactctcaaggtagttctggtttatgattcaaaatgagaaccctcggagatactttataaaatcaaggccggagtctctgaatcagctcttttgctagaatccagatttatctgattttttagtgagaaacactcttatagagcttgagatttggtttatcttaaatgataccatcggcctttgatcgagggaacatttcgtttcatttttccagaattccttaagagtatatcttctattgtcataatttctctgcaaagtcctgatttttgtatatacctgattcgattgattctattagattgttataggggtttctgctaatagtttaaatatgtagtctggtaatagttggtgttcattgatatgagatttttgcttgagtacatgggacctttttgttcttgcttggttttgtcattggatttgttagatgttatctgctgtgtttataagtttttatcttattttctagtatttgtttctggttgaaaga

SEQ ID NO: 100 - DNA, 496 bp, Arabidopsis thaliana
  Intron number 1 from transcript AT4G02230.1 (locus AT4G022 30) derived from phytozome v7.0 (chr-ID Chr4; pos 980043 t o 980538 reverse strand)
gccaattcgcgtacgttgttcttcatactctcaaatgttgttgatcagatttaactttctcggtctcgtgcttgttttggtctgcgatcgaagcttgttgataatgatagtagaaaaaaaggatactgtagcttacttcgtaggtgacgttgaatgatttgaattcagtctgatgaagttgagcttggaaatggtgttgctatgaatctgatttttgaaattctgtaaaattttgtttagtttggacttgttcagatgttatcgtaggtttagtagctttggattgactatgttcttctcggattcatggtctatggtttctgattgttaccaaatcaacatgccatcatagcactctgttggatcatgattcttgtttgttttctatacgaaatggtgatgcatctatgtgcatttgagatttgagtgtaattctgattaagtattttggattgttatggaacttcaggtcaaaacatcaggaagcttgtgaagg

SEQ ID NO: 101 - DNA, 614 bp, Arabidopsis thaliana
  Intron number 1 from transcript AT4G31700.2 (locus AT4G317 00) derived from phytozome v7.0 (chr-ID Chr4; pos 15347098 to 15347711 reverse strand)
aaggtgcgtgacggcgaaatcgaatagactctacatttgctcgtattcgagtttcctttgctaacctttttcatgtttcttcgtttcagttcaacgttgcgaatccaactactggatgccagaagaagctcgagatcgacgatgaccagaaactgtaagattttgcttctctgtttcatcttcattcatttttaatagatatttcgtgctaggttgccagatctattgattggtgtttgtatatatcactgttaaattgataggtctagtaaacagtaattgtcaatttttctatgttcgtcttataagcttaataagagttagaatcttcttctatgtttaatacttacattaaaataagtttcgtatctgctcataaacatatctggattatattattcagcttgatttatgttgatgcagacgtgcgttttacgacaagagaatctctcaagaagtcagtggagatgctttgggcgaggtacagattccatttttcttactttgatctaatgagtgtgaagattagcatttcgaagcagatgatgatgttttgtttatgaattgttgttattgcaggagttcaaaggatacgttttcaagatcaagggtgg

SEQ ID NO: 102 - DNA, 590 bp, Arabidopsis thaliana
  Intron number 1 from transcript AT5G50430.2 (locus AT5G504 30) derived from phytozome v7.0 (chr-ID Chr5; pos 20536308 to 20536897 reverse strand)
cttggtcatccaataacgaaactttgatcaaactggtacgccgattattttctttctttcttctgattttcttagatttcattaacttgattgactcaaaatcaatagggatctttagggaatattctttgatatgttttggaattttatctgattgcaaaatatttgtgtgtatgtttgttttgtttaattggaattttaagtttttttttttgttttcatcacaatttcatgggtttaggcaattttgttgaacggtgatctttttttgtgtgtgtgtatcaatttgtcaatttgtatttagaacagatactttaagaagtgttgcttctctatatgtgacttgagattgtagtaatagcttaactatacggcaatgtcatggagtagattatacatgcttgttcatgtcagttttccagatgtatgacttaagcaggatggtttctttatcgaagatgaccttaatttggtttatgttactgtcattcatttcatacttaaaggttggattatattttctacagtttacaattcgttgttttggttgacaggaactacagtttattggaactccctgaagcatttag

SEQ ID NO: 103 - DNA, 589 bp, Arabidopsis thaliana
  Intron number 1 from transcript AT5G50430.1 (locus AT5G504 30) derived from phytozome v7.0 (chr-ID Chr5; pos 20536309 to 20536897 reverse strand)
cttggtcatccaataacgaaactttgatcaaactggtacgccgattattttctttctttcttctgattttcttagatttcattaacttgattgactcaaaatcaatagggatctttagggaatattctttgatatgttttggaattttatctgattgcaaaatatttgtgtgtatgtttgttttgtttaattggaattttaagtttttttttttgttttcatcacaatttcatgggtttaggcaattttgttgaacggtgatctttttttgtgtgtgtgtatcaatttgtcaatttgtatttagaacagatactttaagaagtgttgcttctctatatgtgacttgagattgtagtaatagcttaactatacggcaatgtcatggagtagattatacatgcttgttcatgtcagttttccagatgtatgacttaagcaggatggtttctttatcgaagatgaccttaatttggtttatgttactgtcattcatttcatacttaaaggttggattatattttctacagtttacaattcgttgttttggttgacaggaactacagtttattggaactccctgaagcattta

SEQ ID NO: 104 - DNA, 843 bp, Arabidopsis thaliana
  Intron number 1 from transcript AT4G15470.1 (locus AT4G154 70) derived from phytozome v7.0 (chr-ID Chr4; pos 8843918 to 8844760)
gattcttctcttcctctgcatcgttcccttcatctgtacgtagatctcgttctttggataagattttcatttcatcttcgtagtttttcgttgatttgatctggtaattaggaattcttatggttaggtcaacctgattctgatttgtgcatttatgtcccttatgtttatgcatttcttttccatttctcttcatggattgagtttcttctcgtaactagatttatatcctttactgtgtttattatacatttgattgtttaggtatatatatggaggatggattgaacaatgttttatatgatgattgacagattgatgcttggtgtgatgatatctagtgtgttggtgttaggattcagaattgactttacttgatctttcactgaaacatagaacaaagaacagaccagaaacctaaggagtaattctggagaatcccttaccctcctgagcccaaaccgaccaaaatcttgacaactcacaaatctgttatatttcctattgatcctttttcttccctctaactatctcgtcatgtaacagccttgttctcttttttctattgatcgtttttcttttgtcaccttagggagaattttcagatagcttgttctctatgagttttgctttgttgacctctcatttgatgttggtttacttgcttcagtacttagttttgaatttgttagtactgagtaccttgattttgtgttgcacagtcgtacatcagctatttattttatgtcatatttgttgacaagatttattgctcatgtgattgattactgggagttcaattttgtagtaatctggcctctgcacatttaccaccagaagcat

SEQ ID NO: 105 - DNA, 705 bp, Arabidopsis thaliana
  Intron number 1 from transcript AT1G06050.1 (locus AT1G060 50) derived from phytozome v7.0 (chr-ID Chr1; pos 1831668 to 1832372 reverse strand)
ttttggacaattcttctcttcttcggctgcaaaaggtttattgtttgctccttgtcctgcgattgaattagtcttttgttatttgtatctctcaactttgattttttcctttttattattgtagctgattcctcttgaacctctgaaacttgttaatcgtttctgggttttgattgctctgttgataaaaaaaaacgtttttttttccgtttcttcttatgtgttgtagatgaatgtaaaattcaattatctgggctctgtctctgtgctttgtctattgaatggtatgcatgttatttcagataatctagggcttaggtttgtagaaaatctcagaatcgtgtatgctgaattttgatgtcattactcagaatttgagtcaatttactaactttattctagtttccggtgtagctatgacttgaaccggagttaccagctcctagtttttgtttctttgagcaatttttgtttcactcttttcttttaaaaagttcttgtggcatagtatgaatcctatgggaaattagatgaggaatagatagagcctcagacatacatggttctgttttctgatcacatgttttggtcttcttgatggcatattcttgtttgctatattcactaagtagaatccatgagattgttttccacactcagttttactcaaggatttaagctctgtgttgcaggttttcgcaagat

SEQ ID NO: 106 - DNA, 610 bp, Arabidopsis thaliana
  Intron number 1 from transcript AT1G06470.2 (locus AT1G064 70) derived from phytozome v7.0 (chr-ID Chr1; pos 1969849 to 1970458)
tcagatccaacgagccgattcttctctctttgtaggtctctttcttccattctggcgaaattttgattttccctatctgtattatgctgatttcatagtccgcgttcgttagctttgaatctatgaattttgagctcactcccgatccagattgattgcgaggagttctcttttcgttgttgcgttactttttttgagctcagaatcattgagcttttcctgatttggattacatctgatttcgtgaaactcagattcattcgaatagatttccttctttttacgtgtttgctttttctaggttccaatagtgacgtattaatctcttcttgaagcggccctgttaaagaatggtttatgtattcaatttcttctgtcggtgaactcttttggttcttatcagattaaatgtagcttcctttcattcggtttgaatctttgcatcggcgtattagagaagcttgcctttattgaaatgtggctcttgtgtgattgtttgctttgctttccactttctccagaggaatttctcacagaaatacttgacttacttgagcttgtgtttgtgattctaggtcaagtagttccagagaactgcattgcatattca

SEQ ID NO: 107 - DNA, 733 bp, Arabidopsis thaliana
  Intron number 1 from transcript AT1G14380.2 (locus AT1G143 80) derived from phytozome v7.0 (chr-ID Chr1; pos 4920770 to 4921502 reverse strand)
ttagaaggaaggacaacattcgaagaacaaccacagtaagtttggtactactactcatcaattcaattctctgaggttgacgttttaatttcctttttcaccatttttgctaaaattgtctgcttttgatttatacccagatctgattaatctctgatcgttagatttatctttatatcacttcctcagctctgaatttgatagaaaggtttgatttttactttggtatcttgctcaattggaactttttttctttttctttctcaattggaactttaccagcttaatttttggatattggtttatctgctggatcttcatgattttggtttgctgtcttcaagatctctgcttttgttcacttcatttaatgccatctgttttatttctggcttccgttactttttttattttatgccttgattcatgctacttttttatgttattatattactgaaccattgtctttagctgatggattgtggtactgtatgttcctgttaaatacttttcagctgcaacttcttcatgttcgttggctatgttgctgtgttaaaagtgaacattcacaaatttagctactttctttgcttgtaaaagttcacagaattggcttgtttctttgctggtgaaattcactggatgagcttgtttactttgtttgtgagaatttacagacttggcttgttcttctgcaggtttctacgtttagcaactcattatttttaggcgc

SEQ ID NO: 108 - DNA, 724 bp, Arabidopsis thaliana
  Intron number 1 from transcript AT1G14380.3 (locus AT1G143 80) derived from phytozome v7.0 (chr-ID Chr1; pos 4920770 to 4921493 reverse strand)
aggacaacattcgaagaacaaccacagtaagtttggtactactactcatcaattcaattctctgaggttgacgttttaatttcctttttcaccatttttgctaaaattgtctgcttttgatttatacccagatctgattaatctctgatcgttagatttatctttatatcacttcctcagctctgaatttgatagaaaggtttgatttttactttggtatcttgctcaattggaactttttttctttttctttctcaattggaactttaccagcttaatttttggatattggtttatctgctggatcttcatgattttggtttgctgtcttcaagatctctgcttttgttcacttcatttaatgccatctgttttatttctggcttccgttactttttttattttatgccttgattcatgctacttttttatgttattatattactgaaccattgtctttagctgatggattgtggtactgtatgttcctgttaaatacttttcagctgcaacttcttcatgttcgttggctatgttgctgtgttaaaagtgaacattcacaaatttagctactttctttgcttgtaaaagttcacagaattggcttgtttctttgctggtgaaattcactggatgagcttgtttactttgtttgtgagaatttacagacttggcttgttcttctgcaggtttctacgtttagcaactcattatttttaggcgc

SEQ ID NO: 109 - DNA, 470 bp, Arabidopsis thaliana
  Intron number 1 from transcript AT1G15340.2 (locus AT1G153 40) derived from phytozome v7.0 (chr-ID Chr1; pos 5276952 to 5277421 reverse strand)
gaagaaactggtatttcttccttctttgtcccttctactgtttcttgaaatttctgctgtaattattattccttttttcctttaattgatgttgtctgtgtaagagattgtttgtctgttctgctttatcttgaagttagtttcttttgtttctcatggtttagggtttatgttcaatttgggggatttcaagaaatgttcgtttctagtcgaatttggggctctttgtgttcaattcattttgaattatccaattagatgggaatttaacggttagggctttcttggaggtcaaattagggttttggattaaatactcttgaaaccctagatttggttgattaaatttgggggtttctcttagattgtgccttgtgttgctgctagttcatgtatctttggtgtttgattagtagaagcttgttttggtttcagttttatccgaaaagagccggtactccgagaaagac

SEQ ID NO: 110 - DNA, 642 bp, Arabidopsis thaliana
  Intron number 1 from transcript AT1G17290.1 (locus AT1G172 90) derived from phytozome v7.0 (chr-ID Chr1; pos 5922958 to 5923599)
ctcttcccgttactcttgacaccatcaaccccaaggtccgtttttttcttaatttttcctttattctcgcctttttgggttgctgtttgttagtgatttgtgttctgtgttttggattatgtttcctcgattgatctgtgtctttttgcaagctttgattttgttttatactccgatgaaattttgtgatttatgatttggtaaagtgaagagcttcgtttaatttcttcgagattgctctgtacttgatttagggtttattgatcacctgcttgtgttctttttgggcatcatgtttcgagtttatgcatattatgattcgtatcctcgtctccgcatcttgatcattgacccttgatggatttatttcttttacgtattatattactaggtgatcctttgtttataggactatttagaatccattttgttcttcagctttttgcgtatattaaaaaagtctgttgctttctgaattcttcatttttgttcttccttgtgattagctcatactttacaattgaatagtttattgtcgaggaacagttctgcatcttaaatctagctttagtgactgatgttttgtttggttttttttattctaacaatatggtttctttttgggggttctcaggttatcaa

SEQ ID NO: 111 - DNA, 475 bp, Arabidopsis thaliana
  Intron number 1 from transcript AT1G17880.1 (locus AT1G178 80) derived from phytozome v7.0 (chr-ID Chr1; pos 6153426 to 6153900 reverse strand)
acactcttcgaacaaggaagaaccctaatctcaaggtaaattcattatcactgtaattttcctttctattagtgttttatctctccggttctagggtttctctaatccccgattttgcaaaatgtcagatatctttctttcttgattcatttcgcttctttctgtagataggattagtttttgtcggtgtttgggaatttactgggttttcaacttctctgtgtgtttgattgggggatttggtatacctaatcgattgaaaatgattaaatttaggttaaaactactagtcacatcaccgtgtcttcatacgcatctgagtttaaatctgttcgcgcttactttcttctcactagtttcttgtataataagaagtttttgtgaatgtattattagcagttaatgtgttcattgattcttttggaagtgatttggggattgatggattttgcttcttattatggtttatacacag

SEQ ID NO: 112 - DNA, 452 bp, Arabidopsis thaliana
  Intron number 1 from transcript AT1G18490.1 (locus AT1G184 90) derived from phytozome v7.0 (chr-ID Chr1; pos 6367301 to 6367752)
ctctgtgttgggtatttttctttcttcttttgtctctgtttgattttctcctactgcgatagggttattgcaattgcagctagttttgatcgaatcagtgacctagttaaagggtttaacgttgttttgttggatttgaataaatgtggaaactcatttgatccaccaaatctggccaattgcagattcacaatttgaaatcgtcagagtctctgagaagtgcaaatcttgtaactttgatgtatacatgatgcaaatttaggatttttagagaagaaatatcatatattaatatatcaatctattcttcatagagggactactaggatcagtgattttatggttcattgtggtgagagttgaagttagaatttggggaatgtttgttttataagcagaagtgtgatttgttttttggtcattcttgtgtgcagactcagttagtcctgcag

SEQ ID NO: 113 - DNA, 441 bp, Arabidopsis thaliana
  Intron number 1 from transcript AT1G18630.1 (locus AT1G186 30) derived from phytozome v7.0 (chr-ID Chr1; pos 6414785 to 6415225)
cagaaattatcatcatccacagagaaacccaaaaggtgtgtaaaatcaattgctttcacgtttgaatttctctaattccgggttcgatcgtatttgctgaaagtttcatttgctagatctttctctgtctagttgcttcatttccctcaattcattgtctatgcgtctcttacccaactcaataatttgatttggatccgacatgtgttttgtttctactgttctgagtgatgctaatagatggattcttcaggaactggattagtggagttaaagttttaagcttttgactcgattcttatagatattgctttgttgattctatccggaaaacgtaaatgtctgaaacagatctactcataagatttcaccttgtgatcaccaatctatcaacattctttgattgtttcttcttgaaaatgtgcttagagattgaagaag

SEQ ID NO: 114 - DNA, 840 bp, Arabidopsis thaliana
  Intron number 1 from transcript AT1G18720.1 (locus AT1G187 20) derived from phytozome v7.0 (chr-ID Chr1; pos 6458491 to 6459330 reverse strand)
ttgctgttcgactaggatcttctcttgccttaaaggttagattttttttctctaatttcaatttagggtttttgaaaaaacttcatttttggagaaaataattgcgtagaagcatgtttatgagggtatatgactatgtgtatccatgtgttgctctatgtgtatatttatatgatgtgagtgtggttcatgcatttattgttcattgttttctatgctttgacttgaaagttcgtttatatcattggttatgctcggggaagaagaaatagatttatttatatcattagtcctctctatctgttgtctatgggtcccttcattagctgttaacgttgagacagcagtactaatatcatgtctctagctttgaacattcatgattagtagttattgcagtttgttctgcaattgtccacctttgcacggttctgattctttggtccggagacttgtcatgtttttagtgttgttgactcattggttaagaggatttgatgtgtgcttggacggaaacaagtgttgttcttgaccaccaacatttggatggtctcagataattagaatctacatcacttgtttaactaaagtttggtttttcttccatagtatttgagacatctgtaacttaggagcttttttatgtatcttctgtgttgtgaatcatttgattagtttatatgtatcttcagtctgaatcatttgattagtttgttatatgtattcaacagcaaggggaaaacagttaatactcaccaagacgccaactctctctgttatgtagatactgtaacaatttaattgtctttttactcaggttgggttagcatctcagctgtt

SEQ ID NO: 115 - DNA, 486 bp, Arabidopsis thaliana
  Intron number 1 from transcript AT1G21380.1 (locus AT1G213 80) derived from phytozome v7.0 (chr-ID Chr1; pos 7488041 to 7488526 reverse strand)
catcatctgttctcaagtttagagtctatagtcaggtaaaggtctttgcctttgttttagttcaattatgatttctgtttatgttgtgttctcttcttccttgttttccagatgtagacacattatgggtttaatttgaaactcttgccaatactttgattcatactttcttatttatgttttgtccttgaatttggatttggttatttgatggcttaatctgtcctgtgtatctattgaattgccttcttttaagagtctgttgtataattgaatgcttctggcttcgtgatctggtctaatttacaagctggtttgtgaattgtgatagcctttgtttgttttcagagtctgatcacagtgatattgataaagtgtttgatctttaacttgcatgttatatctggaattaagagattatgttaatggtttttgaacctgtgttcattaggaaacttggaactttaggatttgattgaaaaagca

SEQ ID NO: 116 - DNA, 233 bp, Arabidopsis thaliana
  Intron number 1 from transcript AT1G25420.3 (locus AT1G254 20) derived from phytozome v7.0 (chr-ID Chr1; pos 8916159 to 8916391)
caactcttcaaccgtgggatctttggcgccaagtttcttcgtcttcttcttttctcttatacgttgatttgggttttgattgaagctagggtttcttcaataatttgatgccatcgattactcttttgcttcaatttgaaattagagtttgttatgctcttaattgtccataaaactgagaaattgaagtaaatgttggcagcaagacaagcttgaacttggcgatagctcga

SEQ ID NO: 117 - DNA, 452 bp, Arabidopsis thaliana
  Intron number 4 from transcript AT1G25420.3 (locus AT1G254 20) derived from phytozome v7.0 (chr-ID Chr1; pos 8917185 to 8917636)
aagacctactggtaccatctctgaacccagtttttcaaattttgtgggaaagttagtcggtaacaaccacattcttcggtctcctaattcagatgtgaactttgatagaagttagttatgtcacgaggtaaaaatgtggtttccctaaatggaaagagcatgacaatgaattggaaatttgagaactacttgtaggaaagtggtgcctaacatttctatatgcgtccacggattcttacgttttcttgtaggtattcaatagagcaaaaggaacgatatatatatatacccaaatgacgagttttgttcaatatagcttctgatcttctgtagatttgaatgattttgcaaatgttttgtaaaccttttatatgaaatgagtccgtttataaagttgatagtttgatttcaatgtcatatgtagggtggagctaagcaaatacatcgtcaag

SEQ ID NO: 118 - DNA, 568 bp, Arabidopsis thaliana
  Intron number 1 from transcript AT1G26270.1 (locus AT1G262 70) derived from phytozome v7.0 (chr-ID Chr1; pos 9091715 to 9092282 reverse strand)
gccggcgcgtcattgtcattcgtcgtcgagttctggtgagtcttccatttttctgtagatttgttgttgtcttgacaaaaatggagttttgaagatgtttcttaatacgttcctcggttgtttgtttcctgatttgattcataggtctgagattgctattaattattcaaatctcatatcgagcttatgttttttgtattagttcaatgttgttgattgttaactagatcaagctggattaagaaaattagatatcttcaaatgcttttgttgcttccatttgttattttcagggatctatgttggacttaaagttttggttttgtgttcttactcacgttcgatttaattcctctctttgtagattgttttaactatggaagctcgtcgtggagtctaattcattattgagcttgaggattggttcggttgatggtcttttccaccgtttgaaagagttcttcagtttaacatctggtgttggatctagtcacctgtattgaaagtgggaagaaactaacttgtgcagccatagtcgcaaaggctgtgattttttgtctccacactc

SEQ ID NO: 119 - DNA, 536 bp, Arabidopsis thaliana
  Intron number 2 from transcript AT1G30110.2 (locus AT1G301 10) derived from phytozome v7.0 (chr-ID Chr1; pos 10582164 to 10582699)
gctttttgcaaagtcaaagataacaaataaataaggtttgttccttctttcgatgctttctcgtttttgtttctcagatctgtatgttcttgatttgtttctatgtgtttgttatctaattctgtgttttgacttttgattactgggaattgaccaactctgattatgattcttgactcttttatttagttaaaattattcttttgatttgaaagtagacttaagagtggaattgcaaacatttctggatgtttctgtctttgattagtgaatagaaacttgaacatgatagtttctagtttgttttcctcgatccaaattcagacaatagagtagttaggttttgctttttaggagaatctgtcaaaactacatcatctgcttataaataagccaaagagtgaagaaacaaaaacatttttggttttgcaaagtacttaaaaacagtaaaccaacaataatgataccaaaacaattcttgtaattatctttttcttctgttaaataatggttaagtggtgatttgtttcagaaaa

SEQ ID NO: 120 - DNA, 593 bp, Arabidopsis thaliana
  Intron number 1 from transcript AT1G31930.2 (locus AT1G319 30) derived from phytozome v7.0 (chr-ID Chr1; pos 11465163 to 11465755)
cgactttttttttgtttctcacttttatacaaaaggtaagattttttcatcttcttttgcaaaagatttattttgttctgttgctttaattggtgtcttccttcagagacacagctcattttttttgtttcattctatttgaaattttcatgaatttgcttaatctatcaacagtcatgatctgaaattttgctgcatgtattcttattagcaagttcgattcggtagtggatttagaataattaaccagtttagtttttttttcccttttagttttttcttctataggctgcgttcaaagctggaaacttttaagtgggtttggttagatgttgaattaatttttttcatggacaattgatttgaccatgaatttgtcaaaatgtcaatttaaaaagcttttcctttttaggtttcaatgctctctcgtgaaacgtccatatatgccggctatttgactttgatttttattcatatgacaaaactaaagccaatttggtaacacatatacttatcctaatcccaactctttctttgtttttatcgtctttgtgtctgaaccaggaaccttgttttgtcttaaatcagaggaa

SEQ ID NO: 121 - DNA, 593 bp, Arabidopsis thaliana; identical to SEQ ID NO: 120
  Intron number 1 from transcript AT1G31930.3 (locus AT1G319 30) derived from phytozome v7.0 (chr-ID Chr1; pos 11465163 to 11465755)

SEQ ID NO: 122 - DNA, 418 bp, Arabidopsis thaliana
  Intron number 1 from transcript AT1G31930.1 (locus AT1G319 30) derived from phytozome v7.0 (chr-ID Chr1; pos 11465163 to 11465580)
cgactttttttttgtttctcacttttatacaaaaggtaagattttttcatcttcttttgcaaaagatttattttgttctgttgctttaattggtgtcttccttcagagacacagctcattttttttgtttcattctatttgaaattttcatgaatttgcttaatctatcaacagtcatgatctgaaattttgctgcatgtattcttattagcaagttcgattcggtagtggatttagaataattaaccagtttagtttttttttcccttttagttttttcttctataggctgcgttcaaagctggaaacttttaagtgggtttggttagatgttgaattaatttttttcatggacaattgatttgaccatgaatttgtcaaaatgtcaatttaaaaagcttttcctttttaggtttca

SEQ ID NO: 123 - DNA, 483 bp, Arabidopsis thaliana
  Intron number 1 from transcript AT1G48110.1 (locus AT1G481 10) derived from phytozome v7.0 (chr-ID Chr1; pos 17772824 to 17773306 reverse strand)
tcgtgattatcccaaatttctggtaaatttgatttctgctacttctactcgtcattttattctgaattcgtctttgcgttcgaattatttcaagcaattagcttcatcttcgtgtgaaatttcaatgttttaggatttgatttggtgtcataaagaacttatttttctcgtgattttgcatcttcttttaagtttttctgggctggtttcatggctcctttatcgtttcacgtgaatttcagtgtcgattcgattgggattttgagaatagttggggacgtttctgtattgcaaaagaatctgtgaatcttttttattcttctgatataattttccaaggagattaatcgttgtatcctactgctgtagcttatttgtttaagtttgatattatttcttcaaaacaatcttcacaaatttctcatgttcgttcttatgttaatttcaggtgtttattcaaactccattgttacaaagattttc

SEQ ID NO: 124 - DNA, 213 bp, Arabidopsis thaliana
  Intron number 1 from transcript AT1G53120.1 (locus AT1G531 20) derived from phytozome v7.0 (chr-ID Chr1; pos 19792908 to 19793120)
ctccattcccacttcgtttcctctccgacagtcaggttcgtccgaagttttgattttggattcaccatcgtacttattcaattgatgaaagtttctcttcatgatgatagtttgcaacttttctttgggaatttagaggttagggcattaacttcatcaaagttttgttttttttctgatgaaatctctaataaaaattgcagctttgagaag

SEQ ID NO: 125 - DNA, 491 bp, Arabidopsis thaliana
  Intron number 1 from transcript AT1G53380.1 (locus AT1G533 80) derived from phytozome v7.0 (chr-ID Chr1; pos 19915925 to 19916415 reverse strand)
caaggaaggtaaagaaacagagagatctaacttcggtgagtgtacaaaccattattttcacttaagcaagttttgtttgttaaactttcatgcgggtttctggtgaatgattcgattccattattgctttgtttttttttgtgtgttttcgaagttttaatttttattacagtggaaggttcatgtcgctggccgtgggcctaatctccattggtgttagctaataacaataatgtctaatttttgtcgcatttattgtttttagttcatcttatatataaatagttgattctctaaaagggttttaggactttcttcttttacacaacaaaaagtttggatcttttgttcatctattttttctttgagtttttttttctgtgttcatcctctgttctattttttttttcttctcattcttgggttgatttttgacttctgtttgggttgatttagtctgcagggtttaagcagaggttggtttgtggatt

SEQ ID NO: 126 - DNA, 567 bp, Arabidopsis thaliana
  Intron number 1 from transcript AT1G54270.1 (locus AT1G542 70) derived from phytozome v7.0 (chr-ID Chr1; pos 20259928 to 20260494)
gctttcatctttcattcaactacttaagctccaaggttcggaaatattttttttacttttctctgcgatttgttccttttcttatgaacgattggatctcgagtctgatttactctctttgcgatggaatttgttctgggtcgttttcaaaattgacgcttgttaatctataattcgtcatcggattcaattagtccgtgaaacccttcaattcgtttatctcaaatcgatttgggttaggttttgatttcgacacttatgttaaaatcatccaaagcttttatcttcgattttggacaactttgtgtatattatatgctttcatggagagatagatgtttttgaatggtatctgttatgataattggatgaaccatatttcctatatctctcctgacatcgaataattcagatattaatgcttgtgttcctctctatatggaacttcaagtttggctattctgttacattcttacttttgcacaactctctctggctataagatttaagaatcatctctagctatctgggttctaaactattgtttcttttgtgtattgttgtagt

SEQ ID NO: 127 - DNA, 688 bp, Arabidopsis thaliana
  Intron number 1 from transcript AT1G54850.1 (locus AT1G548 50) derived from phytozome v7.0 (chr-ID Chr1; pos 20454443 to 20455130)
aggtaaagtaactaatttttctcaaaaattcgtcagttttgtttctactcttgctcttatataacccaagtttgtgtattttcgtttgattctgtgaaagatttaatttttctttatgggttttgtacattttcactgattgaaattaggttacttttggctaaaagtctgaaactttgatgaaatacttgtgtgccaaacttattttcaggtttaaaacttaaacttatgtctaagatagtataatattcattacttggctaaacccttgcttacaaaattgggtcagactcatgtgtgtatctaacattgttgtgtaagaccttttcgataacataaaagaggacaaatgatgaatgttgcctcttcgtttgtctaatttgtggtcatgaaagtataagaagtttccgtttgtatgaatattcgtaagcattaatagtggttatacatcacaagacttagcttgcttattggatcttaaccaatatagttcaatctcttgctctcttactgattctagaatctagctacctctatagccttataatgtttcaaagattaagcctttttagtccgctgctgttttaaagaatcgttgtagtttcgtgagtgattctgttatatagcgaatctgagtcaagtgtatgataaaaggaattgttgtgcttcaggtcttcaagtggtctaa

SEQ ID NO: 128 - DNA, 376 bp, Arabidopsis thaliana
  Intron number 1 from transcript AT1G55730.1 (locus AT1G557 30) derived from phytozome v7.0 (chr-ID Chr1; pos 20833985 to 20834360 reverse strand)
ctttcttctctgaccattggttgacttcttcttaggtactaaaactttcgaatctctcttcaccgtttcgttgatccctccgatcatctttaggtcttctatttgattcttggtagtttatatctggttttagggttttgatattggatggaattgggtttgtgtttttcaaatatcaagtcatttgattgggctctgatttcatggaaagattaagcttagattaacacattttcagttgaatcgtgcaagcttgttctggattcttgttttcacatttggttgtggtttatatactgtataacggaatgctctttgatactgatgattgatctcctaagcatttccaatctccaggtttccagaagaagacgat

SEQ ID NO: 129 - DNA, 392 bp, Arabidopsis thaliana
  Intron number 1 from transcript AT1G55730.2 (locus AT1G557 30) derived from phytozome v7.0 (chr-ID Chr1; pos 20833969 to 20834360 reverse strand)
ctttcttctctgaccattggttgacttcttcttaggtactaaaactttcgaatctctcttcaccgtttcgttgatccctccgatcatctttaggtcttctatttgattcttggtagtttatatctggttttagggttttgatattggatggaattgggtttgtgtttttcaaatatcaagtcatttgattgggctctgatttcatggaaagattaagcttagattaacacattttcagttgaatcgtgcaagcttgttctggattcttgttttcacatttggttgtggtttatatactgtataacggaatgctctttgatactgatgattgatctcctaagcatttccaatctccaggtttccagaagaagacgatattgtagtgtatcctc

SEQ ID NO: 130 - DNA, 542 bp, Arabidopsis thaliana
  Intron number 1 from transcript AT1G67480.2 (locus AT1G674 80) derived from phytozome v7.0 (chr-ID Chr1; pos 25276311 to 25276852)
aacccaaaaaccgacaaagttcccctattctctcggtataacctcatctttatcttctttctccgccattttctcttttctttgtataaatgtctttacccattttggattagattttccccctccaagtaaatgaatcatctgcttcttcaggtctccattgattctcctactctgttttcctcctatatttgtatttgatgttttgtttttttctttggaaccaaacaagtcataaagtttcgatctttgagatcttgcccaattcttggaactagtgtttggttttcttgataatatttctgtgagagaattcttcaattttcagattttcttgataatgttttgctcttttaggaaataatttatagccattcagatttattctcttgtttctttgtggtatatggtgcttgtaattttgcaaaatttggagcaccctatctttttgtttgatgttgatcttattggttcttgacttctttcaaagagttgacttatctgtaaaaaaatattttgcagaaaattcattacttctaaag

SEQ ID NO: 131 - DNA, 407 bp, Arabidopsis thaliana
  Intron number 1 from transcript AT1G67480.1 (locus AT1G674 80) derived from phytozome v7.0 (chr-ID Chr1; pos 25276446 to 25276852)
aatcatctgcttcttcaggtctccattgattctcctactctgttttcctcctatatttgtatttgatgttttgtttttttctttggaaccaaacaagtcataaagtttcgatctttgagatcttgcccaattcttggaactagtgtttggttttcttgataatatttctgtgagagaattcttcaattttcagattttcttgataatgttttgctcttttaggaaataatttatagccattcagatttattctcttgtttctttgtggtatatggtgcttgtaattttgcaaaatttggagcaccctatctttttgtttgatgttgatcttattggttcttgacttctttcaaagagttgacttatctgtaaaaaaatattttgcagaaaattcattacttctaaag

SEQ ID NO: 132 - DNA, 336 bp, Arabidopsis thaliana
  Intron number 1 from transcript AT1G69510.1 (locus AT1G695 10) derived from phytozome v7.0 (chr-ID Chr1; pos 26126443 to 26126778)
gaatctccattctgtaaccggcgatcctctttctggtataactcttccaccaaaatttatttccgattactttctcctttcttcttgttgattttatccttttgatcattcatgttcgagtaaacgataaaactgttgcttgaagttttttaatggcgatttctaatgtgatgttagagtctatgtctagatctctattaagattcgaatactgaattcgcgggaagtggacttttttgtttctaatgattgatttagtactgataagtgataacgatgtatatagtttttgttctggacttgaatttgaaaacatacttttgttaaagctcagtt

SEQ ID NO: 133 - DNA, 336 bp, Arabidopsis thaliana; identical to SEQ ID NO: 132
  Intron number 1 from transcript AT1G69510.3 (locus AT1G695 10) derived from phytozome v7.0 (chr-ID Chr1; pos 26126443 to 26126778)

SEQ ID NO: 134 - DNA, 526 bp, Arabidopsis thaliana
  Intron number 1 from transcript AT1G72830.3 (locus AT1G728 30) derived from phytozome v7.0 (chr-ID Chr1; pos 27407096 to 27407621 reverse strand)
gtttttcttcttcgcttcatcgattactcaaagaggtttctttctctatctcttatctatttctttctgcatctgtagtctctttgttcgaaaaaaagatgtttaatttctgtcaaatttttctccttttttctttgttcgattattggtgtatctgtcttgtggcgtgcgattgatgtttactgattctgaaaaattcttgctaaaataattcatcttcaagtcaacgactttttgcccaaaagtgatgacgggaacaagaaatttttcttggtcggaaaattactaattttagccaatcgtagcgatctctgcaatcgtgttttggttacccaagatagtacgatcgaatcagttcgtttagagaattaaaaaattactcaaatttagaaacttccaacttctgtttctttctattctgggttttttcacccacttggattattagctttaaaaatctaatctttgagtcatttttgattgttatttaggttgttggttgtgagaataattagcttgttaagga

SEQ ID NO: 135 - DNA, 404 bp, Arabidopsis thaliana
  Intron number 1 from transcript AT1G75340.1 (locus AT1G753 40) derived from phytozome v7.0 (chr-ID Chr1; pos 28271467 to 28271870 reverse strand)
aggaaggaactgtgtagaaactttcagcgtggcaggtaaatactcttttcatcatcatcatcttcttcttcatctgttctagtttttgttttgattcaatttgttgttttataagagtttttgaagtttgtttcgattgctgaagtttaggtttcgtgttctatattctggggtttaatttgaaatcaatcgatgtgcgaaggtggtaatgtgttagaaaacgatgtctattgagctgaaatctaaatgaatcatacagtttattgactttgatagattctaatcttcgtttccgccattaatgagggttgatttgcttcggaagttatgattagtgatagtagaagcttagagacgtaattattggactcatcgtcctttgtgctgtttttgcagttgtaggt

SEQ ID NO: 136 - DNA, 268 bp, Arabidopsis thaliana
  Intron number 1 from transcript AT1G75510.1 (locus AT1G755 10) derived from phytozome v7.0 (chr-ID Chr1; pos 28348199 to 28348466 reverse strand)
aagttgatcctctacgggacgattctccccccgaggtaatttggttcttaaattttgagttttagctcaaaccctagattgttgattgattagtccgtttttatgaaattgagtgttgaaattacattacttgtgtcgggagcttgaaaaagtttgaatctttcatgccaatttcactacccatgtggttgattttcaaaacctagcttaggggtggattattcttcttgcaacttattacctttgttttggtattaatcagttcaaa

SEQ ID NO: 137 - DNA, 576 bp, Arabidopsis thaliana
  Intron number 1 from transcript AT1G77580.2 (locus AT1G775 80) derived from phytozome v7.0 (chr-ID Chr1; pos 29146824 to 29147399 reverse strand)
atctcaaagttcttcatacagtccccaaccaaaaggtatttacttcaccaaacatttggtctctttcacaatattctcttcctttgttcgtttttttttaatttatctacttaagtgttctctgaaatagaccaatgtttggagtgtagtttgagacttacttatcactgttccattaccctcgtagcttttatttccttctcttggatttggggttttggtagattttcccttatgcctcaacgagtttcaaatttaaagtttcaagcttttgttctttgtcttgtagctttctcaaccgttggtttttgattatgaaacggacatctggaaccacatttgttactataaagacaaattcagttcctttaaatcatttctaatactttgtgttaaatgattggtttattcaagattttctcttatcttgcatgtttgctgattggttcagtttacttcatcttaaagtttgtttcttctttgactatgtttatgtatgtttcagcatttttaaagaatccaatgtatgtgtgtgtgtgtgtgtgttttctctctcattcagatcctgagactgtt

SEQ ID NO: 138 - DNA, 330 bp, Arabidopsis thaliana
  Intron number 1 from transcript AT1G78630.1 (locus AT1G786 30) derived from phytozome v7.0 (chr-ID Chr1; pos 29576244 to 29576573)
gccctgtaacgataatttttctatctccctctgtgtttagcatctacgcatttataaagtgtcgcactttagctcttgctttgaatttgaagtatggcttgtttttttcttctcccaattgcgatttattaagtagtggattttgcctttgactcattagctgtgttgtctgcatcaattggcttcgaaaattgatgtttattcttctgaatttgttaacttggacgttttatgaaattattaatgtttggttggagagaagttaaaagtctttggcttgaaacctttattgagtgtattctatggtttacaggacatctggaacacgac

SEQ ID NO: 139 - DNA, 740 bp, Arabidopsis thaliana
  Intron number 1 from transcript AT2G03350.1 (locus AT2G033 50) derived from phytozome v7.0 (chr-ID Chr2; pos 1020238 to 1020977 reverse strand)
acctcactgtgagtgctccttaaatcgaatatcttctttttgctttgtctctgatgttcttgcatgcgtttcctctgtgaaatcgatggctttttgttacgtttggtgtaatgtgttgattaaaaggcgattcttttgtgaaatcttgtacttgtatgtttcgaaatcgtagaagaatcacagatctatgaagatctgagatgggttttaccaattaaagatgaaaattagttaacatcattagaattgttgatacatagtccttatctcagaccaattttgatataaagttgagatttttagcaatttgatgtagaaacaagttccaattttaccaaattgagatttttagcattagagagtctttatactagttaactcaactaagcttgtttctcaatttaaagtttccattttaagccattgtttactagaaaagatgaatcctttttggtaataatgtgttcatgttctgctttttgggctaagagctctactaagataagcctagaaaaccagtttcactggatttgtgttcttgagtttgctatagttgtgccaagatatctattctaagaccatttttcgaacgtatcattcgatttatcttcttaactaagtatcagtgtgttcgtaggctagttattcgatatttggttgatttgcattgcctcaaatggttatatgatgttcatttttctcttccagacattctccagtacggttgaagagaaagcaaa

SEQ ID NO: 140 - DNA, 536 bp, Arabidopsis thaliana
  Intron number 1 from transcript AT2G19880.1 (locus AT2G198 80) derived from phytozome v7.0 (chr-ID Chr2; pos 8581630 to 8582165)
ttacaagccctttcgctgtcttcgttcagatccaggtgagagctttttttttgtcttttgctgttgttgtttccgattgaaagtttggtcctttttttctctttcaaaattttgaattttgcttgctcctctgaatcacacgttcggattccataaaacccaattcgcttgttttttgttttacgttggttcagatcgaaagtttggtcctttttctcgttaaatgttggaggataaaagtctggattttggggatttgttatctttaggggttttgttctacaaaggtttgaaaagtaatgatttttatgttccgtatgaagcgtagaaaagaagaaattgagcgtttgttgcatcatcaatgattttccaggaaaaatgattggtttagatcatataaatcctagcagtttttggttaaatgtgttctcttttagttgtttgattgagcatttttatcatcaggataagaatttttcttgcgtttgttatttgggttcttaatgtttcttgtatatgcttcaggggtgtacaat

SEQ ID NO: 141 - DNA, 684 bp, Arabidopsis thaliana
  Intron number 1 from transcript AT2G27340.3 (locus AT2G273 40) derived from phytozome v7.0 (chr-ID Chr2; pos 11696765 to 11697448)
acattcttccggattctcagctgctgaaatctccggtgagtgttcccacactctgtcaattttggttattaaaattttgtttcatttcttttgattgatttttagtttaaaaatgtcaaattgaatgctttttctcgagaatttgagctaaattactgcaattttgtttcagttttcatgggcttctacagccatcacgtccttcctcattcttgccatcgatcaagctcttactttctcagttctcagtgtcgatagattctcttctttggtttagctgttccactctctgattttacttagcttgatccttccgaatgtgaaaatgtttctgttatgtttatctgaaatgtggactcatgaatctggaatttgagcaaacaagggtttcttccgaatgtgagcttgaatgcttacaaattttgaatctttttgtttatttgtttgctctcttcattttttaattgatctggtcacctgaaatgagttaagttcgacttatatagaagctatgttctgcaaatccacattgatgattttaccattttgttaatttggatgaagttgatccatcaagaaacactttaagacttataattgttggacttgatctgactttctttttgggtactgaccatttatgctgacaattttgtattgattcaatatcatttatggtgtcag

SEQ ID NO: 142 - DNA, 309 bp, Arabidopsis thaliana
  Intron number 1 from transcript AT2G29590.1 (locus AT2G295 90) derived from phytozome v7.0 (chr-ID Chr2; pos 12654967 to 12655275 reverse strand)
tttcctgctctttcaaggttcctcttcgtttgacggtaagtctttctctcaatcctctaagccccttctattttgattaattgtcgaattagcgtgataggtttttggaaataagctaatttgaggtttaatggcattattgtcagatgtttgaagatgatagttctcggtgatactattagtctttggaaacttgagcagaatctagaagatgcttgaacttgattgtgtcgtttttttcttttattggagacgatgttgatattttaatgttttgataatgtcaggacagagacaagaatttagcaa

SEQ ID NO: 143 - DNA, 458 bp, Arabidopsis thaliana
  Intron number 1 from transcript AT2G31305.1 (locus AT2G313 05) derived from phytozome v7.0 (chr-ID Chr2; pos 13350451 to 13350908)
tcaacaagcgtcccttcctccttggggattcacaggtttgcttcttcgtcgatttgattctttgaatctttttttcccctaggtttaggtttcgctattgtttctacgatcgaaactaggtctctctattgtttactgcaacatttgattctcaatttcatatcaccgatttgtgtttatcccctggaattaggaatgattagggttcagatctcgtaggcaatgaatttagggttagagaaatagcatctgtttggtttgtttacctaaagaatgaaccctaaaggctttgttctgttttacgattttgtttaaggtcttagtttttatctttagctcttgtcattcttaagcatgttgttagttgttactattaagaacttttattctctgttcttgtattttggtaccttatgaaattagtcttttatgcagattttgaaagctaatcttcagct

SEQ ID NO: 144 - DNA, 422 bp, Arabidopsis thaliana
  Intron number 1 from transcript AT2G32090.1 (locus AT2G320 90) derived from phytozome v7.0 (chr-ID Chr2; pos 13644534 to 13644955)
cagacatcacacgcctcgcccagttttacaaagaggtaacgacacctaatcgacgttttcaatttcttacacttttctttttcttatctctcttcgtattctctgttctgggtttgtgttgttactaccaatttcgacccaaaaaaacaaacgcactgagtcgattacccatctggattagaatctatggtttgtaatttggctttttatttagagatttgtgttgctattgtggctttgtctctttctcttgtcacttatctcgtttctagtttctattgagagtgtccacttttggatgcctttaatccttttgattaagttagtgttatcttcatcttcgtggtttgttctgaaaccaatggattatatatgtataattgtcaggtgtttgggttcgaggagatcgaaagtcctgattt

SEQ ID NO: 145 - DNA, 495 bp, Arabidopsis thaliana
  Intron number 1 from transcript AT2G33470.1 (locus AT2G334 70) derived from phytozome v7.0 (chr-ID Chr2; pos 14177954 to 14178448 reverse strand)
tgatccatcccacctttttcaattctcaggcaaaggtacgatctttctccttccccgttagagatcagccttagattcgtcattctcgtccattgaatcaatagatctcgaataattgtcttgttttattgtttcttctcacgctgttttgatgctcttgcttgattggtggatccaattgaaattagatctctgtatcgattcggttgatgccatttttatgattcttgttctggatttccactgtaatggagctgatttaaatagttctatatctgcatgtgtagagagattgttggctgtttcaattttccttatggagctgactcatttttacaaagtgactttcatgtttgattcaattcattacctttttgcttgagttaatgtgtttctcagtgttgttcatgttgtttctcagttttgggtttgtttaatgttgattatcttcattcttcagtgtttgatctcatattcagataagtcaaacttgaa

SEQ ID NO: 146 - DNA, 498 bp, Arabidopsis thaliana
  Intron number 1 from transcript AT2G33470.2 (locus AT2G334 70) derived from phytozome v7.0 (chr-ID Chr2; pos 14177951 to 14178448 reverse strand)
tgatccatcccacctttttcaattctcaggcaaaggtacgatctttctccttccccgttagagatcagccttagattcgtcattctcgtccattgaatcaatagatctcgaataattgtcttgttttattgtttcttctcacgctgttttgatgctcttgcttgattggtggatccaattgaaattagatctctgtatcgattcggttgatgccatttttatgattcttgttctggatttccactgtaatggagctgatttaaatagttctatatctgcatgtgtagagagattgttggctgtttcaattttccttatggagctgactcatttttacaaagtgactttcatgtttgattcaattcattacctttttgcttgagttaatgtgtttctcagtgttgttcatgttgtttctcagttttgggtttgtttaatgttgattatcttcattcttcagtgtttgatctcatattcagataagtcaaacttgaaaaa

SEQ ID NO: 147 - DNA, 432 bp, Arabidopsis thaliana
  Intron number 1 from transcript AT2G40540.1 (locus AT2G405 40) derived from phytozome v7.0 (chr-ID Chr2; pos 16931013 to 16931444)
cacccagaaaaattcatacttcaattaaaaattctgtaagtggaaaaaacacagttggcaaaatgggcaaaagctaataattgatttatctccatttatggctaaaagcctaacactaggctctacacttttcaagtcttttcattttctgggtaattgttgttcaattttagagatttagggtttttgattgttcttctttttctgggttttatctaaattcgtggatatgagaatggcatgtgcgtgaatgtggcctactttgttttcttccttctaatttgggaacagagtttggttgtcctatttattgttactttgtaggtttcactcttttcgacattacttttcaattgcttcagattcataaatctatcttcttctttctttggttgttcagctttagcgtgttaggctgaacatttaagaacc

SEQ ID NO: 148 - DNA, 701 bp, Arabidopsis thaliana
  Intron number 1 from transcript AT2G40830.2 (locus AT2G408 30) derived from phytozome v7.0 (chr-ID Chr2; pos 17042858 to 17043558)
aaattcttctcttctgtctttagatttcttctcaggtaattttgctctgctttgtgaagcgttttcattgatcggattttagcttctcgtatttaaattgatacttgtgtgcatctgaaattcgtttggattaagccattccgaattttgagttacttgtgagttgtgagttgttacattaccctctcatttattttcccactccataaattggtttcagttagaaattgtagtagctacaaggtgattgattgcatcattatttgaaccttcgttggtttgtgttggcttatataagcaagttccgtcaaaagattaaaactttgggttcagtctctgtgtgtttattagcagctagactttgtattgcctgaaaattcatgattgagggatatgctttatgtactattataagttctgagtttgtagaaacaatattttgtgttttggggaaaacaccacaataactttctattaatgtattagaaaaagaaagttggaacctatgttttagaaaattttttctctatatattgaagtatgacctataattgaatcttctgatgtgcactaaactgaggcaagcgggatttcctggagtctttggtttgcttacttggaaaaaactgtagataactgattactaacttatacccacttttgcaggtttttaactgagacctgtcaaataagctaaagct

SEQ ID NO: 149 - DNA, 780 bp, Arabidopsis thaliana
  Intron number 1 from transcript AT2G40830.1 (locus AT2G408 30) derived from phytozome v7.0 (chr-ID Chr2; pos 17042779 to 17043558)
tcgaggtattcttttgattgagctccgcttttaaccaaaccatcttagattttgttttcatgattggatcactgaattgaaattcttctcttctgtctttagatttcttctcaggtaattttgctctgctttgtgaagcgttttcattgatcggattttagcttctcgtatttaaattgatacttgtgtgcatctgaaattcgtttggattaagccattccgaattttgagttacttgtgagttgtgagttgttacattaccctctcatttattttcccactccataaattggtttcagttagaaattgtagtagctacaaggtgattgattgcatcattatttgaaccttcgttggtttgtgttggcttatataagcaagttccgtcaaaagattaaaactttgggttcagtctctgtgtgtttattagcagctagactttgtattgcctgaaaattcatgattgagggatatgctttatgtactattataagttctgagtttgtagaaacaatattttgtgttttggggaaaacaccacaataactttctattaatgtattagaaaaagaaagttggaacctatgttttagaaaattttttctctatatattgaagtatgacctataattgaatcttctgatgtgcactaaactgaggcaagcgggatttcctggagtctttggtttgcttacttggaaaaaactgtagataactgattactaacttatacccacttttgcaggtttttaactgagacctgtcaaataagctaaagct

SEQ ID NO: 150 - DNA, 391 bp, Arabidopsis thaliana
  Intron number 1 from transcript AT2G43630.1 (locus AT2G436 30) derived from phytozome v7.0 (chr-ID Chr2; pos 18095863 to 18096253)
ttcgaaagtctctgtctcatcaaagcttcgaaaaggtagatttatggtttcttactctcctttctctatgatattccaatttcttgcgagcttgctcagtgttcttaccttatatttaccgaaccagtgcctttatattctatcacattcgaagttattggtttctggttacttatattgcttattgttctatgactacgatataattatcccaaagatttgttcttttctccgaatttggattagaaatggatatactcaaattctgaacatgcccagaagaatccttgttttggtcaatgttgggttctaattggttgtgttcgttgtttgctgttgatttgttttcttttcagaaagtgattgcattaagagaaacattgggataaaa

SEQ ID NO: 151 - DNA, 389 bp, Arabidopsis thaliana
  Intron number 1 from transcript AT2G44120.1 (locus AT2G441 20) derived from phytozome v7.0 (chr-ID Chr2; pos 18250403 to 18250791 reverse strand)
cctctctctcagacgagatttcctcttcatctcaagtaagcttctctctttgatcttcttcgtttagtttagtttttaatcgtaagttttcttttgattcattataatttgtttgttctgatgtttgtgagatcgataaacccagttgttctagttctattgtagagaaattcactttgattttagatttagaatcgttgcattgagttttccgatcttctataattgctccttttcattttgctgtttggttttaaacattgtcgttgatgttcctgccttgcttctctgtgattaacaatctgttcaatttctcaaaggtgtcttttttatttgattagtatagcttatttttggtttgtttatggcatgctatgtatgtaggagaa

SEQ ID NO: 152 - DNA, 538 bp, Arabidopsis thaliana
  Intron number 1 from transcript AT2G46040.1 (locus AT2G460 40) derived from phytozome v7.0 (chr-ID Chr2; pos 18937808 to 18938345 reverse strand)
gatttatataaataaaaaaattactagacaaaaaggttagtgattccgcaatattataatctaatcctcttcgtttgcaagtttcgtattttcacattgtttagtaaccctaattttgggggaaaattagtttattcgattttttgaggaataagggtctgtatctgtgggaaatttgatttttgaccctaaacttcttcttcggtcaccatccatcgaaacccaaacctcgaaagagagagagagaaatggcgggccaaggggaagtggggaagccggtatagggttttgccaaagggaaaaaacttccttaaaatttcgattttttttatgtttcccgcttaaaaaaaccctaattccgccatggaatctctgaggtcttaatcgtaagttcgtgattctttagttccttgatcttcttgggatttcatttttcgtttctctttagattactgcttcttcttttttttgttaggtttgttagagataacgagaaatgggatctgttaattgttgtagggttcgtagttcgttgtta

SEQ ID NO: 153 - DNA, 469 bp, Arabidopsis thaliana
  Intron number 1 from transcript AT3G01050.1 (locus AT3G010 50) derived from phytozome v7.0 (chr-ID Chr3; pos 13291 to 13759)
gtgttcttgattcatcggctcagatcagtcaccaagtaagattttgattacacctgcgagagagagacctaattagggcttttctttttccggcttcctttcaaatctggctggagattcctcgttttaaagtttcctcctttttttggatattcccctgtttaattgtgcattcatgtttagatctcttttcttcttctttaatttctctcatcttttaacatttatatgcaatctatctatcttttacatgtgtatctcttttcagaatcctctgtttattgctgttttgcatgccgattcatttattctctgattacaagatcatcatcattgctttaaaccattatatatatagattctcaggtttcttgttcatcttcacaatcacacttattgaagaaaaaaattgttccttttttggctctttgcagatagaataaatagcaaacaagatcctctgtggaat

SEQ ID NO: 154 - DNA, 461 bp, Arabidopsis thaliana
  Intron number 1 from transcript AT3G01340.1 (locus AT3G013 40) derived from phytozome v7.0 (chr-ID Chr3; pos 128466 t o 128926 reverse strand)
gagttcaaaggaagaagataactccaataccagaggttcgtaacgatgtgagatttttctctgttgtttatgaagtcttagctcaatttgatcttccaatgaatttcgttaaaatttgctagacttctatcagcgcctgtagatcgatttaggttatgtactctcattcacatcggtgggaagcgatcaatcttagaatccacgttttataatttctcgttttgatcttgtttttttcacaacttgtaaacattgcgatgttgattgtgttgattaatcgcttaaaattgaggtctgagtttaaataatccttgtgcttaccatatggtcttggctgtgataatttgttaattgttctgcttaataatctaacactttgcttcggttaatgtctggatcaacatgctcatggttgtgttccctgttgatttgtattgtaacagtgaaagcattcaggaaac

SEQ ID NO: 155 - DNA, 449 bp, Arabidopsis thaliana
  Intron number 1 from transcript AT3G01340.2 (locus AT3G013 40) derived from phytozome v7.0 (chr-ID Chr3; pos 128466 t o 128914 reverse strand)
agaagataactccaataccagaggttcgtaacgatgtgagatttttctctgttgtttatgaagtcttagctcaatttgatcttccaatgaatttcgttaaaatttgctagacttctatcagcgcctgtagatcgatttaggttatgtactctcattcacatcggtgggaagcgatcaatcttagaatccacgttttataatttctcgttttgatcttgtttttttcacaacttgtaaacattgcgatgttgattgtgttgattaatcgcttaaaattgaggtctgagtttaaataatccttgtgcttaccatatggtcttggctgtgataatttgttaattgttctgcttaataatctaacactttgcttcggttaatgtctggatcaacatgctcatggttgtgttccctgttgatttgtattgtaacagtgaaagcattcaggaaac

SEQ ID NO: 156 - DNA, 607 bp, Arabidopsis thaliana
  Intron number 1 from transcript AT3G04810.2 (locus AT3G048 10) derived from phytozome v7.0 (chr-ID Chr3; pos 1317478 to 1318084)
ctgccgatttgaatctcgcaacgacgccgttttaggtttcttatccctttccttattttaagttttgaataatccaagtaacggtttcttgtttatttagctaataatgttgtgttatcgactggctcaattttgatgggctgttaatttctctgtgaatgcgaggaaaataatctgtaaatttttccagattttctccgaaaatgtttaattttgacaacactggacaccaataaagcttaaatcttgcatgttttatgaggaaagattcgatttttacgactgggttatcttactctcttttttttttccaagttttttcatcataagaataattagtgttcgtggctaattatcattaaggttggtgggtcgttttagtcccaaaacttttagaagaatcgaagaaagaaagtttaaccttttccgttttattgactacttttgctcattctatttgatattttagttataatctccagaaaggtacggttttgtattgcttacaagaacaatgtttattaaggatatattgatcttacaatgtgtcttgtatcatcatttggcttcagattttatagacgaaattaagaaggaggtgaatttc

SEQ ID NO: 157 - DNA, 504 bp, Arabidopsis thaliana
  Intron number 1 from transcript AT3G04810.1 (locus AT3G048 10) derived from phytozome v7.0 (chr-ID Chr3; pos 1317478 to 1317981)
ctgccgatttgaatctcgcaacgacgccgttttaggtttcttatccctttccttattttaagttttgaataatccaagtaacggtttcttgtttatttagctaataatgttgtgttatcgactggctcaattttgatgggctgttaatttctctgtgaatgcgaggaaaataatctgtaaatttttccagattttctccgaaaatgtttaattttgacaacactggacaccaataaagcttaaatcttgcatgttttatgaggaaagattcgatttttacgactgggttatcttactctcttttttttttccaagttttttcatcataagaataattagtgttcgtggctaattatcattaaggttggtgggtcgttttagtcccaaaacttttagaagaatcgaagaaagaaagtttaaccttttccgttttattgactacttttgctcattctatttgatattttagttataatctccagaaaggtacggttttgtattgct

SEQ ID NO: 158 - DNA, 306 bp, Arabidopsis thaliana
  Intron number 1 from transcript AT3G06510.2 (locus AT3G065 10) derived from phytozome v7.0 (chr-ID Chr3; pos 2016578 to 2016883)
atctaaagaagttctcgctgatttcaattccattggtaagaagctctctcatcttctccgactccgattagtattactgtgaaatgtgttcttccttctggtttaagttgttgagcttgatgttctggaactcttttagttaaacgatttctcccttttctgcattattttggactcagaccaatctaaaacaatatcctctgcgtttgattcagttaatgtagaatttaaattatttgtgaaggaattgattttaacatgtttgtttcagaacacgaggaaggaaaattcttctttgggttagct

SEQ ID NO: 159 - DNA, 595 bp, Arabidopsis thaliana
  Intron number 1 from transcript AT3G10740.1 (locus AT3G107 40) derived from phytozome v7.0 (chr-ID Chr3; pos 3364585 to 3365179 reverse strand)
tcgtttccatcaatccattgtctttgattccagaggtttgtttctatttcttgttgattccaattcgggtttcttcattgtgcattctcttgtttatgtcatgattcttattctttgcttatcaaagctctatactttatgaccatgatttgagagattctctgaaaagatcacacctttgcctctgaatttgagaaattttagtttctctgtatctgtctggtttagttcttgaagccatttgtgatttaatgtctgaaggttttgactttatgagttgagattgaagccactcttgatttgcaacaagatttgtcattttctatcatagccttattttatagctttggcatcatatcttaaattgagaaagactctgccttgttgcagttccaatgaggacaagaaaaacagtaatgggtcctatatattctcatgtgtttgtcttccttttggtctagacaaactgataagtttctttttgtagctggtactttcttttgaggcttttttaaaaattatccaacggcttgaactgaattggattcaatgtttctacaaatgtctcttatatgtaggttcttggtttatttgg

SEQ ID NO: 160 - DNA, 693 bp, Arabidopsis thaliana
  Intron number 1 from transcript AT3G12250.1 (locus AT3G122 50) derived from phytozome v7.0 (chr-ID Chr3; pos 3905586 to 3906278)
cttttactcagacaggagatttcagtttttttcaggtgagcttcttgctttctgcaactcaagctcttttgttttttgggttttgtttctttcctttttcttttctttttcttttgtttgaagtttcctccttctttgttttactttagtcattggaaagcttactttttctcactttgtgatttgcctttggaaattaagacttagttgactttcagaagcttataaagtttcaagttttttttgttcatttgatgacgttttcagcaaccaaattccatcgaattatcttgatgaatccttatggatttcaaatgttagtatgctttgaatttcatgtgtctgttgaattctgttaagagtcatagattttgaatccttggtgatgagttattggtttgagtgatcagctgctataagcttagttctcgcttgtgttataagcttagttctcgcttgtgttagattttgaatccgctgttttgtttcagtccatgttagtacttgaaccgttgtcttgcagtgtgacttaagctggtttccgtgagccaataacttgatacttgtgagtgtgcccaaattccaaactgatgcagttctctctctctgctatctgttaatttctttcataatcatcttttctctttcctcttggcagcttttcctccctctagtgtgaaactctgcaccaga

SEQ ID NO: 161 - DNA, 526 bp, Arabidopsis thaliana
  Intron number 1 from transcript AT3G12820.1 (locus AT3G128 20) derived from phytozome v7.0 (chr-ID Chr3; pos 4074985 to 4075510 reverse strand)
tcatcaaaattggcgatctcttcccaaactcgctggtcagtcctctaatcacactgcatgcttctctctttttctcattttcatgttttttttcttgcataatctgtttcaagtttcattttgtctatctctctattgtccatctatcattctaattctgaatactttactgatcgattcttatccgtgaaacactgcttctataggttaaactgttgggattttgattttcacaaagtggtatctttttcttttaaggaataatatctgaggagaagtttgaccacaacctgtaactttcgtgtttatgacctatttttttccttctaaaagtttctcatacaaaatcttccggaagattgaatgaaatcttgaattagatgctgaaattgctcaattaaaaattactcggtctttttctttttctgttgtctttgtttttgtcctttttactagtcttatatgttaaacttgtagttttggtgttcaagattaatgatgttgaacttgaaacaaaataggattg

SEQ ID NO: 162 - DNA, 803 bp, Arabidopsis thaliana
  Intron number 1 from transcript AT3G13845.1 (locus AT3G138 45) derived from phytozome v7.0 (chr-ID Chr3; pos 4557739 to 4558541 reverse strand)
tcgccgataccaagagaggaacaagcgcattgacggtgagtttttccgacataacctgaatcgaaagtttcaaactttattagactgaaaattgattttggttgaatctcaaaggaatactcttattgaatcgaatatactgtcgcctctttgttttcctcagattaaaaagacttttttttgctcaggttctgaaacgatcttaattgctttcttcttcctagcattgttagtttcgtaggtggatttttgattgtatttcgctcttggtactacaaagttatagcccatgttctagattctttggtcaatgaatggatttcgttgattgtggttaaaaagatccaattttttcaatgcaatttaatttaggatcgattttagattcaaaatcaggctaatagctctggtgttgcaattgggtggagggaaaaaaattgtggtttttatttgaaaacttgtagtttaacaatgttaatgttcgaatgcacttaaagctattcggaactctttgacattgctttgagagttcttggtgttcttaaaagccatttgaaaccatccaagctatctcaatgacatgtattgtgaagtaaatatgctgctatctagatgttatctctctgtgttgcagagctttcttggttcttatgatttagattttagtacactactaccagtgaaattagttgtctgttagcaaagtttctttggagcagaagagaaagtttttttccactatgtattgtaacatctttatgaccaaagttttgatatgaaaatgtgcaggattagacaaaaaa

SEQ ID NO: 163 - DNA, 636 bp, Arabidopsis thaliana
  Intron number 1 from transcript AT3G15351.2 (locus AT3G153 51) derived from phytozome v7.0 (chr-ID Chr3; pos 5176090 to 5176725)
gcttattaaatcttcgtctgtaaatccatttaaaggttattattttgtttctgagttacttcgtctcgccctcttgttaagatgctgcaaaaatgaattaaagaatcgttttacacttttgttggtgttgtggttgccttcgttattgcatcgtaggaacgagagattttgtgaattaggttttagggtttcggaattcagggttttaaccatttagggtttatcagaattgttaatttctataatcgtttctctgaaattggatgaaatcattaatcgtatcaatattgaaaaatttgggaattcaataatcactctatagaatagaagctgaaacgatggtgaaaggtttagtatgatgttggtacatacatacaacgaaaacatggagtggcttatggtactaattagagtctttgaaattgagcttaagcaaacaaagtatccatagcttcactttttttctggcttcgttgtggtttgatttgtgcatgaagatgtaggttaacatggagatgtacaggattaggaagattgactataccacttatcaaatcttttcctttttccccttcaaccaataatgctttatttgattctgagcctatttgtttgttggaatctgttagactagag

SEQ ID NO: 164 - DNA, 282 bp, Arabidopsis thaliana
  Intron number 1 from transcript AT3G15395.1 (locus AT3G153 95) derived from phytozome v7.0 (chr-ID Chr3; pos 5200723 to 5201004)
tcgattctcactcttccggtcaccgactaattctggttagctcacattccttatgctcattcatccacagttccctaattaacgctacgaattttgtttctcctcttatttcttctttcctcttgtagaataaggtttatcaaaagaataagaataaggtttatctcttaaatctccgataattagcagagttttttcaggattgagtttgatttgctgttttggaatcataaattttgcgttttagtggataaaaagctagctttgaaagagttattgcag

SEQ ID NO: 165 - DNA, 291 bp, Arabidopsis thaliana
  Intron number 1 from transcript AT3G15395.4 (locus AT3G153 95) derived from phytozome v7.0 (chr-ID Chr3; pos 5200723 to 5201013)
tcgattctcactcttccggtcaccgactaattctggttagctcacattccttatgctcattcatccacagttccctaattaacgctacgaattttgtttctcctcttatttcttctttcctcttgtagaataaggtttatcaaaagaataagaataaggtttatctcttaaatctccgataattagcagagttttttcaggattgagtttgatttgctgttttggaatcataaattttgcgttttagtggataaaaagctagctttgaaagagttattgcagagaaaaaaa

SEQ ID NO: 166 - DNA, 678 bp, Arabidopsis thaliana
  Intron number 1 from transcript AT3G20510.1 (locus AT3G205 10) derived from phytozome v7.0 (chr-ID Chr3; pos 7161070 to 7161747)
gttcttcagacaggtttttttcttgcaaatttctttcctttttagcgatctgggtttatatgtctttaacagatatttatgtttaggaagatttattcgtatgattccgttagatgtccatagggaagactttcaattacaagatgtgaatagcttttagtgacttatcacttgagccaaggaattgtttcattttgttttcaatttgttatggttcaatgtgttggatcatgaacttagcttgagagttgatgataggttatgttataaggttaaggatcttattggaccactaacgatctggatctgaataagtgatttgtgtgatgatgctaaacttgctattcaaagataaaaaaaaattaatattttggttgtgtttggatcttcaattgcagcagtatttgaattggtttgctaattttttccactaatgtaatagtgtctctcttggacaagatgctgttttactgcagatgaacattcaatttgagttgttagatgttgtagttgagtagctgtttttaattagtgttcttgccattgattgacaatagaaccaacctcaaagatataacaagcttgcaaaatcgattttcattatctatggtgactgaaactcatctgaatgtttctttttttttcgatacagtcatcgcagctgctctcacactagtc

SEQ ID NO: 167 - DNA, 619 bp, Arabidopsis thaliana
  Intron number 1 from transcript AT3G21430.2 (locus AT3G214 30) derived from phytozome v7.0 (chr-ID Chr3; pos 7552842 to 7553460 reverse strand)
gcttccgagtgattttggatttgtgtaggtaagctctttcaatcttctctttttttttttttttttaattctgatttgttctcatcgaattttcaaataatttgagcttttttaatcgttcgtcctgcaattttcgttttttattcggtaggaaagttttttggattaggtgcgaagtttgtgagtttaaaatttggttctggggaatctgcgcactgattattgagctttggattttgaaattcgaagctcaaaatcgatgggtgtcaggtcttgtgatttgaattcgcataaatttcactagctggagttgcttaaggagattgattttctaatttggacaagttgtttcttaaacttctctgggtttcatattctattgagcgaaagtagggttgatactgataatgagcacacttttttggtatgaggtgggttttgcatgtagactttagtttcattagtactggtagtcagtttctttggagatgattaactgataaatagatgtatctatcaaggattgagcttatgatttattgtgtttgttgtatcttggtaaaatctaaacttgggttcaattttgggaatgtttcaggtaacagaagagctttaactt

SEQ ID NO: 168 - DNA, 455 bp, Arabidopsis thaliana
  Intron number 1 from transcript AT3G24200.1 (locus AT3G242 00) derived from phytozome v7.0 (chr-ID Chr3; pos 8751118 to 8751572 reverse strand)
aacaggttcaatactcacctttcttaatcctccattttcccttaattctatcttcggttggtttttatgcgtttttctaatttgaatcactgtctttgtaatcagttttttttaaatttgagttgttttctttatctttagctaatcaattgatggtgggttgcttattagttctgttgttcctagttttgagaaactactgttgttaaagtttcaatcttttgtcggtgatctcatgtttgttgtgtctgtcaagttctgcaatctcttaactttataggaaattggatcccttgtttgttttgtgcaatttagattagagtccatcttggaatgttgaatttgtatctatttattactatccagcttacttggatattagagaagattattatataatgatgctatgtctaaggacagggtgctcgcaaggaatcttaggacaagtgtctgtg

SEQ ID NO: 169 - DNA, 646 bp, Arabidopsis thaliana
  Intron number 1 from transcript AT3G24740.1 (locus AT3G247 40) derived from phytozome v7.0 (chr-ID Chr3; pos 9031236 to 9031881)
atcgaatccttggagacgaaaacatactccaatttgtaattttctcgtctttttttttacctgattttgttatacgtttgatcgaaatcatttgctctgatggatctctgttttgttaacccttttgagatttggtagatatggttttgaggattgatatatttgccgctgattgtcgttgaaaaattgtgaaatttgatttggtggtttagggttaaaatgaaattatatgatgaggaatataagaatctgatttttttttattagattctccagatgttcttgttacttgtgattgaaactttgattttgggttgttgttgtttttgaactttggggattttaaagttgaatttttttctaatttatgccaaaacggtcttcttctatggttttgtattgaactgatgatttagatttgtttaaatctcggcttttgtatattgtagtggaagattgaattttttatttcttgtcattggttataggttttagtttattatgatgatgccactagttgcatgattactaacttgacagtggtttatatgaacatatgtgataattttcttaagtttgattcctacttctcttttgggattgttgtgcaggttttaggacatttgggttaccctgaggcttaagg

SEQ ID NO: 170 - DNA, 604 bp, Arabidopsis thaliana
  Intron number 1 from transcript AT3G26890.1 (locus AT3G268 90) derived from phytozome v7.0 (chr-ID Chr3; pos 9910778 to 9911381 reverse strand)
attgcatcggtgttgtgagttttacgatgctgttgttgttgatgagctgattttttttttttttttttctggtgattatttgtctcctatgtgaaacattcttaagtatttttgatcagattgatttgatcacaagtttatcccgttgcaatctctctgtttcattttgtgaacgctcatgtggatcattgatttgtttgatcacttgtggaagatttttttcccagtgttcgattatttgtattttgcttaacttttttattatagtgatgtttgcttgaaacttataacacttgagaatttgtgatgatcatttttgttggaatggctgttattgtatgaactcttcttcttgcttagtagtgttattaataatttgggttttatggcgtatgtttccggatcatgatttgtttgatcgtttcttattcttgtagctggaattagtcataacttcttttgaccattcctgattaacttctgcactttgtgttctattgatgattaaggttaacagtctagcagaacaaatttggttgtatttacttactgtgtcattgattcgctttctccgttttatttgtttcaggaaagggtaactgca

SEQ ID NO: 171 - DNA, 472 bp, Arabidopsis thaliana
  Intron number 1 from transcript AT3G26890.6 (locus AT3G268 90) derived from phytozome v7.0 (chr-ID Chr3; pos 9910910 to 9911381 reverse strand)
attgcatcggtgttgtgagttttacgatgctgttgttgttgatgagctgattttttttttttttttttctggtgattatttgtctcctatgtgaaacattcttaagtatttttgatcagattgatttgatcacaagtttatcccgttgcaatctctctgtttcattttgtgaacgctcatgtggatcattgatttgtttgatcacttgtggaagatttttttcccagtgttcgattatttgtattttgcttaacttttttattatagtgatgtttgcttgaaacttataacacttgagaatttgtgatgatcatttttgttggaatggctgttattgtatgaactcttcttcttgcttagtagtgttattaataatttgggttttatggcgtatgtttccggatcatgatttgtttgatcgtttcttattcttgtagctggaattagtcataacttcttttgaccattcctg

SEQ ID NO: 172 - DNA, 662 bp, Arabidopsis thaliana
  Intron number 1 from transcript AT3G26890.2 (locus AT3G268 90) derived from phytozome v7.0 (chr-ID Chr3; pos 9910778 to 9911439 reverse strand)
ttttgttgaaccggttgcgtcatcggtgcgtcttttcatggtcgttaagagtttcatgattgcatcggtgttgtgagttttacgatgctgttgttgttgatgagctgattttttttttttttttttctggtgattatttgtctcctatgtgaaacattcttaagtatttttgatcagattgatttgatcacaagtttatcccgttgcaatctctctgtttcattttgtgaacgctcatgtggatcattgatttgtttgatcacttgtggaagatttttttcccagtgttcgattatttgtattttgcttaacttttttattatagtgatgtttgcttgaaacttataacacttgagaatttgtgatgatcatttttgttggaatggctgttattgtatgaactcttcttcttgcttagtagtgttattaataatttgggttttatggcgtatgtttccggatcatgatttgtttgatcgtttcttattcttgtagctggaattagtcataacttcttttgaccattcctgattaacttctgcactttgtgttctattgatgattaaggttaacagtctagcagaacaaatttggttgtatttacttactgtgtcattgattcgctttctccgttttatttgtttcaggaaagggtaactgca

SEQ ID NO: 173 - DNA, 530 bp, Arabidopsis thaliana
  Intron number 1 from transcript AT3G26890.3 (locus AT3G268 90) derived from phytozome v7.0 (chr-ID Chr3; pos 9910910 to 9911439 reverse strand)
ttttgttgaaccggttgcgtcatcggtgcgtcttttcatggtcgttaagagtttcatgattgcatcggtgttgtgagttttacgatgctgttgttgttgatgagctgattttttttttttttttttctggtgattatttgtctcctatgtgaaacattcttaagtatttttgatcagattgatttgatcacaagtttatcccgttgcaatctctctgtttcattttgtgaacgctcatgtggatcattgatttgtttgatcacttgtggaagatttttttcccagtgttcgattatttgtattttgcttaacttttttattatagtgatgtttgcttgaaacttataacacttgagaatttgtgatgatcatttttgttggaatggctgttattgtatgaactcttcttcttgcttagtagtgttattaataatttgggttttatggcgtatgtttccggatcatgatttgtttgatcgtttcttattcttgtagctggaattagtcataacttcttttgaccattcctg

SEQ ID NO: 174 - DNA, 844 bp, Arabidopsis thaliana
  Intron number 1 from transcript AT3G26890.5 (locus AT3G268 90) derived from phytozome v7.0 (chr-ID Chr3; pos 9910778 to 9911621 reverse strand)
gaagaagagagagaggtacctcttgcttcttctttctctcacgcacctctttgaagattcttcttctcttaccttttggattcgtctcttcttcttgattttgagtttgattctaattttggatccagagggtttatttatgtgaatgattccgattttggggaacttgttcgtctgaaatgttttgttgaaccggttgcgtcatcggtgcgtcttttcatggtcgttaagagtttcatgattgcatcggtgttgtgagttttacgatgctgttgttgttgatgagctgattttttttttttttttttctggtgattatttgtctcctatgtgaaacattcttaagtatttttgatcagattgatttgatcacaagtttatcccgttgcaatctctctgtttcattttgtgaacgctcatgtggatcattgatttgtttgatcacttgtggaagatttttttcccagtgttcgattatttgtattttgcttaacttttttattatagtgatgtttgcttgaaacttataacacttgagaatttgtgatgatcatttttgttggaatggctgttattgtatgaactcttcttcttgcttagtagtgttattaataatttgggttttatggcgtatgtttccggatcatgatttgtttgatcgtttcttattcttgtagctggaattagtcataacttcttttgaccattcctgattaacttctgcactttgtgttctattgatgattaaggttaacagtctagcagaacaaatttggttgtatttacttactgtgtcattgattcgctttctccgttttatttgtttcaggaaagggtaactgca

SEQ ID NO: 175 - DNA, 325 bp, Arabidopsis thaliana
  Intron number 1 from transcript AT3G27000.1 (locus AT3G270 00) derived from phytozome v7.0 (chr-ID Chr3; pos 9955453 to 9955777 reverse strand)
acaaaaacgtcgtcgtttgcgacaacggcaccggtgtaagcttcttctctctgatatctcttgtttcagactccgaactttagttgaatctgatcaatcattccattcctatctgggtttcgttaaaaatctcacttttgagtttgtttaggatctagttgtcttaaagttgcaaaatttgaaaactttcatgtcttagcatagtgtaagatcgtgtttctattgaaatcaaaactaatacatgagaaatctcataatgggttgcttaagttttgagtttcttgtgatgggaacaaattgtgagcctcttattaaatttttcagt

SEQ ID NO: 176 - DNA, 647 bp, Arabidopsis thaliana
  Intron number 1 from transcript AT3G52880.1 (locus AT3G528 80) derived from phytozome v7.0 (chr-ID Chr3; pos 19603704 to 19604350 reverse strand)
ttaagtacatcatcctcggcggcggcgtctctgccgtgagtatcttccttcctccttaagttttttcagccattgctttcgattttcgaagagcttgattcgatttgtgttgcgaaatgccacaattctcgtagtttttttggcttggagtttgttattgttaatcagatagcgattacgatgattatagattgtgattcatagatttaaacgtcagatcggcggctctgcttctagtttctagtatcgttgagatgaatttacaatcgaaacttgattttgaatcaaacaatcgtatgttgattgattgttttttcgacgtaaaacatggatgtaatctggtttcctctgcacagagcatcttaaaaacttccgattcagttctagttcttttgttgttgttaagtgtgagaaaagtgtatctctgcaaaatcacttgcagatggttaatagtaagcatagtatcatcaggatcctctttagtttatactagctcagattaatcgtatagtcacagatgttaatgaagaaaattccaaagaaataactaaatacagaagcaaattcaactcttaacctttgttgtatccttttctccatttttgtgtgtagggatacgcagctaaggagtttgccaatcaaggggt

SEQ ID NO: 177 - DNA, 914 bp, Arabidopsis thaliana
  Intron number 4 from transcript AT3G54300.1 (locus AT3G543 00) derived from phytozome v7.0 (chr-ID Chr3; pos 20108533 to 20109446 reverse strand)
gacaacattgagaaggtatgcttttgtcgttataagaaaagatgaactagcttagacattttaattaacagtagcacgcagatcttgtacttttttggtttaaggtgacaacatttttatccacatgattttgcaattacaaaaaagtactgtaggaaagatgctgaacaacaaatactttctagaagagatatttgacaccaaataaataggtttacttccatggtagttttactggataaatgtatcaattgcttttctcacaaccattctttcattaacctatatctggtataattatattgtttgtgaattactgtgttttctttccagacctttgtcaacttttaaaactgtgacagaatggactttagtatctaagtctgatagaaactaagaagttgcacgcagcttgaattagatttccagacccctgttctgccttttaaccggcttgatttcatacacgcctctgttaaaatttagtactgaggaagtctaaatgggataattatagcatgaactccctgcttctcatcataggaaggagttggttgtgctatagtgctgttccaagtcacgatatatcatctgtcgcttttgctctgtggactatgtttctatttgccttaagtttgaggtcaataatgttataaaaagtaactgcaagtaattttcaacaaaatctagttttttggtgctgtaaaaggttaggcaaccagagtaacttcagaatttgtcgcactatcatctccaatagaagatggggtttgtcccattttcactgaactagcttatgccaatagatgttgattatgagaatgaaacggagaggatttgcagcctttttgatgattatctttgatgttattttaacaggttctggacagaggagagaagatcgaacttctggt

SEQ ID NO: 178 - DNA, 455 bp, Arabidopsis thaliana
  Intron number 1 from transcript AT3G54300.1 (locus AT3G543 00) derived from phytozome v7.0 (chr-ID Chr3; pos 20110146 to 20110600 reverse strand)
gagcctaatccttcatcaccaagctaagtctcaaggtactcattcctctctcgcttttgtttcttctgctactgctactgctatgcgtcgtttgattcctccttcaatttcgtcttctccgatcatatctctatacttttcttccggaagtaaatagcaccgatcttttaattgcgtcgattttcaacctaatcggagcataagaacacgttttccgatttataattgttgcgcttcggtgtaattcttctcaattataaatcgcgattctatacgattagtgattttatctcccgattttgcgatttactgttatcctcctcttggtgttttagggttttatctgatttctacagtgatctatagttttccatatatatatttctggattatgattccatatttggttttgcattccagatctgattgtggttgtggttgacttcttcttcaaa

SEQ ID NO: 179 - DNA, 473 bp, Arabidopsis thaliana
  Intron number 1 from transcript AT3G54300.2 (locus AT3G543 00) derived from phytozome v7.0 (chr-ID Chr3; pos 20110128 to 20110600 reverse strand)
gagcctaatccttcatcaccaagctaagtctcaaggtactcattcctctctcgcttttgtttcttctgctactgctactgctatgcgtcgtttgattcctccttcaatttcgtcttctccgatcatatctctatacttttcttccggaagtaaatagcaccgatcttttaattgcgtcgattttcaacctaatcggagcataagaacacgttttccgatttataattgttgcgcttcggtgtaattcttctcaattataaatcgcgattctatacgattagtgattttatctcccgattttgcgatttactgttatcctcctcttggtgttttagggttttatctgatttctacagtgatctatagttttccatatatatatttctggattatgattccatatttggttttgcattccagatctgattgtggttgtggttgacttcttcttcaaaggtttcacgagtacaata

SEQ ID NO: 180 - DNA, 445 bp, Arabidopsis thaliana
  Intron number 1 from transcript AT3G58570.1 (locus AT3G585 70) derived from phytozome v7.0 (chr-ID Chr3; pos 21656624 to 21657068)
gatctaagatttttcttctagtcgagtttcttaaggtctggcttcatatctctctgtgcatggtgtcgttaaatctatgcagcgatgtcctgttcgatttcattttgcttctagggtttaatgatttgtgcatttgttcgttttagggaacgattcttctcagctttgtgttacttcatcgtgattttgttttgttactacgagtcgtttctatttcttagattattcgattagctgaggttttttgaagattcttctacagataactacttctctcgaatcgatttgcatttgttcttcatttttagtatttggatttgttgactctttctctcatttcttacatgcatagctgcaacttatttatggaaaacgaacttgttcgaactgatatttattacgatatccaggggctttgatcaaactcaaaattgaagaccaatac

SEQ ID NO: 181 - DNA, 547 bp, Arabidopsis thaliana
  Intron number 1 from transcript AT4G00860.1 (locus AT4G008 60) derived from phytozome v7.0 (chr-ID Chr4; pos 359869 t o 360415 reverse strand)
tcctgcgcctctccgtgtctgtgaaatcgattcaggtaaatcactcttctcgaatcgatgcttgttttgtgaaataccgattctatcagatctatttgataaatttgttgttgttgttagtcgtctgtgtagtttattcaccttttgtttcgatttttgggtcctcacgagatctatgaatcgttatctgaaacaaaactcgaaactagcagatgatatgttatttagcgcgattaggaagaataaaacgagatttgttggtagcagtgagtttcttagatcggtttttttatcgattgtgtgaaaaaattcaccattcagatgcttttattgatttgtgtcttctataattgaattgaattgtttgattcagcagcttaattatctaatggttttatgtgattgtattggcttgattagggttgaatatgccttgaaacttcatttcaatcccactatacactatagctataatctgatataagttcgttttctccttttgtgtggcttgattatgtttgatatatctatgtacttcaggttaagg

SEQ ID NO: 182 - DNA, 606 bp, Arabidopsis thaliana
  Intron number 1 from transcript AT4G14350.1 (locus AT4G143 50) derived from phytozome v7.0 (chr-ID Chr4; pos 8260059 to 8260664 reverse strand)
agcaagagttgaggaatcgaatcccaagaatcgaggtcttctccctcttcttttcactttcttttatttttctctcaccataaattacgggtctctgtctttgtgtctgcgtttttgtctcaccatgttgtgttcctaatctgacgcttcttcttcatgttcttcatttcaagcttcgttgagatcgagcttttttgtttcaattgtggtttgttgcattttcgctgactcacaaatagggcttcttgtttgatttcgtatttcccccaattttggtgtacatttggggttttcctctgatttcagatctattaggttttgtgttctactctgaaatgatcatgtaagtaatctatggaggattctgtaatttagattcagatatgtctttgatttggatacaaagttgtcaactttaagctcctttctgttatttgtgaataccaacttcactgcttttttatgactttgcaaagcagttgaattgccttagtttctattgaatcattcttatttcttcaaacatgcttctgttgaagtttctagtcaatgttagctaacatatgtcattttgttgcaggtgtgagaagcagtatcagtcactag

SEQ ID NO: 183 - DNA, 320 bp, Arabidopsis thaliana
  Intron number 1 from transcript AT4G16265.1 (locus AT4G162 65) derived from phytozome v7.0 (chr-ID Chr4; pos 9203641 to 9203960 reverse strand)
aaattttgtcgcgagtaaatacgaatctcttcgttttttttattttgggggtcaaaacgaatctgttctctgctcttttatactagtcttctgaaattgaaatttgggttttcatttcttagctcatattgaattatatattgtacccagttctcttaagtctctaattgtcggaattttagttttggatggtttgcttatgttttctattggattaaagctccaacttttctccacttttgcagcttatgaacctttgattttgtttttttttgaaatgttcagtaataacattctatatcccaaggaagacaaggagc

SEQ ID NO: 184 - DNA, 548 bp, Arabidopsis thaliana
  Intron number 1 from transcript AT4G18593.1 (locus AT4G185 93) derived from phytozome v7.0 (chr-ID Chr4; pos 10237606 to 10238153)
tcagtgtagcagacaccatccatccctgagcaaaggtgattccttttttcccttgttttctgatatcttaaagaattattctgaggtttttgattacttgaaatattgtgtgtgtttcgtggaggtttatagatttctcgtttagggtttttgtggtttaatctgcttcttcgccactgattctgatacattttttcactttttgggtaaatcttgcaattgaaattcatgtgggctatcttttggttgttcgtgtgattactcagtgtaggtttagtgactcatgtagtggactaaaccaattgttgttggaaagctgttaactttttttttattagggatttgaggatcattctgaaatgaagaatttttcgtttgttcattattgctctgttattatgcaattttaaacttgtggctggcttcaaaatcaaattttttactcttatttaacaataagatttatgttgatcctgaactatgtttatacactcgggttgaatttagtttgagagttatttttctttgatttagatagaagaaaagct

SEQ ID NO: 185 - DNA, 682 bp, Arabidopsis thaliana
  Intron number 1 from transcript AT4G23040.1 (locus AT4G230 40) derived from phytozome v7.0 (chr-ID Chr4; pos 12077880 to 12078561 reverse strand)
ccgtcgccgttcgtaagctcgaggtgattcaattacacttccctgggttttttccgtcttccttctattgtttagatgttattttgtttttgattgaagtatttttggaagtttctcgaatcgctcaagtggttgttcgttggatcatcgaattatatctcctctacgcttttgttatatcgttgttaagctcatcttgatgcgtttaggtcgcaattggagttaattgtgttgaattttagtttatccgattatctgattgagtttttatgtggacttcttacagaattctcatgcttattggttttgttaattgttcattgatatctaaacgagtttatacctgctcattgtgaaattagttgtgaaaagttttgttcttttttggattttggtctggatttttggtattttagagatattcatgtggggtttaagttagttattgaagtcaatgaattttttttcagaactcatcttgtgtacaattttagtttgggtttagagaactttttattgtgtcctttgtgcattcttatcttttagtcattattctattgtctcagcatcattataacttgtaagttttttttttgtgtgtggctggtgttcctcgtgtttgccaaaacttacatgctatcattattgcaggagtatcgtgggaacctcaatagagctgtga

SEQ ID NO: 186 - DNA, 395 bp, Arabidopsis thaliana
  Intron number 1 from transcript AT4G24690.1 (locus AT4G246 90) derived from phytozome v7.0 (chr-ID Chr4; pos 12741194 to 12741588)
gagtctactgctaacgcactcgtcgtcaaggttagagatacaaccttcctttctttatttgcgaatcgtcagttttctcacagtaattgtcggtgattctgggttttcgtggcgatcgtctcgtttctgttgattttgttgcttgtaatcggtcctttccttttgaatttcgctatggatcgactctctctctctctgtctctgtattataatcttaagtgtaattcgaaaattttccagacatacttagcagtatctgcttgaatcttatacccgaacaatgattaaaactataagttatcgtaattagaatcgtaatctatttcttcgacaattttttttcatttttttcattgaagtgatactaattttgtttgtgattatgtaggtgagct

SEQ ID NO: 187 - DNA, 346 bp, Arabidopsis thaliana
  Intron number 1 from transcript AT4G26060.1 (locus AT4G260 60) derived from phytozome v7.0 (chr-ID Chr4; pos 13215999 to 13216344 reverse strand)
tcttctcgaatttgtgctctagaaattataatctggtaagttattcatctccatcggtttccttttacttcccggagcagtctccggttcgtgtggatttcattcttccgatgaatttgaagtcctattgtctcatatatgttctttttccaaatagagaagataatctgattcagactttttcatgcttctgttacgctgatttcaatttcttgttggtttgattgctgctacggttttagctgaaatcgtctctgttttctatgttttcctttctgaaattcattcatattgttaatgttttgttgcaggcaatttgaagatcttgtgggtcacgacacaaact

SEQ ID NO: 188 - DNA, 819 bp, Arabidopsis thaliana
  Intron number 1 from transcript AT4G26300.1 (locus AT4G263 00) derived from phytozome v7.0 (chr-ID Chr4; pos 13312236 to 13313054 reverse strand)
gtttctccgccgatcatctgacttttaccaccgtggtatgattctccatcccttcttatttatttaatcttcctcaaattcgccgttgatttgttcaactttagcctaaatgttcaacgaatcggatcgcattaataaacacagtaacctaatggcataatgggcctaatattttttcggcccaacacgaaaattacctgaacaattaaaaaaaaaaagaagataaaataaaaaaataaaaaaagggaaacaaattaaagagagagacagaaaattggaaatggcaataataagcctaaccctctttccggtcacagcaacaccaccgccgtcttgtctcttctccttgaatcgtttttctcgttcccatcatcactttgcttatttctcttcttcttctccaactggtaaaatcctctctccgagctcttcttatctccatttttctctctacttgtggtttatctctgctcgactacattctccccatttgttgagattagattcttattcttggctaagctcattttttttctaactgttggaactttgcgaaatgatattgtgtttgcgtggttttcgttttagtttctatagaaatgctgaagagggtaagtgttcatttttgtttatatttcaacacggtttgtgtgcactgtatcaatgatttgatgtaactccaataaagaagagcaatctactgcttacaatcaaagtttcattgtttgttttttttaattgcaatttggatgtactgatttcgctttggggttttgtaacctagacagaaaaattgagagcaacggcttggagatttgc

SEQ ID NO: 189 - DNA, 648 bp, Arabidopsis thaliana
  Intron number 1 from transcript AT4G30080.1 (locus AT4G300 80) derived from phytozome v7.0 (chr-ID Chr4; pos 14705565 to 14706212 reverse strand)
cttcgctattttgttcagatctgccactgtttcaggtttgaactaattttacataaattttctctcctaatctttctctgtttcatctttggttttctcaatcgattcgatatgaatttgatttggtttagcttgattcgatttgatcatcatgtctaactagttctatctaactttgttagtttactgttcttttgtgtggttcttgttcttacttcagaccgatctatgttttttttgctttgtctgcttcacacaacacaatcgtgagcttgctcttatgaaaatctaatctaactaaattttcttaatttgtggtctttttaatttcataatggattaataaactaaatatcctcaaaacgttcttgaagttttataatttgtattttttgttttctccggagatttggtatttgaaatcttcttactatctgaaatgaccctttttgtcggtttttcttgaatctttttatttatttttattttccgggaaaatttcgtttgttaggtaaagttgactgatacaaaggacttgagttgctaaataaaaagcatttgtattgtgcttttgtttggttactctgttctcaaacaaaagctgatacatttgtatttgttgttgcagcaaaaacggtcacaaaaaat

SEQ ID NO: 190 - DNA, 176 bp, Arabidopsis thaliana
  Intron number 5 from transcript AT4G36640.2 (locus AT4G366 40) derived from phytozome v7.0 (chr-ID Chr4; pos 17277455 to 17277630 reverse strand)
acaatccaccaagactcttccaagcagtctacagggtacacaaaaaaaacattcgtcattattacaaaaccatcaaaattgtctctcttctctttttctttaaaaaggtttactatatacctactatattctttcatgtaggctgctaagtacttcttggacccacgtacagctga

SEQ ID NO: 191 - DNA, 674 bp, Arabidopsis thaliana
  Intron number 1 from transcript AT4G36640.2 (locus AT4G366 40) derived from phytozome v7.0 (chr-ID Chr4; pos 17278432 to 17279105 reverse strand)
gaaagaaagaaagaaagaaagatccgtattattaggtaagaatgagattcccttttacgtttcgattttgattcgtttgtgtttgattctcgatcgttttgcttcgatttagcttccttctgtttttacaagtctctcttgattagaaatgtttaggtttcaatgtttcatgatcatatttagaaaaaagtttcatggtgaccaaaaaagaaagaaaattttgatggctgagagatgtcagagtcttgttttgtttttttgataaattctctgtttgtgtgcttttaaaaagtcaaatataagaaattctttgaatcatttaaagccgtatttatgtccttttgacaagtcgatttaatgctttctagaagagagtttatcagatgttaagaagattcaaagttggattataacgaaaatttgtatacctcattagagatttttcaagtggtaaatactaatagaattcatgatcccgttttagatgtaagatttggttgtgtttatcagttttctattaatagccgatattattaaaaccttttgcttaatcttggatctgatttaatttgctttaaattggacttgaaagaaatctgaatttgatttgatcgtttctaggcttcgaagctgtctcaagattgttgtttaattaaacatgttcagaagaagga

SEQ ID NO: 192 - DNA, 656 bp, Arabidopsis thaliana
  Intron number 1 from transcript AT4G36640.1 (locus AT4G366 40) derived from phytozome v7.0 (chr-ID Chr4; pos 17278450 to 17279105 reverse strand)
gaaagaaagaaagaaagaaagatccgtattattaggtaagaatgagattcccttttacgtttcgattttgattcgtttgtgtttgattctcgatcgttttgcttcgatttagcttccttctgtttttacaagtctctcttgattagaaatgtttaggtttcaatgtttcatgatcatatttagaaaaaagtttcatggtgaccaaaaaagaaagaaaattttgatggctgagagatgtcagagtcttgttttgtttttttgataaattctctgtttgtgtgcttttaaaaagtcaaatataagaaattctttgaatcatttaaagccgtatttatgtccttttgacaagtcgatttaatgctttctagaagagagtttatcagatgttaagaagattcaaagttggattataacgaaaatttgtatacctcattagagatttttcaagtggtaaatactaatagaattcatgatcccgttttagatgtaagatttggttgtgtttatcagttttctattaatagccgatattattaaaaccttttgcttaatcttggatctgatttaatttgctttaaattggacttgaaagaaatctgaatttgatttgatcgtttctaggcttcgaagctgtctcaagattgttgtttaattaa

SEQ ID NO: 193 - DNA, 412 bp, Arabidopsis thaliana
  Intron number 1 from transcript AT5G03455.1 (locus AT5G034 55) derived from phytozome v7.0 (chr-ID Chr5; pos 862719 t o 863130)
tcaggtataacataatcgatttatttccgtcgattttagtcactaatctgatcctttaccaaattttagttcgaatcaatcccgattattgttcttaggtttgattttgctctactatgtaatactgatatgcgttttaagagattactttacttttgaactctggggatcaattaattatgaacatgttttctaaaactggatattttgtagaatctctgtcgaaaaacaactattagggacctcatgagcttggaacaaaggttttgtggttagatgggctgagaaagaaacagactttttgtaatacttatataggttcttctgatacatagttatggcttaaacaaatttagactttttatgaacctattgtatagctcacattggaggaattgtatgtttttaaggg

SEQ ID NO: 194 - DNA, 795 bp, Arabidopsis thaliana
  Intron number 1 from transcript AT5G11420.1 (locus AT5G114 20) derived from phytozome v7.0 (chr-ID Chr5; pos 3644696 to 3645490)
cgccaccatcacttccgtcatttgcttcagtgacggtaatcatcatcacatacatagacgtacttaatcatgtttaagcgtatatatatgattttgcattttcagtgacatttttctttaaaacctaaattctgttttagcgaatcgaagcttaattctgtcgagtttctatccaaagtccctgacgagacattttgacaaaaaagtttggttgtgacttgtaagtagtctagtggtcttagagtaatgttttgcaccctagtttgaaccttatttgtaaaagatgtacgaagcttttaatagaggatagtttacaagttgaccccgaactgaggaagaagattacgatttacgaacctagaacttcctcccgtgaaccctcgctcgatagccacaaaacaaattggtcgcctggtcgggaccattatgctctctattactgtttttttctttctttaataattattattgattgattttgtaagtcggtcaagagtctaatttacctttttgcccatttctgacacaaacactctggacatttcaatcaaatgtgacataaaaatggtccaatcacgaaattctcttttatttgccgatcccagtttatgtttcttttgggatataaaccattcctcatatttattcggatccatgttgttgtgtttttgttaaccctgcagaaaatactatatacacataatactataaatgaacatctataagtactagaccacttttttatatgagcgttgaatcaaaaaatttgggcaattttgtaatttcaacgcaggg

SEQ ID NO: 195 - DNA, 569 bp, Arabidopsis thaliana
  Intron number 1 from transcript AT5G11860.3 (locus AT5G118 60) derived from phytozome v7.0 (chr-ID Chr5; pos 3823659 to 3824227 reverse strand)
agacggaagctagaagaaatcgtttttgatcggaggtacttttttccgacgaatatactctctctagggttttcttttttctctctctccctctccgtttcttcttcttagctcttcaatctcagctcgaatttctgggctactgaagtttaatctaggtgtgcgcttcgttgaagaaattttgaaatttgcagagaaatttgcggagaaagcggaaagattagatttatccatcgtttatcccagtaaaaagctttgatttttccacatgtcttttttccccccttttttcgtattaaaagccctagatatatatatcaaaattgaaaattatctgaaatcgatttcgtgggtttcagttccggttcggttctctttcttaaaatattgatttctgtcactttccgcgatgaaaagttttcgaattttgcttcttttggctccaaagtttttatctttcaaatattttaaatctgggtacttttttgttttggttccttctttgtgaattgtatctagggctttgctccttttctaatccaagatctgttttcgttctcagatagtgt

SEQ ID NO: 196 - DNA, 252 bp, Arabidopsis thaliana
  Intron number 1 from transcript AT5G16160.1 (locus AT5G161 60) derived from phytozome v7.0 (chr-ID Chr5; pos 5276219 to 5276470 reverse strand)
ccaacctcacccagaaacaaatttccaaattacaggtcagattctttgcctcgacttttaatgtttctgatcttcagatatcccaatgagattgtaagcacgacttcgtataatcatcttgattcgaatttctatcaactgttcaatccagttttttttttttttctttcaaccgaattactatgtacatagcaatttgaatttgaagccattttggttgtgttgagattacaggagctacacaagagacgt

SEQ ID NO: 197 - DNA, 849 bp, Arabidopsis thaliana
  Intron number 1 from transcript AT5G25210.1 (locus AT5G252 10) derived from phytozome v7.0 (chr-ID Chr5; pos 8724321 to 8725169)
gtcgtcaaatcagtgccgttggatctagatccaaggtttgttcgtgtctctcttctctgttttggattcatcataatcttacctagacatgtgtctttactcgttgatctctgacctaattcttgatttgaatcttggaaaacaagattctctcagttttacaatataccatatgattcaagatttgagccaacttttataaatgttcctctgctacaagattccatatgtcctttgttttttttttttgctttcgagaagctcattgaccaaaaccaaaagcatcatccttcgagtaaaaaaaaaaagaggcaccgagtgttttaagttttaactagatagggtcattatggtcattttaaagcggccgtgtccgacgtcgtcgttttagtatttttgttcgtttatgattttgagtggtaccaagtggatggtttgttgaataaagaagagattgatttgagtgattacattatatgtagctggtgttgatttttgtaaggtatgtataagcatttgaaataagcagaggaatatgattagttttgggttatatattgtagtttaaggataagtttgtgtgaagttttgttaggttatcaacctcaaagacgcgttgtttaatgtttttatggttacatgggaccattttctcaacattgaatttgtgtgtgtggggactttcttctacttctgtttcttgtgactcaactttattattcctcatttgattgaatgttcttgttgatatcgacaattcttttcaggattaacttgaattgctaaacttttgattgtgttttttaataagcagaacatttcatcacttagatcaccattcagcgagcg

SEQ ID NO: 198 - DNA, 660 bp, Arabidopsis thaliana
  Intron number 1 from transcript AT5G28050.1 (locus AT5G280 50) derived from phytozome v7.0 (chr-ID Chr5; pos 10045093 to 10045752 reverse strand)
gaagaagctaaaggtaaaatcaattacgatcctcgtcgcatttttgttagtttctcgatcgagatcggagtatttaatctccttagattttgcaatttctactcgagattcgttgtttttgcttgcatcggtttgattatacaaccgaatcgatcttcgcgattttggatgattctatttcgaatcagactctttctcaagctgattcaatgttcagtttccagatctggattctagacttatttcttcattctaatttcacatgcagatgagaaaatttctggtgaatgtttactcgttgtcaatcaccagatcaccagagtgttatatatcatcggaatgtacataagcatatagatttgtgttcgatttttaggtgattttgactttttgattagaaacaatggcttctagttttgtgttatctaattatcttagcttgaagattcctctattagctgatgtttacttgtaccacaagttatggtatctgtttcttgtgtctactaacttgtgatctgagtaaccatgaagctttgttgttcaatggatgtaattgttcttggttttgatcattgtctgtgtcgatttagtctttgatgtttcgtgtttagaggatctgatttgctttgttattgaactgtgtagtggaagcaaaag

SEQ ID NO: 199 - DNA, 354 bp, Arabidopsis thaliana
  Intron number 2 from transcript AT5G28050.2 (locus AT5G280 50) derived from phytozome v7.0 (chr-ID Chr5; pos 10045093 to 10045446 reverse strand)
caccagatcaccagagtgttatatatcatcggaatgtacataagcatatagatttgtgttcgatttttaggtgattttgactttttgattagaaacaatggcttctagttttgtgttatctaattatcttagcttgaagattcctctattagctgatgtttacttgtaccacaagttatggtatctgtttcttgtgtctactaacttgtgatctgagtaaccatgaagctttgttgttcaatggatgtaattgttcttggttttgatcattgtctgtgtcgatttagtctttgatgtttcgtgtttagaggatctgatttgctttgttattgaactgtgtagtggaagcaaaag

SEQ ID NO: 200 - DNA, 483 bp, Arabidopsis thaliana
  Intron number 1 from transcript AT5G38510.1 (locus AT5G385 10) derived from phytozome v7.0 (chr-ID Chr5; pos 15420003 to 15420485 reverse strand)
tcttcaagattaggatcaggtttcttcgttcaaaggtaaaatcttatcactttctcaaattctaattcttcttcccaattgtgttgatactcgtctctgtacttcgtaaattgaaaagtctcacgcaaacggtgaggaagaagacaaatgtctcacttcaaagaagtgattttgatactcgtttcgttattggattcttgaaaacgttatgcccttttgttgtttggttaaatgcctcaatgagattacttaatttaaagcttttcgtgaatcgtatctctgtttgttcttttcggttgtgaaatgggtttaatcccaaatagcttctttgattatcttaggactaacttgttaagtgcgtctctaaagtttgtgtttttatcaaaatcattcacatgtttttgtataatcttctttggggtttggtggtgaatgatgagatttgatgatgacatgtttctctgaaatggacaggacctgaag

SEQ ID NO: 201 - DNA, 387 bp, Arabidopsis thaliana
  Intron number 1 from transcript AT5G38510.2 (locus AT5G385 10) derived from phytozome v7.0 (chr-ID Chr5; pos 15420003 to 15420389 reverse strand)
ctgtacttcgtaaattgaaaagtctcacgcaaacggtgaggaagaagacaaatgtctcacttcaaagaagtgattttgatactcgtttcgttattggattcttgaaaacgttatgcccttttgttgtttggttaaatgcctcaatgagattacttaatttaaagcttttcgtgaatcgtatctctgtttgttcttttcggttgtgaaatgggtttaatcccaaatagcttctttgattatcttaggactaacttgttaagtgcgtctctaaagtttgtgtttttatcaaaatcattcacatgtttttgtataatcttctttggggtttggtggtgaatgatgagatttgatgatgacatgtttctctgaaatggacaggacctgaag

SEQ ID NO: 202 - DNA, 534 bp, Arabidopsis thaliana
  Intron number 1 from transcript AT5G39340.1 (locus AT5G393 40) derived from phytozome v7.0 (chr-ID Chr5; pos 15748972 to 15749505)
gattttgtgatttcaccattagtctctatcaccaggtaaattttagcatctctccttagagattcaggataaaagtgattaactttcttgtgaagagaacttagaaattgtggttgagttttaaagtctcctttttagagatggctctccacagtctttagggttcttattgaagcttttaaattggaaactggggatttaagagttaggtttactgattgtgaaatgggttattgtctccattttcaaagtcgtctcctttcaaagtgattacttttctggtgaagcaaactttgaatttgtggttacgtttttagggttcttattgaagcttgtatatggcaattggggattttgggaattgggtttagggtctgtgaaatgggttattgtctctttttcaaagttgtcttctttttagggatgactactctctactgtttttagggtacttggagcttgtatttggaattgggaattttgtgaaatgggtttctgagattctttgtgttggttttgtaaaggggtttttgg

SEQ ID NO: 203 - DNA, 420 bp, Arabidopsis thaliana
  Intron number 1 from transcript AT5G47310.1 (locus AT5G473 10) derived from phytozome v7.0 (chr-ID Chr5; pos 19200866 to 19201285)
ctctctgtctctctccccaattcccagattctcatgtaagctctctccaaggatttgatttctgtataatgtttgcgaattgagactaagagccctctcgatttcgatttttgttcgtctggatcctttgcgttaggttttttcttctcgtataattagggcttccgatttgtttacccttagttcattttctctaaattttggtttttgattgatgggttttcttgatttagcaatttttaagatttacttgaaagattccgtaattttgttctgattcggattctttgatctgtgctcactagctctctaccaaagcagcttccttttctgatccctagtgttcaattatgtgaacagattgtttactttagcttctcttccttttcattctagttttgcagagattttaggaggaac

SEQ ID NO: 204 - DNA, 819 bp, Arabidopsis thaliana
  Intron number 1 from transcript AT5G47520.1 (locus AT5G475 20) derived from phytozome v7.0 (chr-ID Chr5; pos 19278787 to 19279605 reverse strand)
tccccaatttctttaatcggtgttgcttccacaaggtaattttgttttcctctgcacttcccgagaataaagagaaggtttttctcaattttccccttatgattatccctgtaaatgcgagttttttgtcctgttttgtctaatgggtcttcataattcgtgatcatcaacgttttctctgtcttgtgtgtgtatgtatgtgtgtgatcttacatctgacgggaatgtaatgtgatgatctctcatgtaaaattctgtttttacttggtttgattgtttctattacaatgctctgtttttgctttaaagagttcttacaatatctcctccttctcttttgcgaaaatgggttcttacttgggtttagtttcttaggtgaagtttcgattatttttttgaattggtgttttataagttttgatgtctcatcatctttttcagaaagaaatgtgtggcctactttcattttctaatgccgtatatgaagattttcatattcaggcagatattataaacctgcagcaatcattaactcgattcatctttaatgtgagccctaaggacaagactgagaattttctatcagtgtttaagattgcactttgtgtgatcaagtgaatgagtattgttggttgaattgggcccgcgcttgtcttttctgtctcaattctgtttctccttatgatagagagaatatttctctgctttcctattggtggctttcatgatttgtgaatagtcagtatctaccgactttaacttagattcttagggtgagattataactaaagttagctttacttgttgtatataggcttc

SEQ ID NO: 205 - DNA, 807 bp, Arabidopsis thaliana
  Intron number 1 from transcript AT5G53650.1 (locus AT5G536 50) derived from phytozome v7.0 (chr-ID Chr5; pos 21791353 to 21792159)
attacaaagtcgctcacgaatcgatttctcagcaggtaatccatcgatttctaattttgtttctcttatcggatccatttctttcgattatctattgcgaacaagctctgtcaccgtagattttgttttcgagtagctgaatcgatacatttcgttagcagatgttgttaagaatggaattttgttgatctgtagaccatttctagggttctcgttgtcatctctgtgattctccgattgagattcatatgcaatcatggtggaagaaagtttcacacaattttgatgtttataataggaattagggtttctggtttgtgtttgccattttagctactggtgagattttgttctggagttagagtttcataagttccaccaatacgttaatgcttcattaacattactatgaattagttttattttgtgattcttgagatgccaaaattgctaatacgagaacaccttcaaacgtttggtattgatgaatgaatactgatagagttgatgcacatagatgtcatcattgtgaatatccatggttgccatttctctgtagctttgatggtaatgattatactacaattgcatgattaaaaatatgctttagaattagtttttttgagaaccttgagatgccaaagttttaacatgagaaaactgccaaacattttgttggttgaattgagtgttagctttgtgaagaaccgtagcagcattttctatgtagctttaaacgtataggatactgacattggcattgactgttagatttgatctctctttttctacaggcgaagtcttttc

SEQ ID NO: 206 - DNA, 428 bp, Arabidopsis thaliana
  Intron number 1 from transcript AT5G57300.3 (locus AT5G573 00) derived from phytozome v7.0 (chr-ID Chr5; pos 23210620 to 23211047 reverse strand)
acaacacgtgtgatacatcactcgatctcagagctgtgagtcgataaaatttgggttttaaaactatactattcctcattgttatggctttcgttaattctggagtttactacttcattcttcgagcttaagttttaagggtagattaaattagggtctcggtttcctttccggtgagtcggtggattcatagaacagctcaaaagattcttcttcagtttcatgattcctgtagttagaaaaaaaaaaactttgaatctcaacgaaataatttttattttctgaaaattttgatgtgattggaacattttttgtcttctctgttttaatctttagtaggtgatgaagtggtctaaccatctaaaatttgtggggatttggttgtaggaacagagtttggagtagacgactataatttctgtttctat

SEQ ID NO: 207 - DNA, 422 bp, Arabidopsis thaliana
  Intron number 1 from transcript AT5G57300.1 (locus AT5G573 00) derived from phytozome v7.0 (chr-ID Chr5; pos 23210626 to 23211047 reverse strand)
acaacacgtgtgatacatcactcgatctcagagctgtgagtcgataaaatttgggttttaaaactatactattcctcattgttatggctttcgttaattctggagtttactacttcattcttcgagcttaagttttaagggtagattaaattagggtctcggtttcctttccggtgagtcggtggattcatagaacagctcaaaagattcttcttcagtttcatgattcctgtagttagaaaaaaaaaaactttgaatctcaacgaaataatttttattttctgaaaattttgatgtgattggaacattttttgtcttctctgttttaatctttagtaggtgatgaagtggtctaaccatctaaaatttgtggggatttggttgtaggaacagagtttggagtagacgactataatttctgt

SEQ ID NO: 208 - DNA, 587 bp, Arabidopsis thaliana
  Intron number 2 from transcript AT5G62890.2 (locus AT5G628 90) derived from phytozome v7.0 (chr-ID Chr5; pos 25243797 to 25244383)
catttcttattgcatcaccagtcctcctccttggcgtgagaccttcttcctacttgttttctgattctaagttttgaaattaaagctctttgatttttatttcgaggtttttccggctttatctgtcggtggtgtgtgtagatgttaggtttttttctctttattcggctttgttcttcttaacaatgtctcgacctgagatttactcttgttttactcgtttagacctttatttttagtaagatttgtattcccagtttgcttttaagctggagattttctttcctaatttgttgcatctgtggcaaatttgtggttttcttctgttgttaactaatctctgggtgggatgcttgtgaaccgaatataagctttgtttgatgtaccagttttttacaatgtcggaaaccattatctcttacatatgttcaatcacattagtctgtgcttctatcttcttttgaaacatacaatttttggtgtttgcaatgagttcctttggaattctgcagtttttcataaagacttacatttttcatgcttgtgtttcagctgaagctattcttcttggattccaacattacctt

SEQ ID NO: 209 - DNA, 574 bp, Arabidopsis thaliana
  Intron number 1 from transcript AT5G64170.2 (locus AT5G641 70) derived from phytozome v7.0 (chr-ID Chr5; pos 25676013 to 25676586 reverse strand)
ttctggagttgctagtggaagaatctgtctcacaggtgagcttatttcgttcggctttgatggaatctatttcgattgaatttaattagaaaatttggttcttatcctcagtgtttccatagcagcggtagctgaggatttctcagatttgattgtttttttttttgttgcagttagtttcattgaatgcctcatttcactggattttagttgtttttgtaaactctcggtttaataatgatagtttaactcgattttgctagaaattacgagcataaaatggttgaatcctactatctgatttttctcctactttgtttttgtgctacttgctatgagatttgactttttggctgtagaatttgagtctaatttctggaattcatgaatagttgaaagaatgggttaactcttagggtttggattacatgtatttcgggtttcatgggatttgattctggataagaaaagtcaagttttcttatatgctgggttcgatttctctattattggaagctgtttaatatatttatatttcctatccagaaccagaaatagtgtttgtgggagttac

SEQ ID NO: 210 - DNA, 1034 bp, Arabidopsis thaliana
  Intron number 1 from transcript AT5G64170.1 (locus AT5G641 70) derived from phytozome v7.0 (chr-ID Chr5; pos 25675553 to 25676586 reverse strand)
ttctggagttgctagtggaagaatctgtctcacaggtgagcttatttcgttcggctttgatggaatctatttcgattgaatttaattagaaaatttggttcttatcctcagtgtttccatagcagcggtagctgaggatttctcagatttgattgtttttttttttgttgcagttagtttcattgaatgcctcatttcactggattttagttgtttttgtaaactctcggtttaataatgatagtttaactcgattttgctagaaattacgagcataaaatggttgaatcctactatctgatttttctcctactttgtttttgtgctacttgctatgagatttgactttttggctgtagaatttgagtctaatttctggaattcatgaatagttgaaagaatgggttaactcttagggtttggattacatgtatttcgggtttcatgggatttgattctggataagaaaagtcaagttttcttatatgctgggttcgatttctctattattggaagctgtttaatatatttatatttcctatccagaaccagaaatagtgtttgtgggagttacatgttttgcaatagagatgacatatcggggtaatgtgcatgattttagtggtgattaaagagtctgaagttgggaggaatgtcggacttgtacattcatgaggtgagtggagtcacaatcatatatgtgtgtgtatcttttttctatgagactatggatttagatctttcgttgttgctcttgtcgtatgttcccggaaaatgaactgttgtgaaatttcctttttttattgggttcaaaatcgtttaaaatataggacagttcttgcatctcatattttacttcttgttatcgctaccacttggatgtgttctgtgcaggattggggatactttgttagtctactcggtttgatgtttccctagtcatttttttctttgacttggtaatgtggatttctaattggtggctgaagttttctttcctttcttttcctttcagctaggcgattatctttcgg

SEQ ID NO: 211 - DNA, 496 bp, Arabidopsis thaliana
  Intron number 1 from transcript AT4G02880.1 (locus AT4G028 80) derived from phytozome v7.0 (chr-ID Chr4; pos 1274635 to 1275130)
ctgaagattttgaaaaacccaccgagaacttcgaggtgaatttgatcatcttcttcaaaaacctgtttttttgtttgtttgttcttgtgtgtctctattgttaattttgacgaggagatttatatatcctatgatcaggtcgtgtttcacttctctaattaagttgctttcttttgattccaccgtattgtatctctggatcgaaattagggttttagtgtgtgttgtgaactttaaacgcataaagtttctgcctttcgcgtatttgaaagtttgatgcagccatattctgtagtgtctccaagcaattttctagggttttacataaatatgatgtaacttcttatttgttgattttactaattagatgatacttttcagtgaagttattgtcttttgggattacttgaatcaacccaatagctcttgcaccattttaacccagtaataatcgtttgtttttgctttcttgcagatttaattgaatttttcactg

SEQ ID NO: 212 - DNA, 543 bp, Arabidopsis thaliana
  Intron number 1 from transcript AT1G54290.1 (locus AT1G542 90) derived from phytozome v7.0 (chr-ID Chr1; pos 20269396 to 20269938 reverse strand)
tcaaatactcgaaaccctaatctcttcttgatcaggtgatactttctctctttctgctgaatgattgtttcctgttgatttgcttgttcgaaaaagtttttatttagagatttgtaggtcattttattttctgatctgaatgcagctctttttggttcaaaatatatactctgggttttgtttcttcgcaaaatgataatgtttgattgttttttctttcagaagaaattgactccaaaactagatatgttatttattctgtagaaaatggtatcgaattttagatacagatactatattttttgttttgatttttgattttggaatcttgtgatatgtttacgcaatggagacttttgcagaaaatggtttctttattatttgttatatgaatctttgattatctgaataagacattgctaggataaccagtgtcacttttttttacgttatgtaacttgaaatcatttttggactcgtaattctaacattctgtttttgttctcaggccttgtcgatttactgtcccttgtatcaacttaa

SEQ ID NO: 213 - DNA, 517 bp, Arabidopsis thaliana
  Intron number 1 from transcript AT1G01640.1 (locus AT1G016 40) derived from phytozome v7.0 (chr-ID Chr1; pos 231916 t o 232432 reverse strand)
tctatagaggaagcagccgatctcgctatcagtcggtaatatacactatcattctactttcctaatttctcttcttctttttgttttctttgagaattgcatgacaaacccttggaaaagggttgttttaaaatcatcatgaaatttgagaatatgatcggtggcttgattgaattttcgttttgtgtgagtggtctttctgtttgagttttaaaatttcggagagtggcgttttaagattcgataccatatccttggataactattagccagaacaatactttcaaattttaaagctttgattagagttttaaagcttaggggaggatcacaaatttacaatattgatcttatgaatagagaacctctctactactactcttaagatttgttgattaaaataaacaattgtggcatgtatggttaactttgatcttcttggtatttcgttctctgtttggccaagtaatactacatactaaagctttttggttgtgacattagtttgaataaacta

SEQ ID NO: 214 - DNA, 345 bp, Arabidopsis thaliana
  Intron number 1 from transcript AT1G02305.1 (locus AT1G023 05) derived from phytozome v7.0 (chr-ID Chr1; pos 455868 t o 456212)
tagggcttctaatttcatccttcaacttgttgcaggtacttgaaccttcataatctgtgtttgaaattgcttacgaatatttatgcatgttagtgctttcttctagttacgatctgtttcgtagccttctcgggtttttctgggtttgatcatgtttgcttatttgttggactcttgaagctagaagttttaaaaaaaaaaatcgaaattttctgggtcttaatcgaatcaatgaacgggaaacatatttgtgatatcagaattgtttaaagttttaaacttttgaagctgggttgtctcttaatctcagggtattgcagctgaaaatctttccaagcagaaact

SEQ ID NO: 215 - DNA, 497 bp, Arabidopsis thaliana
  Intron number 1 from transcript AT1G05190.1 (locus AT1G051 90) derived from phytozome v7.0 (chr-ID Chr1; pos 1503239 to 1503735 reverse strand)
gcttcctcactcgtctcatcttttcaacccaggtacttttcatatactacaaaccatagagcttcttcattccgctagggtttcgttttctttacttggcattttctactcaaaaatctctataaactgtgttcatgagcctcccaagtataaggaatctctttgaatgggttatttttatctttttaaatcgatggcaatgttgaattggttatggactcttgaaattgtggatttttattttgggaatttgaatgtgttatgcggaactcactgtgtaaaaagcaggattctagaggggtttttagccatggaaactgaaagttctacaagaatgtttctcttccttaatctaacgttatctttgttccaataacagtttctgtgtattggtttagatatatatctggtagagttttactttcttgacatgttttatctgaagatagatagataacttcccctttgttttaggtcagcatttttgggagatagaa

SEQ ID NO: 216 - DNA, 546 bp, Arabidopsis thaliana
  Intron number 1 from transcript AT1G10900.1 (locus AT1G109 00) derived from phytozome v7.0 (chr-ID Chr1; pos 3636512 to 3637057 reverse strand)
ttttcttcttcgatttcacaagtttcatcatctcggtaagcaagtctcctgcgaatccaggtccgattttgttttcttctttgaaattgtttacttgtaagagtcatcttctgaagattcgacctctagattcttacttctgtgtatgacttactcaaatcacaaattaaagattacttcttttttgttttcttaatcaatctgcttcgcaatagctatttcttcgtaatgctgatatttgactactaagttgctttctgactttaatggctatttattttctggggaaaactggatttgagacaaatcactgataaacttctattgcttgaaccttattttagttgaccctcaagtttaggctctggtttttcagtcaaaatgagtgatggaatctccaggagaatctctcgtcttctgcatcattaattcattctctggaaactttttgattcataatctgtatgcttgtggataacaaattgtgatgacttgagttaaagaatggatttttatcttaggaatcttgttgttttttcttagctt

SEQ ID NO: 217 - DNA, 449 bp, Arabidopsis thaliana
  Intron number 1 from transcript AT1G12680.1 (locus AT1G126 80) derived from phytozome v7.0 (chr-ID Chr1; pos 4322311 to 4322759 reverse strand)
aggttccatcactcttttctgatcggtgaaaggaggttcgttaccttccctaatttttgagcttgatcctctttctgtactttgattcaaggattaagtattggttttttgctgtttcgatctagcattctttcttttttccggaaaaaaagttatggatttcgcgcgaaaatctctgggtagagtcattgaagttgcgtcttttattttcatactcttctctgcattgctttctagattgtacttgtgaagttttatgtaaacatttctgtaatcggtggagtaaatttttggtttttctcttttgtgtgtgtgttggaaattggctttttggctacattttatgtactaaacttttgattggctctatagcatttttgtttctgcagttggttttgatgattgattcgcttgttctgattttgcaggagaagacctgttgttttctt

SEQ ID NO: 218 - DNA, 568 bp, Arabidopsis thaliana
  Intron number 2 from transcript AT1G12750.1 (locus AT1G127 50) derived from phytozome v7.0 (chr-ID Chr1; pos 4346884 to 4347451 reverse strand)
atacagctaaaacagccaacctagtcaggtaaattctacgcggtacctatcaaactagagatcgctaaggttcatcgatgttttaacagagttatatgctttctacattcagctatatataggaactttggttaaccaagttttcttcaaagaaagtttcatgacaggtgtagttgacagctatacaactaaaaactgaatctaaatcctacctaaaccattttacccttgtaaatgattcgtaattggacttattattagattagctaatgttcatgttgaccttgtaaacatcaaaatcagtttttgactggatccgttaatttttgtcagataaataaaatggatagtgcaggcacattttatgtagaaatctattatagtaagcttattaatatgccttattgacattccccgtagacttttctctctcacatcaacttattaacaaattaatactccacaaatgacgaaggtaacagaatcaatcaatgtattaataattgatttcacgtctgattattttctctcaggtctgagatatttatcagaaagttaaaggaaatat

SEQ ID NO: 219 - DNA, 733 bp, Arabidopsis thaliana
  Intron number 1 from transcript AT1G12750.1 (locus AT1G127 50) derived from phytozome v7.0 (chr-ID Chr1; pos 4347526 to 4348258 reverse strand)
cctaattttactctatcggtgagcttcattgttcgatttctatgtagcagcactttctaattcagtgtaaccatggttgatgacgaccgatttgaggatatatgatttcagttttgtaatttcattgtctgattgatatgttttggggttttgatgttgaatattgttttaacgtagtaaagtatatacttttgactttttggctttttgctgtagtatctcaatgcgatgtatcgaggtcatttgagatcaatctgtgactgtgagatcttttcatagattaatttgcatatggtgatagttatttaatttgcttcatgaaattgtcactatatatgaaagtattcctgaattttcgatagaaagttagttgctttactcaagtcgttttaatcttctcggtatattacattgttgtcttattggctcttttctgattttattgcctctttctgttttggttcctagaaccagcatgacatctcgagcacacttggctatggggagttacaatagatttatagtgcgtgtcggtttcttaaccaaaaaaacgtagacaatgtgtgattttctaacgaatggaagcacatcaatcataaatcttcgtcgaaagtttcctcctcgtcaatgtattggaaggaaatattttgatccccacctgactcaaactctccattaccatttttacgaaattctgacttgcatacgccttgcactaaagtttctgcaggag

SEQ ID NO: 220 - DNA, 681 bp, Arabidopsis thaliana
  Intron number 1 from transcript AT1G13000.2 (locus AT1G130 00) derived from phytozome v7.0 (chr-ID Chr1; pos 4438730 to 4439410 reverse strand)
gctttttagagatttgattcgtttcactcttctgggtattgattttcttccttaaatttgcatcctttttaacgtttatccaacgatcttgctccgttactgaaactctgtttctccgttgcttctctcgtctcatttattgttcgtaacgtgattttactacttctgttactcgagtagagattacccttcttatgtccgaatctgattcgtcgtctttaagctttgtcttctcccaattagctcaaagttcgtaactttgtttacttgccagtaagtaacaacgtttacttttcaaagtaaatctctaattcatgaagtggatctgcttttagttgtatctttaggattttggaatttttaatcgttagctttcaatttgatttgctaatgaatcgcatcagatttcgatctcaggaggtgtaaacaatgttttctgtcttagttaggaagcaactgttacagagttatctcaaattttccatttttggtgatgtcttctcttttttagcattaagctaatattcccagctcaattgttttatagttttcttctcactaacttgtaaatctctacttgcattcatttgtgtactggatctgaatctaaagattgcatttttattcttgttcattggtgatgcagataagaaatttccagagactgaagtttccattgaa

SEQ ID NO: 221 - DNA, 468 bp, Arabidopsis thaliana
  Intron number 1 from transcript AT1G17470.2 (locus AT1G174 70) derived from phytozome v7.0 (chr-ID Chr1; pos 6002974 to 6003441)
ctcttcgccggagatcgcccttcaccaattccactgtgagtcgcacatcaaatattcctactttttcatgctaagattttgatttattgttaaatcagttatatttaaatgattcctgcatttcgagctcgtctaatggaattcatgtttggaatcgatgtctcgacatacgtttttttgttcgattagacgtaaagagctcagctttcgccttttggcattcaaatttgtttactgagtggatatatatggtttgataaatttaagctaaatatgaatcttaaagctttatattcttcgggtttgattttagctcttttattagcaatctgaagttttttgtttgagttattgataaaatttttatgttattatctatgaactctctgattctgagtctattgataagtaacaatctttgtcctttactctctctccacagatagtagcaaaaacaagtgaagcaca

SEQ ID NO: 222 - DNA, 468 bp, Arabidopsis thaliana; identical to SEQ ID NO: 221
  Intron number 1 from transcript AT1G17470.1 (locus AT1G174 70) derived from phytozome v7.0 (chr-ID Chr1; pos 6002974 to 6003441)

SEQ ID NO: 223 - DNA, 402 bp, Arabidopsis thaliana
  Intron number 1 from transcript AT1G17820.1 (locus AT1G178 20) derived from phytozome v7.0 (chr-ID Chr1; pos 6134542 to 6134943 reverse strand)
ctcgcgaatccatcgatttctgtatcaacaaacaggtgatcgctcttaattcctctttttgagtttcttaagggttttgtttcttagagagaagaattctgggttttgttccttctctaaagatattatcttttagaaaactgaattctgggtcttaattctgaaatgtgtgcgtgcatgttgcttccgttgtgagaattgagttcgtttcattggaaatttcgattgagattgtagctaaagtggctcttagggtccattgattattaaagtcaccaactttcaatcgagaccgtttgaattgtagttgaagttaggagccagacaatatctgtttctgccattttgggtttctttctcaatgtctgtaatgaagttttgtatctattttcagggagtggt

SEQ ID NO: 224 - DNA, 338 bp, Arabidopsis thaliana
  Intron number 1 from transcript AT1G23310.2 (locus AT1G233 10) derived from phytozome v7.0 (chr-ID Chr1; pos 8271339 to 8271676 reverse strand)
gatagacttttggagtcacaacattgagtttgaaggtttgtgatttggtttttctttctctttggatcgatcattgatcaaattcttcttcttttgaatgattctgaaatacccttttgaaaaggcgtctcctttacactgtgtgattacgaatttgttctggaaattgagctacagaaacccagaaattagtggccttttggtgttcttagagtcgaattagttttgatcttgattcgtttatccaaattctggttttctggttccaattgctgatgatgaattgttttcttccaattgtagaggagggaagaagtgagctagggattggttcagag

SEQ ID NO: 225 - DNA, 591 bp, Arabidopsis thaliana
  Intron number 1 from transcript AT1G29890.1 (locus AT1G298 90) derived from phytozome v7.0 (chr-ID Chr1; pos 10463550 to 10464140)
gttgtgtcacagccaattacgcctggtcaggtacaatttttcatgatcttcggtgattcaagtttcgatttacattcttctccaacttcccgaagcggattttgagattttgattgaattggcctgtagcttaatgtgattaggactctctatctttctcctttatatgaatgtggttgattcattcttcagttcatcggttgcttgctagatttagattaatgttggctgtgtaaagtagagtggtgagattgattatcccaccagatgatctgctggcacaatgatctataatagttcatttacaaagattgtaatgtctcaacattgagtcaagtgttttcaattactaataacttactaagcttctacctcagccactctgtgttttcttcagcttgaagcaacgtactttttcttttagtttggaagatttggattgaaccttgttgcgtagatttacattttgtattcggctgaaagaacacaactttcgtgggtttttttggattactgttattgttctcaatctttcttcttttgttcttctttctgttgcaggtttcgtttctgcttggagtcattcctctt

SEQ ID NO: 226 - DNA, 456 bp, Arabidopsis thaliana
  Intron number 1 from transcript AT1G31340.1 (locus AT1G313 40) derived from phytozome v7.0 (chr-ID Chr1; pos 11218886 to 11219341 reverse strand)
tcaaagccaaaattcaggtttctctttctctctttctccgtctcccaattccacctcctcgtgcttttcttaggattctagggttttgcactatgaatttgtttgattgttggagacacagattggtttgctttgtttgattgatttttaggttttctttccccgattatctagcgatcgatgttaagatttctttagatttctgtgtaacagtaagcacaaaggctctcttaatccttcatgtgtttgcttaatttcgtatttgtttatgttttatggtacacttgaaggtatgtgaattgcttgagaatggttaattgtttctgagtttaagaagattggattaagattattgttaatgatcttttgatttggtcttcttctaattggtttatgaatggatgggatttgatgaaaacaggacaaagagggaataccacctgatcaacagaggtt

SEQ ID NO: 227 - DNA, 461 bp, Arabidopsis thaliana
  Intron number 1 from transcript AT1G32400.1 (locus AT1G324 00) derived from phytozome v7.0 (chr-ID Chr1; pos 11690940 to 11691400 reverse strand)
gcgaacatcgaagaatcatctctcaacaattctccgtaagtttccatcatcttcttcttccactctctcaatctcgtgcttcgattgcgtaatttcgattttgttctcccgatctgaacttattcgttcgtaattttgttcacggaaaaaaaaattggtggaatcatttctcttagattacgagatatctctgtgatttggtcgttttttatgtcgattagagaaaattaattggtgtatctctcattctcagctctatgagaggcttgattcgtgtgtatagcaattgaatttgggcaggacatcacaatttcattgaagtttgatttttagtcaaaattcatttcttagttttgatgatattttagatagaatctttatcattgatctatctttgggattgttattatgaactcattgaaatttagttttttgttcttttaggataattctttggactg

SEQ ID NO: 228 - DNA, 505 bp, Arabidopsis thaliana
  Intron number 1 from transcript AT1G48790.1 (locus AT1G487 90) derived from phytozome v7.0 (chr-ID Chr1; pos 18046844 to 18047348 reverse strand)
tttacttcaggatcgctgataatatcctcaaacaggtctcttcttcatacttgactttgaattttgatttatcaaggtatctttgtttaggagattcgtgtttggcctaattattgtgaaatgatcctctccaactatttatatctctctttgatgaaattattgtttcctaaccagagttcaatttttcgagtatcataacgtttgcaccattttgtttaagtttgattgttgttgagtgatattgattgttgtgtctgtgaaattggaatatgttcttcccttagtcttcgctatcagctgcgatttgaagtttgcagtgatcatggtggtcacatcaaattgtctatgaactgcaaaatcttttggatgtctttaacttgatatttagttgttggccttttgtttccttgaaagtgatccctttaagactaaaatcacttggttaaatttcctaatcatctgcataatgttttgtaggccaacatatttcgggcagagaaga

SEQ ID NO: 229 - DNA, 577 bp, Arabidopsis thaliana
  Intron number 1 from transcript AT1G50570.1 (locus AT1G505 70) derived from phytozome v7.0 (chr-ID Chr1; pos 18727567 to 18728143 reverse strand)
ttcttctttttgacctttcttcccctaaattaaaggttaacagagcctcaatttcgtctttttcttataacgagaaccctttaccataaaaatctcaactttatcccttattcttatctgcaaaattcgttctcgtcccttggattatgggtttttttgttcctcgagaaagttgattgctttcttggaatccatgcgtgccctttctctttgttgttttaaaggatgcgtctgcgttagattgttttagtaactttgtgaattgattaagcacttcttcaccataatcaagtttatagcttttgcttctgatcaggtaaaaataccaaaattttaggagttcttgagctttgtttttaatggcaatatttgattgcagcatcttaaagttctataatttgccagagatctgatttgattcgcttagtaatttctgtttcttgagttagagttagtgtctctttgtttgttatctgtagaatttgaaccaaactctaaaaggtttgtctttattttatttgtattatggatgattccaagtaagagctgctgtctttttttgtttgcagatcctgtt

SEQ ID NO: 230 - DNA, 743 bp, Arabidopsis thaliana
  Intron number 1 from transcript AT1G52340.1 (locus AT1G523 40) derived from phytozome v7.0 (chr-ID Chr1; pos 19490770 to 19491512 reverse strand)
gaatcttcttcttattcttctcttcctagtcaaaggtataagctttctccaactttttcctctgatccaactctttttgtttgatcttcgtttactttacctttttttccttcttgggtcattctaaatactgaaattttgttctttgagggtcaaattaacagttgataatcagaccatggagttttttcagtttcatgagtgtctttgctctgctcacgacagatttgagatctagtcatggttctgtttgatttattgatgtcaaatcttgaaatgtttatgatctctaggtttcagtctctttgctttttattatgatcttcaaacatttggattagttttatcagttctgattcaataaactagtgatatacatttggcttttgtttacaaatctctcaacttcagatttgttattttgtgtcccatttgattcatctttacctcctttgcacgttctgtttcaaaactggatttgtggtcctttcttttcaccattgtagttttgtggcccagatctttttttttttattttgtggcccagatcaatttatgaataaagttctttttttttctgttgcattttctttcactggtcttaagtttgatgtaacatctcaaccttattattaggagactatggtgcgattggtttaatccaatttaattacttgcttttaatctcttgtgttcttgatgtgacaggcttttgggtaaagtggcattgatcactggaggag

SEQ ID NO: 231 - DNA, 517 bp, Arabidopsis thaliana
  Intron number 1 from transcript AT1G54160.1 (locus AT1G541 60) derived from phytozome v7.0 (chr-ID Chr1; pos 20218707 to 20219223 reverse strand)
ctccatctcttcttaccaaatccaaagcaccaaaggtctctctctctctctctctcttcttgttcgcttaatttatttggtagtgatgttatgatttggttgctcagtttctacttatgatgatataattaaaaataataatttttgagttatgagagaaaaaaatcttttggttggtttctctgttttcttggatcattaagttcaatgagatttgatgagtttttttatctgttcaaactcagaaatttaatctgtcgattttagtttttgtttgcatgttgtgtaagttctagccatgttcaaagtttgaatcttttggaaccctttagatcatgaaacaatcttactgtgtcattgaacctggaatctgtgttttaggattgcttttataatcttttggtatcatttctctcttgtatttgttgattatgtggatcatgaataatatcatatgatttatgactggacttgttggtttggacatttagtttattgaagtaaagatttgaagaca

SEQ ID NO: 232 - DNA, 441 bp, Arabidopsis thaliana
  Intron number 1 from transcript AT1G54570.1 (locus AT1G545 70) derived from phytozome v7.0 (chr-ID Chr1; pos 20384140 to 20384580 reverse strand)
ctcctacgttactcttcttacctggtaaaacaaaatcagtgatttataagaatcaatggtttttgagctttgattgttgaaattgcttgacctatgtgaggtttgtgtgtgcttcatgagctaaaaatttactattcttccaaagtttgaaactttgtattcattttctcacttctttgtgtgtttcatggaggaaaggttgaatctgtaggctgttttgttgaattactgttttcttatctcatgtatctgattctaaatcttcgtttcaaagttccaagcttttaggataatgctttattgtttaggctgtattttgaattctagtaatggttttttttactgtttttcagtgtcaagtatctgactctctgattatcgcttcaaagttccaatttttggactttcgtaatgcctgatggattaatattttatgcaggg

SEQ ID NO: 233 - DNA, 567 bp, Arabidopsis thaliana
  Intron number 1 from transcript AT1G55820.1 (locus AT1G558 20) derived from phytozome v7.0 (chr-ID Chr1; pos 20864545 to 20865111)
agaccgctcagaagctcctcttcttaggtacgaatcatcatctatgtctctttctcagcttagggtttgttttgttttgatggagcgtgacttgcgtgactcttgggtttgccctccttagatttgaattgtacgatagggtttgtatctgttttcgaagatcatgtgatgtgcttttggttcgctactgttttgagtttctttttgttgccttgagctattcggttatcgaatctttgtttcctggtgtgtgaatatgcagattttatgcctaaagtcatagttccttaccatttaactggaaaggtacttagaattattgaaagagatcttgttttctttttgtaactttactttggggatgagttcgtacctttcaaggattctggtgggcgtgatctggattattaagtaggtactatttgtcttatgtgtctacatgtcaaaacattcagattttgggtcagcctcgtgaaaactcttgtattttagtttggctcaactttggtctttatgagccattttcttatgtacaatgttaattttgaaattttgcagatacatttc

SEQ ID NO: 234 - DNA, 694 bp, Arabidopsis thaliana
  Intron number 1 from transcript AT1G57680.1 (locus AT1G576 80) derived from phytozome v7.0 (chr-ID Chr1; pos 21363838 to 21364531 reverse strand)
ccgtttcaactctttggatccagattctcctccttgtaagctttcttctccctttcaatctcaccaattttggttcttttttttattggtctttgtttggatctgaaagttttgatttttttcctatttgcattattgggtattcgattgttttcactatttccttctctcgtgtattgactttgaagttttgggtattatctcttgagattctgtgtttaaaggttatgacttggctttatgtatttcaatattgttattgatttgtgtgttaatcatcttaatcttcaaggttgctttagttttgagaaaggttatgactttttaagatctagggttaagatggtttgataggtctttgtttcaaatttttggtatatttggtaagtttttgattatttgttgttttgtttagtttatgtaggtaacacgcatatcaagtgttaaagagtcaagatcacaaaaagttctatcgggtgatctgggctgctttcttttgtaatctaattgcagaaactttgctctgacttggatagcttcgtaaaaggttcaatctttctccgtttttcatcaatgagtagtaactaatctggaaatttgttgggagagaaagggcacattgcactgctattgctagagaacgtttctgcatccatgctggtagagagcatgcgtggatactgtgttttgggtg

SEQ ID NO: 235 - DNA, 525 bp, Arabidopsis thaliana
  Intron number 1 from transcript AT1G58390.1 (locus AT1G583 90) derived from phytozome v7.0 (chr-ID Chr1; pos 21693892 to 21694416 reverse strand)
gcgacaacagaagagttcctcgacgccatcaagaggttagtaaaattttcttgtaatgttatttgctcttttattcttagaaaactttctttgtccatgttctggatcggtactactatttgtctctgtaattgcatcggggactcggggtatgttaagacttaagagacacataaagcttgagtccagttaaagataggttttgtttgacttctatatgttgaataacaaaaaacaagccttacgccaagaattcattacttgaaaaaatgtatagcagtttgattatatctcactaaaaatgttaaatcttaactacatttggttaaaatgtgttaatgtccagcgtcacacgtcacacactctctctctctcccgtattttatgagtgtctatataagatacacaagatcaatgtgtggaatataaaatgacgaaattttgttttactcttggtgattatgaatgttcatcagtagtacatagcttgattatgattttcatatcgcttaaacaggagcaact

SEQ ID NO: 236 - DNA, 331 bp, Arabidopsis thaliana
  Intron number 1 from transcript AT1G62430.1 (locus AT1G624 30) derived from phytozome v7.0 (chr-ID Chr1; pos 23108976 to 23109306 reverse strand)
atagttctggattcaaaatctttcttccccaataggtatacgcgaaaaaaaaaatccaacattttcttcttacttaaatcctcaaattttgtcacttgttcatgcttttaagtaatcaatttcttaatttcagtgttaagtttgtcacgaatcttatttcttttctgttgggttaatgaatagtcgattaaaaatcccagctttttcaatctgttattgctaagtgattaggaatctcagatgttgacgttcactgatagggttttagtcaaaattcctaatttcttcaagctttatagtaagaatcttaagttgtttgttttgggtacag

SEQ ID NO: 237 - DNA, 911 bp, Arabidopsis thaliana
  Intron number 3 from transcript AT1G63010.4 (locus AT1G630 10) derived from phytozome v7.0 (chr-ID Chr1; pos 23351034 to 23351944 reverse strand)
tgaagaagaactaggaagaacgaggatagatacaggtattatttttatatatcaagatctctgcttttggcttatttgtttatcatctttttcacttgaaatgcacgagttttaaagtataaataagctttgtgttcttgttcttgaggctttgtgttgtgtgaagtagaaataagctgaatttggatttgatttgatttggtattaaattgtcctcactggttttgcgtgattatatcatctatgcacatggcttgtagcgctgacttgcttataagtatttttataaaacgtgttgcgttcttgttttggcttctataattgtagttttagaattgtgcttgagcactaatcagattcacagcaattcaaaaatccatttagaggtataattccttttagatgctctttgatcttttcgtgcttgagtcagtttgtacttttgtccttgactctttctaaaacaggttttgtgttaatcccttgaatctgctttatcgcttatgtctcttgaaatctatctatgttgctctctttgtgactgtctgatcattagttgcaaaatgtgaaattgtctgtgtaatgatcaggtcgagttttatgaaatgttgttagcttccattgagtaaggcttattgtggattggtggattgaaatcttcatgtaactataagtattgaggagctttgaatgtggatttaaaactgttctggagtgtcattgactttggatactattattatgtatttgtattaaattcatattatgtatgccacagacccattctctatttccttcaacaagttgacagagagcaaaatctttatatacgtgatatcaaagtgttctaatttccacattcttctcacttctcaggctttaatctaaactttgctctctgctttctgcga

SEQ ID NO: 238 - DNA, 404 bp, Arabidopsis thaliana
  Intron number 2 from transcript AT1G63010.4 (locus AT1G630 10) derived from phytozome v7.0 (chr-ID Chr1; pos 23351955 to 23352358 reverse strand)
agttgcgatttttgcaactgggtttctctcttcaggtactgagtttttgttgttgattgtgagaataaaaaggaaagtagacaaaagaagagaatctaggtttttgattgaactccattttagaaaaagttgaaaactttttggcgtttttcatttgtttttcaagttgtggaattttctgaattggcaaaaaaacaattttgtgactactaaagcaacttgtcttggctgcttctttttatcaatcatatatcattgactccactaagatctagtatttatataatattttgtgtaggccttattaccttcatgctaagctcgtgtcttctgatctatttgtaattattttaatctattttttttcagagatttaatctgtataagaagatctcaagatcagc

SEQ ID NO: 239 - DNA, 200 bp, Arabidopsis thaliana
  Intron number 3 from transcript AT1G63630.2 (locus AT1G636 30) derived from phytozome v7.0 (chr-ID Chr1; pos 23588013 to 23588212)
catttgcaatattggaggatctgcagaagagtgaggtatgtcctcgtctcattttttttcttttcagtttatgctctttcattttgggtttcggagaagtttgctatcgaattgtccaagtcaaatttaagatacagagtctagattaaccctctctgattagcttagtgtgtttgctttgcaggatcatcatttggagg

SEQ ID NO: 240 - DNA, 949 bp, Arabidopsis thaliana
  Intron number 1 from transcript AT1G64140.1 (locus AT1G641 40) derived from phytozome v7.0 (chr-ID Chr1; pos 23806010 to 23806958 reverse strand)
gccgtgaaaatctcgtaatcagattcaaaattgaggtaaattcattcttcgtttttgtttttcttcagttgaatttgcatgtttgtttttgatgagaaattcagagaaatttgacttctttttaattcgagacaaaaaaaatatgtctctgagatcgatgtctgggaaattgaataattctgttattctcgttgctttctttccttgttctgtttcatttatttctgaaattttgtgtcggtttaatctagaaagactcaagtttttgatttgaagtactctggtttggtctcttttgttttgatttctctctcttttattctaagcttctcatggaatcatatcgatgaagctagtgaataatccatcatttgtggtgtatctctttgacaaaaaattcttcatttctcaatctgtttttttagatctcttgttttgtttcatgttgtggttgactaacgaataaaaaggttgtgctttttaatcttggtttatggtgtttgtcctaaactatgtgtgttctggagatgttaagtgttctgtagatttgaggtgttaaatgatctgtgttctgtagatttggtaacccaattgaatttttcactgctctattgcggtttactgccactcacttgtttattatctgttatatgaagcaggatggttagctgctaccgtaatccttgcgtgaagattgagaagaactaattttggtttgtgagcaactttcgaatcagctctgttagatttgatttgaacttttatttgaagatggatcggtgtgacacctcaggatttgtaagcggcggtggagatgcttataaggtcttctaactcttattagagctgtggctttattctcttaacccggaagttgttgttgtcctcttggcttcgcgtctttgcttttggtgttcttgacgaaagttttcatttttaagttgtgacc

SEQ ID NO: 241 - DNA, 580 bp, Arabidopsis thaliana
  Intron number 1 from transcript AT1G64980.1 (locus AT1G649 80) derived from phytozome v7.0 (chr-ID Chr1; pos 24138620 to 24139199 reverse strand)
tttctcaagatccaagttctcatcatctcctccaggtacgctctgttcttcctcatttccttcagattcgttctcgattcctctgtgtcactccaatccatgcctcaattcccgtttctatcttactagattcgcagtttcattgtttcgctttatcagcgtaatatgattatatagatctttagttgtccatgtctctgatttagtttgaatccatggcttcttcattcatctgaagattcttcaatttccgtttctgactactagattttcacttgattcgcattttgatttggttttgattcatcacgattcttcaattttgcttatcattatgagatgatatagatctttctcatttcttcgaaattcgttgtagatttctttgtgtgttacttcattcatctgaatatggcttcaatttccgattctagcttctagatttgcacttgattcacatttcgataaggttttgcttcataacgattctgtttcttacgaatttgcttaatctaatgagatgctacagatcttaacttttgcaatgaaatttatggcagattcgaattctgcaacaaca

SEQ ID NO: 242 - DNA, 379 bp, Arabidopsis thaliana
  Intron number 1 from transcript AT1G66510.2 (locus AT1G665 10) derived from phytozome v7.0 (chr-ID Chr1; pos 24812942 to 24813320)
ttcctcaatatacactggtcggaatcgatactcaggtttgtctacttctaagtttaaagcttttatcgaatttcaacttttctcagtttcaaagtttgttactttattccaagtttaaagctttttaatgtggaactgattctccttgtatagtttctttttggtttagtaaatatctcgagaagaaagtgtattttgagtttgaatatgattaaaatttgaggtttttgagcttttgaagattctttattggctatggattttgatttctgtatgattgtgaaacatatttcttgagcatattcattggcctataacgacaatgttttgtattgtggttacagatattcgcagttggaccagctttcaaagggattaa

SEQ ID NO: 243 - DNA, 370 bp, Arabidopsis thaliana
  Intron number 1 from transcript AT1G67250.1 (locus AT1G672 50) derived from phytozome v7.0 (chr-ID Chr1; pos 25164507 to 25164876 reverse strand)
tcggatctcacccactcgaatcgtcatacgaatctgtaaaactatcctccccgatttagtttttctttgtttgttagtttgaaattgaatctgtttgttccttggttaactgagaaattagcttacgaaaggaacttaagtgtgtttgattagcattcctgaatctcttctatcgcctgattagttgattactttgttttgcaattcgcaaatttagggttcaatttgagtagaaactgttgtttcaatcttactagggttctaaattgggttaataattagggttctgttcttactctctagatcttgaatctctgttgattcatcggtttcaggaaaagaaatcgaaagaggcgttgaagaggacggt

SEQ ID NO: 244 - DNA, 432 bp, Arabidopsis thaliana
  Intron number 1 from transcript AT1G67700.3 (locus AT1G677 00) derived from phytozome v7.0 (chr-ID Chr1; pos 25374562 to 25374993)
gccaatgttcgtctcttttccactctttcttcacttagcttggattaggagataattaaacgcttaaacatgttagctttgctttggttctgtttccaaagttatatacttttttcaatttgatactcctagaccaattattagattgcaaatcatctggtttcatcaaatttggatttttcaacatttcagctctttgttctagtacgtgtttgtttataacatgaattaaaattgttagcttgattggttttgtttgcaaagttatgtactttctttcattcgatccttttagatcaattatcagattgcaattgtgttctggtttcatcaatgcgagtgttcttttcagcattttactttttgttgtaaaaagtgtttcttgtgacgtgaacaggtgtatctttggtatcctctgagtataatagctgg

SEQ ID NO: 245 - DNA, 295 bp, Arabidopsis thaliana
  Intron number 1 from transcript AT1G69740.1 (locus AT1G697 40) derived from phytozome v7.0 (chr-ID Chr1; pos 26231902 to 26232196)
cttccttaatcccaacaacttcttaacaattcaaggtttgaataacacaactttactctgtttctctttgctttctgtgttttcattttgaacaaaacagctttaatcttcttcttcttcatttttcacctaaatcttgctttgtttagtcaatatacgatctaaagtctgtaactttcaattcaaacctgcattcttagtcacgggtacatctaagaaacctcaatttcgaaattcaatatcacaatttgcttataaaatcctcaatgtgttcctgtgtgtgtgttgcagattc

SEQ ID NO: 246 - DNA, 391 bp, Arabidopsis thaliana
  Intron number 1 from transcript AT1G73820.1 (locus AT1G738 20) derived from phytozome v7.0 (chr-ID Chr1; pos 27756578 to 27756968 reverse strand)
agctcaggcgcaaagatcctgaactgtatcctcttaatccgttcctttcttttgttgcttacggatcatgatttttcgaatccctaagtttgctttggtcactgaatcagtctcagtctccttctaattcgataatttgcttactttcttagtctccttgaaattgtttcctaattcacatttaagtttcttggtttgatttaaggtattgattctgggaaaaagtatgttttcttctctccaaatgactgaagaaaaagtgtgtgcgttttagtaaatatacgaaatttcttgcttgtagctattgtgaagcatgttcattgggttgtatagggagatttgtaagcttgaagtttgatgcacttaactgttttcatcagatacaagcgga

SEQ ID NO: 247 - DNA, 648 bp, Arabidopsis thaliana
  Intron number 1 from transcript AT1G74530.3 (locus AT1G745 30) derived from phytozome v7.0 (chr-ID Chr1; pos 28011290 to 28011937 reverse strand)
tcgaaattcgccatccacttcatctccttcatcaggtaaaaatcatttttttaagctcttgagggttgtttatttatcaatcactgacttttcctttccttgtctcgaaattgagtaccttttgatgttttaatttttctaaccccgatctgattaattaactaaattgtgtgtctgtggtttttttaatgaatatgggtttcgtaaatggaagatcgatgttgacttgctaactgaagggttcatcagcactgtctagttatggttgcgtaaagaactagtttttaattttctatgttttttgtacttaagattttgagtttgctattggttctttaagccgaacttagtttttagggatcaaatgggtacttacatcaccgttctttatttgttcatcaacatgtttcttattgataaaagcaaaacttggtatgcttctagaagcttcttaagccaacaagattagtggttcaaatgcagaacattctagattgaatatctgatgcaaagggaaatgcttgatttggggatctagtgcctttgtttaagggttttctttatctgtatcaagattgtatctgaggtaaatggttattcatagcaataattagtcggattggtatgtttcagattcctttgtctcct

SEQ ID NO: 248 - DNA, 187 bp, Arabidopsis thaliana
  Intron number 1 from transcript AT2G02970.1 (locus AT2G029 70) derived from phytozome v7.0 (chr-ID Chr2; pos 867213 t o 867399 reverse strand)
ggcttctgttatctctggtgagttttcaaaatcttctcttttgttcaaaagtgagtctttttatctaatgccattggagttgtatcagtttctgtctcgctctttttgatttgagagtttgttgctcctttattgttactagctaatcattggatactaaatttgccaggatctgacgagggtgtat

SEQ ID NO: 249 - DNA, 581 bp, Arabidopsis thaliana
  Intron number 1 from transcript AT2G05250.1 (locus AT2G052 50) derived from phytozome v7.0 (chr-ID Chr2; pos 1915766 to 1916346 reverse strand)
ttgaagctgtgtttgtaattttccccaatttatcagtaagatcgctaacttcgattctcagtttatttcatttattgaaattttaggtttttggtttttgtcattgttgtttattgaagaaattagtaaactttgagttgggatttaaagtttaatccttttgagttgggttttgtcttatgaagttgatagcttgaatctgactttttggtgaaatttgttcaaaatggagataaaattaagctactttttgactatctaaatctagttttgtataattctctatgtctttgtgatataaagttagcgattttgtcaaaaaaaaatctgaacttggagattctagatctcgaatcttaggatggttgttgtaagttagtaagtatgggtttgtttgagtatgtgtggttggttaggtattggtttgcatttgtagtgactcaaaaagaattaatgttgttcttgtgaatgtttgtttgcagataatgatgatcttttggtgcttgaatatggaatgcttgcgggaacggtgttagtttccttttgtagagctgtcatatattgtgttggtttctttctac

SEQ ID NO: 250 - DNA, 697 bp, Arabidopsis thaliana
  Intron number 2 from transcript AT2G16860.1 (locus AT2G168 60) derived from phytozome v7.0 (chr-ID Chr2; pos 7305174 to 7305870 reverse strand)
tgaagcaaaggccagattcgagaagcagaacactggtttgtgttctttttctattttttgaggcttagctgttcttgatgtttctgtcatctgtgtccattctcatggaggtctataattttgatgtgtagcagtagctgttttgaggtttaatgattatttgctacttgctaggttattcgtttagaggagatctgttagtgaatttgcacattaagtttctagtgatgcttcaatgctactgagtttctattctgtgattctcactatttaaaaatgagtgaaggagtagttattgctttgagaaaattgctgaagcaaaggccagtagagaagtagagagaagtagaatactagtttgcggtgtatgtatcatctgtgtgaatttgtttcccgtgattatggtttatgatttttgatgcgtaagcgtagcggtttgaggtttattattagagttatgagtaaatcttcacataaagctggtgttgtctcaatgcaacttagtttcaattttgtgatccacccactatgtgcagaaacagatagagacatgttacttgtcattgtgatatcatgtcttatgaaatgttcatgtagttctgataagaagtgagtgtgaattaccattctgagacttgtttttctttttcatgtaccaaaaggattagctaaagttcacgagcagacgagggagccg

SEQ ID NO: 251 - DNA, 628 bp, Arabidopsis thaliana
  Intron number 1 from transcript AT2G16860.1 (locus AT2G168 60) derived from phytozome v7.0 (chr-ID Chr2; pos 7305960 to 7306587 reverse strand)
gtacttgcggattcctccgaattgtttcttcacaggttggtttttttgattcgatttcagtttggagtgtttcttctctctattctatagattgtttcttcgatttcaatcgtttggtttttgaatagaaaaccaaagagaagatgattttacttgtttccattgttcttaggttttgggaaaaatcttacgtatttaacatagtgtttcaaatacacagaatctcgaaattgattccgatttatgaggtcatgaatctacaatttcctacctcctgttttaggctttgaacagattaggtttaatatttaagtgaatttgcatcaaattagggaaattttcattgaatccagttaagttcttgtttgcatcaacttgtagtgttatatagtttagctacaaatttgcatcaaattagggatttttcattgaacccagttaagatttttatttacatcatcgtaatgtgtgagctttgttgttatttggtgcttcttgtgcctcttttgctattattcttaaatctcaatgagagaagagtttattttgcagtttattggcgtttctgttggataactttattggcgtttctgttggtttattttgcagtttcttaacgcttggaagt

SEQ ID NO: 252 - DNA, 420 bp, Arabidopsis thaliana
  Intron number 1 from transcript AT2G17340.1 (locus AT2G173 40) derived from phytozome v7.0 (chr-ID Chr2; pos 7543535 to 7543954 reverse strand)
atcaacgtcttcgccaattccattccttctttcaagttcattctcttctcactacttctctcttccgaccttatttagtttctatttactttgaccagattcagactctgttcatgttcatgggtcagaccaagctttgattttgttaccaaaaaactacttctcttagcctcaaatatcaaaaagctcaggaaacttttcgtctttcagctaaattcgactaatgtcgttggtttgttgtttgtgttgactttcctgggtttacttggtttttgacttatttacatcaagagtagtttctggaagcttataggcaacagttgcaatcctgttttttaaccagaaaatcccattaaatctctatgttctaaagctgtttcatttacaggaaacgtgcagagagcgatatcactgttccag

SEQ ID NO: 253 - DNA, 440 bp, Arabidopsis thaliana
  Intron number 1 from transcript AT2G17990.1 (locus AT2G179 90) derived from phytozome v7.0 (chr-ID Chr2; pos 7827040 to 7827479)
atctcgacttgtgaggatcctcttttccttttctttttcttttgtataataataattatctcatccccgatcgatttcgattttcatatggtttctcgccagaaatgatcgattctctcgtttatttcaatagcctcagatgattgaagatgataattcaacagttaataacgcttctcttttttttagtggctttgtgttttgaccagccaatctaaatcactggtcacctttgttttgatctctgttttgttgaatttttgtttcaaacttaaacgaagctaaaaggctaatgggttggtcttaattctgaattttgagagagttttaaaatcatcttttatgagctaagccatgtttgaagctagatctgcctttaactttggttttggttttaaacttttttgtttctaacttgttgtaggctgaagaggctggga

SEQ ID NO: 254 - DNA, 491 bp, Arabidopsis thaliana
  Intron number 1 from transcript AT2G26770.2 (locus AT2G267 70) derived from phytozome v7.0 (chr-ID Chr2; pos 11407744 to 11408234 reverse strand)
tcaaaacatttgtctgatccattaatcggattcaggtgagaagtgtttagctttgttctcttgaaaatctccgacgttgttcgtgattattgcagtattttgtgttctgattttcgatttcaagttcttaaaatttgactttcaatttctatcttctttgaaatttgttactaaattggtatatgggtagttgttgttagctcttttgtttggtaatctagggttttgacatccatcaattctttatctctgtagctataaaatgtttttaaatgtgtgttgaatccattgttatttccaacattggcgtaggtactgaaaaaaacaatgttttgtttttgttgttttagatttttgtgaagattcaacaacagatctgtgagtccattggagtatattactattcatagtggttagacatctactagcattttctgtcttttattttgtttttgtctaagcatttttggttttgtttataaacagataca

SEQ ID NO: 255 - DNA, 549 bp, Arabidopsis thaliana
  Intron number 1 from transcript AT2G31140.1 (locus AT2G311 40) derived from phytozome v7.0 (chr-ID Chr2; pos 13270125 to 13270673)
acaagctcgagtattccctcactctcagtctcaaggtttggtttgtcttcaccagctttctttagatttctcttcatagtctccgatctttacaatctgggaattggttttcgggaactatttgataaatgctcttagaattccggtttaggggaatctgcgtttattgtgttctcattctgcattcgaatcaatctgttcataattgaagatatactagctatctgatttatgaaaaagttaaaaactttgatgttgagaatacaaagagacttactttatatttggattttgctgtttaatgttgatagcttttgattcttgaatgcttttatagaacaacttcactcacaagacaatgttgatgttgtgttataactttcgataagatttgaatgttttgcatatagtgctcaatgtctcatgatgactcttgtgttgatagctgattttaacaactttgtttagtggtggaaacttatgattttttttttatgttaaccaattttgacagagtcataggagtaataaactgagtgaccgggaact

SEQ ID NO: 256 - DNA, 765 bp, Arabidopsis thaliana
  Intron number 1 from transcript AT2G31490.1 (locus AT2G314 90) derived from phytozome v7.0 (chr-ID Chr2; pos 13412193 to 13412957)
cgatcattgtctacaagggaatcgtcaaagatttcgtgagtttaaatctctctatctctatctcattctcgatcctatttgcatttcgaatcctcccgagttagatatctgttttgtgccctaatttttcatgtatcgtatggaattggatcgtttgatacatttgaaattggggtttaattttagctgtagatgcatttgaattagattagttcttttgctgcaacgattggattcggaactggatttcaattttcacctccatactagtattcttaggtgatgatggttcgatttcagattgattataactcaaaattttcgagaccgaccaatgaaagtctaagattggagttagggcagaagaaatttagttctcttttagcttgtaaaaattggatctttggctaaaaaaatggttttaactgctttctattgttctgagtttgagtctgagctgatttggttatgaaaaattatgtatagtggactttcaaggttcttaatctctcagcagttcattgctacaatccttgaggattcttcctccatagtagtttctactctgtgtccttgaatatagattcttgttaggaccatgtttatgtggttgatgatctatgccatcccttgttagtggaatttgtctatgacgattgagatggaaattttttttatgtgttacttccaatacaattgtgtagttattgtgattaatatactaagttcaatctaatggactctaaactcattttttgatagcat

SEQ ID NO: 257 - DNA, 337 bp, Arabidopsis thaliana
  Intron number 1 from transcript AT2G38180.1 (locus AT2G381 80) derived from phytozome v7.0 (chr-ID Chr2; pos 15997263 to 15997599)
ggggtgccactctcgctgacctctactctcgcacggtttgtgacatcttctcttccaattccaatttcgatctgtagttatactcaggatcttctgattttgactgattagtttagtgaataatctacaataaacccactaaacctgtaatgcaaatctgtactttactgttttcgcaaatggacaactgtttcactgtcaacaatatctaatgattgatgagtatataaatttcgtgtctttatactctgatccataactgttacacttaaaaattactttttttttgtgtgtgtttgatatgcttattcacaggctgatatcattcttcgtggat

SEQ ID NO: 258 - DNA, 732 bp, Arabidopsis thaliana
  Intron number 1 from transcript AT2G39940.1 (locus AT2G399 40) derived from phytozome v7.0 (chr-ID Chr2; pos 16674292 to 16675023 reverse strand)
gacttttgagcatcgttacacactgcaggtacacttacttctcagtatcttgtagctactttggctcgatgcttttgaggtttagcgactccttatcatttcctactttgactagaactctagatgcatttggctctttttaaaaaacttaataagtcgtcgttgtacaaagaaccatatcttgagtttgtgtttgtaaagatttgatcttctttagctcaattgggtaagttgtaactttggtggatactttttgtccttaatgaaattggtgaaccttacttcatttgatttcttagtacactttacactaagagtaatataagcagaaacatttatttcagaaagtttcagtatttaggcgttcatgtttgtcttatatccttaattgctttgcaactgttatgcttgctattaaagcagaaattgcaatgatcttcagttatttctcaattggggaagtataaactttgatccggattttatctacaaccaattttttccctctttggggaacattcactttgtttatgcataaatagcaaaaagattgatttctgacatcttcagtctgccagagtttatgtgtattatttggtttttgaatccttgattcggctgctgctgttcttcatattcagttttagcgggaaatccaaatatcttgagttgtttctcactttattcatgcaactgtctgttgtcttgtccaggaaaataaaaactttgtta

SEQ ID NO: 259 - DNA, 623 bp, Arabidopsis thaliana
  Intron number 1 from transcript AT2G43770.1 (locus AT2G437 70) derived from phytozome v7.0 (chr-ID Chr2; pos 18135304 to 18135926 reverse strand)
gcgattcgtgcctccctccccttcctttgacttcggtgcgtaacttctttctatgtagggttactcttttaagtaatttcgttctatgaagtcttctgctggaattttggtatctatcaagctttttttcttgaactcttcactgtctgtaatataatgggaggtgaatcatgcatgtatgtttcgattttgagacgaatcgagctgctagtactaaatttggtgttagtggttgctttgctttatgtcaaaattgaatctgtgagatctctgtaaccggacttgaagtccttttttcgtctctggtgcaaaaccacaacaagttttagagagatatcgatttcttaatgatctgtgtttatttacttgcggcttgagaataaacattgcaaccttttgcttttgtaggctttacttagaatgtgcaggtttcatgatacttcttggtgtttactatctgcttttcggatgttatattgattaatggcttgaaaattttgaaattgagatatctataaaagctacacagctgtgtgaatattgttataattcgctcaatcttctgattcgttttctcatggaatccaggttctaacttgattaccagtgagaagtaggctaag

SEQ ID NO: 260 - DNA, 373 bp, Arabidopsis thaliana
  Intron number 1 from transcript AT2G45260.1 (locus AT2G452 60) derived from phytozome v7.0 (chr-ID Chr2; pos 18665939 to 18666311 reverse strand)
atagtgaataaacacacacacggagccaaatccaggtgatctctttagttttcgatctctttctctagattcagattaaattataacagctgattgtctaaccacaaacctaaattgcaaaaagcttgtgaactttatctggaaatgaacactgtcgaaagatctttagggtttgtgaaatttattttttacattttccatagctagatttcatttgaatgataattcacttcgagatctgtaaacacaaaatgtttcaaattgagtcttcttctgttccacaagtttgattctaagacatttttttgcaggagaaattaggtttgaattagagagattaggagaatacaaattggtttggtggttttcaagt

SEQ ID NO: 261 - DNA, 567 bp, Arabidopsis thaliana
  Intron number 1 from transcript AT2G46080.1 (locus AT2G460 80) derived from phytozome v7.0 (chr-ID Chr2; pos 18949361 to 18949927 reverse strand)
ccctgtgatttcttcatttccggcgacttaaaacggtaagtttcgtggaaattgagtttttttttgttatctataattctccttttattgtgtgtgttcttctgtaaatcgaagtttgtgtgtttagttctaagatagattttactgttcgatgaagagtttgtaccgaacttctgtgttcaaaacttccgtgtagataattaactcctagggttcttctaattttggaaagattgaaacttttatcctaattccttggttctggacatcttcaagtgtagattatggcttagaacaattgattatgtgtttgttttcatcttcaaattttgattttacatcatttcaataaaggtggtaacttcttttttttcaagatctcaaaagttgtcagctttttgggactcttaaggttgggacttgggattgtattgttcctcgattagtccttctatgtgtggcaacaacacagaagatacattgagttcacagcaaatcggtttgtatgattaatcattatcattattctaacaatatttctcttttcattttcaggtgtctagcaaa

SEQ ID NO: 262 - DNA, 506 bp, Arabidopsis thaliana
  Intron number 1 from transcript AT3G01450.1 (locus AT3G014 50) derived from phytozome v7.0 (chr-ID Chr3; pos 171380 t o 171885 reverse strand)
ccctgaattttctctggcatttcgaatttatagaggtacgcgagtcaaataatcttcactatttactcttcaagttagtagtcatcgataccgcttgactcgccgctactttttctattcttctgcgttttcgatctttcgcggttgcagtagtttacggcgccggagttagatttcggactgcgaggatttgtttgaactttttagagtccttgagtgggatcgaggttttttgcttttgttttgagtaaatttcgtaattgtttgaaataagatttgggaatgtagatagatctctgctctttaatgttattgctgttgaactctcatagtaatgtgtttatcttaccatttctactttgaaagggtttcattgggaatacttaatactaagctagaggtcgaaaattcatctataatcttatctttggttttgtaatcgcagatgctaaacttatgttgtttgtacttataatggcgtcttctttgttacttttcaggtacgc

SEQ ID NO: 263 - DNA, 463 bp, Arabidopsis thaliana
  Intron number 1 from transcript AT3G02210.1 (locus AT3G022 10) derived from phytozome v7.0 (chr-ID Chr3; pos 410957 t o 411419 reverse strand)
ctttctagtttctttctctggtttaactccttcaggtaagccgaaagattctatctttattcaagcttttctctgttcattaccgtattttacttgctagggttttatttcgtcaatgattctgagtgcaactttccttctttgttccccatgttttagttatgtgcatattttaaaattatttgctaggagcttgtgtttattgagttctttaagtttggatcttgcaattgcttgagcttttgggtacatagggaaagagagaagaaagttattttgtatgttaagccgtataattgttttgaaggagcttcttatcctcaaaagagaagatctttttgacattttcatcttcaatgctctgttattatagaaagagagaatctatgagataagaaaacaaaaaaaagcttcagtattttgtgtgctcatggtgttgcttttgggattgtttcagaagctt

SEQ ID NO: 264 - DNA, 514 bp, Arabidopsis thaliana
  Intron number 1 from transcript AT3G02555.1 (locus AT3G025 55) derived from phytozome v7.0 (chr-ID Chr3; pos 540956 t o 541469 reverse strand)
acccttatcgccgctgtttcgtcttgaacaatcaggtttgtttctctctccctctttctttaaggtccgttaatggcggaatttatctaccttgtaaacagtttgttacagatctaaggtttataattttttttatcttgtttcatcttctttagtcttgtgaaaaatttctgtttttagtatcgtcaatactttgtgtattctttgatatctatttctgtgaaattggtttcttttagtcaatgtattagttggcatttctgcttctaaacaccctttttatatccatctctctctttgaatttcgatatgatcaccaaacgagtttttgtcaattctctcaaattcaacgggactctggacgaatttagggcaaatttgttcagattttaccaagtaaatccgatttcttatccattggggtcttaaattacacatctttcacttcttttttcttttaaaacctaattttttcacttgatgcacagattaggtgttcttctgtggataaaag

SEQ ID NO: 265 - DNA, 485 bp, Arabidopsis thaliana
  Intron number 2 from transcript AT3G04910.2 (locus AT3G049 10) derived from phytozome v7.0 (chr-ID Chr3; pos 1355247 to 1355731)
aagttcttggtaaaggagcttcaaagactgtgtgagaatctctcccttcttctcttctttttctgcttcatgtttctctcaaagtttgcagcttttttttcttctggatctggtgatgatttaagcctaatctgttgttctttcttcataaagtttgtaactttttgttttcccagtcaaaacccatttgtgatccaacaaatttgtccttacgatttttgtgtgttttggattcatgattgaatcaaatcctttaaaagaggaaataaaaaagttgagcttttgtttttttttgcttcattgaatcacttctagtttggtcattaattccccacaagagaaatttccaacaactttgctttttttggatctctttattgctttgacttataccaaattcagattctgcaaacaaaaaaacttctttgctcatacatacattaatcttctttctttcttttgattttgtagttatagagcatttg

SEQ ID NO: 266 - DNA, 485 bp, Arabidopsis thaliana; identical to SEQ ID NO: 265
  Intron number 2 from transcript AT3G04910.3 (locus AT3G049 10) derived from phytozome v7.0 (chr-ID Chr3; pos 1355247 to 1355731)

SEQ ID NO: 267 - DNA, 495 bp, Arabidopsis thaliana
  Intron number 1 from transcript AT3G09860.1 (locus AT3G098 60) derived from phytozome v7.0 (chr-ID Chr3; pos 3026269 to 3026763)
tggcagctctctaaccagttcaagtatttctcgctctctctctctcttgaactttcgaattcgaatttgggtactttcggtttttcgtgtttgatttccgaattgggtttcttgttcatgtgtttttgttcttctctgaattgctccggtgagaattatgttttgattcttttggtttgactgttaaagttcttctttttctgctacattagattggttatagcgcaatgtttgaagatttagtaatgtcagaagatactttgatgtctttaggcgaattgaatgaagttgttatcataggcattgctaaaacctcaggtttcaatatcatctaatagttgatggagtgtttagtcctatgatacatagtgtgatcaactgtgtttaaggtcttgtagatcaaataatcatgtttctcccggataagttctgtggcttatccaaagtatggtttttgtatggttgtctctcatactctctaatgtggcagttacc

SEQ ID NO: 268 - DNA, 381 bp, Arabidopsis thaliana
  Intron number 1 from transcript AT3G11540.1 (locus AT3G115 40) derived from phytozome v7.0 (chr-ID Chr3; pos 3632461 to 3632841)
gctacagagtcaagttcctcttttcaggttttgtggtaagtaatcgttaaaccctaagtatcggaccttgttgtttaatctgttcgtgtttactctcaattacatatgcattcttctgcttaatcgtttcttttagtttaatttctagggtttacatcccaaaggtctgatctttttgcatatttgtgtgaatcttagtttttttttttttttttggaattgaatgtgatgagttgggtttgatactgttaaagatcaaatctttagcttcgttgaagcttcatatttatgtcaacaatgcaaggtttatttttcttccacctttgatttgatatttataattgtttctttgaaggtgaacaagattttagttacaaaaaa

SEQ ID NO: 269 - DNA, 785 bp, Arabidopsis thaliana
  Intron number 1 from transcript AT3G12480.1 (locus AT3G124 80) derived from phytozome v7.0 (chr-ID Chr3; pos 3958068 to 3958852)
aggaagaagctcgatactcggttcccagctgtaagtttttcgtctctaattgatcatttctgaaattgaagtccaatttctcggaaattactttgatctgttgtttttcagatcgaatttccaacactatttgggattagattagtgttctacgatgaaaattagattaagtatctcatttctggcgaattagttttagcaaatgacctagtagtcaatttcaccctaatttttgttgtgcttgttatatagctatagtaatatgtgttatgaagatccgctatggaatgtttcatgtaaattagagaattcgagaatttaggtgactagtgctcgaaacgtgttctttatcaacaaaccagtcagctattggttagatagtgttgattgaagcagggatgttatacacgaattgttttttcataggcttggaactttttgtagagcttccaatttggctagctagattttgtttagctttattgaataaaacgtcagatgatttcataagttggttattgttgatggtggtttattttgtttgagctgaggctagaatattagtttttcacagattttgactttccatttaatttgttaatatatttttgtttgtataatctgattggtgattgtacagagcgtgcttggtgtttctcagttctaccatttgctttataattcgtttagtagtctgtaattattgccacacacactgtgtgatggttgctgtttcttcatttgatgcatatattacaatttttcaggctcgtattaaaaagatt

SEQ ID NO: 270 - DNA, 545 bp, Arabidopsis thaliana
  Intron number 1 from transcript AT3G13350.1 (locus AT3G133 50) derived from phytozome v7.0 (chr-ID Chr3; pos 4337110 to 4337654 reverse strand)
cgagctttcctcggattaaccagcaagactttgaagtcagtttctttcttacccttttcacatttttgtgagaccttttcgtttggtttaagattgtggaagaaaaaacccaactttgtttgtttgtatctctcccgaagattggttagggatttaaggcttgaggtgttgttatattgtttggtgagattgaaagcaatagaattagattttgttgctcagtgaaatgttgaaaattgtcaattagggtttagtggattccggattggtgaagtttaagcaggaagtgcgttatgtcatgtgtatcgtctgttgaattagatttatcgtattctttacctgtttatattgttcataaggaaatgaaatcaaactggatttagtatttactaatctggatactgtaattatatctatgaacgagtttaggcttaatgtgtgttgttttgtctcttgtgtttattaattgatcactgtctggtaatgaaacattttccgtctctgtaaaagggttcctactgtgggaggaaacactcttgatctgc

SEQ ID NO: 271 - DNA, 559 bp, Arabidopsis thaliana
  Intron number 1 from transcript AT3G13870.2 (locus AT3G138 70) derived from phytozome v7.0 (chr-ID Chr3; pos 4570548 to 4571106 reverse strand)
ggtaatttatatatccatctcttctctgctcataaatgttcctgatctcgtggatccgttttttcgctttgatctgatcagttttcgttttgaccaagcgttactcgttttcgatttcagtttctttctaagctctgtgatttggattgtgatctgtctgatgtaaaattttgatagtctcttttgctcattagatggtaggtgattgattcttctttcttctatttagtagcagatcagtgtattagatgattccgagtttcgatttgcttaattgttgttgaaatttggggtttcaatgaaattttttggctaggtttctagtggattaacagttatcttagtgattcgaaaatgcgaggaatcaatcaaaaattaaggattctgggtttaaaggagacactcgatgcaacttgtggggaagatttaaagcctagattttgaagatgttattgaataggaagactgaatttcagatcttgctttgttcagagacactttgggcttacttgtacatagtgctaattttattactttctttattgcttggacgttgcag

SEQ ID NO: 272 - DNA, 529 bp, Arabidopsis thaliana
  Intron number 1 from transcript AT3G14350.3 (locus AT3G143 50) derived from phytozome v7.0 (chr-ID Chr3; pos 4786398 to 4786926 reverse strand)
gagctacggattcatcagatagtgagtttcacttttcattttttcctctttgaagaatcttttaaaaagtctcgatcttttcaggtgtttaatccatcattttgtgtagtcttattgatgattctgggtttatgttttcatctacaacttttgatttcttcataatcatcccaagctaaaataataaccctttctgtcataatgttcttttcttcaaaacaggttttgtttcgaccaaatgagttttctttttaaccccaaatctcaaacctttctcctttttcacacactttatgttttgtttttctttttgttcctttcttgtgtgtttgttctcttttctgggttttttctttgttgttgttaattctcaagcatttcattaacacctagttcataaaacccaaatgatctcaaatcttggatctgcttcatgtaaccgacaaaaaatcaagatgattatgatggtttggaatagttcacttatggtctctggttcttaatatgtgcagcttcggcgttaaacatc

SEQ ID NO: 273 - DNA, 231 bp, Arabidopsis thaliana
  Intron number 1 from transcript AT3G19490.1 (locus AT3G194 90) derived from phytozome v7.0 (chr-ID Chr3; pos 6757659 to 6757889 reverse strand)
aggttcgagtttccacgatgttgtcttagtacaaaattcgattttgatgattacccattttcgcttttgatccaatcttagctaattactcatgaacaagtcacatattttctaattggataagtttcattcatatagtgacctgaagaagaacactaaaatgggtgtagtaatcgatggtcattgctacagaaatgaaagtttatatctttctgtgatccacaggatttg

SEQ ID NO: 274 - DNA, 382 bp, Arabidopsis thaliana
  Intron number 1 from transcript AT3G19760.1 (locus AT3G197 60) derived from phytozome v7.0 (chr-ID Chr3; pos 6864063 to 6864444)
tccgtttgtcaagtcgttgatacttcttctagagagtatgttttctgttcctttagctggattaaacccttcatttcaattttgaactttacttgctttgctcggattgttctctaacctaaatcattaggttttgtttcttatcgatttcacaaatttggtgggatttgtttgtctgacttgtagaatagatgaacgaattatgattcattaatgttcaatcaaaatgacaatgaaaatttgtgatagttattagcttttcggttagagtgattgagtaatactttcttttaggctgcaagatctttttatatgtgtactcatgtatttggtatctcggactgcagggttcaggccttgatattatccccaacaagagagc

SEQ ID NO: 275 - DNA, 410 bp, Arabidopsis thaliana
  Intron number 1 from transcript AT3G46210.5 (locus AT3G462 10) derived from phytozome v7.0 (chr-ID Chr3; pos 16978490 to 16978899 reverse strand)
tcctctggtggtttcagttgttcttccagctttcagttccgtagctgtgtattctctctttcgttagtcttcttgtttgatacggaatcgtctctgcttctagcttcctcaaaattaggttcttagtctagctctgtgttgattcgtgtgtccttttgttcatacatcgtcttttatgtgctagataacgagtattgtagaattgaaagaacgatttttttgtctcaattaacaaaaaaactactcggatgttggtcagaaccattaaaatacacctactgttgagctagaagcagttcaaattttgttttcagtggtaacaattcacagttatagaatctgagaatttgattttgtgacaaaagatgcttactttgtgaaacccttttgtgtgaagaagtattgtagca

SEQ ID NO: 276 - DNA, 397 bp, Arabidopsis thaliana
  Intron number 1 from transcript AT3G46210.2 (locus AT3G462 10) derived from phytozome v7.0 (chr-ID Chr3; pos 16978490 to 16978886 reverse strand)
tcagttgttcttccagctttcagttccgtagctgtgtattctctctttcgttagtcttcttgtttgatacggaatcgtctctgcttctagcttcctcaaaattaggttcttagtctagctctgtgttgattcgtgtgtccttttgttcatacatcgtcttttatgtgctagataacgagtattgtagaattgaaagaacgatttttttgtctcaattaacaaaaaaactactcggatgttggtcagaaccattaaaatacacctactgttgagctagaagcagttcaaattttgttttcagtggtaacaattcacagttatagaatctgagaatttgattttgtgacaaaagatgcttactttgtgaaacccttttgtgtgaagaagtattgtagca

SEQ ID NO: 277 - DNA, 695 bp, Arabidopsis thaliana
  Intron number 1 from transcript AT3G47810.2 (locus AT3G478 10) derived from phytozome v7.0 (chr-ID Chr3; pos 17638226 to 17638920 reverse strand)
aacacatcatctgcactggaaatctctgcatcaaagtagtgttttttttccttcaaattttcaacttttacatctctagtatgctttattttttttcgttaatgtcgttgtgggatcattctgtctgatgtaactgtttctgggatatttacttatgaagcagaaatgaggattcagaaggagggtagactctaatttcaagctttatatgatgcttttctctgatgcaacctagtctatgtttatcctgtattgggttgtttagaactattttcttacttggttgtgtaagccttaccagaaatttgataaggagactcaatagtgaattatgtgatctactcggagcttgttctatatctgctggattgtgtagatttgaattcttaccttgtagtgtgagagtcgtgtaaaatgggaagaggaattccattacattttggtttgatcagttttagttttagatttgcttgtgaccatggaattgtaaagtgattaagtcagcatcgatgagtcatttatgagaagccaatgatgttcttttagttggaagatatgttaagaagtttgtaaggtgtttagttgaaaacccatcttagagaaactgcagacctgatttatttgtatgctgcaaagtcttatatggttcatgtttgtggtaagcttaacatatttttgactgttgtaggaaatcc

SEQ ID NO: 278 - DNA, 510 bp, Arabidopsis thaliana
  Intron number 1 from transcript AT3G47810.3 (locus AT3G478 10) derived from phytozome v7.0 (chr-ID Chr3; pos 17639018 to 17639527 reverse strand)
atcttattcgatagtctatttgagcccttgatctggtaagctctgtctgatcttctaaagtttcgctttttaacttttggggaaatcatccacctttgtatcaagtttctggcaatttcttctctgtagttagaatcattcaataagccctttaatctcttcgacgcagctagtgttgaattacatctgggttttgtctactttgtgtcaaaaccatgcttttatgtttgattttcgcgaagtatgatttaggttcgattttagtgaaagaaagacttaacagttgtagttaactgaaactatgcgatatctgattacgttggtgttatgattttattggaagggttttggaaatgattccacattgtattgtagatctcattgacttttggtttttgatctgtttctcaatccagattctttatactttagtttaacaagtgacaaactttgatctttgattggttcaccaacgtctttgaaggttttttatttggtgaaagttttgaa

SEQ ID NO: 279 - DNA, 510 bp, Arabidopsis thaliana; identical to SEQ ID NO: 278
  Intron number 1 from transcript AT3G47810.1 (locus AT3G478 10) derived from phytozome v7.0 (chr-ID Chr3; pos 17639018 to 17639527 reverse strand)

SEQ ID NO: 280 - DNA, 270 bp, Arabidopsis thaliana
  Intron number 1 from transcript AT3G54440.3 (locus AT3G544 40) derived from phytozome v7.0 (chr-ID Chr3; pos 20156632 to 20156901 reverse strand)
aatccgtccaaggtacccaacagtcctaaaacttcatgctttcttctttatactcactcaattacttaatcgagagattttgaccaaattggaacaattggtttgtaaagaatgatccttttcaattgaaattcttctggtgttaccaattccgtgctcatggtagctaaagttcgggtctttaaattctgtatagctgcaattcatcttcgttttgagtgtggttttgacttgttattaaacagtaagtcaggggagagtgaaaatttt

SEQ ID NO: 281 - DNA, 319 bp, Arabidopsis thaliana
  Intron number 1 from transcript AT3G54440.2 (locus AT3G544 40) derived from phytozome v7.0 (chr-ID Chr3; pos 20156583 to 20156901 reverse strand)
aatccgtccaaggtacccaacagtcctaaaacttcatgctttcttctttatactcactcaattacttaatcgagagattttgaccaaattggaacaattggtttgtaaagaatgatccttttcaattgaaattcttctggtgttaccaattccgtgctcatggtagctaaagttcgggtctttaaattctgtatagctgcaattcatcttcgttttgagtgtggttttgacttgttattaaacagtaagtcaggggagagtgaaaattttatgtgattgtataggggctttgaggtactggtatcagcggaacaacgtg

SEQ ID NO: 282 - DNA, 466 bp, Arabidopsis thaliana
  Intron number 1 from transcript AT3G59430.1 (locus AT3G594 30) derived from phytozome v7.0 (chr-ID Chr3; pos 21966498 to 21966963 reverse strand)
ggcaaaattcccggaaaaagccactcgatcagcaggtaaatactaaagcttcctccacgaattattcgccgtctatttctaaaaattttcatgttccttcgatctaaatggggttaattcgattgtgtccttgtcagtgtttagtctctcttaggtttttgatgttctgtaacagggaagcattctcttttggtcaaattttatatctttttagtctctcttctctttcagctgaaactagttcttcaagtttctggtagcttctattcattggtccacttggaagaattctattgttttatattccttcaaatttgtgaccgttgggaaaatcttgtaagattgtatttgtaaagttcattactttggttgatacccaaaacaaaagttcactacttttggtcattctttgtttcaagctcttaaaaagtgtaacactttatttggattggtgtaatggtaacag

SEQ ID NO: 283 - DNA, 793 bp, Arabidopsis thaliana
  Intron number 1 from transcript AT3G62980.1 (locus AT3G629 80) derived from phytozome v7.0 (chr-ID Chr3; pos 23274950 to 23275742 reverse strand)
gtctcgctgctatcgctgccacttgcaggtattctttttctgaatgttttttgtttcatcaagaagactcccttgtgtctctaggaagaagcttttgtttgtattaaacttattggtgtgtgatttgtatattcattatactacataaagtctcaattatagcaaattcatgtacttgttatttgatctgggcatataggttttgctgcgttgttcctgctgatgttactctggtctttgtgagcttttttttggtttggtcaagattttgcgtatctaaaagatatatgttttaatcacgtttctgaagattcttattatagccactctctttttctttctggtgggtcttatttaacggtggtgtatctatttattcctggattattcgctctcagtgaatctcctgaggtgggaaatctaatcaatttggctttgtgtgtgttacttttctttttgtaggggactttcaattttctttttttaccttgttgggaaacttagatctgttttcggattccccttctttactcgctttagctctgttttagcatctctcacattgcttccacgtgataaatttagtaatttgttattgttctatgcttagatagtttcccaaagtgatctttctacattgtatcaaatacaactttggacaaattaatgacaattatgctcatgtattgtaggcaatgtttatgttctcgaagttgtataatgtgggtcactcgatgctaattatgtgatttcttatgcaggaatctgaaagagcttgacttacgagagagtg

SEQ ID NO: 284 - DNA, 811 bp, Arabidopsis thaliana
  Intron number 1 from transcript AT4G02530.1 (locus AT4G025 30) derived from phytozome v7.0 (chr-ID Chr4; pos 1112902 to 1113712 reverse strand)
acaagctgttcttaattctgctgtcaaggaaaagggtacttcttcaattttcctctaatctttcatttatgttcctcccctgctacatgaagtaaattgaacaaattgatggaaaagtttactcttttatggaaaaatgtgtgttctttgtgttatggttcctaggctagttacattgaaccctagtctggttttgtttcatttatcttggctacatgaagtaatcagaacaaactgatggagaagttttactcttttgaggacaaatgtgtgtcctctttgtgttatggtcccatggctagttacattgaaccctagtctggttttgtttcatttatcttcattcaaggccgtatgaagtaatcagaacacactgatggaaaagttttttactcttttgaggacaaatgtgtttcctctttgtgttatggtcttcacagaatcatagttaaatggtttgttccagtgccatttacattgaaccctagtttgattttgtttcatttttcttccttcaaggccacatgaagtaattggcacatattgatggaaattttgtgaactcttttggggacaaatgtgtttcctctttacgttatggtcgacatagtaaaatggtttgttccagtgccatttacattaaaccctagtctgattttgtttcctctatcttcatccaatgctacataagtaatcagaacaaattgatgggctcttttggagacaaatatacttaggtcttcttggttctctaactaaaagtatatagtgtacagggtatttgcaggatcttgtttacaagttgagcaag

SEQ ID NO: 285 - DNA, 263 bp, Arabidopsis thaliana
  Intron number 1 from transcript AT4G02550.2 (locus AT4G025 50) derived from phytozome v7.0 (chr-ID Chr4; pos 1121630 to 1121892 reverse strand)
tgaatcaccgtcaatctgatttcgtttctgtgaaggtatacgcatttgatttctactactgagagctgatttgagttcttttttaaaaatcattagctaagttagtttcagagctcttcttcgaatatctggaagagagacgagtttaggtcgatcgattttgaaaatggtatagagcttcgtttatttgtgagaacgaccaagctttttctattgtgatgttatggtataatgatatgcatagaattctacgtgaaccagga

SEQ ID NO: 286 - DNA, 535 bp, Arabidopsis thaliana
  Intron number 1 from transcript AT4G02600.1 (locus AT4G026 00) derived from phytozome v7.0 (chr-ID Chr4; pos 1144287 to 1144821)
acccctttacgaagcccttcaaaaggttaaagaaggtaccgtacacacacacacacaccaacgtaaaacaaaacatcaaaagcccttcttttctttttgtttgagtgggttccacggatcttttgagtgagattagttttgtttttctgggttataacacagtgttttagtcttttaattatggtttctagtttacaaaatctgcaaattgttcgataaatccttcaatcaaatgtagctatgtcagattttaagtagcttgagtctttaaagtttaactctttactccttttggtgttgctttggttcgaatttattgatctatgacaaatctttaaggatttgcagagttgatgttgttgttaatagtggaccaattgtttctttaaagcttaagtgagatgtgactgtgtctgattataagcagcgctttgagtatttaaagttcaaatctttcactttttttttttctttgtgttgctttagtgcaaatttgtggatgtatgatgaatcattttggtgaattgcagagctg

SEQ ID NO: 287 - DNA, 319 bp, Arabidopsis thaliana
  Intron number 1 from transcript AT4G03610.1 (locus AT4G036 10) derived from phytozome v7.0 (chr-ID Chr4; pos 1605171 to 1605489)
ctctctttacttcctcaccttaaccctaactacaggtaaatcttgtcatcagtttcttctctttgggttttggtctttgaagctgtggagatttgtgaaatgtcaaatcttgttgctttccgtaaagacccttttgaagttgggagttttgattgaaaaaagagacatctactgttgtctatattcgtgttggagtttaggttttaatccattttaggtaaaaatgaaccatccgatttctagtgttcttgggaaattatttcagatatattagggtttggtgaacattcttgaatcttgattctctgttttttggcag

SEQ ID NO: 288 - DNA, 378 bp, Arabidopsis thaliana
  Intron number 1 from transcript AT4G11860.1 (locus AT4G118 60) derived from phytozome v7.0 (chr-ID Chr4; pos 7137809 to 7138186 reverse strand)
gaccttgtcctttgttagccatttgtatgtttctattttctcctttttcgtcctcataaaacttcattcagatcgtaaaaatagggtttggaaagtggaatttcggtgttatgatcattgattctttaggtttgcgttactgattttgtggaatttgtaaaagaaattgaagaatcggtgttaggtttgcttgttccgtacaatgtaatgaatcattgatttgatggttagtgtaccgaacatcagattttgttgttagcttgagcttctcgtagaaatgacaagtgtgagaatttggtatttagtgtgcttaataatacttagatcaattaacactttgattactgattgttatttgattttgggatgaaacaggta

SEQ ID NO: 289 - DNA, 385 bp, Arabidopsis thaliana
  Intron number 1 from transcript AT4G13780.1 (locus AT4G137 80) derived from phytozome v7.0 (chr-ID Chr4; pos 7997966 to 7998350 reverse strand)
caacaacgttcctcatctcggaaacatcatcggatgtaatttgaatctctcctctctttatctgtatcatttcatgtcttcgtcttctctgctaatacatgtaatcgcgtgtgttcgtttatgaatttctgttctagaaccagatgcagaaatcaatttagctttgaaattgtcatcgtaatctaattttgcgtttcatttttcaaaatctgttgcaatattttagtactgattaatctacggaaatgcaaacattgtgtggactagtgtgtgacacacgactgataaggatgattttcttcttgagtgtgcgaggattgctatttccaggttctttttgagtttatggaatgtttttgttttcttataggtgttctgagcgctg

SEQ ID NO: 290 - DNA, 669 bp, Arabidopsis thaliana
  Intron number 1 from transcript AT4G15780.1 (locus AT4G157 80) derived from phytozome v7.0 (chr-ID Chr4; pos 8980842 to 8981510 reverse strand)
gctacggtttgtcactctctctatcttcttctctggaaacgaacaatgtttttagtttgaagccattaaggttttgatggatctagctcagggttagctgatatgcatcatctgaaacttaaggcattttcaggatcttcatagattggattcgcattacttggcgatacaacagtgttttgtgtattagttccattgagatttgagcttagattgatttaacttttttactgattttgtttggtttccactttgtaaataccaattaagcacatatatctaatcaaaaaagaattttttccatcaacaaattaagtaaagtgttatctaatcatgaatcttgatatgtttttgtggagtttgttctcttgggagattcaattagtaactaaacagtctcaaaattctttcagtgtttggtagtttagtttttatgatgaatacattacgcgtcttattattggtgatacctttacgtgatgcggattggagatgtttgtgtctttctttctgtatgtagttgtatttgttatggtttggagatgaaactacacacatgtgtttcaaaataatttgttatggtttggattgcatttcacttatatatggtggctctttgaaatttcttattcagcatattgtgttgtggcgaaagattctcttagcaag

SEQ ID NO: 291 - DNA, 589 bp, Arabidopsis thaliana
  Intron number 1 from transcript AT4G18120.1 (locus AT4G181 20) derived from phytozome v7.0 (chr-ID Chr4; pos 10038286 to 10038874)
cgtgggagaaacaaacaaaaaacaatttcttctaggtaagttttttttttttgttcttcctgctaaagtttcgatttttaaactaattgatacttgtgtgttcctttggctctagcggcaatgagtttgtgttagtgatcctgctaaatacaacaaaagggtgaagtagaataaagttggtttcttttttaatcaaaaacagttggatgatcacagtttagcttcttcgatattgaaaatagggttcttgttctgtttcctttagttccctctttcctctgctgtgatcgtttctgtcttgatgatgatgatttaccccaataaggttttgattagggtttataaactcagtggaatcaaagttcagggtttatagagattgaatcattaaggatttgtttgattattattgctaatggaatttgcaatcctctgttttttaaaattgtatccatcttggtttagaaaatcatatttctctgtttcaattggagtcatctttcaatcacttgcctccatcagggtttaaaagagtccccttttcgtcgttgtagcgaagaagcagaattaatcaaagttcagagctttc

SEQ ID NO: 292 - DNA, 449 bp, Arabidopsis thaliana
  Intron number 1 from transcript AT4G18120.2 (locus AT4G181 20) derived from phytozome v7.0 (chr-ID Chr4; pos 10038426 to 10038874)
ctgctaaatacaacaaaagggtgaagtagaataaagttggtttcttttttaatcaaaaacagttggatgatcacagtttagcttcttcgatattgaaaatagggttcttgttctgtttcctttagttccctctttcctctgctgtgatcgtttctgtcttgatgatgatgatttaccccaataaggttttgattagggtttataaactcagtggaatcaaagttcagggtttatagagattgaatcattaaggatttgtttgattattattgctaatggaatttgcaatcctctgttttttaaaattgtatccatcttggtttagaaaatcatatttctctgtttcaattggagtcatctttcaatcacttgcctccatcagggtttaaaagagtccccttttcgtcgttgtagcgaagaagcagaattaatcaaagttcagagctttc

SEQ ID NO: 293 - DNA, 609 bp, Arabidopsis thaliana
  Intron number 1 from transcript AT4G18800.1 (locus AT4G188 00) derived from phytozome v7.0 (chr-ID Chr4; pos 10320545 to 10321153 reverse strand)
aaagcccagatttgggacactgctggtcaagaaaggtttaagctccgtctctttgattttgtcttcatttgttcatttctcgatctgtgttttaggtattggccttctgatgcattgtggagtcaatacaatttcattagatctgtcttagttaatggaatcagtttatcgtagagaaagcttgagaaatcaacctaacctgtgatcgtgtatataattactggaggtgaagtgtacattgtatttgtgtataatgagagaactcaacaattatgcttaaagttaccagctttgtagaaattctgttgttttgctgattagtttgatcaaccagtggttgatgataatcttcggtatcgtatatgttcatggtgtttctatatgttcgttaattctgatgacgatatcgatttctttaatgatcgttttctaccattgaagctgaagagcttattgctttgaagtctttcttgtcatttcggttcttattatgttcctatctttctaatttaacagagtttcaatgactaagtcgttaacgggtttttgtttctcctcttttcgctatttttagataccgagcaatcactagtgcttactatcgaggag

SEQ ID NO: 294 - DNA, 418 bp, Arabidopsis thaliana
  Intron number 1 from transcript AT4G19150.1 (locus AT4G191 50) derived from phytozome v7.0 (chr-ID Chr4; pos 10472137 to 10472554 reverse strand)
gctgttaattctagggataagcattctcggactccgtatcctttcttctcgcaaaatcaatcttcttcgattttagtttctgcttgatcatgaaatttaaattctctcgactcgcttttctctgtttgactacaaattttccgatgtttgctgaatgtaatttgctacggccttaattagggttcttaaaaccttagtatcagcttatacaactttattcaatgctaaacattatttctaggttttacattttgattcgtcacacttgatttggttgctaggagaatgatggtttgtagattacagctagagcaatgatagatctgatctactttacgtgttcattgcagtcttttgttgttcatttttttgtccttaacatcatgatctcttggggaaatagactacatttagcagc

SEQ ID NO: 295 - DNA, 600 bp, Arabidopsis thaliana
  Intron number 1 from transcript AT4G20410.1 (locus AT4G204 10) derived from phytozome v7.0 (chr-ID Chr4; pos 11015828 to 11016427 reverse strand)
tccaaagccgacaaaatgtatgctttttctcttctcatttatatgaatgctctgtttgagaggttaatgatcggtggaaattaaaattcgatttgggctttagggcattttgggtttgatcgagatgactgtgctcttaagatatgagggttttcttttgttactgtgattgagaaacttctcgtgatccattctgagattcgatcaaaggtttttgttgggagaaaagaaggatctaggatcttgtgtattgttgcataggaacattttaatatgagagtttgcttaaagtttaagaacacttcttttgagtctgattttcaattcaaaaatttgtgagttgtgagattctctgcaatttttgtgaattggaattaagagttaataatgagtatgcaatgtaatatattaccagtttgacaaggattgagaaatcattttggattggtttgataaggaacatcgtctttgcttgcttatataaattgtgttgttctgttttcacattcctacatttcagtgatctgcttctgttattaaccatccttttaagcatctttggttcttcattttttacaggacaaagctcacgcttactag

SEQ ID NO: 296 - DNA, 350 bp, Arabidopsis thaliana
  Intron number 1 from transcript AT4G21790.1 (locus AT4G217 90) derived from phytozome v7.0 (chr-ID Chr4; pos 11570060 to 11570409)
ctcttgtttccgccgttgctcttgtatggctttcaaatttcttcgtaatacatgaaattttttgtttgggagtgaaattagttttctaaaaatgcttgcttttaggtttatagatcaatttcttagcgtgtttgacatatctttcctcttctgtttaacaaaagaggtgacctttgttgttgagacatcgttttctatctaaatcattgagctttgaaatacttactcattgtatagtttgattgattgtttctgtagtttatttctgggtttagttagttgtgttgcaatttctgaccttttgtttgaaatgggattatgattggtaggttcaactgataaggatccaa

SEQ ID NO: 297 - DNA, 600 bp, Arabidopsis thaliana
  Intron number 1 from transcript AT4G22120.5 (locus AT4G221 20) derived from phytozome v7.0 (chr-ID Chr4; pos 11719145 to 11719744 reverse strand)
ccttcaccgcctactctcttaaatcttaacccttcgtccgtaactgcttctcttgtcagtttctatagcaacattatctcaaatagttctattgataaattttatatcaaaaaccttaaaaagtttcattggtttacaaattttaccttttttcgtttgtgtgttgcgtgtgttactaaatcactgaagagggtaaagagaaaaacaaaacaaaaagttcttagctttggatgaatctggaagtgatccaaaacactggcttattccactcctcttctctagggtttctctctaattctgaacttgctttctctgaatctcattatttcggtggagtaaatttggggttagctcacattttatggtctgagttgttttatgtctctgtaaaagattcgaacttgtttttggaatttagattgtgtggggttttgttcctaaagttttcacctttatggattttttcatgttctgtatataattagcaggggtttcacttagattccaacttgaatcacttcaaagatcacaaagcttcaatttttaacaaaatttggttgcttctttgtgtgattaacaggttgaattgttagttaatag

SEQ ID NO: 298 - DNA, 581 bp, Arabidopsis thaliana
  Intron number 1 from transcript AT4G22120.4 (locus AT4G221 20) derived from phytozome v7.0 (chr-ID Chr4; pos 11719145 to 11719725 reverse strand)
taaatcttaacccttcgtccgtaactgcttctcttgtcagtttctatagcaacattatctcaaatagttctattgataaattttatatcaaaaaccttaaaaagtttcattggtttacaaattttaccttttttcgtttgtgtgttgcgtgtgttactaaatcactgaagagggtaaagagaaaaacaaaacaaaaagttcttagctttggatgaatctggaagtgatccaaaacactggcttattccactcctcttctctagggtttctctctaattctgaacttgctttctctgaatctcattatttcggtggagtaaatttggggttagctcacattttatggtctgagttgttttatgtctctgtaaaagattcgaacttgtttttggaatttagattgtgtggggttttgttcctaaagttttcacctttatggattttttcatgttctgtatataattagcaggggtttcacttagattccaacttgaatcacttcaaagatcacaaagcttcaatttttaacaaaatttggttgcttctttgtgtgattaacaggttgaattgttagttaatag

SEQ ID NO: 299 - DNA, 600 bp, Arabidopsis thaliana
  Intron number 2 from transcript AT4G22220.1 (locus AT4G222 20) derived from phytozome v7.0 (chr-ID Chr4; pos 11759560 to 11760159 reverse strand)
ttctgaccatcaaaaacacgtaagtaccgtctgtttctattcattttatgcagatattaacataatctgttgtgagttgttgtgttatgccaatcagtgttgtctaattggttaaactcattaaatgttgatataccagttactgtgtttcatgactgttattttgttttgaggaacttggtcactggactttgtctgttggtacaatattggttgctggttagtatgccctgtgttcctattcatgttttgcagatttttaacataaatatgaacactcgtgttatctaattgctgcactcattgaatgttgacatacctgagacgaagtaatgtgattattttgtttagatgaacttagttactggattttggtcaattggtctgagattggttactggtttggtttgtatggtatttaaggttttccagcctataatgatgcagacctcttgacttctttttcttagacaaagtaaacattgtgatttctgtcatggagtttctcaatatctgaagacttactctgaatgtgtgcttctctttctgtgatttattttgccagcgaaatcgcaaagcatctttctctcccaccagtca

SEQ ID NO: 300 - DNA, 430 bp, Arabidopsis thaliana
  Intron number 1 from transcript AT4G22220.1 (locus AT4G222 20) derived from phytozome v7.0 (chr-ID Chr4; pos 11760189 to 11760618 reverse strand)
tggttgtggttcagccatcgcttcttcatctgttggtatgtttatattctaatttcgtgttttgttcgattgaggattgaattagagaaattaaatgatttcaattagggattttgattagtctttctcaaatggagaaattaggttttaaattgatgggttcgtgtagagattcggtgttcaaatttgggattggtgtcgttaatgacaaattagtgcatgatttggtcagttgagacgtttttattggtgattcaatgctgaatttgtaatactcctagtctcctaatgttattgagaaagatttcatctttttgatgcgatgtcgtcagtttctggcttagcttctatgtgggagctatcttctctctggggatttgttgctgttatctaatgtatgattcatttttacgtttttttcagccactga

SEQ ID NO: 301 - DNA, 309 bp, Arabidopsis thaliana
  Intron number 1 from transcript AT4G22410.1 (locus AT4G224 10) derived from phytozome v7.0 (chr-ID Chr4; pos 11819580 to 11819888 reverse strand)
ttttaaacccaaggtatattagatcttgtgactaactacatcatagttcttactgcattttgggtattgatttgtgaacatgtgagcctttgcacgtagttaaaaacaacaaaattgctttgactataatctcaatcagtttcttcttgctagttctctatatcatctaccatctatttatattttttcatattactcttctttcatgttttctcaatttttctttgatttttcagttcctttttatgaaggcttcggtgctatccatttacaggtttagtagagcacaagtaaacgagcttgacaaga

SEQ ID NO: 302 - DNA, 491 bp, Arabidopsis thaliana
  Intron number 1 from transcript AT4G22890.5 (locus AT4G228 90) derived from phytozome v7.0 (chr-ID Chr4; pos 12007321 to 12007811)
cttgttgcctgctaaagccacaacagagcaatcaggtcttgatttggccactttagtctcgatttcgaacactccgccttagttttctgtttacaaagccatttggattcgaatttgttcacaattgggtttccaaagtttgagccttttgaaatttaggatatattattttaattcaacgtctctagctctgaaaatttatgtttttaagtcactaacttgtagtatccagactcgaatcctgttaaagttcaattctttgaagggtttgattgattcaatggctataactttggtatagtatatttgtttgtattggactttgttgactatttagtggttaactctgtactaaagttttgcaatgtcagaagttgtgtaactattaggttgcataagtaaggtatcaactttagatttgctatgaagttctcaattacagtctttttgtcttccttaaggtccagtaggaggagacaacgtcgatagca

SEQ ID NO: 303 - DNA, 491 bp, Arabidopsis thaliana; identical to SEQ ID NO: 302
  Intron number 1 from transcript AT4G22890.3 (locus AT4G228 90) derived from phytozome v7.0 (chr-ID Chr4; pos 12007321 to 12007811)

SEQ ID NO: 304 - DNA, 491 bp, Arabidopsis thaliana; identical to SEQ ID NO: 302
  Intron number 1 from transcript AT4G22890.4 (locus AT4G228 90) derived from phytozome v7.0 (chr-ID Chr4; pos 12007321 to 12007811)

SEQ ID NO: 305 - DNA, 453 bp, Arabidopsis thaliana
  Intron number 1 from transcript AT4G23740.1 (locus AT4G237 40) derived from phytozome v7.0 (chr-ID Chr4; pos 12366598 to 12367050)
gccgacaataaagttcagatctggaaaaaagcgaggttaccaattctttatttttaataaatttaatctcgtagtagagttagggttctacttttcgacaattttaattaccagaaattctagggtttatgtgagtttaaattaaagcttcgtcattttcgaagcttaaagttactcactttttatgtctcccactcctgttgtattttaaaatctccagtggtcacatagaacaacttcaagattccacttttgcttttataatcagcagtcttctagaaatctgtaatcttttcgcttttttggtaccttttattttaaattaaagttcacaaattttcaccatttatatgtccatcatcatcatcaccacaatcaaattgagctaaattggtttttgattgttgtttttctccagctccagattacaaaaagaaacagctcgtttttttc

SEQ ID NO: 306 - DNA, 645 bp, Arabidopsis thaliana
  Intron number 1 from transcript AT4G26190.1 (locus AT4G261 90) derived from phytozome v7.0 (chr-ID Chr4; pos 13266288 to 13266932 reverse strand)
acagagatactcttcgtcaatttgaaaacttccaggtaatctcatctttttcttcttcttcttctccttctatttgtattaagcgtagcctgagaaatctcctggtcggttttgagacagtgccctgtgctctaatttcggttgataccttgacatgtccgtctcttcttcgagggtgatttttgtttttcaaattcagatttaagatgtgacccagttactaaaacttctggttttaaggttgccatcatttatgtggaatatcctcagctcgattgaatctggcagtttttcgtttttctcttgttaatggtttttgttaagaagcgttttggtgttttagtgaataagaacactgccaatcatcatttcacgaacaatggtattagaaagtgcataattttctggatggctgcttctttggttggaattgtttgattcacatttaatacatagtctctattgctcagtttccaatcacttaagagctccgtgttgggttttctagagctaccgtttgatggatttatgtgaggcatcttaatttatccgttctttgtgaatcatcacttcacttgtgctaaacttgagaaaacgtttcccttgatagttttgaactgcagctgatttccgactaaattaaag

SEQ ID NO: 307 - DNA, 775 bp, Arabidopsis thaliana
  Intron number 1 from transcript AT4G28025.1 (locus AT4G280 25) derived from phytozome v7.0 (chr-ID Chr4; pos 13936514 to 13937288 reverse strand)
gaaggtttgctattccttcctcttctctcgtgtaagtctttctctgaaactctgtttttcaaattacagttctctgttctcttattctggttgaagttttgaattttcggaatgaaaagcgtatgtagtgttctgcctcgtaatttttgtaattcgtgatctgggtttgtgatttttgttgttactcgccaccaaagtctctgtttttcctctgaacttctaaaatcagaatccattttgggtaattgagatttctccaattgtgactttgatttcttctctgttgattgggttaagatgctttctatgagtaatgtttgaaattcaaatcctttattcatcatcgtgtttaagatccaaatgtaatcagtgaactgtttatagtttggaagcggtttagttcctattggatctgtttcatttcacataatcacacttgtgttgtgaatatttgctcttgcgttttggataagtttacttattggtaccgaattgatagttattctatacatgagataagcattcctcttattctgcttctcttctcttacttacttacataccctgtgtttgttccattgccagctttatttcttcttttcttttatgacatttgttaatctaagttggtaataagatcatgaagaagaagcattggttttatccaatttaggagtcattgatcagttgttatcattacgtttgataaatagacaacttctcattcattataaacatgtatttttcatcagaaagggactaagaagacaccaag

SEQ ID NO: 308 - DNA, 775 bp, Arabidopsis thaliana; identical to SEQ ID NO: 307
  Intron number 1 from transcript AT4G28025.2 (locus AT4G280 25) derived from phytozome v7.0 (chr-ID Chr4; pos 13936514 to 13937288 reverse strand)

SEQ ID NO: 309 - DNA, 435 bp, Arabidopsis thaliana
  Intron number 1 from transcript AT4G29660.1 (locus AT4G296 60) derived from phytozome v7.0 (chr-ID Chr4; pos 14534580 to 14535014 reverse strand)
tcatcggcgctgcagttacagagcagctctacaaggtcagcttcgtattgttatcgattcaggcccggaattgctattagatttgtgggttctaatttgattctcgtgattggtaaatgttagggttcgaaatgtgataaaattggaaatgattcattgttgattactaataaaggattgtgtgatcatgaaaagaactatacttgaattgcttttcatgggaatggttcattaggtctttcaatgaagcttttacgtcttgattagtatctaatctaattcattgttctgtagtatattgtattctttgtcaatgtgtttcttacactgttttgtgttagtatcagttatgtttcttgtttgagtgtgaactttatgttactccactctctgtaaacaggagaagttttgggaagagcacccagggaaaacagt

SEQ ID NO: 310 - DNA, 450 bp, Arabidopsis thaliana
  Intron number 1 from transcript AT4G30560.1 (locus AT4G305 60) derived from phytozome v7.0 (chr-ID Chr4; pos 14929707 to 14930156 reverse strand)
cttcgtcttcttctctggtatatctcttgcattccctcctaatttcttagccaattactgtttggaatgatcttcattttgtacttcccattgcttgattttggttgacacctttctcgtttaagatcgtctcgttttcatgctgaaaactcaagtatttagttttttcgtttgtacccttttgttgatgttttggtttggggagaaaatgtggttcctttcaagttttttccgtcaatttgagttctcaggtcaacgaaaatggatggatgttcttaacccattaaccaagtttgatttttagagagattctgtaaacaaacaataacattttttgtgcttgaattatttttatatttattgcaagtttaggattttgctgcttgaaatgattttgatcataaatgtttattacattttcttatgtgtgtaaaaacaggtttgggattc

SEQ ID NO: 311 - DNA, 471 bp, Arabidopsis thaliana
  Intron number 3 from transcript AT4G31720.1 (locus AT4G317 20) derived from phytozome v7.0 (chr-ID Chr4; pos 15355015 to 15355485 reverse strand)
gctaagagtggatttcagtgccccgacgtacgattgtaggtatttccgacaagttatatctgatacttacaatgaaagagcagataagttgatattgaatggaatcattgttgggtcttagaatgggtgaccagtagttagatcaatggcttggtttaaatcattttggattaaggttttgccctgtttaacattcctgtaaaatggtatgataaagaagtctatgttggactagcactgaaaaagattggcaatttgaatgtaaacttcagagttcagtttgaatgcgtagaataatgaggggattcttctctttctatcaaattgagtgctgaatattggtatattttagtttttgagtttttcactcctgtcataatcttttcctgtatctattcttgccaatattctgtttttttgtttacttgtttgacaggataaggctagttgctgtggctacacaaaagtttg

SEQ ID NO: 312 - DNA, 520 bp, Arabidopsis thaliana
  Intron number 1 from transcript AT4G31720.1 (locus AT4G317 20) derived from phytozome v7.0 (chr-ID Chr4; pos 15355706 to 15356225 reverse strand)
tcagctcaattctcttccgttgctgcttcgtttaggttcgcattatcgcttactttattgaatttttcctctatgtctctggtttcaatttcagctcaattttgtctttttttcggttgaattttctcttgggtggtatcgaattttgctcatgaatgctgtttcttgatgaatcagagccctcttagtttacttcacgtcgttcaattcaaaacttggtgtggtcttttgcaacacaaatcaggaatagttcgttacttagaaacaataatgtcatacgagaagacaaatctggaacagagaattagtaaattgagctggaaagtttcagtagtcaaaattctcgtaaaacttattttggtataattgtgtcatgagtcatgacattctttcttaggtttcgtacaagtttctaatttgaggtagatactagttcagaggttctttattaatgtttgattttgaaaacctttctttacttacagttgttgcttcgcttcagtactctggtggtgggaga

SEQ ID NO: 313 - DNA, 521 bp, Arabidopsis thaliana
  Intron number 1 from transcript AT4G31720.2 (locus AT4G317 20) derived from phytozome v7.0 (chr-ID Chr4; pos 15355705 to 15356225 reverse strand)
tcagctcaattctcttccgttgctgcttcgtttaggttcgcattatcgcttactttattgaatttttcctctatgtctctggtttcaatttcagctcaattttgtctttttttcggttgaattttctcttgggtggtatcgaattttgctcatgaatgctgtttcttgatgaatcagagccctcttagtttacttcacgtcgttcaattcaaaacttggtgtggtcttttgcaacacaaatcaggaatagttcgttacttagaaacaataatgtcatacgagaagacaaatctggaacagagaattagtaaattgagctggaaagtttcagtagtcaaaattctcgtaaaacttattttggtataattgtgtcatgagtcatgacattctttcttaggtttcgtacaagtttctaatttgaggtagatactagttcagaggttctttattaatgtttgattttgaaaacctttctttacttacagttgttgcttcgcttcagtactctggtggtgggagag

SEQ ID NO: 314 - DNA, 415 bp, Arabidopsis thaliana
  Intron number 1 from transcript AT4G32120.1 (locus AT4G321 20) derived from phytozome v7.0 (chr-ID Chr4; pos 15519174 to 15519588 reverse strand)
ttctcttgtcttgcttggctctacgtcgctggccggtacgtcgcttttttcttccatttccgtctgatttttttcctgttgagtaatatcaaatctcactgattctagatgtgttcttcggaatgcatcccggaattgaatgaggattgtaatcgtcatggaacactgtcttcatagttgttgatagatctcgcagatgctagattcttccgtttttctacaatttttcgccgatttgttaccattctagatttctgtaatttcagatataactgtattgcaatgtgtattttgggtttgagttccattacagtaaatagtcgtacaatctaccaataacgagctcaatttcgatccctggatcttattaactgatactgatctctataatggtgttgtttcttacgtttaggtt

SEQ ID NO: 315 - DNA, 663 bp, Arabidopsis thaliana
  Intron number 1 from transcript AT4G34040.1 (locus AT4G340 40) derived from phytozome v7.0 (chr-ID Chr4; pos 16307745 to 16308407 reverse strand)
tttggcggagacccatctgattggtatttttgcaggtacacagtttcttcaattctctgtctttgttttgtttactttctctaccgctcgacgatcggtcttgaatctatttcatttactggatcgtttttttttatgtggaaatggtttttgttttaatgtgttgattcaattgcaatagctgtgaatctaaaggatcgggattctctaaccttagggtttctttctttatgattggagcctctttagtgcttaactgttttttgtttgtgatgaatcggaatgtataaagatgcaatcttgtaattcgctttagttatctgtagctacattctctcttttctctatttccgacaagattttgagataatgttgcaaggactttgatttttctttccgtatatttcagtgagtcccctaatgaagtttactgagttaagcagaagtgttggtttcttagttaactgctaaagtcatggttttgcaaatgtttctgttgtttgcttactaatggagttcttccagatgaagtttttagtgtgttttagcagtttctcttatatgaaattgatacttgtgaaatatgatggatgttttgaaactaatggtttactcgctgacgtttcagatattccgttcttggagtaccaactggcctggagc

SEQ ID NO: 316 - DNA, 307 bp, Arabidopsis thaliana
  Intron number 1 from transcript AT4G34090.2 (locus AT4G340 90) derived from phytozome v7.0 (chr-ID Chr4; pos 16329754 to 16330060 reverse strand)
ccatttcagagctagagtctcttgttgctcttctggtaatttcgtttttcctccgtttgtgagaattgcatgtgattgtcgaattatagtaattgtcgattgtttgatggcttttcaaatcgagaaaatgcttgagcttatatctttgttgagtattttagaacaatcttttgtaggaaaatgcagtgactatgactgtctttttgattattcttggtggagacaacaaattaacaaaagaatgtgtaataattcttccaaagagacacattgggattgacttaagattagcgttgttgtgtagggc

SEQ ID NO: 317 - DNA, 631 bp, Arabidopsis thaliana
  Intron number 1 from transcript AT4G35290.1 (locus AT4G352 90) derived from phytozome v7.0 (chr-ID Chr4; pos 16789659 to 16790289)
tcgacaattgttagtctatccaatttccttctctaactctttttttcttagcctgtaaatgtgactagtgcatgaattctgattggaagtaatcaaatcccaccaaaaagcttaccactttcctaaatcttcaagcaaacccatgattttacttttgtcagtttacctcctttttgtttattgaagacctactccttccttttttcaggtttttatatgtgtactcctcttgcttgttcctcatgctttctttcagctagatttttcatgtgcctgacgaatctgcttttctttaaaggatgattttggtttgggtttgggttttggcatctctgccactcatttcttgacaatccttgttctctatgtttgaggtaagggtttaatcctcgtgacactttttcagttctggttaaagtcactttctttgcttatcttccttattctttttgtttcattagaagtttctagctttctcttcctatgttactctttttaaaaaaatcccattttgatttggtgaagtggctcacaatctctcattttgtgattcttaaagtttttgggaattttatctaattgttgtttgtttatcaaacttggtgtttcaggaactgattaagccaaagct

SEQ ID NO: 318 - DNA, 263 bp, Arabidopsis thaliana
  Intron number 2 from transcript AT4G35290.2 (locus AT4G352 90) derived from phytozome v7.0 (chr-ID Chr4; pos 16790027 to 16790289)
tttgaggtaagggtttaatcctcgtgacactttttcagttctggttaaagtcactttctttgcttatcttccttattctttttgtttcattagaagtttctagctttctcttcctatgttactctttttaaaaaaatcccattttgatttggtgaagtggctcacaatctctcattttgtgattcttaaagtttttgggaattttatctaattgttgtttgtttatcaaacttggtgtttcaggaactgattaagccaaagct

SEQ ID NO: 319 - DNA, 419 bp, Arabidopsis thaliana
  Intron number 1 from transcript AT4G39080.1 (locus AT4G390 80) derived from phytozome v7.0 (chr-ID Chr4; pos 18209631 to 18210049)
accttggagatcttggcctcgtccaattcaaagacgtccgtactcattctccttctctctatctctcgatgtttttgttgacgaaatatgctattggattgtgcattttcttatttccaattgcaaatccgcgtctgatgaacaattttcctctgttggatttggattttgacggggttttctggtctcgaatttggaaccctaggtttaattcaggttttaaaaagagtttacgcatctatctatctatgtatagctgttatttgaatatcgcgatcaattttgactttggcgtttggttgaaatatagattttcctcaccacagatctttttggtgaataactctcttcttataaacctttgttttttaatgttgatctcagcttaattcagagaagagcccatttcaacgtactta

SEQ ID NO: 320 - DNA, 153 bp, Arabidopsis thaliana
  Intron number 1 from transcript AT4G39520.1 (locus AT4G395 20) derived from phytozome v7.0 (chr-ID Chr4; pos 18373808 to 18373960 reverse strand)
aggtaattattcaatcctctctgattcttcacctcttctcttcaattttggatgcatagaactgtgaatccgaaatatctattctgaatcaaagaaatgatttttcaatctgggtgactcacaagtacgaggttttttttgtttatgtggcag

SEQ ID NO: 321 - DNA, 619 bp, Arabidopsis thaliana
  Intron number 1 from transcript AT5G04090.1 (locus AT5G040 90) derived from phytozome v7.0 (chr-ID Chr5; pos 1107630 to 1108248 reverse strand)
atttgctttctgattcgagtcttgaggtttcttgggtagggtttctctgatcgcttcttctactatgacctttgtttttttttttgtctcgatttttcttaaaattcttttttcctgtttccggtttctgttaatctgttggttttctcgccccttttgtgtgttttattcgattttatttgagttgatggttggttaataggatttgatttgatccagctttcgttaaacaagaaattaattacgaattcttggaaaagtttatgggtttcgaattttataagctcctgctcttaaatccatcttcctctgttggattcttttttttttggtctatgtcgactaattcgattttgttagctcttgttattctctttatcgcaaaaaaaatatatattcaatgttgtattaaatatgttgaatattgatgtcttatgggttatggcttctaatttgaagctcagtttaataggagattagtatgttaaatgcttggtatttttgtgtcttaattgtatgctttatcagttaagtacatttttgagtttgttattctgacaggagttagatgcgtacttcttctgacaggaacaggatcgcttctacagatatttcaccc

SEQ ID NO: 322 - DNA, 381 bp, Arabidopsis thaliana
  Intron number 1 from transcript AT5G08200.1 (locus AT5G082 00) derived from phytozome v7.0 (chr-ID Chr5; pos 2638644 to 2639024)
ctctcgccggcgttgccatcaaatacggtgttgaggtataattctgctaacgatttaggtttggtttgtgtagtgatggctatttccagctccagaatatttgactttggttaaggttgttgagtaatattgacatacaacggtatttttattagaggcaaaaggtagaattaatggtactggtaaaaagcattaggatttttttttgtttgtgtgggaattgacgcatgatgaagaacaacacatgaggaaaaagttatttgtcagagagagctggattatttctaaattgtataagcttcgcttttgatgctggattattcctaatcgttgttcttatttttttctttgtgttgtgaaactttctacttcaggttgcag

SEQ ID NO: 323 - DNA, 532 bp, Arabidopsis thaliana
  Intron number 1 from transcript AT5G09225.1 (locus AT5G092 25) derived from phytozome v7.0 (chr-ID Chr5; pos 2870623 to 2871154 reverse strand)
cctcgcttcgatctctctctcgactgctactcctggttagttctctgtcaaatattcgttcatgtgactctcgtcgatttttgtcttgatgcaacttcatcgctttgttcttcgctattcgttgttattgttgattccgcatatgcttcctttgatttcagcttgtaggtttgtccaaatttcacttgctctgttcttattgttgttgccaaccaagtgtttgatgaaatgcctcacagaatcagtggttgttttttttttggtagagcttgtaatcacttgtgctttgtttatttttggatatgtatgctgcttggagccacattagattattcttgattcattgtttttatgaactctagtagtgttttttaactgattcttaatacctctattatcttgtgtatgagaaacaagtttattaactcgattctgtactttattgttctttatgattccaaagattacttttgtttatatcattcgattattttctacttaatgatgtttttcaattttctctactacagga

SEQ ID NO: 324 - DNA, 478 bp, Arabidopsis thaliana
  Intron number 1 from transcript AT5G09650.1 (locus AT5G096 50) derived from phytozome v7.0 (chr-ID Chr5; pos 2992387 to 2992864 reverse strand)
gttctggaaagaaggtaccttttgtttctgacttctccgttttctgtctccggtgtttaaaatcttagcttggtttactggggaagtattgaggaatggataacgtttgcacattgttattttggaataatctttggttaaattggttacgaatagatgaatcataatgaagaaatcttctccgagtttgcagtcaatgttttaaagatctacattgtcaatttgctttgaagtgttcatcactctgttctgtgttcaaggtttggttatggggacagattgagtaagtggattatttgtttaccaacatttttgctaaccactaagctcactataataaagagatcttctctgagaatgcaaccactgtttctaacattttgattgttgattgaaatactttttggtttattactctgttccgtgttttagtgaaaggctggataaagatggtttccaattgtgtataggtttctcc

SEQ ID NO: 325 - DNA, 732 bp, Arabidopsis thaliana
  Intron number 1 from transcript AT5G09980.1 (locus AT5G099 80) derived from phytozome v7.0 (chr-ID Chr5; pos 3122872 to 3123603)
tcggtttgcgatctccatctgatcatagttttccggtaagtgatttctgtgataaacgaccataattaacattcctctgtgagcgttcatgtgattagatctcgtcgtctcaagatgatgagtttcatatattggattgagctttggtaaagatttttctctttcggtagagattgtaactcttgactattgaaggaaaattagttgtcaagattttgaatgtatttttttttttttaactatgagttgaacgattttatggtttttaactcttaactcgaaattaactactaataagtggattagtccaaatttcttatatattattctaagcttcaaacttcatatatgattgctaacacgcattgtacatatatatatgatggattctttaggcattcatatcgacaaagcttaatattgggttggtttggttagaacaatttcggatcggatcctatttacgtgaagtcatatcttatatcttaaaacaagactgtaactactaactagtgagctgcatgtttttttggtggtctagaaaaaaaaacttgttaggtgaaacttaaagggattttaactttagttagatgctgacacctcataaagaatagatcatcttcagttcttgcgctgacacatcaccccatcaactttttttgtttatttgtatgtatgcttaaagatatatctcctttttaatataaacttcaaatttatcacgacaggagg

SEQ ID NO: 326 - DNA, 787 bp, Arabidopsis thaliana
  Intron number 1 from transcript AT5G13190.1 (locus AT5G131 90) derived from phytozome v7.0 (chr-ID Chr5; pos 4205260 to 4206046 reverse strand)
ctttattgcggcaacactggtctcaccaatctcaggtatattcacttatacgattttagagtttattgttcgcgaatcgttctatgactcgattacaagaaatcatcgaggaaatgtgcaatcggcaatttcggatccatgtcaattgatctcatacttggaagcaatatagtagaaaaattagcgcctctaatcattgccagtggtttaaggttttgagtattggatttttggtttcaggattctcaaacttgttcattttgattggtgtgtttcattagctatagaatgtttgatacttctatatgaacaagctgttataaaacttaaatcacttaaaaggaaggctgaaagaactccattgatccagcctgttattgttaagctttctcaacaaatatacttaagctgcaaagataaagctacctgctttgtgactctttctgttggtaacaacatcttttccttagtagtggagttatttagatggtgcttcacttcagtatctcttctattttgatactggcggtgattggttttaatgaagttagtctgctttacgttttctcgtttctcggcattcatgtttagggcttacatttttcattctaccgaaacaattttaagagcatgagactgtactattcctttgtgataacctgtggttttatgtgaaaatattcattgtaacaacctgtggtttacatcttctttgtttgtgatatatatttttttttatggatgtgaaacagatcgaaacctggtgtagctgctgttgttgcttgca

SEQ ID NO: 327 - DNA, 474 bp, Arabidopsis thaliana
  Intron number 1 from transcript AT5G16390.1 (locus AT5G163 90) derived from phytozome v7.0 (chr-ID Chr5; pos 5362429 to 5362902 reverse strand)
tctctgctaagcccaagcttcgctttctctccaaggtacacgattccttcctcgattaagataagatcatttatcctgcaatgtagtttttagcttttcgaaatatggataatttcaatttactcaagttttgtttggctaatcttcgtcgattagtttttatctgcattttacgatttgattctctctgtatatatatttggcgtcaattagaattcagagaatactgtttttccggagaagaatgataaaatccgatttccagatttatgggtacaatcgtgatttggggttttttctttttaaatatggttgaaatcagtggaaatgtttaggaattttctagagtagtccaaagttgtaattcactaccgtagtagttgatctccaaggtcgagattatgggataactgtttctctgcatttgatgacattgcagcctagtcgcagtagctaccctgtggtgaaagcaca

SEQ ID NO: 328 - DNA, 592 bp, Arabidopsis thaliana
  Intron number 1 from transcript AT5G19520.1 (locus AT5G195 20) derived from phytozome v7.0 (chr-ID Chr5; pos 6585439 to 6586030)
caagatcaatccttgcttggcctttcagtgtccttgtacgactatctctcttttccctttctctgttatctttatttgtttctttaagtttctaaaagtgttttcttttttttgtccacccaaagataaagagagttcaatacctgctctgttttgtctctgtaacttttatagtaagcttatatcctaagtatacgtttgaatattttccaacgaggcactgttggtttactttttctttggaagtatacatatgtgttttgggaaactgttgatccttcttacggctttcttcagaaaattggttggttttaaagagtactcatttacttagaaaaaatgttctttcttgcagatctcttttctagccttgtaggatttggtttaggttttaaggtttagcttagatttggtgtaaaattttgtcaatagtcattagtcaactaagtccaaagtcggtgtcaagcatgtgttatgtcaaatctcgttgtatctaattgtgtaaagagtttgtgattaatgtaatcactgatgcacttctactctcgtgttcttaggatttggtccaacttctaggctcttttgggagcca

SEQ ID NO: 329 - DNA, 342 bp, Arabidopsis thaliana
  Intron number 1 from transcript AT5G27120.1 (locus AT5G271 20) derived from phytozome v7.0 (chr-ID Chr5; pos 9540945 to 9541286)
tctctaaagctgtagttgtgcgttaaccctctaaggtactgaatctctctcgccctctctttcttcgttgttatggcaaataagcttccaaaattctaagactttgacaaagtatagttctgttctttgtcggattttcaagaatttgaacagagtatctgccttaactattattctgatttgtaaacttcgaaacagggaaaaagttttaccttgaatattgtttcgtactagcttaatggctttagctcgtaaaacactaacttgcaagtttggtgactttgagttgattcaagggtttctcttaatcttgttttttcttcttttcaggagcttgtaaaa

SEQ ID NO: 330 - DNA, 269 bp, Arabidopsis thaliana
  Intron number 1 from transcript AT5G27380.1 (locus AT5G273 80) derived from phytozome v7.0 (chr-ID Chr5; pos 9670370 to 9670638 reverse strand)
ttcacggactcgtcgttggtgacaaaagttatcaggtttacttacttgcccaccactaaagttcctgtcttttgatcttgtgttctgataaagttagagaaaaattcgaaatttattatctttatgaaccttgtatagctgaatcatcattttcttcgtcctggattgtgttagtttcgttgtcttatagctttcgatgccatgtttgatctgaatccaaagctttgtgttttcttttgattggttttgatgattacagaaatcaggaa

SEQ ID NO: 331 - DNA, 466 bp, Arabidopsis thaliana
  Intron number 1 from transcript AT5G27640.1 (locus AT5G276 40) derived from phytozome v7.0 (chr-ID Chr5; pos 9784760 to 9785225 reverse strand)
ctttgttttttgctctcggctgatctctgtattgggtacgtttcttatctcgatttcagtgttcatttgttttttttgtcttttcttatgtagctatgagacaggatccagaacgatgcaatagatataagagagccttcaggaaaattttgccatttttctccatttcacctgttgttgggttctagattaaataaaactagagtatagttaataatttctataggcatggttttagatttacattatagtgggagtgatgattcaaagttttagtctttgaacatttggccatggtagtttgttgttttaatacttgtttagggttaacaaaaaacctacttttagatctaaagactcagatttttcacatttatttatcgacttaaagttggaatgtgttaaagactgatagctctctctatatggctttctttggcagatttttgatataaggtttgaaatc

SEQ ID NO: 332 - DNA, 458 bp, Arabidopsis thaliana
  Intron number 1 from transcript AT5G36230.1 (locus AT5G362 30) derived from phytozome v7.0 (chr-ID Chr5; pos 14273522 to 14273979)
aggtaacaagaatctccactctctctcgtaaatctcttcttctttggattttgggtaatggattatattctcgattctttctgaagaaatctttgaatttgttcgtagtaggaagattttgttcttattttcttcttgggctatgagattacgtttgatgtttgttacctttcatggcctcattgcgattgattgaattcgatttatgatgattagggatttgtgtaaaaaaattcggattcgccgatgtaacaatttcgggttcttcttataattggaattgaattagactgaattaagttagtttttttgccgttcaatattatttgcgaaatgtgtgttttcgatttctagggtttctcatgattgggactaacgaatgtatcaatttgctaaaattttttgtcttcgtttgttctgcagctcgaaggagaaacccactctcgggttagtgatac

SEQ ID NO: 333 - DNA, 599 bp, Arabidopsis thaliana
  Intron number 4 from transcript AT5G36230.1 (locus AT5G362 30) derived from phytozome v7.0 (chr-ID Chr5; pos 14274315 to 14274913)
gtgacatcttctttgaggtgagtttacaactaaactttgtggacatgttcttggtgatcttttatttggacctttttcaggacctttttcttgcttatttctttcatgtttacattgatactgtactccgattcccttattcttagttaagcagaatttacttacagctgtgttgtttcaactgtcttgcaaagccttagaatcacttctttgtgtatttaatcacattgtgtatgcgtgggatacgacttcttttttctttgacaagaggggtttacgcttctagaattgtgcactgtcttctcctgtgatttctgatgtccacttgtatagaagaatacgtgttcaatctgttgaacctgtaatatctatttacctgtatattctgcagtgtaaatggttctgtagaaatattcctggatatttttcttcttcttgttattgtggttctgttttcttctattcaaggggtgtttgtgttataatttcttatgccttctactggttttgtttggtttgccctttttagttatgaattttgattgagagatcttgtgttttaaggttattttcataggaggacgcacacaacctggaac

SEQ ID NO: 334 - DNA, 697 bp, Arabidopsis thaliana
  Intron number 1 from transcript AT5G38600.1 (locus AT5G386 00) derived from phytozome v7.0 (chr-ID Chr5; pos 15456634 to 15457330)
gccattcttgcttcttccctcctccattgactaaggttaagccctatctctatgtaaatctctcaatcttcaaattgcttgtttcttgcttcttctttcttcgtaccttaagaacatttcactacttttgaaagatttgttgttcccgacgaagccttggtgtcgtttcatctccttcttcaaatttttaaaaatttctccagtttttgcttcgcgagtatatgctttaggtttcgaattgagtagattaagctcttgttcactgtttttgatttgtcaaatcttgaaccctagttttttcacaaattgattaacaatggatacgcaaggtaatcttggaagtttaattgtttatttaactgtgttcaaagttgaaaccctaattttctgggtatgcgaatcgggctgggattgaaattaatcgctctaggagctgagatttttcttagatttgagatattgattgcttgtttcttcattcttagcaattacgttaatcaaatgttgaattttgttgattctttgcttaacggatctaaaatcttgtgtggcttgatttggatatgattctttttggtcttgaatatagtgtttgtatatatttgtgttctatttaatgtgtatgttgtactctatttaatgtgtatcttgttattgcgtttctgatactgtcgtttcttattacagggtgtttttt

SEQ ID NO: 335 - DNA, 505 bp, Arabidopsis thaliana
  Intron number 1 from transcript AT5G42560.1 (locus AT5G425 60) derived from phytozome v7.0 (chr-ID Chr5; pos 17015068 to 17015572)
tcgtcgccgccgtacacagttgttgttctctgccggtaactttaccttctccgatctctcgaatcggtcttctttgtgctgttttcgtttcttatacgaggatttgagtatttgttgctaatcatcatctagctcgatcgtttaccctagttttcgcttattgataatcgttcgagtttttagttgttcaatttcgttttcctcacttgattctctgtaacattttctcatctcctttgtcgatttcttctcgatccgagaggattatgaaatagcgtaattggtcattcaccgtcttcaatgctcaatttcattacttctgttgtgatttttctagagctaagctcatatacatggatgattcgtgaaggttttaactcagtagttagcattttaaacaaggttaaactagtgtaggactatcaattttgcagtatctgatcttattcgaaaatatttctcatgttaattgatacttttttgctctgctttcagtttctgcaag

SEQ ID NO: 336 - DNA, 635 bp, Arabidopsis thaliana
  Intron number 1 from transcript AT5G42560.2 (locus AT5G425 60) derived from phytozome v7.0 (chr-ID Chr5; pos 17015068 to 17015702)
tcgtcgccgccgtacacagttgttgttctctgccggtaactttaccttctccgatctctcgaatcggtcttctttgtgctgttttcgtttcttatacgaggatttgagtatttgttgctaatcatcatctagctcgatcgtttaccctagttttcgcttattgataatcgttcgagtttttagttgttcaatttcgttttcctcacttgattctctgtaacattttctcatctcctttgtcgatttcttctcgatccgagaggattatgaaatagcgtaattggtcattcaccgtcttcaatgctcaatttcattacttctgttgtgatttttctagagctaagctcatatacatggatgattcgtgaaggttttaactcagtagttagcattttaaacaaggttaaactagtgtaggactatcaattttgcagtatctgatcttattcgaaaatatttctcatgttaattgatacttttttgctctgctttcagtttctgcaagatgattggatcgtttcttacaagaggattggtgtacgaaaatcatattctcatttgtttgctaaacgatatatgatgtggtagttactgttgattagttctccttaatttactactatatttgttatagg

SEQ ID NO: 337 - DNA, 734 bp, Arabidopsis thaliana
  Intron number 1 from transcript AT5G43460.1 (locus AT5G434 60) derived from phytozome v7.0 (chr-ID Chr5; pos 17460040 to 17460773)
ttcgcttctctctttatcctctccgcttggcaaatgtgaggcctttttcttttttctccattctcgatctgttctcgcgtctcttcgtgttccttgattgagatttcggattgttttccgatgcttaatagtgaattgcttcgtgctagatctaatctgggaattgagaagctttataggctctttttgatatctagggtttcgtgaaattggatatttatctgaatctatcacgatttgattttgagtacttgttatgtttcgatctagatttcttactgttattgatttgtattttgagcttgattttaggttttggtgatctggtcactttagattaatcaaagtttgaatatttatgtatcttgtgttatcaatcaatgtatgatgttgtttgatcatggttgaatctggcttgggcttattaccgcatttagggcacatataattgttctctcttatattcgtttatagatgtctttagctctgttgttcatatggttagacgttgaattggtttggttattccaatgtttagtggtctagagacaaagcatcatttactctaaatggaagatgatcgataaatgtaaaataagattgttctcgtactattcgttagtcgttactaggattttagtttgtttacttgatagctcaaaatattatcttcctcttttgactatattactaaattttaacaacgcttatttgggggaatttgaataggttca

SEQ ID NO: 338 - DNA, 842 bp, Arabidopsis thaliana
  Intron number 1 from transcript AT5G44370.1 (locus AT5G443 70) derived from phytozome v7.0 (chr-ID Chr5; pos 17876446 to 17877287 reverse strand)
tcgagaaaaagctgaagaatttcggaacaactaaggtaaagctttgtgattttgacttcggttttcgatttacattgtgaagactgaagaagagatataggcaacacattccactgtgtaattcggctgcttgatgcttaattttaagatttcttcttgggttctcgtttctttggtacttaagtttaattgaaagaaagcttggattttttgcgtctgtaaaacgaaattgagtctctgtgataacattggaatcgtaattcattaggaattaggattgttgatccttcaatttagaaccaatatgattacgttatggcttttgggacaaattcatttgcttgatacgaacttttacttcagatttattcttattttttaagatctgtttatctttatcttttgatgtcatatttaggatatgttcttatcttctgtgttgaaggatttgacttaattttactttctagatgccttcttgtatgattggagaagcgtaagattgtgtatttttaggatgcctaattgaaaatggataaagttgtgttacttatacctctctcatatatatctcaacagaggaacgtattgggtttgagtctattttgttaatgatcagaggagaattcatcagtcatatagaatcgtccctgcaagttttgtgttaacatgtatcacaataagcaaattaaactgctttgaatatgtcattgcagattttaacggtggaattggggagtcttgaagcttatttttcctcctggtctcttttttcttatgtggtggtgcttgagagggtttttgtatgatataaatgctctagatcagagaaaaggtctaac

SEQ ID NO: 339 - DNA, 376 bp, Arabidopsis thaliana
  Intron number 1 from transcript AT5G45140.1 (locus AT5G451 40) derived from phytozome v7.0 (chr-ID Chr5; pos 18257712 to 18258087 reverse strand)
tatcaactccagcttcaatctccttcgaatcgcaggttctcttcttcgattttcatcttcaatctcctttttgaaatcacacgaaaatcccctcacaatctcttccacaaatttccggtactcgtagagtcgttaggtttacttctcttactgtttcttctctgtaaatcacaatgcttcgtcttcaattctcaaaacgactggtttctgggaaattctgggttttatttgaattttgatgaaattgtggaaaactaggattcagtatttgggtttttgtggtttaattctcttgtgattatgatgtgttgatgttaattatatttctccatggatttcagataactgacagcttaattgcaaagttaagagcgat

SEQ ID NO: 340 - DNA, 476 bp, Arabidopsis thaliana
  Intron number 1 from transcript AT5G45710.2 (locus AT5G457 10) derived from phytozome v7.0 (chr-ID Chr5; pos 18541062 to 18541537)
gagtcaaatctgaaatcttctccactcatcatctggtacgtttgatgattccaaatcagaaacattaaaggacaagaaatgttcgaatttttgattgattctctctgattttcaatcatttggttgtagaagcaaaagggtttggttcattcattctctcgtgttgcccttatttcggattcggatagatttggagctaaattaggggttttgacttttttagtttctcccattcaataaatttcgaagcttgtgagggaaaagtcttggtttttattgtcatttattactttgcttcttaaagcttgagagatcgattcgtatattgattcaaacacttgacagttgtgtcttaaactggaattgttgcaattaaatgtttatgttttcaatgagtctctctagttgagtttgatttcagcttcttgttctatccaacagactataagacttaatcaagggactttttgttcggg

SEQ ID NO: 341 - DNA, 607 bp, Arabidopsis thaliana
  Intron number 1 from transcript AT5G47970.1 (locus AT5G479 70) derived from phytozome v7.0 (chr-ID Chr5; pos 19422809 to 19423415)
cactatagctgcctgtattcgtcttctctatcaccgtaagttatctttcgatgctttctaagctattcctcttcttctttagatattcttcaacatcgtcgcttagacccagccggtacaacattgtgctaaaattatgcttaattcggttcagtgatttctctcctgtgacaggatttttcctaatccgttttacttattctttggtcttattaaataaaattcgaaaactttgattaggtctggaattgatgttttttaagtttgacatttaacttgtttgaacaatgttttgtatcttctgcagtcaagttccgctttatgattagtttgagttaagataaacctgttgaaatgttatcttgttttgatacaaaaggtctttgatttgaatcaatccataagaacgagcttgagactcagttatgtggcatgttaaagttcatatatgattgagactgagtgatggattatatgcaattgtttttctactgtttcataccattatggtaccaaaagtacttaaattcaattgtgtcgtgaagctaatgtttactacattctttgtgtagctcgttatctggatctgaaatattaggtgatacga

SEQ ID NO: 342 - DNA, 247 bp, Arabidopsis thaliana
  Intron number 1 from transcript AT5G49530.1 (locus AT5G495 30) derived from phytozome v7.0 (chr-ID Chr5; pos 20100687 to 20100933)
cgactattactcaagattttgattctgactttcaggttctttctttctttctttcttctgcagttccgtttctatcagctcaagatttatcgattaagatttctcaaagtattgatttttttttagtgattagacaaattttcatcagtaactcatgaactttgttatgattagcggcttgggtttgttttgttgaattgtcaatgaagaaaaaccctaattttgcattgtcacaggaagtaaaaat

SEQ ID NO: 343 - DNA, 457 bp, Arabidopsis thaliana
  Intron number 1 from transcript AT5G53500.1 (locus AT5G535 00) derived from phytozome v7.0 (chr-ID Chr5; pos 21728611 to 21729067 reverse strand)
tttcgaagaaacctcgtgaagacgaaccaacccatgtacgcaatttttaatctttgttaccaaaaaatttgaattggtgatgctcgtgctcacgcatttttgttgcggattttttgttgcttaggatctaaaaatgagatctttcactttgttgtgctgatttcagcttctctgtgtgctaaataaaccattttttcttctcttttgatgggtttttggtttcgttgcttacacatttatcgacccacataagttgtttgtgtaaatgtctcagagagactagattcaatgggttttaggattgagattgatgttaaactctttttatttctttttttaaactgatttttttatctcgaactctgtgattgcttaatttgtaaacttctttaaaatattattgtctaaagtattatatatagtttgccttgtaggttgcttgtttggaagcaaaact

SEQ ID NO: 344 - DNA, 605 bp, Arabidopsis thaliana
  Intron number 1 from transcript AT5G55760.1 (locus AT5G557 60) derived from phytozome v7.0 (chr-ID Chr5; pos 22567377 to 22567981)
caaggtttctattttttgtttccttctcctcctggggttttgtgggtttactctatttttctcgagattctgtataatttcacgttgcgttgattttttctctggattaatcgcttagctgtttagattttagagttgatccttcttgtgttctgtcctagtgtttgattttggatcgtaggttcatattaagcctttaagtttttatatttgtcgtttggatggtcgtgaagagttgttgaagagttggagaatgattagtacttaatgattcatataatctagttttaggttatacagtacctgtttttagacttgcattgtgttgtgttaattgaagaatgaaatttggtgataacaagcatcttaagattatgtgattttatttactgattatgtgaaaaccgttgtctggattcaaatttgtgtggagattttgactgtttgtttatcattgttttatctaacaagccaaaaggtctgataaaaggatttggttgctagatcttggcgtgtttattgtttatttcactattgtgctaactctggtgtttgtctttggaaatgcagattgaagaacttgctaagttgattcaaaaggtttg

SEQ ID NO: 345 - DNA, 536 bp, Arabidopsis thaliana
  Intron number 1 from transcript AT5G57230.1 (locus AT5G572 30) derived from phytozome v7.0 (chr-ID Chr5; pos 23190036 to 23190571)
aaagcaaatcggaagaagcagcgaatcagcttcaggtgttatttctcttcataaacttttgtatatgattgattcgaattcgtttcactagaaaagatagaagttagcgaattgaaatttctctgcttttcatatgatcatccgattgtgaaatgtgagacaaaagatttactttttttctttctgggtttttgtttggtgggcgaaatttaaactccttatgcgtttcatttgaagtttgaatacgtttatggaaatcacgagtgcttttaacttatctggtggttagaacagaggatgtttattttgagtgcactcatgttgttcgatgaaatgcctgaaagaacaatttaagcttatattgatgagttacatctttgcattggctttggtaactggtggacatcgacttataatgcaaaaaatctcttattagtgattaagaattgataagttaccttcttgagtattttgtctgttttcacctaataagcaatggtattctcttgaatctgattcatttggtatatgctcag

SEQ ID NO: 346 - DNA, 505 bp, Arabidopsis thaliana
  Intron number 1 from transcript AT5G57815.1 (locus AT5G578 15) derived from phytozome v7.0 (chr-ID Chr5; pos 23426756 to 23427260)
gaagacgaggtgatttctcgttcctttatttatctcacaactacgtatacctagagtaaatcagaaaacgttaatgaatttgatcttcttgaaactgtgtgctacagtaatttcgattgcttattggtttctatgtatcatagaggaattggttgataaagttttgatttttatgatgtctgtggcggtatctttatcatctgatgaaacttgtcgagacaattctgggataaaggaataaactttaagccgtattggtggggttgattcttcggatttggatgatagtatcttcttgattccgtagaattgttgaaatgtttggaaaattgagatttctagaggcaacaagtattttggagatttctatgtttggttattggttcattgattgaggaaagaaacaaagtgatttaagtttacaaaaccttatacagtttctttcacacttgtgtttgtatttgcattagattgaattgaaaactgctcctgctgatttccggtt

SEQ ID NO: 347 - DNA, 459 bp, Arabidopsis thaliana
  Intron number 1 from transcript AT5G61640.1 (locus AT5G616 40) derived from phytozome v7.0 (chr-ID Chr5; pos 24775441 to 24775899)
atcccaccactttgaatcggcaggtaacgaaagttttgctctttagaatgtctgattttgtgagttttaagttttgattttggtgattgaggaagatttctagggtttctagggcttgcttgaaatattgagctctaaatagattgaaatctagggtttggatgatgtaatactttggattcatttcatgttctgttggtacaaaatttaggttttatgtttgaaactgaacagagagactcatacatcttctctttgataaggatgtgaatttggctatcgttcttgtcatctttggtcactgaaccatccttatgtgtattttggtagtttcttagagagcacttaaccagctcttatgcagaatcactatttatttggtagtttatctgcttgtcgtgcattatgttcgaatttgtttctctgttttaatgagtacatccttatctgatcagggaa

SEQ ID NO: 348 - DNA, 520 bp, Arabidopsis thaliana
  Intron number 1 from transcript AT5G62090.2 (locus AT5G620 90) derived from phytozome v7.0 (chr-ID Chr5; pos 24938588 to 24939107 reverse strand)
tattttaactttatattacagcttgaaatttccaggcaaatttttttccttcttcttcttcttcttcttgtctcattaattatcttcctcttcttctgtttcaattcagctgggtttagttttaatttctagttgtgatctctcagcttttgttctatattgatcgaagctccacttaacagttcttcgtacgttgtttccgtgttcttcgcttttttattttgtaatttaatttcggttgctttttaaatatctaactccgagatttttaagggattgctatctattttttttttttttggggattggttagtttctcggttagttatgttaagtaacgaactttaaaattagggttttgatttggttttttttttatttcagtggttaagttcaatgtctgtgtatctttaataacgcaccagattcatgtgttagggaatgttattgatctgattttaatcgatacatgtataatgttgtaggtatcagtagtaaaggtgggacatttgtgtcgcat

SEQ ID NO: 349 - DNA, 419 bp, Arabidopsis thaliana
  Intron number 1 from transcript AT5G62530.1 (locus AT5G625 30) derived from phytozome v7.0 (chr-ID Chr5; pos 25102687 to 25103105 reverse strand)
tcatccacctcgcttgcttctttgactctctccaggtttttcaaacgtcctgatctcaccaaattatttcttgttttgtgttaaacattgctcttcgtcttttggggttgcatgtttttgcctaaagtaatagactttccatttgtatatatatataaataaataaaagagaaaactttagcaagttggtgtattaaaaatttgagatttagatcatcgagtagccgcatctgctcagtctctatgtaatgaagagagtgttagctgattagagtttgaaatggtactttatgtatttgtgttctgattactctttgatgtctgagaatgtgatccatttaaaagagtgttcctttgccttaatttttgtgtttatggatcttgcagattgaatcattccataccttttgctaccgtag

SEQ ID NO: 350 - DNA, 336 bp, Arabidopsis thaliana
  Intron number 1 from transcript AT5G62980.1 (locus AT5G629 80) derived from phytozome v7.0 (chr-ID Chr5; pos 25276048 to 25276383)
actactctgcgccgctttgtctctgtcgcaatctcgtaagcttcttcagtcttctcttagtttaatcattggtcgtaatttgtattcgttcgaattgagtgctgtgatgttgaaaacctaaatttatcgggtcctgatgacgtaatgggactcgggaacgatctttgagttagaagtatttttgcagttttgtgtagagtttcacaaaattcttcggtttttttaaactgtggatcaaaataactgctatgtaaatctgatttttgtttcaaagcctgtaattttgttatacagttttactgtataagctgattgtgtttatttgaacagaaccat

SEQ ID NO: 351 - DNA, 379 bp, Arabidopsis thaliana
  Intron number 1 from transcript AT5G64020.1 (locus AT5G640 20) derived from phytozome v7.0 (chr-ID Chr5; pos 25622064 to 25622442 reverse strand)
ctcgttgaagatccaatcatcatcaatcgtttccggtaaatgatttcaatcatcttcgagctcgattttgtggagaaccttattagttagatatttgattttgggtttaaggatataattctgtttattatccatgggtttaatcaaatttcctgatttggttatgttttctgatttggatgaattcggattgaagaagaaaccatccttaaaactatacaaaattcaattgctagaatttgggattttgattgttaaaacaaagaggaaacctttttcttttgtctttgaatgattcaacgactgacaagattttgttacactatctgactggtctttcttaggatcttgaacttaacaacatagcaaggagctttct

SEQ ID NO: 352 - DNA, 385 bp, Arabidopsis thaliana
  Intron number 1 from transcript AT5G64060.1 (locus AT5G640 60) derived from phytozome v7.0 (chr-ID Chr5; pos 25635362 to 25635746 reverse strand)
agttttctgttcctccgcttctccttcccctaccggtgcgacttctcctctcttttatcttctctctttgtttattttaacgccggaaatgtttctcacttgtacgttttggtttccgatgtaatctctcgtcttctctgtttcttgaaaatggggttttgatttctgggtttgatcttagctccatcaactttgatgcttccccttgatcaaaggattaaattctacagtggagattatctatctgcttaccaaattttgatcagttacaacaaaattacaaaatcagaattagccctagaatttgttttttgttgttacagtcccattcattgaaaagtgtcttcttctatgtgtaggtgcttcgttttgtgttgtacagcag

SEQ ID NO: 353 - DNA, 512 bp, Arabidopsis thaliana
  Intron number 1 from transcript AT5G64180.1 (locus AT5G641 80) derived from phytozome v7.0 (chr-ID Chr5; pos 25677305 to 25677816)
cttctctcgtctccgagcaagcccgaacaatcaaggttaatcctttttcctgtgataaaatttgaaattatagagcttaattgtctgaattttgagcttcttttctttgactttgatgattgcttctgtgatttgtggattcgatctagttgatcacgatcgcactttttagtttgctttagtactactatagctcagtgtaatagtgtgattctggaattgcatttgacggtgaatttgggaacttgtagttgatcataaattttgaatcttcgattttgtgatctgttaatggtacaaatgatcaccaaatccttgaagactggacttgaggtttcactatgaaaactcccaagtgcaattatgtgtattaagtagaaattcttcatgttgtaagtaaaaaaggactgtgttacatgtttgagataagggatagtttcagattgtctcttaactctgttcaatggtttgttttaggttcttgagcaaagagtacaaacactagaaagaga

SEQ ID NO: 354 - DNA, 364 bp, Arabidopsis thaliana
  Intron number 1 from transcript AT5G65250.1 (locus AT5G652 50) derived from phytozome v7.0 (chr-ID Chr5; pos 26079084 to 26079447 reverse strand)
tcacacgaaaagctctaaaggaacccatttctgaggtattgttctctttctcgagctttgcttcatcaaatgattccattgaaaacgtcccattctctatgtcactatgtgagtgaaattgcatgaaagtggaacaagtgatgatttgggaattgatctagagttgttgaatgtctgaggaagtaacaaatgttctagtgtttgaatcaatattttggagatttaggataatcttgcagaaaatatcagtttttgagtttatgactggtcaatatagctgtctttgtggctgtatgtatctgaagagtttggtttgttttgtccaaaagactgcagctttagctcaaaagaattctgaggctac

SEQ ID NO: 355 - DNA, 655 bp, Arabidopsis thaliana
  Intron number 1 from transcript AT5G65890.2 (locus AT5G658 90) derived from phytozome v7.0 (chr-ID Chr5; pos 26355046 to 26355700)
attagtctctattgaatcagaatctcaactctcaggtaaatctcttttcgtcttcttttttcctttttcgtcttgaaattcttgagaaaactacaaactctctctctggttttttcaagacgattcggatttggattcagattctcatctatggtaatcgtgtggtcaaagaccgaactgaatctttattgctttttaattgctctattcataatcaaagtgttttttttcttttcccaatgcgacttcttgattctatacgaacaactattcttccaagttgagagtaatattaatctaacataaacaaccatagttctcttgaattttgaactacgaattttggttttaaaaaacagctgagaatttgaatatcttgagcaatctgcatctgattttgatttctgacatcctgattaaaagtggtttcagatttgattctgaaccgaagaaataggcggcttcttatttatcgttaagtttaatattaaacgttgtattgctctttaagtatctttaaaacctcgtttacttcgtgttattattcaattttgttataacaaacaaattttgatacgttgctctcttcttctttgactaaaaaaacacatgttggtacgtaggttggattttgagagctaattaaatagttaag

SEQ ID NO: 356 - DNA, 621 bp, Arabidopsis thaliana
  Intron number 1 from transcript AT2G25540.1 (locus AT2G255 40) derived from phytozome v7.0 (chr-ID Chr2; pos 10871396 to 10872016 reverse strand)
gggttggtttcctctttctttttgactttagggtttgatgtaacgttaatttagatatctctgtttgttttgttggttttttggccaaccttggcttatggaagctaaaaagttttgaacttttctatgtgattttacttactgagagaattaatgtgtcagctaaaattagatttttttttttgcttttgggtttacttcaatctctatgcatagagttatgttcttgtctctaaagttttttatatcttttgttcatgttttagatctatgagtaaatgttgttgtttttcatttttgttccaattttggcttctagttttatccctttaggacaatgttggtgaatttcagttataggttcttgatctacggtttttaatatgttttgcttcatcgttgctaaagctttacactcattgactcattacaatctaacttaaccaggttcttaaaatgttattttaatgcaaaaaagctttaacatgcttgaaagtagccaaaattcagataagcaatcatttaaatatggttcttgcaatatgatctgtttctgttttttttggtctcgctaacctcattctgtcgtcaaagtgcagctaaaacccttgaaagatctga

SEQ ID NO: 357 - DNA, 652 bp, Arabidopsis thaliana
  Intron number 1 from transcript AT4G24680.1 (locus AT4G246 80) derived from phytozome v7.0 (chr-ID Chr4; pos 12732768 to 12733419)
ccctcttcgttcgattctcacaattaatatctagggtttgcgaggaccccccctctctattcaaaaaaagagagcagattttctctataatcccctttggtcagtttcttctctacctttttttcccctttgtattccagaggaatcgagtgatgagtttatagaattatcgcattttgaagtaatttgggtccttttgtagagcttgattgacatttctggagacatttgtatgtttcagagctctttttttgttgctgttgttgttctagcaagttgattgcgaaattgtcaacattctgggaatacgtcaattgtttttttagtattgcggtcatttagtctggaacctcttttgattccgcagtttgacgatctttcatacttttaggtttctgtaccaatttgattgtcgaacattgtctttctgttatgatggtgaattttagaaagtatttcaattcatgttggagaatttgtataggcagtctgattctgcaacacatttcacggtagcagtgttatagcaatagttcttcagtgtcggtcttgtttgattctttgggatttgagcttcaaatttcatttgtgaatctgattctgtatgtgacttacaggtttcaagtggtgtaattggatcgtgtagctgctt

SEQ ID NO: 358 - DNA, 527 bp, Arabidopsis thaliana
  Intron number 2 from transcript AT4G24680.1 (locus AT4G246 80) derived from phytozome v7.0 (chr-ID Chr4; pos 12733428 to 12733954)
acctctagcacgacaggagatcgaaggtttctcttctttcaactttatctttgtcatgaacttttctatgtttttatactggattatgggttatatattggcctctttgcacgttacttgcatgatttttcttttgatttggccttttcttcatatgaattacttgttttcgttgtgctgtatattccaactgttgttaaaatatagaatcactatatgtgcctggggtatagaaggaaactcagggtgtggtttttctttctttgaaagagcttgcttgcatgatagacattcaccatgtatttgtaataattttattcaacattattattgatttgcaacatgccaacatcaccatttagattaaaagaagggaaagttgtaaaatgtgtgtagaaaacatatgtaaagagctgatcgtttttttaataaattgtataatcatttatactttgctcatttacacttaaagagctttgtatcctctgtggtgatgatgagaaattacatgtgctggatattagcag

SEQ ID NO: 359 - DNA, 718 bp, Arabidopsis thaliana
  Intron number 2 from transcript AT4G25530.1 (locus AT4G255 30) derived from phytozome v7.0 (chr-ID Chr4; pos 13038594 to 13039311)
tcgacattggtcgaagtgctatttggttgtttaaggttgcttttagcacacaactttaatattatttttatgttttcttcttacgatttatcgatttgtaggatactgacaatcagatttttgttgtttttttcagccaaaaatcagatttttttacattttgtttagagaatgattttggttcccgatttgtctgtttttcgcttatgtgtaaagtactttgaaaaatattgtgttaactctacaatgggtatcccaaatttttgagttcttttgtcttgttcgttgtcgagacactagaaatgttaatttaattctcttcttccaaaaagaaccatttactggttcattctctacttgaattttattctggttgtatttcttttccagtataaagcagattgttttttgttatttttcagtttagattggctttgtctcttttgagttgttgcaattgtcaaactttggaatgaaatagtaaataatcttaggttggtagtaaatcttaacattgtgtttttggggcataatttatcgataaaatcttcagcattaaaaccaaaaagaaaaaactttttaagtcttttttgtttggtggttaatataaagtttatacgtgtattaatttgatcacactcactatatgtccagggagctaaacctctatatcgagtactaatagtatgcaatgtccaggttattgcattgagggaaa

SEQ ID NO: 360 - DNA, 589 bp, Arabidopsis thaliana
  Intron number 1 from transcript AT5G62230.1 (locus AT5G622 30) derived from phytozome v7.0 (chr-ID Chr5; pos 24996511 to 24997099)
aacaacgaaggtttgtttcttctaactcttttgtttttgtcttttttcttgtgatctctgtttaaaattttgattatgtgcttcaaaaattagggtttagttaggtatatctccttaaacccattctctgattttttctgaaagtttgaatctaaaatcgtctgtgttagaagttatcatgacatataatctttggtttatgtcaaacatttggtttccccataaaaagagagttaaagttgaaagctttttcatacccaatacttagctctggcttgttcttcatcaaatgcatataaagatgcaatcttttctccatttcccaagaaatttgatcatgattagtacacagagaatgcctgttcctgtaccatggaaagtttgtgtttttttcaagctgtttcccgagaaaaaaacgaagcttaatccctagtgtcctggagagaaaggacatgaaatttacaaaaattccttagttttggtttatgtatatttaactatgtgactgatgttccgcgtttcaaatgatttattactaatcctagttgagtctgtttatgaattttgaaaacccacagggaaagctctg

SEQ ID NO: 361 - DNA, 685 bp, Arabidopsis thaliana
  Intron number 1 from transcript AT5G06960.1 (locus AT5G069 60) derived from phytozome v7.0 (chr-ID Chr5; pos 2155011 to 2155695)
tttggggttaagctcaaagaatccgttcttttcaggtgagtctcttcttcaatagtcttaggggttttagttcttcagttttcttattctgcctctgctttcatgattgtttttttccattgaagattttgacctttgagggaattttttcctttttgctttatgtacgtgttaaggatccaaaatcattatttcggacactatttaaacgaattggttgagatttgatgttatgaagcttgaattttgtgtcttttactctgtttccggggctagtttgctaaattctgaatcttttagctctacttcagtctaatgttcagattagttactgtttcacctcacggagagctttacgctatagaagtccgttggttctcatttcaaatcatataggcgtgcttattgtttactttgattctctggctttgaatactcaaagttcttgaggtcattggttgcttcacagctatgtgttaagtttagtggtttggatctttatgttagtgtgacataaatagggtgatgtatcgtatcattgtttccactttcttgattctacttaatgcgttggtttttggcttaaaaatatgttttctttctctataactctaatcttttgtttatgtttaccatcttacttttgacagtctttactccatctagggtaccacgattggatcgg

SEQ ID NO: 362 - DNA, 695 bp, Arabidopsis thaliana
  Intron number 1 from transcript AT5G06960.2 (locus AT5G069 60) derived from phytozome v7.0 (chr-ID Chr5; pos 2155011 to 2155705)
tttggggttaagctcaaagaatccgttcttttcaggtgagtctcttcttcaatagtcttaggggttttagttcttcagttttcttattctgcctctgctttcatgattgtttttttccattgaagattttgacctttgagggaattttttcctttttgctttatgtacgtgttaaggatccaaaatcattatttcggacactatttaaacgaattggttgagatttgatgttatgaagcttgaattttgtgtcttttactctgtttccggggctagtttgctaaattctgaatcttttagctctacttcagtctaatgttcagattagttactgtttcacctcacggagagctttacgctatagaagtccgttggttctcatttcaaatcatataggcgtgcttattgtttactttgattctctggctttgaatactcaaagttcttgaggtcattggttgcttcacagctatgtgttaagtttagtggtttggatctttatgttagtgtgacataaatagggtgatgtatcgtatcattgtttccactttcttgattctacttaatgcgttggtttttggcttaaaaatatgttttctttctctataactctaatcttttgtttatgtttaccatcttacttttgacagtctttactccatctagggtaccacgattggatcggtttttatctg

SEQ ID NO: 363 - DNA, 733 bp, Arabidopsis thaliana
  Intron number 1 from transcript AT2G47380.1 (locus AT2G473 80) derived from phytozome v7.0 (chr-ID Chr2; pos 19440961 to 19441693)
tccggtcgtcgtctacacctccacactccgacttggtaaatccccagactcatctctctctctccttttcttttgatttctagatttgctagtttgtttcgattgttcttctagatagaaattaacgagtgatttttgatttaaccgattcgcatcaatgccccttcttcttattgcgtcgatctcatggatcgggatccatcgttcctctatctgatttctcttgtgggaaagaatttcaagctttatggttttgtagtaatgaacgtttatcattttcgttcgagggaagatttttaaactttcgttatgcggattctggatattaggctgttttttttttttttttttaatcgattgaaggatgtcaatttatagattgggctgtagattgctagtttatgtcattgatattgaattgtaagtttttcgatcttccagtcatacaaatcactaattgcctcaagataggaaaatccattggcagtatatagatggagttcatatcttaagcacaggtttatatggtcattacatttctagcttttgtttgttaggactgattcatgttgggtttttggggttattctttataacgggtcatgcttgtatatatgtagtatcaatacatttctgatttgtggttatgcttgatgcaaaaaagatccaatctttcgagttggtagtgagttacatttgttacttttggtaggttgagaagaagaaagaagag

SEQ ID NO: 364 - DNA, 602 bp, Arabidopsis thaliana
  Intron number 1 from transcript AT5G17920.1 (locus AT5G179 20) derived from phytozome v7.0 (chr-ID Chr5; pos 5935169 to 5935770)
ttttccttcctcctctccgattcttcctccgtcaggttcgtctccgactttctatgtcttccttacgtctctcttatttagctccctttccttccttctccacgttattattactacttcgcttttagtgtgattcgtttcattctcgtttttttatattcctcgatctgtttgctcatttgttgagatctattcgctatgtgagttcatttgactcagatctggatatttcgtgttgttcgatttatagatctggtttctggatctgtttacgatctatcgtcatctttcctttgaaaatgattggtgtttctgtgttcgtattcgtttagatctaaagtttttgatcgatgaatgtcgcatgtgtttttatctgaaagttttcgattacagtatcaagtggtggtagtagtagtagtagactcaaaaagctgcacaaactttttatacacgtgaattgtgattgctttacggttttcttggagtttgttaattaaatcatttaatattaagaagtttatgaattaagagaacgttattttatactatgattttgattttgatttggtttgtgtgttttaatgcagtaaaagaaaatcaaa

SEQ ID NO: 365 - DNA, 369 bp, Arabidopsis thaliana
  Intron number 1 from transcript AT4G05050.1 (locus AT4G050 50) derived from phytozome v7.0 (chr-ID Chr4; pos 2588961 to 2589329 reverse strand)
aaatcaatctctcaaatctctcaaccgtgatcaaggtagatttctgagttcttattgtatttcttcgatttgtttcgttcgatcgcaatttaggctctgttctttgattttgatctcgttaatctctgatcggaggcaaattacatagtttcatcgttagatctcttcttatttctcgattagggttcgtatttttcgcagatctgtttattttcttgttgtttccttgtatttgatccgatttgttgaaagaatttgtgtgttctcgattatttacgctttgatctgtgatttttatctagatttggtgttagtttcttgtttgtgcgatcgaatttgtcgattaatctcggtttttctgattaacag

SEQ ID NO: 366 - DNA, 332 bp, Arabidopsis thaliana
  Intron number 1 from transcript AT3G49600.1 (locus AT3G496 00) derived from phytozome v7.0 (chr-ID Chr3; pos 18386672 to 18387003 reverse strand)
ctacttgctaaacttttctttgtagattctctcaggtactttctctcttcttcgctctttctctcttttttattctccgttttgttgtaatttcttcggtaattttatcactgttcctttctcgatctgggtttcgatgctgaattgtttaaccctagattcgatttcatctccttgagttggcattttcgattaggttttttttttcttgataatttcttgttcttgttccaaatattttcgttaatcggaatcaaaattgtgttaacaatgttgctgtgttttcgttatttctagggttttcgattgttactggggaaatttctggtggt

SEQ ID NO: 367 - DNA, 662 bp, Arabidopsis thaliana
  Intron number 2 from transcript AT3G14080.1 (locus AT3G140 80) derived from phytozome v7.0 (chr-ID Chr3; pos 4667743 to 4668404)
ttatctttcaacatcactcgctagttatctcgatagtaaatccgtctctctttctctctgtttcacatatttgttgaaccgtatgaatgcatgtagttaaaataattggccgtgatggctctgtacgcatttgggagctcaattttgcaaacaattctctgtttttttgacgtttgattttgacttcttattgatatataggctgtactattttgtggctgtatccaaagcttgtcaattttggtgttgaattgtctcaaagagacattcattgattaagatattgattattgaatcaaagctttagtttttttttaattgggtcaaatctaactgttcatcagttattgttgtcaagctaaattttagcatgcgtgagagattagatgtgattgaggttgctggctcactctttattcaacttacgaagtataaactttaacctttgttgaaatttaattcactatcggctttttgatgttggttctttgagtttaaaagtcaatgatcttcttttgctgatgtttttgggctatgagttagttctcaatctcatttggcgtaccgttttcttttttagatatgaatcaatgtgcatcagttacttatgtatgttggctctgctcttgatgatgcaggaaaactacttgtgcttcttagag

SEQ ID NO: 368 - DNA, 748 bp, Arabidopsis thaliana
  Intron number 3 from transcript AT3G53990.1 (locus AT3G539 90) derived from phytozome v7.0 (chr-ID Chr3; pos 19989730 to 19990477 reverse strand)
ggaagcagaggactcagtgctcttcaaaggtaatttcttgctctctttttcttttttatgtaataaattccattttatattcttgccaaaatgccattattgcttagtgtttactgtttagtattgctgtatatgaaattataaaatgtgagatacaatagggccattgatataatttggtgttggaacaaatccatgattaaaaaacgctcgttacctaatttaaggcaatgtttaataccaatggctttgattttgaatccgtggtttaatttattaaaccatctcgctttactttgaacaattttggttgacaaattatttttgtctttttggtctatctaattaaacatatatacttttgaggaatatggtaaattcaaaattttgatgacaattacttctcaacgaaatggataaggtctagttgaaaatgacaatggtaggttttagatttagctttagctatggattaggttttaggtttagctttaactttgaattttgtctttatttcataattaagaaaaaaacaaacatttaagattgtggttacacctttgtttttagcacacttgtctttttttttttttttgaataaacacttgtctttgatttattcttgatatttttaacgtaacaattatcattggtaatcttttagtgatgaattcttctaaactttaatcttttggtctaagtgaaatatctagtgactaataattgaaaataatgaaacaggataata

SEQ ID NO: 369 - DNA, 745 bp, Arabidopsis thaliana
  Intron number 2 from transcript AT4G09760.3 (locus AT4G097 60) derived from phytozome v7.0 (chr-ID Chr4; pos 6150057 to 6150801 reverse strand)
cccgggtaaataaaatattattctttcacttttatttagtctgtttggagttttggtttactagttattcggtttatgaaattttgaaaccggatttcaaatccggtttgatacagttcttgtttcagtatgaattcgatttttagaaaatatttgatgattttcatgtgtaaggatgtaatttctccaatcctgcttttagtttggttacggttttctagttgtttggtttatgaaaccggattgaaaccaaagagcagtcggttttggtttgatattgttcatgtttggtataaattgggttccttacaagttacaaaatatttgacggatattattattcatcaggttttgatttgtaaatgattttcagattttactgtttgtttttcatcaattccgattcggttcggtttgatttttcttttggatatgtagttaaatgaaaccgaattggcttatattttctttggttcagctttcggcttagttttttattgggttaaactaggtttagcaatccctataggctatagctcatataattggtttacctttttcatgtggtgttaaaccggaaaaaaccaaaccggtttagctgtgcacctattgttgatttgtcttcatactgtagttaaatttttgtgttgatcattttccattataaaaatgtcacaataataattcttgcatctataacttcggttcagacactatcggcaaccgatcttcgtgatccgaacat

SEQ ID NO: 370 - DNA, 323 bp, Arabidopsis thaliana
  Intron number 1 from transcript AT1G03950.1 (locus AT1G039 50) derived from phytozome v7.0 (chr-ID Chr1; pos 1012887 to 1013209 reverse strand)
aacatcttcactaagaaacctaatcccagaggtttaattccaccggatttttcttttgtatcattatggattttgttttctcaattaggttttttttttctccgattgatcaacctaaatggaattttgatcatctgggtttcttccggttgacttcttctgtaattttgtggcgcgttcgtgatcatgtttcttttggaatctggcttggtttcgtctgaattcgagaatcttaatgtctattgaaatcggactgtcagaatctgaatgtttcgtttttttttttggcaattgcagaagtgcttcgggagagtaagagagag

SEQ ID NO: 371 - DNA, 445 bp, Arabidopsis thaliana
  Intron number 1 from transcript AT1G06130.2 (locus AT1G061 30) derived from phytozome v7.0 (chr-ID Chr1; pos 1860149 to 1860593 reverse strand)
ttctagggtttgtatttccttaattcgtgctgaatcatttcctccaatctcattgtccgattactcaccaattttttagggttcactcctctgttcgaaaaattagatactcttgattgtttcttcttaaatctctattttaattcgatgcgttatagcttattggatttatacaagttacttacttctttacgactggattttttttcagttaatgaactttctctgtttatggtgaaattatgaattgagaaatctggttgtacactttttcttttttttttttaaaatcacactagcttctactcaaagcttctctgagacttttcttgtatgagtcttggctgtgacttttcttgtatgaatatttttcaatattgttgttcatatctttgattagtctctgctcttatctatatgtttatcagaagctagttagtcagcc

SEQ ID NO: 372 - DNA, 445 bp, Arabidopsis thaliana; identical to SEQ ID NO: 371
  Intron number 1 from transcript AT1G06130.1 (locus AT1G061 30) derived from phytozome v7.0 (chr-ID Chr1; pos 1860149 to 1860593 reverse strand)

SEQ ID NO: 373 - DNA, 179 bp, Arabidopsis thaliana
  Intron number 1 from transcript AT1G07320.2 (locus AT1G073 20) derived from phytozome v7.0 (chr-ID Chr1; pos 2250013 to 2250191)
agacggaaggttagtgttttcttgaaaggaactggcttgttgtcgaaatttgatgttttgaatgttgtgtttgatcgtttttgtctggttttaatttcttgaagaggtagaaatatgatgtgttaatatggaaaagtaattatttgtttgtgttatgaagggtcagaggaagcttaaga

SEQ ID NO: 374 - DNA, 420 bp, Arabidopsis thaliana
  Intron number 1 from transcript AT1G07870.1 (locus AT1G078 70) derived from phytozome v7.0 (chr-ID Chr1; pos 2431317 to 2431736 reverse strand)
tgataagcgagacgatcagactcagcccagttcaggtatcgagtgattttgactaatttcgttattctctcttctccacaagctctcttttggatttgttgatttttttttatcggatacttatgtttaggtttttctgtatctgttacatttgggagagacatttaatggagattttttgtgatttttccccggagaattttgatgcatgtgtactattcaccatataaacgatgttgggtttttgaaatcgagctagttttttttggttttgtctcctccatgaggggacaaagtgtcaaaattgagcctttggtatcttgccgtgtctgtttttggttaagtcacatgataactggtaatcgattttgttactcgttccatgtgttgtagattcaacaaaagtcagtccatatagag

SEQ ID NO: 375 - DNA, 595 bp, Arabidopsis thaliana
  Intron number 1 from transcript AT1G08800.2 (locus AT1G088 00) derived from phytozome v7.0 (chr-ID Chr1; pos 2817131 to 2817725 reverse strand)
atcaaaaggttagatttttctataacagcgcttatatttagttggatcatataaaatattgtgggtcttgatcgtatgattgatccatttagtatttcttctacacacaattctaattctgattttgttgagctgtcaattgttctttttagatctcttttcctttttgtggcaaacttttgatttagagtggtttaaaatctttgttggaatttatttttgcttcaattgctgacttgagataaatatttgatcttcctgtactctggagataaacactattaagaaggctaaataaaaacgtaagctttatcttgttttggtcaacttttctgttcttgcttctgtttgtcccaaatctgcaaatatcatttgtaaatcggattggattctggatattagttgtcttttctgcacgaatcaagtttgtttcattatctcaaatctctttatcaactttagtctcattatattttctgagtagaatcttgatgttattgattcaatatttttctcatatttttgtactctttactaattgtttgatgtgtatctacattgatgcagatttgaagcctgattgattcttgatctt

SEQ ID NO: 376 - DNA, 439 bp, Arabidopsis thaliana
  Intron number 1 from transcript AT1G09160.2 (locus AT1G091 60) derived from phytozome v7.0 (chr-ID Chr1; pos 2955080 to 2955518 reverse strand)
gatctgttgtgtatactactcgcgatttcattttggtgagtttattgactgcgaagaagcctcaattagtgttcttttactgattttgctattgctcgattctactttcgatacattttcctgcatctcaaaagatagccaattgttggagattctagaattctctagattagggttttcctctgcattttctctatatttttttatttgtttggttccattaaccaaaaagagtttatctttgagtaattccgtagaaacctcaaatttttggatgagaatcgaaatttagtaaagttggttaccattttgttctcatttttagggagatagattgttatagggttccttagtattatttattagaattgaaccctaaatgtttgcagcaactaaataattttgttttctgtgatgaacaaagaatttgttccagcca

SEQ ID NO: 377 - DNA, 564 bp, Arabidopsis thaliana
  Intron number 1 from transcript AT1G17455.2 (locus AT1G174 55) derived from phytozome v7.0 (chr-ID Chr1; pos 5997365 to 5997928)
ctcctatctgtcatcggagctttctacttccgaaggtaaggaaactggatcggaactcttttgaattctgtactgtgtatttgcttagggtttctgggtcttattgcattgttaaggattgcgaatcttatctgaatctgtgtctactactattgtgatgttttaaagctatttgtggaacagcttttacttgtccctttatagatctctttccctcttgggttcataagaacaaaatcctcttccctactttgtacgattcatgactattcagctgaatcgtgttgggttcttgtctgaatttgagtgttttaagattggattattactggaaatgtctgtactaatggaatcttatgtgagctttaaggattagagctctaaaatcaagatagggtcaggtcaacgcatagagaataaattgtgttattgtaactacttttctagtcaacgttttctgttaaattgaatccctttcttggctttgtttccatgtttttgacatgattgtattgaaacaggagtaaaggatcaatcaagagtttgatcttgttagaatagccg

SEQ ID NO: 378 - DNA, 556 bp, Arabidopsis thaliana
  Intron number 1 from transcript AT1G17455.1 (locus AT1G174 55) derived from phytozome v7.0 (chr-ID Chr1; pos 5997365 to 5997920)
ctcctatctgtcatcggagctttctacttccgaaggtaaggaaactggatcggaactcttttgaattctgtactgtgtatttgcttagggtttctgggtcttattgcattgttaaggattgcgaatcttatctgaatctgtgtctactactattgtgatgttttaaagctatttgtggaacagcttttacttgtccctttatagatctctttccctcttgggttcataagaacaaaatcctcttccctactttgtacgattcatgactattcagctgaatcgtgttgggttcttgtctgaatttgagtgttttaagattggattattactggaaatgtctgtactaatggaatcttatgtgagctttaaggattagagctctaaaatcaagatagggtcaggtcaacgcatagagaataaattgtgttattgtaactacttttctagtcaacgttttctgttaaattgaatccctttcttggctttgtttccatgtttttgacatgattgtattgaaacaggagtaaaggatcaatcaagagtttgatcttgttag

SEQ ID NO: 379 - DNA, 677 bp, Arabidopsis thaliana
  Intron number 1 from transcript AT1G20580.1 (locus AT1G205 80) derived from phytozome v7.0 (chr-ID Chr1; pos 7129103 to 7129779)
actgtcagctcgaggatattacttataccgccaaggtaatcaactgatactctgaagatctcgattcattttatatgagactgttttttgaaccataggtttcgtttcaatttcattgtttgatgttagtgctgttaaaaccctagatttggtgagctgggcaaatttgctgggaaattttagattgcttcttattttaagttctaagtgagattaagaatccttgaaattcatgctgtataaaaccctagaatgcgtgatcctgccagtgacattagataaattttgactgtagggtatagtctcctctgattggttaaacttattattgatctataggacacatcaataactgagaagaaaggttctacgtttgtgctttgtaacgttttatccaaagcctaagttgctctttaggaatacagtggtcaaatgtgaattatctgaagtatgcaggtcttaaagcgtcctcttatttgcggattattgtgccgtatgggttttgagtcaacctgtaattattgggaaaagaactacatgtagttctcaattcagaaagtcttaactctttaagtgttattcttcatagtatacataaataatctgtcaacttaatgggtttgtttgttaattgtcactgaacttttgttttgggttttccaatgctgtgttacagg

SEQ ID NO: 380 - DNA, 425 bp, Arabidopsis thaliana
  Intron number 1 from transcript AT1G23750.1 (locus AT1G237 50) derived from phytozome v7.0 (chr-ID Chr1; pos 8400213 to 8400637)
tttctcgttcgtctccgccttcgatttatccaaaggtaagctattgataaaaaaaactaaatccctgatatttgattttgaatctcttatactcatacattgctgttcatgtgttgttgtcttgatttcaaatctgcccagctttttgtaataatgatgcatgcactatgtttaatgcttgagttcgatttccctttgtttcgggttttgcctcattgttataactcggtcgaaagtcatctcctttacatgaaatttctgttgttaagattatatggaatgtccttcattgttctgctttctaattcttgtgtcaatcttatctaaatcttataaatcagcatttgcattagaagatttgatctattttaaattggttaagaagtgaaatgattgattgtcaatgcaggctcttgttattgaaa

SEQ ID NO: 381 - DNA, 344 bp, Arabidopsis thaliana
  Intron number 1 from transcript AT1G24160.2 (locus AT1G241 60) derived from phytozome v7.0 (chr-ID Chr1; pos 8555831 to 8556174 reverse strand)
tttggtttgtgggttatcttcacttttctggtaaggtttggatcattatttcacttttctcttagattctctctctccttctaagtgaagtttggtacttttcaatcattgatggaagatttggtctttctttttgtttcttcaattatttgaaagcttcttcattttttaagtacacactactgtctacaagaatctgagtttgctcactaagagggtttagagaattacaaaaaggagaaagtgaaagtagctactagatctttcttcaagatattaatggctatggtttgattcaaatttacttgattttgtgtgaattaaggttcttgtgctgagcatta

SEQ ID NO: 382 - DNA, 349 bp, Arabidopsis thaliana
  Intron number 1 from transcript AT1G24160.1 (locus AT1G241 60) derived from phytozome v7.0 (chr-ID Chr1; pos 8555831 to 8556179 reverse strand)
acaattttggtttgtgggttatcttcacttttctggtaaggtttggatcattatttcacttttctcttagattctctctctccttctaagtgaagtttggtacttttcaatcattgatggaagatttggtctttctttttgtttcttcaattatttgaaagcttcttcattttttaagtacacactactgtctacaagaatctgagtttgctcactaagagggtttagagaattacaaaaaggagaaagtgaaagtagctactagatctttcttcaagatattaatggctatggtttgattcaaatttacttgattttgtgtgaattaaggttcttgtgctgagcatta

SEQ ID NO: 383 - DNA, 511 bp, Arabidopsis thaliana
  Intron number 1 from transcript AT1G26850.2 (locus AT1G268 50) derived from phytozome v7.0 (chr-ID Chr1; pos 9303433 to 9303943 reverse strand)
atttttcccaccgacaacaatctctcggagtttgggtattattacttctctcatcaaccaattgtaccactagatctcccagattccttcattatctctgtatgttccttctttccgaccaatctatctctgttttgtcagatcgggcttacttttaaaaatctgttttgtttctcaatctgttaataactaatgacgttgtagtagttaaagactagtgttttgttgtagcttgttttattagatctctttcgttattcttacggaagatttgatttattgcttctctttcaagacaaagtttttatttttatgaatgtctctgttctagttttaataatataacagatttgagattctcttttgtctctttagtatatttgtcttgtttttgaactgttgttgttgttgttgttatgtctctatctacttattcaaatctaaagcttcactctcttttttttgcctcttgatctgatttggagctgatctgtgttttgttagatcaata

SEQ ID NO: 384 - DNA, 447 bp, Arabidopsis thaliana
  Intron number 1 from transcript AT1G26850.1 (locus AT1G268 50) derived from phytozome v7.0 (chr-ID Chr1; pos 9303433 to 9303879 reverse strand)
taccactagatctcccagattccttcattatctctgtatgttccttctttccgaccaatctatctctgttttgtcagatcgggcttacttttaaaaatctgttttgtttctcaatctgttaataactaatgacgttgtagtagttaaagactagtgttttgttgtagcttgttttattagatctctttcgttattcttacggaagatttgatttattgcttctctttcaagacaaagtttttatttttatgaatgtctctgttctagttttaataatataacagatttgagattctcttttgtctctttagtatatttgtcttgtttttgaactgttgttgttgttgttgttatgtctctatctacttattcaaatctaaagcttcactctcttttttttgcctcttgatctgatttggagctgatctgtgttttgttagatcaata

SEQ ID NO: 385 - DNA, 402 bp, Arabidopsis thaliana
  Intron number 2 from transcript AT1G30810.1 (locus AT1G308 10) derived from phytozome v7.0 (chr-ID Chr1; pos 10941103 to 10941504 reverse strand)
tggaaaatcctccattagaatctgagatcaaagaggtgagtttttcgatgtttaattcgtgtctcaatcgattaattactgtttttcttgtttgtttatggttaattactgaagattatgtaaccttgaatcaaaaacagtattgatgtttggtttttattcatcatagatttgtatagagtcttttgttttccggatctcgtttgtttacttgatttggcaaattacctaatcactgatcatagatcctcttcgtctttgaattatagactagttttgttgtttatgcttgatctttgtaacgctgattatagtttctaggtctgtttaatcaaacacatattcatatatttgttgttcttctctaaaaataaatttatgtgtgtttttaatatacaggat

SEQ ID NO: 386 - DNA, 535 bp, Arabidopsis thaliana
  Intron number 1 from transcript AT1G30810.1 (locus AT1G308 10) derived from phytozome v7.0 (chr-ID Chr1; pos 10941546 to 10942080 reverse strand)
cttcttcttctcgaaatctcagccgttcgtttgtggtaatctccttctcgacttttcctttttttttttaaacctcttttgtaattttgtagtaaataatatttttaagttccttatcgtggttaagttcggtttgttttgttttataatgtgttccttcttattcgtcgttactactaggtcaattaaatctctttcttaaattttcccagatttgggtatttctaactttaactgcgaattcaattcttatagcattaattgggccaaaacaaaagaaccaaaaaactttcaagctttttctcctttgataggtaaaaaaagattgattttcatgaatttaaatatctgtgatttttgatgttcttgttattgttcctctgtttgtgaattcaattagggttaggaactttttttttttttaacttctctttattttgatatatcgatatttgtttttgttgataacatcgttttcttatcttttttttttttctcagtttcattggctctcaatcgaagaaaacttttagct

SEQ ID NO: 387 - DNA, 662 bp, Arabidopsis thaliana
  Intron number 1 from transcript AT1G31650.1 (locus AT1G316 50) derived from phytozome v7.0 (chr-ID Chr1; pos 11329896 to 11330557 reverse strand)
tagatttttcctataagctcgcttcagaaattgaggtttgtgctcaaatttcttttacaatgtttcttcaaaatctatctcatgtttctcttagtgtagttctaggtcttgttgatctatgtatcagccaaatctttgttaggttctttggtttagggtttcattctttgtagttaaatctgtttaaaagatttcattttgagattagttaaagaactttgagattgttgcctttttaagtagctaaaggtcctctttatactaaaagttttacatcattactaatcctttccttaaaagttgtattagtaaccccattagaaaaaagctgattagtaccaaaaaaaaaaaggcacaagtgagtttcagtttttgttttgccttatcttcattgtacagttgaaaaaaagaattcttccttcttgtctctttgtgtatgattaataatattctaaaatggtgaagcatgattttgtcttcttccattgttcattgttgcatagtggttgttttgttgcatattagctgataatgaagaacaaacctaagtttaaaattttgattttgctgttagcttttttactttatgagttaaaaattattttaattgactttgactgtaaaatctttaatgtgtaattaattttctatgcagggacaag

SEQ ID NO: 388 - DNA, 674 bp, Arabidopsis thaliana
  Intron number 1 from transcript AT1G32090.1 (locus AT1G320 90) derived from phytozome v7.0 (chr-ID Chr1; pos 11543086 to 11543759 reverse strand)
gattctgctatcttccttaggatttacactctcgggtaagtattttatcttcttcttctcggaatttggttttgtcttacataaaaaacgaaactttttgagagtttgagttgtttgctagtaaaatctgttgagaagtcaatatctcgagaaaatgaaagaacaaaaaaatcgaaactttttcaatattgatagaaaaatgttgattattacagttgctctttatttttattgtcctacataattatttcactaagatttgattaatggttctcgagagaaaaattgttactttcgagaaaatttatgtttttttggttcttgttcttgtgggttttttgtgggattgattgtaatctccaagaacgaatttttacgagtgacaaattcccgaatttcacggttttaagaatctttactcgtgagaatgattgtactttattttaacaatataaagaatgtacagctaagtttcagatttgtctgctctgtattccacaaagacaaaagcaatagaagtttcgtttctgttcactgtttcgtgtttgtttcctgagaaaaagtcactctttagatatctttcttttttccccgggaaagttactgtaaaaatttatgtgagaatctgaataatttgttggtttgttggcagcttgaagatctttgcaccagtg

SEQ ID NO: 389 - DNA, 412 bp, Arabidopsis thaliana
  Intron number 1 from transcript AT1G33240.1 (locus AT1G332 40) derived from phytozome v7.0 (chr-ID Chr1; pos 12053626 to 12054037 reverse strand)
tttccaggtctctcttcctctcttctcttccattttcatcaatggtgtttcttgatagagatccatttgcatgtgttttttttttgttaactttttttttttagtgttaggtatatataaatagtaatatattcgagatcaaagcatcttcaccatccccaagaaaaattaaaagaactgtttgtttattacagaagttggttcatgagtttctgggacgttttcgattttgaaaatcccaagactctctttacttccaaaaaaaaaaaaaaaaaatccgatcgaacagtaaccataaaaattttccagctaataacgacaaccaaaaataaaataaaactagagaatctgaattattttcatgtttttggaaacaggaagctattggagttaggttacaaacgaagttcaa

SEQ ID NO: 390 - DNA, 501 bp, Arabidopsis thaliana
  Intron number 1 from transcript AT1G47278.1 (locus AT1G472 78) derived from phytozome v7.0 (chr-ID Chr1; pos 17330882 to 17331382)
catttctctcgtctcgtcgtctctcagaaatctttgtaagtgcttcgttccccatttctctctgattagattttgtgtttgttcgttttgcttcgattctgcgatttttgatttgcccaattagattcgatttcgttctatgttcggatctgagaccatttgtatgtttaattcttctttgattttggctttgatgttgattccgatcttgggtctttaagtgtgttcatcatttgttttatcttctcatatggtttctacaaacttctcaacgtcatagaaatgtataattgttagtgtttcgtgggttaatctcaatgttcttactttctcttgttgtttaaaggcctaggattgaatctgtcgacgaaaatgtgatatatgagtgtattcagggtaagggtagctttgtgggaaacttgatatgatgctgcagatttgatttactactgttttttttttttatggtttctggttctttagttagttgagagagctata

SEQ ID NO: 391 - DNA, 661 bp, Arabidopsis thaliana
  Intron number 1 from transcript AT1G47970.1 (locus AT1G479 70) derived from phytozome v7.0 (chr-ID Chr1; pos 17687694 to 17688354)
aggtaaaaaaaattttctgaatttatcaattttcgttcttttattggttgaattgttcacttaatttagggtttagtctctgagattgtagatctatgattttatgtgtctcaatttggtttaaattctactgataatgatagttaaagtgtgagtctgtgctaaagaaagactggatctgtttaacctaaacagaatctatgaacttttctggaaaaaatttgcttactgttactagaaatcgttctgttttatctccaattcagggtttatactttcttcccctaaataaacaagtgggttttgtttgtgtctctgttttgtttcttttgagtgaaccaataagattagaaagtgtttaagattttgaattctcatgttcctctttcaaagtttatacctttgtagtactgttttggttctatgagtgatccagttagatcagagtctttagattttgggttctcgtgttcttctttcaaagtttatatacctttgtggtccttgtctgaaaagggttcttgcagatggtaatagaaaaaggagttatcatagtcttctttgactctgttgtttgaatacttggtttaagctatgaaactgagatagttatttttggtttgtagggggatcttgggacagagtacttagtgaggccagt

SEQ ID NO: 392 - DNA, 596 bp, Arabidopsis thaliana
  Intron number 1 from transcript AT1G49880.1 (locus AT1G498 80) derived from phytozome v7.0 (chr-ID Chr1; pos 18464247 to 18464842)
caaacagttccagtcttcagaaacttcctctcaaggttcaaatctaattccggtttcaattagtttttcgtgtttgttttgacacttagcaaaatcttcccttgcttatcatcatcaccaacgtgttcgatgaaattccccaatgaactctttctacctttcctgggtcagaaatcgtctttctttcttattttaccaaacctgtggttgaaagttagatgctttattcaattcggttctctattgtcaggaaatttctactggtatatactgtttttatatgatgatttggagtttgtgtaactagccatgaaaaaatagctgtatcttgaataaggtttcattacgaaaagttttacctttaaggtctcattgaaacgggtttcaagtgttatacgacattttcatttcagcgatagattttgttgatatgaactatgtgtaacaattacatcaaactcactccatattatttacaggacattttcatttcagcgatggattttgttgatatgaattatgtgtaacaattacatcaaactcactccatattatttacaggacaagtctactggtcctgtgactaaagaggatct

SEQ ID NO: 393 - DNA, 784 bp, Arabidopsis thaliana
  Intron number 1 from transcript AT1G53440.1 (locus AT1G534 40) derived from phytozome v7.0 (chr-ID Chr1; pos 19946056 to 19946839)
aaggtttgtattaccttcctttttcttatatttacattgcaattaactttcttcaattttactctaatttctaagaaaattaattctatgcttccttcttgatttaaacaaaaagaaaacttaatcgaaagaaagttatcagttgttaaaagaaaaattatattttttggtgtggatattggtcgtcatcaataaatttgttgaatggtatgggtcatcatgaatcataagatccataaaattatctaatctattgtaggtcaatttgtaaatgcttgacttatttaaagatttgctagttctagtatatcatacataatttacacattccgatattatataatctttttacaataaaaaaattgattggtaacacaaaattcactactaattttggtatccggtagaagaagcggtaaatgatatcaaaataattaaaagtgataaaccgtagtaagagaatccaatagaaaagaaaaaagaaatgatgtttttggtactattttgatgattaaaacagtaagcccgtgtcttcttattaataattgtatttcaatacatgtgcaatttggccagttaggtcaaaaattttacttaaaagatcgatagagacgttgagacagaaatgttttttattgtatagtatttatctctcattcttattcattttgttggactttcattatttattatatcaaagttcttactttaattctcaaccgacaaattgtttgaccaattttgcacagttcaaacattgcgaacgatctttagaaagcttcaa

SEQ ID NO: 394 - DNA, 512 bp, Arabidopsis thaliana
  Intron number 1 from transcript AT1G59670.1 (locus AT1G596 70) derived from phytozome v7.0 (chr-ID Chr1; pos 21930357 to 21930868)
acaaggtcagttttttttgtgtcttttttttctgatgtccaacaaatttaatttatgagtgatcagtaatactttatgcaataaaattttgatatttttagcgagatactaataattatatcttattttttgaatgacaaaaacttattgtttatgcatatctaaattgttgaaaatttgaaattaaatggaccatgcaaatatgcaatatgaagtgtggaaaattcggcttaaaataattgaaatctagtcctttttcccattgtttcaacaaaaacagaactatttatttatcactctaaataatttgatggatgattgaaattggtcccaaatatcttcaatgagttttaaacttgatcattataaaatcaattaggatgttcctaccatgaaataatcaatattttatcaagaagaaaccattaagcttaattttgatttagaacaaatttgtatcacactattttcgctaattttccatttcaagaatgcagtggttaccgactttg

SEQ ID NO: 395 - DNA, 450 bp, Arabidopsis thaliana
  Intron number 1 from transcript AT1G60890.1 (locus AT1G608 90) derived from phytozome v7.0 (chr-ID Chr1; pos 22416594 to 22417043 reverse strand)
tccagttttcaaggagattcttaagctccatctctgtgagtcatcttctgcgaatcgacgcgattattggattgtttttgttttgaattttgctgtcggttcttcacatctatcgtattgtagctcgtaaagtcattttctgggatttgaactcgagatttctcagtttcctgctgagaattttagttcaaaacttcattgatttgttctctttctctctaattacttgtataattagttaattggaatagcttttgttatatttcgtttagttggtgatgggtgagttgcattgtgctcacaattgggtatttggtggtcaatctttggatttttatgtttgaatccactgattagctgtattgtttgaccttaattttggttaaaccctgattttaatttttctcttttccagtgacaggggtggatcattggtgaattcttgaggtc

SEQ ID NO: 396 - DNA, 455 bp, Arabidopsis thaliana
  Intron number 1 from transcript AT1G60970.1 (locus AT1G609 70) derived from phytozome v7.0 (chr-ID Chr1; pos 22448962 to 22449416 reverse strand)
ggcattctctgcagatttcttctccttaagccgtatgaatctatttttctaaacttcttttatttcagagatttcttctctgtttctattgcaccgatcattcctatgttttattatctgcgatattgtaatactttacatgcatgtgagaagtgacaaatttcagattttgtaattgttttcatctatagatacgatcgtcttaaatctttagtcatataaaaaatttgattgaagttacgcatgattttcagataatcactcattaggtgttagacaattgtggatagctaattgtactatatacagaaaagagattgttactgttcactgattcatgttctgttacatcttttggttggtgattttcaatatctcttaatctttattctattctgtgttttcattacttacatttaggaattgcccccaaaagtgaaaaacatcttgctttt

SEQ ID NO: 397 - DNA, 541 bp, Arabidopsis thaliana
  Intron number 2 from transcript AT1G61780.1 (locus AT1G617 80) derived from phytozome v7.0 (chr-ID Chr1; pos 22813096 to 22813636 reverse strand)
agaataagcttctctccaagaagaataggtatgcatttcttatgtttatccatcttcattttactacttttcattatttgaattgcaatatggaaatagtgattaatttgtagctttggggatgtttgtatcgtctagtttggtattggttttgtttcctgtagtttcttctaagaaatattggtattgtagtttcgtgtagtgtcttttttgagttgatccctccaggttcttctaaaaatcattagtaattatagaatttctcatggaaatagcgataaattttttaagtttgggatgtttgtattatctgttgagttgattaggctactggactcttgccatctagggtgtagaactccaccgcttcgctagtcctctaggttttaataagaatcattagtaaatgtacaacttctcatggaactagcgatatttgtaactgtgaatgtttgtgttgtcttttttgagttgagttattagttttgtttactcttgttctgcttctaattttctattgtgatatttctttgccttgtag

SEQ ID NO: 398 - DNA, 322 bp, Arabidopsis thaliana
  Intron number 1 from transcript AT1G61780.1 (locus AT1G617 80) derived from phytozome v7.0 (chr-ID Chr1; pos 22813692 to 22814013 reverse strand)
gtttgcgataagtgtaagtccatcaataatcttctctttgaattccatattctaattgaatcaatctatacttggatcggttttaattctaattgaatctatactattggcgttaggatttgtgattcgtttcgtttctagcttaatcgattacatgtttcaggaagaaatttaatgatctctgattcgattttggtttcttagatcgaaaccctagttgtaggatctctaatttagttcaaagtatgaaccttttgactcaatttgtttttatcttttaattttaggtgagaagaagttatcgaaagtgatagttcctgat

SEQ ID NO: 399 - DNA, 332 bp, Arabidopsis thaliana
  Intron number 1 from transcript AT1G67310.1 (locus AT1G673 10) derived from phytozome v7.0 (chr-ID Chr1; pos 25202727 to 25203058 reverse strand)
gaaccctcctgctaatccttcagattctttatttcgtcagtccatagtcaaattattacaccttcttttgtctctatcttctcttcttctttgtctatcgtactggtttagcaactcctgtctgtctcgagctccgatccttatctctcttccgaaccaaacttgatctcatgtttgtcttgatagattgacttactctacttcaattcgtcaccagtcgttatgcaatctggtgagttttgaggggtttcttcattttcctcgaaagcatcaaactttatgtatttcgatgactaagactacatttttcgtttttttcttcttctcagaat

SEQ ID NO: 400 - DNA, 466 bp, Arabidopsis thaliana
  Intron number 1 from transcript AT1G69960.1 (locus AT1G699 60) derived from phytozome v7.0 (chr-ID Chr1; pos 26349793 to 26350258 reverse strand)
ttggtgagagtctctctttaccttatagctttttttagggtttctacatttctcacatctcttgatttggatttgggtattttccctaatttggatttgattttgttgaccttttggggctaatgtagacttatttggaagtgtttactagaaatggatagattattgtttatctatcgaaaagttttggttttggaagattttgtcattgaaaagacgaaacttttgttttagctgttaactattctcagggcttctacaatggagtagcttgaccttgggagatataacattttaatgtagtttgtgaagcttcatgttcgagtactcggatttgtgtttctcttttctctgtttaagtgccttaagctccgtttcctacttaagttgctcaattagctaactaatggatcattgttaaacttgtgaagatcgagggtattattctgtggagacagtctcactt

SEQ ID NO: 401 - DNA, 390 bp, Arabidopsis thaliana
  Intron number 1 from transcript AT1G77700.1 (locus AT1G777 00) derived from phytozome v7.0 (chr-ID Chr1; pos 29204793 to 29205182)
attcattaattaggcctaatatatcagtaggtagatgaattgacccatgacatgaaggctaaaataatcaatatcaacaagattatccaaattcaataatagaagatacaaatagacagataaaaagccacatacagtatagatccttggccatttggactttgattaccttaacagcatcccaaagaatacttgcatgaaacatcaggaaacgaataacactaactaactctttcccatattccaaaacaaggaaccttaattatttgaaaacacatatagtactacaaccgattattataattgtaccgatagactctccatgcaagttattctttcttcctcccttaaaaagccagtctcacttcaagatcagaaaataacattaca

SEQ ID NO: 402 - DNA, 378 bp, Arabidopsis thaliana
  Intron number 1 from transcript AT1G79660.1 (locus AT1G796 60) derived from phytozome v7.0 (chr-ID Chr1; pos 29975913 to 29976290)
gtttcttttagcagctctttctctctcacccgaaggttcgttatctcttttcctgattcgatccgtttctttttatttattttgcgtcatgttttgagttttcttctgttggatcgtctaattcgttttagtttcgaataaaatggatgatccagatttactaagcttgtttataatcccacatgaaagattaatctcgtcttaaaattcgtcgacaaatcgtttgttttgaaatttggcaatgttacatgttttacatcccattgtttatctcgtatctgcaattttattttttgaagaagcttttggtttatgaactcaaaacttgtgtgtcatttttcaggttggtgttaagctggaaaggttggtcttttagaa

SEQ ID NO: 403 - DNA, 345 bp, Arabidopsis thaliana
  Intron number 1 from transcript AT1G80940.1 (locus AT1G809 40) derived from phytozome v7.0 (chr-ID Chr1; pos 30411039 to 30411383)
caccaagatcgcgtggaaatcaagaaaaagatcaggttttttccactgtttcttgttttctcagaccattaaagattctagacctttattagctaccctttctatttctggtctgaaagatttggaattttttttaagcatcaattgttttagctctatgtgaactatttcctcgagatctagacatggagctttagtcttcttctctctgtcttaagcttgtaaaatcaaagactttgtaactttcgttttgatctgatccgtttgcatgtgattttggaactcaaagcattaactattttgatcgcagcattgttgaacctagacaaagcaccggaggctgtt

SEQ ID NO: 404 - DNA, 507 bp, Arabidopsis thaliana
  Intron number 1 from transcript AT2G02800.1 (locus AT2G028 00) derived from phytozome v7.0 (chr-ID Chr2; pos 798686 t o 799192 reverse strand)
ctaattctggtaactttcttttaattttctccatacctctaaagtttcttcctttatccaaatttcgttgctgcgtaagtttctgtttttgaaaatttctccttattctctaagatggttaagattcgacttttaggcttttgttctttgtctgacatcttcaaaatcaaacctttcgaaataccaatttctgcttatgtctgatttctcttagtaattttggggttagatatggaaacatttggtgtttgaatctatatgttactccattatctcactatttgactgtttggattgttaaatcttcaatagttatcttaaatttggttttagattgttgaattggttaacgttgaggattgaaattcgaaatcaagttatgatcatgctttaagttagtaatcaatttttatagaattgttaagttagaaatcaatctgacatagatatttttatttgggatctcttttagcttcattgagctcaagagtttctagcaagacaagt

SEQ ID NO: 405 - DNA, 569 bp, Arabidopsis thaliana
  Intron number 2 from transcript AT2G05160.1 (locus AT2G051 60) derived from phytozome v7.0 (chr-ID Chr2; pos 1860932 to 1861500 reverse strand)
gaaaatcatttgctgacggataatttttcaccaaggtaaaattttcgtagatcctctctctaatcattggtgaatgttttgtttccatgtgaaaaaaaaaaaaacatttcttcttcaagacaaatgtagtttatcatgttcggttttttcaatacagttatgtacaaagatcattaactttgtttgcatttgtctgcattgtataagagattagaagattaatgttttttttttttttttttttttttgtgtgtggggtcaaactgttgtttttgattgtgtataattttgatttagatcttgctcattgttcttcttagccataacattgcagattttgttttctttgttttgacttacaatgcaatttttatttttttgggtaaagtatggaacatgtgggttcatgagtgagtatcactcttctacctctttttggtatcaacttgtagtttatgtaacttttgattcatatcgttttgactaaatcttttggaactaataataatgaaagtttgtgaatgattttgctttgcagagaagtttttaagataagaagttttttagag

SEQ ID NO: 406 - DNA, 420 bp, Arabidopsis thaliana
  Intron number 1 from transcript AT2G14850.1 (locus AT2G148 50) derived from phytozome v7.0 (chr-ID Chr2; pos 6385927 to 6386346)
caatttcgcggctaaatcaatcgcttcttctactggtacgtacttactctcttaattcatccttcaatcttcgatttacctttctgggtttcgttttcctcaagtcaatttcgattgatttcactgtttcttcgataaagcttcttaatactttataaacctcggatcttctcaaatctctcttccttcttcctagaatttgtccgaaattacgattcttcaccgactctttcagaaatttatgtttgattttactttcttagttagtcaatttgttcaacgtatttgctctagctcgctcaggttatctacctgaacttcttcttctcttacttcgatctcaagaattaatgtatgtctttgattttgaattggggttttttaggtcttggaattgagagaagagaccagtttcgctgg

SEQ ID NO: 407 - DNA, 495 bp, Arabidopsis thaliana
  Intron number 1 from transcript AT2G23060.1 (locus AT2G230 60) derived from phytozome v7.0 (chr-ID Chr2; pos 9813971 to 9814465 reverse strand)
ctggtaaattactcataacacctaaatcttaaaatatataaaaaaatacagttttctaaatttaagttgttaaccaaaatatattttatcactaattagtgagaaatcttatttcttttcataatgacgaagcaaatatacgaattattaacttacaaaaaaaagattgtgtttgtttatcaaaataaaaaatggtttgttttgttttgttttatagttaattaattaaaaaatgataagtgaaacgacattcaccttcttgcctcatgctggttacaactcaaaccgaagatattaaaaacccgtttctttatataaagagcaattacatgaactaactaacccaaaagctttattattattattattattattattattattaatattttattgttattattattgttaactattaaataaaaagaaggttttaacttaaaattggaatttgtaataggtggctgagattggtccgaaagagaagaaagagtt

SEQ ID NO: 408 - DNA, 729 bp, Arabidopsis thaliana
  Intron number 1 from transcript AT2G23810.1 (locus AT2G238 10) derived from phytozome v7.0 (chr-ID Chr2; pos 10136152 to 10136880 reverse strand)
atagtttctacaaggaacatcttactgctcttcaggtaaaaattttgactttgatgtgattttaaagttttgtaactttttttttagggtttttagtgaattgtgtgattgagaacttagaaagagattgagctttttgatcctttaaaagttctctttttgtgatctaagaacttttgattttgacttgaacacaaaagccttaccttgaacacaaagtttcaacctttttctaatttgagaatcatgaattatgaatctgacccatagacatatgttttagttttgaacttcgatgcatatcaatatgttgttctccttttgttaaggttttactgaattacctacaaaagtttgttgaattgctaacaaaaaattgttctaattcttgaaaaaagatttgacctttttgatccataaagttctcttttttagtgatctcttataaaaatccatttttctagtcaaaaactttactttttgattaaaagtttcaaccttttaaaactgagaatcattaaacatgagatccaggaccagattcttacttaagatgcaagcaattttgtaactaaagttctgctctgttcttagcacttttatatgaattttgtttgtttgatagtttctaaagctgaatctttgtgaacttttactctttcttaaggctataacgttaactaacgaatctttgttttgtgttacagtctggttgctgcaaaccttcag

SEQ ID NO: 409 - DNA, 461 bp, Arabidopsis thaliana
  Intron number 1 from transcript AT2G26140.1 (locus AT2G261 40) derived from phytozome v7.0 (chr-ID Chr2; pos 11134663 to 11135123 reverse strand)
gcttggaggcgcatcatcaccaaggtttttgtttcatttttctcttttcccctttatccaatttttaatacgaaaaaggtttcgactttggtttgatactgtagtggatttgatctaattagataataatttctgatgggttttatcaagatctttgtgattcataagctaaagatgatatttttcaaaccctagaagctcaaattcttctctgccctcaaaatgttgtcttttaggattctagattgtctctgtgatattgtcatttgatttatttgactacccaagtcacctaattttgaaattggtataaaaagtttcaatttttttgattcaaaatgggtaaaagtattcacttttatcaaaatgttttcatgtgttgtctagtgtcattttgagtttgggattagtaattaacttcatctgtattgattctcttcaccgatgacaggtttcgagtc

SEQ ID NO: 410 - DNA, 421 bp, Arabidopsis thaliana
  Intron number 1 from transcript AT2G26570.1 (locus AT2G265 70) derived from phytozome v7.0 (chr-ID Chr2; pos 11299144 to 11299564)
acctccgatcatcataatcctccggtaagacttctcttctcttcttgaatcttcttgatgcagcttttttttgtcggcatacaacttttgtatttttcatattttttttttctccagctgataaactcagaattcttgaaattcggaaacttttcatttttctttgaattgtaggaaattatcattgttcgtatttatcttcttaaaaaaacactattaaatcctggaattggtaattatttactcacgtttccgaatttgtttacacaaagatgaaaatccgatgatcttgattaaagtatgtttgattcttgtataccatatttgtttgattagagtaatttgatcatcaaagatgttttgtattcaattttttctcaattagtctttatgttttgtagcaatttcaggttacagggga

SEQ ID NO: 411 - DNA, 417 bp, Arabidopsis thaliana
  Intron number 1 from transcript AT2G26800.1 (locus AT2G268 00) derived from phytozome v7.0 (chr-ID Chr2; pos 11432186 to 11432602 reverse strand)
tcatcggaattaaacctccggaggaattaatcacggtaaatttcagactcttcgttatctcttacgctgatcgaattcaatagaatgttagggctgatcacaaagagcgatgatttttgcagcacgattctgttctaatcggagaacatttttcctaattttgtgaaattcatgttgaatttattgattttccggataattagtagagaatcgattttggaatttgaatgataatttgtggtatatttgaacatattttttgagcaatggacctgaccattttctccagagaactcaaactattgctgaaaaatgcaatggaatggggtgagacgagcccattctatatggtgcaagagattaacaaacaacactcatttgcatcatccttctattccagtctcacattttttcacc

SEQ ID NO: 412 - DNA, 389 bp, Arabidopsis thaliana
  Intron number 1 from transcript AT2G28540.2 (locus AT2G285 40) derived from phytozome v7.0 (chr-ID Chr2; pos 12218263 to 12218651)
cgactttcaatttctccaccaaattctctgtaaaggttaaagatttctactttcttttgagttcttagcctgattctttaaccttttcgttgtcattcgtcggaattttggagtggtcaaagtaataatctttatcacaattcaagctttttgagagttgattggttaaaattgtttctttttgtttttgcgagtttaatttagtttgagatttgtcttcactggtttctggttttgattagaagttgtttctccattgtttaaaaagtaaggagtaatgtgtagttgcagtagttttttttttttttataattgagaattgtggattatgttctgattctaatgattgtttaataatttgtttaattaaaatatatgattaggtgacg

SEQ ID NO: 413 - DNA, 507 bp, Arabidopsis thaliana
  Intron number 2 from transcript AT2G28540.2 (locus AT2G285 40) derived from phytozome v7.0 (chr-ID Chr2; pos 12218735 to 12219241)
tggttatcaggtttgatacattacaaccacttttcctcacaatgtggctctcttgtttgtttattgtcactgtttgagtagaatgtgtgttttggggtcttgtttatagtctgaaaccgttgggtgttgatacgtttcattaagggtattgcaatttgctatgggcagagttttttctcaccctattcttttgagtttaagcaccaaagaatctaagcttctgttaattctgtatgctgtatatattaacacatgcctctgtggagagttgtcttctgcttgaaaaggaccacgatgtgtagtctcagatttcgaattgttttataggttgtcccacattgtctataagcatcttgtgaatggaccttttcttataatcgatgtttaaagctgacattacccagccttatattgttgcctgttcatttatgtttgaattattcagtgtgccactgtggtgatctataagaaaccctttttatgtaaatacatgtactttgtgcagat

SEQ ID NO: 414 - DNA, 467 bp, Arabidopsis thaliana
  Intron number 1 from transcript AT2G28580.1 (locus AT2G285 80) derived from phytozome v7.0 (chr-ID Chr2; pos 12244888 to 12245354)
atccaggttcgagggaaacaaaatttatttatgtgtgttttcaaagtttttgatgtttttaacccaaaaaaaaaagtttttgttgtcgtcttctagttgttagtagtatcagttctgacttctgattatatgtaattcaaatctttaacctttatttcttcaatttaaacaacaaaaataaaatatctgaacattaaaaagagtatatatctatatatattatttggtatattggtataatatgtactttagtgctatttttctttattataagattttatttcatagagtacaaaatagtgttagttatttctaatgttttagaaacaatattttaactttatataaaattctattagtattatatatatatatataaatagttgttagctttatttacgatccatatatattaaaaacgtctcatttttctattcgtgttagtttagtcctcagaatctctagga

SEQ ID NO: 415 - DNA, 343 bp, Arabidopsis thaliana
  Intron number 1 from transcript AT2G28760.2 (locus AT2G287 60) derived from phytozome v7.0 (chr-ID Chr2; pos 12338643 to 12338985 reverse strand)
tcacttttcgttcatttgaagcttcattttttctggtagggatttttttttttttttttggtgtggcttagttaacaaattttgtgggactatcttcatgtttcatatgatttatttaaatttacatgcgtataaatattgattccagtgaatctcttaatgtcatcaagatcagaagacaatttttatttttcatcaagtttcttagatcatcaggttgattgatactctaatcagtgtgattgtgtatgtaaatgcatgtgtattattctgtttttggttttctaaatctcatgatgaatctgtgattagagtttattaaatttgattcaaaattgtagaa

SEQ ID NO: 416 - DNA, 273 bp, Arabidopsis thaliana
  Intron number 1 from transcript AT2G31200.1 (locus AT2G312 00) derived from phytozome v7.0 (chr-ID Chr2; pos 13294174 to 13294446)
tctttcagaggacttagcagggtaaaattacaaaaaaaaacttttctcttcttgcttaaaatcgatgtactcttgtctatgtcgcaagcatcttcaatgttaaaaatttgatttttatgaagtcgatgttaaaaaaaactaaacccatctccatttttactcttattgagggtttaagatcactagatgaagtcaattcgatgaattttggattaaaaatcgaatcttttggtatggttttgatatgtgttttggttttatatctgtagccaa

SEQ ID NO: 417 - DNA, 445 bp, Arabidopsis thaliana
  Intron number 1 from transcript AT2G34310.1 (locus AT2G343 10) derived from phytozome v7.0 (chr-ID Chr2; pos 14479271 to 14479715 reverse strand)
gtcgtactgtctttgttactgtttttggttttcgcttagaatttgtagttgctggatcgatatggattttggtgattctagttgctgtttacaggattttatgtctcaaatgggtttctggtgttaggtaaagtttcttcttttggtattatacaaaacgaagtgaatgatgctttggtcctactttatagggaatttttggtgggtggggatgaatctgatggggtattgagatttagccaatctctgtttaattattgttccaaagtttgtgactttactctaatcacatcatgtctgagttgtctctgtgttgcttctggatacttgcaagttgcaacaagtgctggatgttttttcctatcttttttagtaatcctctttgaatctgaagagtaagtcttttattgccctggatctataagtttactgaatatctcaggac

SEQ ID NO: 418 - DNA, 631 bp, Arabidopsis thaliana
  Intron number 1 from transcript AT2G36290.1 (locus AT2G362 90) derived from phytozome v7.0 (chr-ID Chr2; pos 15210127 to 15210757 reverse strand)
atcaacaaccgattccgccaggtctccttcctcaggtttgatcttttgtctcttccattataattacgcccattagattctgatatttctttttttttgtcacttacaaagaaaaaataccatatatgtggaaaattttctcaaaaatcgcagacgaagattccagttttgtacttcttgaatttcgttcaaaatagtaatcctagctttaaacacatacaaaaaaagttccagaattgggtcagctgatgtgaaatgaaatgattactgttgttgaactttagacaatgcattaaatgatggctttcaatcacataatcctagctttaaatttcgttttattagtaaagaaaaccaaatcaatccttgcccattttggtggaatttgattgtttttttttttaagttagatagtaagtataaacatgttacaggttcatgatttgcttatgttcggttttatgttgcaagaatatttgtttgaggaatcttaataagtgcccatgagtgagacttcacagcttgtttcttgcccttgaagatttcctttaagagacaggacaataatctctgtttgtctctaaatctgattacaggtgttctccaaaagctgttattactattctctgtc

SEQ ID NO: 419 - DNA, 762 bp, Arabidopsis thaliana
  Intron number 1 from transcript AT2G39480.1 (locus AT2G394 80) derived from phytozome v7.0 (chr-ID Chr2; pos 16483687 to 16484448 reverse strand)
atcagttcaatcgtctcctcgaggtaggtcagcttgaatacgcttctgtggcttttcaaaatttctaatttcctagctgagtgagcttcaggggatatggaatttggataatttattaggtgttggagctattgattcagtttagtatataatttagtgatgaaattttggaactttgtttctccttccgagctggattgtaattttagcgggttgccacattaaggttaagtctgttatctcgacaaactttgtggcactctttggtcataaatgtattagttcaagaagttaacatgagagtgtgaaatcctttgattgttttgctctatatctttgttggtttgttagtaggttttctgtttcatgattcctatgtgcttttgtttggaggactagttaagtataccagttttcatgtagtttttgcttctaagatggcatattaacctggaagctagctgttcttgacttagctgggaagcctactttgaatcatcaaacgtgttcttttactcaaatgcatgctcagaggaagacaacctatcttctaagtctatgctttcgtatttctcacctctagggatttctatgtatggtcttctgaatgtccatttttttattcgaggtcttatctgtttgcaaacctgtttatctggaatcttgaaacagtggcaacaatcctgaaataatgtgctcgtctaaattattgagtccctttgtgcagctttcgctgaccattgtatatatcgctggaggtgt

SEQ ID NO: 420 - DNA, 449 bp, Arabidopsis thaliana
  Intron number 2 from transcript AT2G40730.1 (locus AT2G407 30) derived from phytozome v7.0 (chr-ID Chr2; pos 16994960 to 16995408 reverse strand)
gtgtcaagcgccttcgtaccgtaagttctcattaatttatcacatggtttaggctcgattcatacaaacgagattcttttttctgattactgacataaacgtctattgagtactaagttgtaactctaagcacttggaaatcttattcatcaaactagtgtgtacggggaagtatgaagttgcaataaatttatataatccgtaattcattcctacttaagaattccctagttgaactgacacctgcataatttttgtttcttctgactgtcggacttgatggatataaatatcataaatatcaatgtacccttttgatttatctgaatgtcggaccttatggattcctttctcctcttgttagtatcattggcatcattctgttagattatcatcgactattttgttttgcaggtgaggcatccaaatattctttcatttctccacag

SEQ ID NO: 421 - DNA, 485 bp, Arabidopsis thaliana
  Intron number 1 from transcript AT2G40730.1 (locus AT2G407 30) derived from phytozome v7.0 (chr-ID Chr2; pos 16995487 to 16995971 reverse strand)
gagtcactttcgtggtacctccaaggttatttctcttttctcccctctctccggatgtttgtaattctgcgttttttttcttcctgttacttgctttgatcttagctcttctttctagtattttttttatcctgtttgttttatcgttatacttaggattttgagttctgcagattagctgtgtaatcgaattcggttctgtttagtgttgctttatgtcaaaacgaaatacgataccaaaggaaatgtaacgtgattcagaagctttaagatttttatgcttagtagctgtagtttaagaattaccaattcgaattattattgctcttggttcttccaatatgtgagtactctgagttttaagatttttggctttgttttattaagtttatgtcttttttctgcttttctgctttattggatctaatttcagatactgtaagttgtgatacaatcttatattctttactgttggtttcttcagg

SEQ ID NO: 422 - DNA, 511 bp, Arabidopsis thaliana
  Intron number 1 from transcript AT2G42670.1 (locus AT2G426 70) derived from phytozome v7.0 (chr-ID Chr2; pos 17773848 to 17774358 reverse strand)
ttccggatcttacgcaaccattactctcacctcaggtctattctagcttaatcattctcttctgtgtttgtattcaattccgtttggtttttgctctgttgcttgccgttttaactctcgacgcattcgttaatttgagaaaatcgaatctccgattttgagctcgaattttgtattgatttagattacatgtccttcatctgtgagattcttaagattagtggatggtaaatgctttaaaatttgctgattatatagctcaattcgattatatccagttttcaaaccgaaatggttaacgttttgatgttctgaatttgtatatgtgcgattcatttcccaagttcgagtaataatgatgcttttatgattcactgattatgtttggttccgaatcctctgtgcacgatgctcatccgagtcgcatttgattgagaataatttgttgaatcggtacatttttcttatatcaagcttgtttttacttttctttggcttgtttcaggcagaa

SEQ ID NO: 423 - DNA, 427 bp, Arabidopsis thaliana
  Intron number 1 from transcript AT2G42780.2 (locus AT2G427 80) derived from phytozome v7.0 (chr-ID Chr2; pos 17800610 to 17801036)
tcaatcttcgattcagctctcttttaatttttttggtaacctcctcctctgcatctactgttttcgatttggaaatagattggttcaattgtgaattggaattgagggtttgattgattggatcatctcaattcataaatcaaatcctttgaatttagatttagaaagctctagagtttatgaagatctgcatcgttcttatgagttatatgattgatggattttttagtgtaaaggaacctactttaatgatcaaagctaacgttttgtttaaattttgaggcaaaattcaaatttattcatatgaatattctcataagctgatgaattctgtatctttgtacattagtgatatagtctacttgtgtgtatccttgttaattcatatttaaagtgtgttttttcttgtaggttttgggaagctgct

SEQ ID NO: 424 - DNA, 579 bp, Arabidopsis thaliana
  Intron number 1 from transcript AT2G43040.1 (locus AT2G430 40) derived from phytozome v7.0 (chr-ID Chr2; pos 17898581 to 17899159 reverse strand)
atcgtaggtacgttagattcatttttccgaaattggctttttgatttttctgatcgaaacgatgcgaggttcaatttcatcattgttttgaaatctatgacttacaaaagtaatggcgttgacagatttgttcttaataaggacccacatttttgctgaattttggaacaaacattgttcttctttgatttcaaaacaagaattagaaaattcatttatcatgtaatctatttagctgatgtgacgatgaacagatcaaaggaatgtagtctcgaattgtttaaggttataatgattcctctaagtgaaaaaaaaaaaaaaagcagaaaaaaaagttagaaagatgacaaagttgaagatttctttttgtctttgaagcttctatttttttggtgggtcctttttaagacaatgatttcaattcttggattttgtctgaagaaaaatgttgctgttcttctctttacaatgtttttgattgtgagcttgcgttgacttaaatcatgtcatatattttggtttctcacggttttatttattgtgccaagtgatgcagttgctgctagttacggtggattg

SEQ ID NO: 425 - DNA, 496 bp, Arabidopsis thaliana
  Intron number 1 from transcript AT2G43920.1 (locus AT2G439 20) derived from phytozome v7.0 (chr-ID Chr2; pos 18190688 to 18191183 reverse strand)
agctgctacattccagccccaagttgttgcagaaggtgattgactataatatacgtcttatgttctacatgaaaaagttgtgaatatttgataaatgagtcgcactaagaaaaatcatttgcttaaatcttctgaacatataaactcagattctgttaaattaaatagattttaaactcaaaatcatttagtaaggactgaactgatcatgtcatttatatatgtatctctaaattacttcttatttaaagtgtgtttttatcttcaatactcaaaaaaatcgacattctgtttttcattttagattggatggtagaaaacaaaacaaagaggaatacatataatgtaaaatttctagaaagtaatactcgataaaatagttccacagctaatcatttttttcatgttcttgattggtttatcaatcaatataattagtatctctataatttaatttgtagaaaattttactgtaacttataaaatatataggcgg

SEQ ID NO: 426 - DNA, 524 bp, Arabidopsis thaliana
  Intron number 1 from transcript AT2G44970.1 (locus AT2G449 70) derived from phytozome v7.0 (chr-ID Chr2; pos 18551495 to 18552018 reverse strand)
tgtttcgttttgatcccacattcctaaagctccaggtaccttttctacgtttcccgaattctgattagttgattcttcttcctcaatccgttcttcccaaacttgttgccgatttttggatccggtcatcaactttgttgtttatttgtcatcaatgcaaaaattgagagcgtctgtgttttcacttgcatgttatcaattcctaatgttgtttgccgtttcattaaccggattcgagactcttcccgctggatttctttttttcacgtcttcttttctattttttatggatttggtattttgacatgttaagcaaccttcgttaatcagtttaaaatcggtgctttccgaaatttttagaagaaacatggaagcttaaaattttgaaattgctatttggaaaagctatcatttcataggcttagtctttgtaattcttctttacttgttgttcattggcatgaatatatgaaggattttatatttgattgtgtgtttgtttatgttgttagaaattgatcaaa

SEQ ID NO: 427 - DNA, 611 bp, Arabidopsis thaliana
  Intron number 1 from transcript AT2G45010.1 (locus AT2G450 10) derived from phytozome v7.0 (chr-ID Chr2; pos 18568148 to 18568758)
ttcctcaggtacgttagattctccctccctgcattactcttaacgcacgtttctagagaactccgatctcgtaattcctttagatctgtaccttaatcgatttgatggctttgataatctgtggtggtagagttcttgttgatcccgattgttgtttgtgtcgatctccacctctcgatgaggtcttagagatgaaatttttgtcctgtttgattgaggaatagtgtaactagtctctgttgatttgatttctttgatcaatcttgaatttctccgtgcattagatccttgtgatgtgatatagattctagtagtgcatatctgttgtgacatgaacatatagcgatttcttattggcaccactacctgttttaaagttttatgtatcaacactgattagtctagtctcatcaagcaactattaaaataagcctagagtactagtagtgtacgttcctttgagcttccttataagaatgtgtgatggaatcaagaaactagaatctttctctgaatttcttctgctctcactatggtagtcattgtagtgtggcgtcatgtattacaaccactctactgctttttctgtttttgaaattgtttacagttga

SEQ ID NO: 428 - DNA, 149 bp, Arabidopsis thaliana
  Intron number 1 from transcript AT2G46280.2 (locus AT2G462 80) derived from phytozome v7.0 (chr-ID Chr2; pos 19005394 to 19005542 reverse strand)
cttcctcgtcgtctctctcgtcttcaagtgaacaggtgaagaagaaagccgttttccgtaatcgtttcttcaattatttttcttgtcttttgattgattcgatttcgtatctgtttcaaagattcgcatcaaaccctaagaaactgaag

SEQ ID NO: 429 - DNA, 759 bp, Arabidopsis thaliana
  Intron number 1 from transcript AT2G46420.1 (locus AT2G464 20) derived from phytozome v7.0 (chr-ID Chr2; pos 19054031 to 19054789)
ttggattcgcttgtgacttgaatcttgaatattaggtgaaaccgccttggatcttctcgttgatctttgtcgtggacatttttttttgtaaagcttagtagattctctaatatttaattagagagtatctgttcgtgttattctttattgttagataatgattaatcactgcacacaatcttattgaattttcctgttgcttttctcggcttgaattctgaagaagtagttagagagatggctttgctatatactcttgctagatctgtttgatttcttagattcctgatttaacgatttccttctaatttgattatccaaaatctagaaatggtaaaagtttcttgagttaaggttcatttattttacatttgactgtagtttttttgtgtgatttagatgcagacaggaccatgttgtgttttggattacttgagagatttactatctcaatagttcatttcatcgtacataatttttttttgtgaacttgtttaataggaatgatgatgaactattcttgttttgtgtgtatagtttgaagatggtaactttatgaattaattatttattacttattagattctgcagttgcgtcttcttgattcctaataaacaatgttaaagaacacacttttcatgcttcctatcattagaagtgtcaaagatgctgctcttttttaatcatttttcttcttacctgctgtattaacaatttacgtatatccaggtttctatttggtcaacaacatcagaaac

SEQ ID NO: 430 - DNA, 558 bp, Arabidopsis thaliana
  Intron number 1 from transcript AT2G46550.2 (locus AT2G465 50) derived from phytozome v7.0 (chr-ID Chr2; pos 19113469 to 19114026 reverse strand)
ttttgggtttcgtctggtgttactctctccttctggttagttctttttttccgaattcttacaaattattgcggtttcattaagatgaattatgatttggatcaccatccgttgtttttgtgtccggttttgattcttaggtctaatcgcgtttcatgttttttttttgtgttcttctgggtttgataattttatagttgaagttttatgaaatttgatttcaattgcaaataatgatgatttgtttagtaagttgataaattgacaaagaatctggctttggtttttgtttgcttctaagaaaattaggaactaattcttcaatttacctggaaagcaaaacatatcagattctctaaaaagtagttttgtaataagcttttttggtgatggatctgtcggcaatcagaaagattcttcctttgaaataaatgattcatattatttttcctataaatagattcaaaacggttaataagattttgctaaatctacctaatttctaaatcacattgatcttgaattgaattctcagtctcttgtcttatctttagagtt

SEQ ID NO: 431 - DNA, 569 bp, Arabidopsis thaliana
  Intron number 1 from transcript AT2G46550.1 (locus AT2G465 50) derived from phytozome v7.0 (chr-ID Chr2; pos 19113458 to 19114026 reverse strand)
ttttgggtttcgtctggtgttactctctccttctggttagttctttttttccgaattcttacaaattattgcggtttcattaagatgaattatgatttggatcaccatccgttgtttttgtgtccggttttgattcttaggtctaatcgcgtttcatgttttttttttgtgttcttctgggtttgataattttatagttgaagttttatgaaatttgatttcaattgcaaataatgatgatttgtttagtaagttgataaattgacaaagaatctggctttggtttttgtttgcttctaagaaaattaggaactaattcttcaatttacctggaaagcaaaacatatcagattctctaaaaagtagttttgtaataagcttttttggtgatggatctgtcggcaatcagaaagattcttcctttgaaataaatgattcatattatttttcctataaatagattcaaaacggttaataagattttgctaaatctacctaatttctaaatcacattgatcttgaattgaattctcagtctcttgtcttatctttagagttatggtgaaata

SEQ ID NO: 432 - DNA, 156 bp, Arabidopsis thaliana
  Intron number 1 from transcript AT2G47060.3 (locus AT2G470 60) derived from phytozome v7.0 (chr-ID Chr2; pos 19334760 to 19334915 reverse strand)
ttccgtttcactccgtgttgttggatcccccaaaggtaaaacctttttccccagattatttctatttcgttcctctcttctcgatttcgactgattttccgtttttatgctcttctcttttccattttgaactccaattttgattctttaaagaaa

SEQ ID NO: 433 - DNA, 443 bp, Arabidopsis thaliana
  Intron number 1 from transcript AT3G02080.1 (locus AT3G020 80) derived from phytozome v7.0 (chr-ID Chr3; pos 364661 t o 365103 reverse strand)
cttctcatctcaagcgatctggcaaggttagtggataaagtctcttcttttttgtttgagtagaaatgttccaagctttatttgtatgtactcgaataaagatggattaagctcaaattgcaatgatttccattagttcatagatatttctgttgattgttggcatttctctataatactttgaattgtgtaatgtctgttgaatgtattgaaattttgtatatgttgctaatatttattgaatcacaagtgttactcttagtatttgttaatagacagcttaagattcaaatgcttgggattaatattgtgatttgctttgttacgtctgttgaattaatttacactagcaattacaatagcttgaatgtcaagctccactttttacaattgttttggttttcacgagaccataattgtttgtttcagatcgagcttcccac

SEQ ID NO: 434 - DNA, 410 bp, Arabidopsis thaliana
  Intron number 1 from transcript AT3G04590.1 (locus AT3G045 90) derived from phytozome v7.0 (chr-ID Chr3; pos 1240736 to 1241145 reverse strand)
cgggtcatccaagaaatctcagcttggttctgtcggtgggtttaatcttttcttcttttgaatcttatcgttggtcaatttgatatctaaagtttccaactttaaggtcaatgattaatctcccaattcttaaattttgattctttagctgttaattcgttggtgtgatttgagacgtaagtgccttgaattagcattatgtataatttacagcagtagatttacatcttgagtttcttaattacactgaagattgtgtagttagattcttgtttgtatagtttatcaatttgtttcttttttagatcccattgagtatctttcaagtgatcctttagttatattctggaatttgtgttatactctgagctttactacaagttttttgttggtgcagggaaaactggaca

SEQ ID NO: 435 - DNA, 467 bp, Arabidopsis thaliana
  Intron number 1 from transcript AT3G05160.2 (locus AT3G051 60) derived from phytozome v7.0 (chr-ID Chr3; pos 1456073 to 1456539 reverse strand)
gcacaagtatgtactttgttttttctttctttttcaatttagcttttgtaataaatatttaaataccctttaatcctaattgatcagactcttaacacacaagccaggtcgatatgaagaaaatgaaattgataatctatagtatgtagttacgtataaagacatcaatgataaataagatatagctttcgcaactggagataataggttcttctgtatctagttgtttcttgtggtccaacagttatgactacttcttatgagttatgagtagaaaaaaatggcttggaaaaatatattaagagacacatgcaagtacacactacattgagagaaaatactatatttagcattgcattttgtcaggaacaacttagcattttgatgaagtaagtgtgcttcacaaattttcatatatatttttttttccagttttcagcgtttggttcctttttgaacttgggagg

SEQ ID NO: 436 - DNA, 407 bp, Arabidopsis thaliana
  Intron number 1 from transcript AT3G05560.2 (locus AT3G055 60) derived from phytozome v7.0 (chr-ID Chr3; pos 1614234 to 1614640)
cttcagagaatttcaccttctagggtttgttcaaggtacacgctgctactatctccctttaatggaacgggcttcagtttctgatatagtagattcgatagacttgtctctcgagatgtgaagatggaatgagaagaaacgagtttttagcttcatttcctcttggattagcttcatttttcatctacttagagtgtaattgactatgttagattgaaagtcgaatctgcgatacagatctcacttcccattttccaggttttgagttagtcatagtagctagaaaatggcttataaagtatatagagaatataggcttctttatttgtatcagtatgatttgtcaatgatctatagacacagtcttatggattgttttttggattttacagagaagtcttgggaaa

SEQ ID NO: 437 - DNA, 407 bp, Arabidopsis thaliana; identical to SEQ ID NO: 436
  Intron number 1 from transcript AT3G05560.1 (locus AT3G055 60) derived from phytozome v7.0 (chr-ID Chr3; pos 1614234 to 1614640)

SEQ ID NO: 438 - DNA, 454 bp, Arabidopsis thaliana
  Intron number 1 from transcript AT3G12560.1 (locus AT3G125 60) derived from phytozome v7.0 (chr-ID Chr3; pos 3984864 to 3985317 reverse strand)
ttcgcgatcgtgatcaagaaactggtggctgataggtgagttttttcatcgcaattgacttgttcacttaccgatctgtaaaattcttggggttttgggtggtttttgatcctttgactctgatccggttttcaaatttccattaaatttctttggcgggtcgaaataatttgttcgagatctgatcaggttactgtttcttttcatcttgtctcgaatcttataattgaatttgtaagcagcttctagcatttgagtcttgttcaattttaccaacgcttttccatttgcgtgatccatttcttgtttcagtgtctttcttacatcaaaggctcggatttggtcgtgttgatctgatctaaattggtgtttactgtttatgattcttgttgctactttctgattctttacagtgttctgttctgttctgttttgtttttgtgttgctagtgat

SEQ ID NO: 439 - DNA, 358 bp, Arabidopsis thaliana
  Intron number 1 from transcript AT3G13030.1 (locus AT3G130 30) derived from phytozome v7.0 (chr-ID Chr3; pos 4171629 to 4171986 reverse strand)
tttcgtcgtcgctttgactggcttggactcgcttggtggggttttctgtaaaaaagttgtttgctttgatcttctgtgttacaatggagaaaatttctctgaatgatgatgaatagtttcgataataatttatatgggtctaccatttcgtttgctagttgtttgagcattactatatagctggtttttcgtcatagtagagattaaagtttcgttttttcctctctttctccatcggcattaatgatttcaatctctgagatcaagttagtgaattctctgtcacattaaaggccattcaaaattcgattttgatgcttgttcctgatttttgtaacagctgattgagaagcgaaaa

SEQ ID NO: 440 - DNA, 517 bp, Arabidopsis thaliana
  Intron number 1 from transcript AT3G15810.1 (locus AT3G158 10) derived from phytozome v7.0 (chr-ID Chr3; pos 5348430 to 5348946 reverse strand)
cgaccgggaagtgtctccttaccgttaaacgaaaggtaaacttaattcatcctttttttcttcttaaaattatgttgggatgagtaagagtctagtcgtgagggtgactagctaggtgattataataaattttgatgctcaacttcttgtgctgaatttgattagatgggtttggtttaaaaaatgaatttcattggtgagcatccatcagaattcaagaatcttttgctaacctcttttttttgtcaagaaaatcttgataagttttttgtattggtaaacaaataatgacttggctagaatcgataaaaatcattgttagaaacgagatctgaagaaattgttttgagctgaaaattttaatcaactttttgtataagcctaattccgagtcatcgactcagttgctaacacaatttatagtgtcctttatttgttatatagtagttctaaagatgatactgagtcaactcgttgtttatttttctgatgaacagagaccaactctacaccaaag

SEQ ID NO: 441 - DNA, 300 bp, Arabidopsis thaliana
  Intron number 1 from transcript AT3G16170.1 (locus AT3G161 70) derived from phytozome v7.0 (chr-ID Chr3; pos 5476190 to 5476489)
tgggtttcgattcttccaatctaaccatctcttctgtaagttttcttctttacctttgtttggtttttgcatgttacatgttcgacgaaatgtcttaaagattcgtgctttccatatagtaacattgatgatccgtaaaaacctgaacaagttgttgttttgatctgaatttatattgaaaattttgcagcatctccaaggaactcaatctgttctttttttgtacatgtagtttctatatattaatctgaattttatctatgtaatcaaaatgttgcagcttcacagtctggttcactc

SEQ ID NO: 442 - DNA, 353 bp, Arabidopsis thaliana
  Intron number 1 from transcript AT3G17150.1 (locus AT3G171 50) derived from phytozome v7.0 (chr-ID Chr3; pos 5847440 to 5847792)
tcttgatcctagaagcaagaactcaaatttacgaggtgagatcaaaaaaatcttagattacgttttttttttcttcttccataaggataatctaccaacaatttcaaaaactaaacagaaaacacgaacaataattcgtacaaaaaaggaaaactgacgaaatgactttgctatatttgacatgtttaacgcaaattttaatcggtgaagttgttgttaccagaaaaaaaaaatgtttaagcaaattttgtcattgtctactattccctcataataaaacttacgtcaaaatactaaaatgtatatttgtttatttttttctttcatgatagagcttgcgtggatctctatcg

SEQ ID NO: 443 - DNA, 746 bp, Arabidopsis thaliana
  Intron number 1 from transcript AT3G18820.1 (locus AT3G188 20) derived from phytozome v7.0 (chr-ID Chr3; pos 6484284 to 6485029)
accctcctcaaggtcatcatcctcggtgatagcgggttaggtttctcttaacatactattttttcttatgtgattttgagtttttgggtggtttcgttttccgggtttatgagatttatctcggattttgtttaaatcgttttcttttgaagtttaaatttgatatcatttgttaatcttttagatgacttttgttgaattttgttgtctttgttttggtttgtaaacactcaaaattgatctgcttttaattaaaggtttcatggtggtgttgtttgttgttgttgatccaagtatcagatattttcttctgtaaaaaattcaaaattgaagaattgagatgacatcatagtctcatcaaacattgacgcttgtaacttgagttcactataccacgatttatttgtctgtagattgtttagagttaatttgatgtttaatgattacttgttgtttctccaaacttgcttatgatctgatgtttggtttcttattaacattttgcatgttcttgtctgcatctgatttgtgggtactgagtttgtgcttgacattcaagatcatgttggttttgttatgcattcgttttgactctttttttttttttgtttctctctgttgttacgtcctgaagcagaaaatgtttgtgttatgtcatgactacatgaaattggtgtctttacttgagtgaaactaattttgacttctctgacttgtggttttgtagggtgggaaaaacctctttg

SEQ ID NO: 444 - DNA, 630 bp, Arabidopsis thaliana
  Intron number 1 from transcript AT3G19820.2 (locus AT3G198 20) derived from phytozome v7.0 (chr-ID Chr3; pos 6881617 to 6882246 reverse strand)
atcctctcactctctctctcctttggattcttcaggtactctctctacctctctttctctctctgtctcagtcgctgacttatcatttcctgtcgttagatctctcagtacttggttcatagttgtttcatagcacgcactagtgaactatgtgggttttttaattttaatcatctcagtcttggagaatttcaaacaaagtttcaaactttgctcaccaacttttatttatttattttggtggtagaaaacagactttgatggctttgtaggaatactagatgtgtagatctaaagattataaccattttctgtgttcttgttctttcagaacataacttcatgtctttttgtctctctgttcactagctctctgtttccatggactccacactatcttcttcttacagatttatttcatacacatacactgatacacatgtgtgtatacgtatgtgtttatgtgtgcttattatactctttttggattcaagaaactaatctttagtatttttgacattctggtagatttatgctcacttcttaggccttgttgacttttacagtgatggattttgaaactctggttgatttgattttctttttggtttgatgcagtgaggagaggaa

SEQ ID NO: 445 - DNA, 505 bp, Arabidopsis thaliana
  Intron number 1 from transcript AT3G19820.3 (locus AT3G198 20) derived from phytozome v7.0 (chr-ID Chr3; pos 6881617 to 6882121 reverse strand)
tttcatagcacgcactagtgaactatgtgggttttttaattttaatcatctcagtcttggagaatttcaaacaaagtttcaaactttgctcaccaacttttatttatttattttggtggtagaaaacagactttgatggctttgtaggaatactagatgtgtagatctaaagattataaccattttctgtgttcttgttctttcagaacataacttcatgtctttttgtctctctgttcactagctctctgtttccatggactccacactatcttcttcttacagatttatttcatacacatacactgatacacatgtgtgtatacgtatgtgtttatgtgtgcttattatactctttttggattcaagaaactaatctttagtatttttgacattctggtagatttatgctcacttcttaggccttgttgacttttacagtgatggattttgaaactctggttgatttgattttctttttggtttgatgcagtgaggagaggaa

SEQ ID NO: 446 - DNA, 417 bp, Arabidopsis thaliana
  Intron number 1 from transcript AT3G23410.1 (locus AT3G234 10) derived from phytozome v7.0 (chr-ID Chr3; pos 8383035 to 8383451)
caacttctgggtctaaaactcctgtccttcgccaggttcacacactttttctttatattcatcaaatgatctgtttttttaacaaaatgctaaagttttgacactttcaaacaaaaaaacacaaatcaagaacgtgtgatatttgaagatttgttttgatttgttcgattagttaaaaggattcgtattgatcgagttccaataaaatccttgtggttctcttttgacttctatagaccttttaaatgacaaaaatatctagctctttttgtttttttaacgtgaatattattagtctaggtttcggtctaaaattaattgcggttattaaaaagaccttaaggttttgagtaaaaagtgaaagatttgttaatggatgcagagcattgagctggtcacgaaacgagggacaataga

SEQ ID NO: 447 - DNA, 531 bp, Arabidopsis thaliana
  Intron number 5 from transcript AT3G24170.2 (locus AT3G241 70) derived from phytozome v7.0 (chr-ID Chr3; pos 8732854 to 8733384 reverse strand)
gaagaagcttttgcaaaagaaggtatgcaggaattgctataatgcttacgtattcttatttttcagtaattgagtgaaatatttcttgatacacttgcaccagttgctcgaagttatcccaatgaaatcagcttattgtaaaacgattagcgttgtagctttctccttgacactgtaatatcttcctttgatctttaagttgtgaagaaattatggttgaaactatttcaagaaagtgacctttaggttaatatttttggatgttttggttgtaatagcagtatagtgtcttggatttctcacaatgagaaactactaaaactctgggatgtataagcattgatatttttccgcaacctactgaagatacttatattattgttttgtcaagtatgaaagttagatggtggggaatggttttttgctgctatagttttttctagtgtgctcagtagattggatatttttgcgatgtaactaattcggtcataaataatcaattactgtctttaattccttctgtgcagactg

SEQ ID NO: 448 - DNA, 447 bp, Arabidopsis thaliana
  Intron number 1 from transcript AT3G24170.3 (locus AT3G241 70) derived from phytozome v7.0 (chr-ID Chr3; pos 8734116 to 8734562 reverse strand)
gtagggagcactaagttggtatacataaaggtattgatcaatctaaaaaactcaatggtttaattatattaatgactttagcctaaaaaaacttaagtcagtgtaaaacaatatcgatgtgtgattaagaagagatccaatttaacattacccacacaatcatttgattatttcctcctctccgtatctgtgtctctcttctcttgatcttttagtgttcttgctttgtcgcttcaacgcttaaggtaacactgcttcttctttgatattcgcgattcatcgaacgatttcatcattatagacaaacatcctatcgatcgggtttgtttttgctgattcgagattcactgtttgttagtttcatttcgttattttgcttcatgtggtgttgattgattattcgattttcttttttggcagtttggatttgtgtgagtctgcataatc

SEQ ID NO: 449 - DNA, 237 bp, Arabidopsis thaliana
  Intron number 1 from transcript AT3G24170.1 (locus AT3G241 70) derived from phytozome v7.0 (chr-ID Chr3; pos 8734116 to 8734352 reverse strand)
tttagtgttcttgctttgtcgcttcaacgcttaaggtaacactgcttcttctttgatattcgcgattcatcgaacgatttcatcattatagacaaacatcctatcgatcgggtttgtttttgctgattcgagattcactgtttgttagtttcatttcgttattttgcttcatgtggtgttgattgattattcgattttcttttttggcagtttggatttgtgtgagtctgcataatc

SEQ ID NO: 450 - DNA, 430 bp, Arabidopsis thaliana
  Intron number 1 from transcript AT3G25520.1 (locus AT3G255 20) derived from phytozome v7.0 (chr-ID Chr3; pos 9270927 to 9271356 reverse strand)
gcaaagcctctcgttgctagaggaatcaaacagtaaaccctagctttaatctctatctcttctcatttctcaatcgtttcttcttaatcttctcttaagaaaatcgggttttgatcttcatttcatatagaaatctcctgcattgcttttgattagatatcgtaacgagaattcgtgatcctatggttctatccaccttcgtagatgtttttcttcatgggtttttggttttataacttgcttgagaattgaaataggaaaagtttgagactttgcttttgttctgttttagaggtcactgatacgtattcaatggagttcttaccgtagatctttgttaccatcgaagaacctttatattgttggatcttagactaataaaataagatgatttgttgttggtaggtgtttgtgaagtccaccaagtcga

SEQ ID NO: 451 - DNA, 390 bp, Arabidopsis thaliana
  Intron number 1 from transcript AT3G25585.2 (locus AT3G255 85) derived from phytozome v7.0 (chr-ID Chr3; pos 9295464 to 9295853)
acgtcgtcttcggctttgtagcatctcgccgaagcgtcgtaagttctcttcttctctaacctctttgcccttgagaatcttagatcgaatctgctcctcctttactggaatctaacatctttaaaaagtcgagtttcgttatactcctccaatcgcttctccaagttcgtgtatgttgttgaatttgaaggaattttttttttttgtaaaaaataaaagtcttgtctttttcagatgggtcatgtcgatttcgtgtttattgctttagggtatttgaaaagtcgtcgtctttgaacaaaagattgaacctttaatgacattcttggtctgtttgttgtttttgatctttgaacaggttgatttgagagagacccaatttggattgttaga

SEQ ID NO: 452 - DNA, 387 bp, Arabidopsis thaliana
  Intron number 1 from transcript AT3G25585.1 (locus AT3G255 85) derived from phytozome v7.0 (chr-ID Chr3; pos 9295467 to 9295853)
tcgtcttcggctttgtagcatctcgccgaagcgtcgtaagttctcttcttctctaacctctttgcccttgagaatcttagatcgaatctgctcctcctttactggaatctaacatctttaaaaagtcgagtttcgttatactcctccaatcgcttctccaagttcgtgtatgttgttgaatttgaaggaattttttttttttgtaaaaaataaaagtcttgtctttttcagatgggtcatgtcgatttcgtgtttattgctttagggtatttgaaaagtcgtcgtctttgaacaaaagattgaacctttaatgacattcttggtctgtttgttgtttttgatctttgaacaggttgatttgagagagacccaatttggattgttaga

SEQ ID NO: 453 - DNA, 421 bp, Arabidopsis thaliana
  Intron number 1 from transcript AT3G46560.1 (locus AT3G465 60) derived from phytozome v7.0 (chr-ID Chr3; pos 17138701 to 17139121)
atcgatcagcttcagctccgtgataggttcgtcacttagatcggtttctctgtttttcatttaggattctcccaaaaaaattgacttttagctccttgaaatctttgttcttatagttcaaagctaattagatttgctttagaatattgattcaaggttagtgtgtacttatttctggctaattatagatctttgggtccttatggttcattgataaacaaaagtttggattagagttagtgaaattgttctttaagatgtaactgtgttgtctcattttgtgtgttgttgtcaaaactcacaaaatcttcacattatttaggttgtaacaacttatgcaatgcctattgttgttttgtgtttaggccttaactttggctacttttgttgagttttgtttttggtgaatttcagtttgagg

SEQ ID NO: 454 - DNA, 858 bp, Arabidopsis thaliana
  Intron number 1 from transcript AT3G48410.1 (locus AT3G484 10) derived from phytozome v7.0 (chr-ID Chr3; pos 17927187 to 17928044 reverse strand)
caccagaaacaacactcaacaaagttcttcttctggtaactaaaaaatctcggttatgtttttttcatctttcttatgttcttgtttatgttcgatctcacttttgcaataaaatctgagactatctctcttttgctaagctgagaataattatggaagttgaaaaaagacatctatctttaactgatgtgtagagctcacaatttcttgcttggatgggatgattgatggaattagatcagaacgctagtcttgtttgttcgctaattgtttgttcatttaacattttagtccaaattgaaccaaaccaatcggttagttttgatcggaccaaatttgattttgacaaaaactgtaattgattttacaaatgtaaacagagaatcatttcagtttcgattcagatattttagttcagttcaattcattaaagttgatacggtttcttggtaacaccaacttagactttaaagcatgggtagtgctctatgcatctttttaagtaaataaatatatttgggatgtcagaagaaaagaagtaatactttttggttaaaactagaataatgtgtgtgtttttttttacctttttaataaaaaatttctgtatagttttcacagagttatccccttttgtctttgaataatctcatgttatgaaattaattctctaatcataatttcataaaccaatgaattaattaaagagtcaaaattctcgtaacaaatatatatattaataaaaccgcttaatgggctggtctaatgggccgaaaacggtttactaaatggtcttagaagacttgtttcttcaattatgaaggttatctgaaaacgcttctcctggtaacgttcgtc

SEQ ID NO: 455 - DNA, 528 bp, Arabidopsis thaliana
  Intron number 1 from transcript AT3G53750.1 (locus AT3G537 50) derived from phytozome v7.0 (chr-ID Chr3; pos 19915396 to 19915923)
cctgccgagagaacgattttaatctattttcctcggtaatgttatagcctaatttgtgtttttttctttttcctgatccggatatcgttattctgattgacaattgtcagtttcatcttctattctgtgaaattttgatttttttccgatctgtgatttcgtcattgtatcagcgtgcttatatgcgtttgaggcgtaaatgagtgtgtacctcatttatcatttgctatgttttttttttttaacagagatcttcagctgtaatattataatagattgaattgataacgtgattctggatctggaatatatatatgtcacattcttcttaggatttgattttgtctctctttggatattaatattcttcactcccttgaaaatgaatctgtttattataatgtttagatatattccttaccggcatttgttttagcataaatatgaaacatagcattgactgatttgtctttttattattcttgtttttttgccaaattggtctcatgtttttgcagagagtagaaa

SEQ ID NO: 456 - DNA, 451 bp, Arabidopsis thaliana
  Intron number 1 from transcript AT3G54880.1 (locus AT3G548 80) derived from phytozome v7.0 (chr-ID Chr3; pos 20337985 to 20338435 reverse strand)
ctaccaaattttctgttgatactttcctcattaaggtaatcattcctctatcctctacttttcttatgtagcaaactttctctttctatcatgaattttggtttctccttagaatctttttggatcttgaatgcttctgatctgttttatttggatctttaaaaatatattcttcaccggaaatgccattgttttaatctcaatacatttcttaaggagatagaactagttctttgattgaaaaatctctgttttgttgccttagagatgaatgaagattttaatgaatgtaaacccaatgcgttaaaaaaggaaagatgtttttttttcttcttttgctatgagtttggtgtatatggtttgaatctttctttcataacgtattgttttctgagaaatctggtatgttttgttttcttgaatcttctagggttttccacatagctgattg

SEQ ID NO: 457 - DNA, 363 bp, Arabidopsis thaliana
  Intron number 1 from transcript AT3G55440.1 (locus AT3G554 40) derived from phytozome v7.0 (chr-ID Chr3; pos 20553832 to 20554194)
tgtaagtgatctttaccttctattgcgcaccttattattagtcttgtcacttgatccttccccgatcaagtcaaagagatcggaaaatcccgatcttaagatctaaggtttttttcattatttgtagcggtggaatttgaattgtaatgcatatggttcagatttgtcgattctatgccggatcttagttgtttttttttgtcaaaattttgagtaggaatttttcttcaattgatatctcgtgttctagctttggtggatccgtgtgttaattttgttggttaaactattttaacatgttaatatttgaatttgtaatcttatatagaacggaactgctgaggaggtgaagaagattgtgaa

SEQ ID NO: 458 - DNA, 439 bp, Arabidopsis thaliana
  Intron number 1 from transcript AT3G55980.1 (locus AT3G559 80) derived from phytozome v7.0 (chr-ID Chr3; pos 20776418 to 20776856)
aaaacattccaactttcttctcaatttcattccaggtttgtgccctttcttcttgaatcttcttctatggaacttccaatttcgtctacttatgggcttaatttggtttacaagtcttgctatttctagaaaactcgtcttatcttgagtttcttggacagaaattcttgagtttcttgatttatctttgacttgtttcttgaaaaaaaaaaggaaaaaattttggttggaatatttcaacggagaagagtagaaacggtcgttggcttgtcttagtagaaagtagtttactttttttatatccgcaaaaattgcggcttcaaattctgcttcagaagactcttagaaaatggaaaaagttacaaacaaagaataatatttattttctgtcagtttttctgatcatcaattacttttcttgaatctacaggatagtatt

SEQ ID NO: 459 - DNA, 490 bp, Arabidopsis thaliana
  Intron number 1 from transcript AT3G56240.1 (locus AT3G562 40) derived from phytozome v7.0 (chr-ID Chr3; pos 20863910 to 20864399 reverse strand)
gctcaggtaattttgtgactttgatattcttcttctttttttctccatttcttggccatgaaacgatggaataatgtttttgagagacattgatctggaagcaggaatgtctttttgtgtccatctccaaaaaagatgctagcaattgtctatatatatcggttatgagagtccgattaatcagtttttatgataataaatattttggaatgaattaatatcaaatttcaagagggaagaaaagagattgattggtctaggtctaggttctatctgtaagtactataatgtccgattagcaccactttgaaatattcatcaaaaaaggtaaatattattaagctagagcacaaaagataacagttaataattgtgataaaattagctgttgatatatttggaccgaattggtcctatgtatatggatatggttcttacattttcggattaaattgtctaattaatgcagaccgttgtcctcaaagttggt

SEQ ID NO: 460 - DNA, 755 bp, Arabidopsis thaliana
  Intron number 1 from transcript AT3G61700.1 (locus AT3G617 00) derived from phytozome v7.0 (chr-ID Chr3; pos 22835534 to 22836288)
ggttcgttcttcaaaggcttcagggtcgcgggaaggtgagattcgattggatcttttttgttgttgtttagtttgttcctctcctcattgtatatatatatatatatatatatatatatctaaacttttctgcttttttgattttattacaatattatttttcaaagtttctgttcatgtgggttttttttgttctttgttcttcttctgtttttatttttttaagaattatattactctctcttttattcatcaatctccggcaatttccctcaatctggagttgatgaactcactcaaactctgttccacgttctttacaatcaatgatttcaaattctgaaaatcaaagcttgttttgttgtttcataaatggcaaaaagattctggaattaggtttcacacatactgcagtttgttctttatctgggatttttgtttaggttttggttttgtgtttaacttttttcttatgaaatagtttttttttaattagatagattctgtagagtgcttacttgggatctgaaaccttattaaacaatgtttgagagactcacttttcatgattttttgattaattaaactaatcactgtggaaaatgctttcactttatactactactattctcttctttttagcttcctaatatattttattgctttgattgtttgttgacttgtgctactactagtactgtagaaaaactaactatggccatcggctaactggttttcttttgttattcaggttt

SEQ ID NO: 461 - DNA, 306 bp, Arabidopsis thaliana
  Intron number 1 from transcript AT4G04320.2 (locus AT4G043 20) derived from phytozome v7.0 (chr-ID Chr4; pos 2113614 to 2113919)
acaatccctccaaattttccctctctcaatttcctgtaagcttttctttttctctgtttgaattttttggataattttgcgattctgtccaaattcacacaatttgtaatcatgggcaatgaaaagtttacatcttttgatgaaaaagagagagagagagtgagaaattggctatggctttaatcggagcttgaatgtttttaagaagataagaatataataaggctaatttgactctataataatggtttgttgactttgttgtcagaaggaaattcaatctaatcctcaagagaatcattctag

SEQ ID NO: 462 - DNA, 303 bp, Arabidopsis thaliana
  Intron number 1 from transcript AT4G04320.1 (locus AT4G043 20) derived from phytozome v7.0 (chr-ID Chr4; pos 2113614 to 2113916)
acaatccctccaaattttccctctctcaatttcctgtaagcttttctttttctctgtttgaattttttggataattttgcgattctgtccaaattcacacaatttgtaatcatgggcaatgaaaagtttacatcttttgatgaaaaagagagagagagagtgagaaattggctatggctttaatcggagcttgaatgtttttaagaagataagaatataataaggctaatttgactctataataatggtttgttgactttgttgtcagaaggaaattcaatctaatcctcaagagaatcattc

SEQ ID NO: 463 - DNA, 696 bp, Arabidopsis thaliana
  Intron number 1 from transcript AT4G09900.1 (locus AT4G099 00) derived from phytozome v7.0 (chr-ID Chr4; pos 6223006 to 6223701 reverse strand)
gaacactctctgactcattttctaataacaagcaggtccaagctttttgatagtaatgataaagtttggatttttaaactttgaggagagaattcaaaagtatttataaaggttttaaatttgatattgttcttaaaagtggttgggaccaaaagaacagaataagtgttcttaaaaggtcttgtagtgcgttttgctttttaaaatgtttatatagtgttgttgtcatattactttatgggtctgtctagttttgattagaacaaagatggagaaaagaagcttctttgttggagaaggcagtgaactttgttcgtgtaaatattacttctttgtaattgagactgcctatgactatgagaaaccaggtctctagagatcagtacacaatttatgttttgactttactgatgctagtatctttttatcgtttgttgagtgttgttctcaaatgatagttattgtcttattaccctacgggcctgtcttgttgtggttagaacaaagagtgagaaaagaagcttctttatggttattgaaagcagaggactttgttcgaacactcgagaatttgttcatgattgttcctgtcacacataattgtcattgctttttatgttcagttttacttatgctagttaatttttttttatctctttaggttcctgagtttttggagagcttgaaggttaagaa

SEQ ID NO: 464 - DNA, 454 bp, Arabidopsis thaliana
  Intron number 1 from transcript AT4G12040.1 (locus AT4G120 40) derived from phytozome v7.0 (chr-ID Chr4; pos 7214887 to 7215340)
ttttggcaaaggtctcatttgatccgacttttctggtaatttttttccctttattgtttgtttttccaacagatctgaacatttttgttacgattaatcaaatttctgtgttcttaaattggatttggggaaattttgagtagcgagatagatcttatcaaagctgggttaaatcgaatttttgtttatagaaaagctgggtttagatcgaaatgaatcatttttgattatatagaagctgtgttttattggaatttgatcaattttgattgtatcgaagctgcgttaaatcgaaatgattgattatattgaagctgggtttgatcgaattgaatcggttatttgattatcatgttatgaattgaagacaaccttaaaaaatgagtcttctggtgtcagatgataaattgtttttgttgtttgtttagttgaaggtgaaatagatacaaaaaaa

SEQ ID NO: 465 - DNA, 460 bp, Arabidopsis thaliana
  Intron number 1 from transcript AT4G14147.2 (locus AT4G141 47) derived from phytozome v7.0 (chr-ID Chr4; pos 8156292 to 8156751 reverse strand)
gatctctcctctcacgagtctccaagtcgtccaaggtatgcaatttgttcacgaccaaggttttagggcttttgatttgtctgattgattcctagggatctaatttgatttccctttctcacattttccaaaagtttcagactttcagtagattggcttatttctctaagtgggtctctcaataatcatgatcttgttgttgcttcgagttgattacatagaaactctagtctccgggatcttgctgttacttgattgttattttgttctcttcttatcttaaacatttgagagtgttttgttttcttgtagacattttgatcctaaagttgctttcttattgacgtttagtataaaaaagttggtaacctaaattctatgaaactaaagatgctttcttgtttatgtttggattattttttcagctcataaagattcatcgagaagaaagataaaatcc

SEQ ID NO: 466 - DNA, 452 bp, Arabidopsis thaliana
  Intron number 1 from transcript AT4G14147.1 (locus AT4G141 47) derived from phytozome v7.0 (chr-ID Chr4; pos 8156300 to 8156751 reverse strand)
gatctctcctctcacgagtctccaagtcgtccaaggtatgcaatttgttcacgaccaaggttttagggcttttgatttgtctgattgattcctagggatctaatttgatttccctttctcacattttccaaaagtttcagactttcagtagattggcttatttctctaagtgggtctctcaataatcatgatcttgttgttgcttcgagttgattacatagaaactctagtctccgggatcttgctgttacttgattgttattttgttctcttcttatcttaaacatttgagagtgttttgttttcttgtagacattttgatcctaaagttgctttcttattgacgtttagtataaaaaagttggtaacctaaattctatgaaactaaagatgctttcttgtttatgtttggattattttttcagctcataaagattcatcgagaagaaaga

SEQ ID NO: 467 - DNA, 359 bp, Arabidopsis thaliana
  Intron number 1 from transcript AT4G14220.1 (locus AT4G142 20) derived from phytozome v7.0 (chr-ID Chr4; pos 8196157 to 8196515)
gtctcgagcctttcaccctccaggatccttccactgtcagattcttttaatcctctctctttttgtttttgtctataagctcttcggggtttaacgatctccttctcgcttttatttcgcttttacttgaaatctgggataatcggattttgtgccttgcgatattttgactcagattaataacgagatcgtttgattaactcgatcacttgttcttgaaccatcgttgaacatgtttgattgatcctctcgctttctcattttggtcctattgaatctaacataaacatcttctattgttgtttcttctccgatatctaaagctttccgatggttttctcaggtcaccagctgcaaac

SEQ ID NO: 468 - DNA, 536 bp, Arabidopsis thaliana
  Intron number 1 from transcript AT4G14746.1 (locus AT4G147 46) derived from phytozome v7.0 (chr-ID Chr4; pos 8463717 to 8464252 reverse strand)
cgatttcctttctcctcttttcgctcctgtgtgtatgtcccttcctcttcctcactttttcctgaattgtttttctcatatttgatattggtgggatcgtttaatccaaatcttgatttattgttaattgaagttaagttcctctagtttttcattgatgtatttaacttctttgaaacaatgattatctcattagcaaaaataaacaaggataatctgtttaaatactaaactttatttaggaagaacaaaacttgattatgtgtccaagaatagacatgtaacttgattatgtcaagattagggttaaactcccgccgaaatttgaactagagatgtaataagaggacatacttttttttcgtgacagaattaaagtatctttatgagttggtttttgagtaaaaagtgatcttctttgaagggtccttctcaaatttccaatttagtagattgtgactcatcaagtatttttttgttaatgatttaaagttggttgatacaattattgtggggaaaaaaaacacagataatat

SEQ ID NO: 469 - DNA, 424 bp, Arabidopsis thaliana
  Intron number 1 from transcript AT4G17486.2 (locus AT4G174 86) derived from phytozome v7.0 (chr-ID Chr4; pos 9751243 to 9751666 reverse strand)
ctctcccaaccaatcccattctgctcgactctcatgtaagctccgtttccttcgtcttcctcgtctctctcgatctctcttgctcgattgttgtacatgaaaacgcacgcgcccaatttcaattatgtttcgtggctttcctgatttgaaattcgagcgattggatagatttttcttttagaggattagatttttgattgtatgtgtaattgctactgtgtgaatcgaatccttggatctgttctcgttagtcgccaaagaagaagttgtatacatgtttgattgtttatgttcgaattgcttgaattccaattattttgatctaagttatggaacatttgattgttacttttggtgtttatatgatgaatatgaccatcagttttttttttttttagtgttgcagaggtttaggaagaaagga

SEQ ID NO: 470 - DNA, 276 bp, Arabidopsis thaliana
  Intron number 1 from transcript AT4G17670.1 (locus AT4G176 70) derived from phytozome v7.0 (chr-ID Chr4; pos 9834103 to 9834378 reverse strand)
tacaggtacttcctttgttctagatcttattttctttttgaaacatacccagattatcatttgctatgtaagctaagaaatttgattactgtaacgattaggttttggtttgcttaataaagttttgatattttagtcaacaaaagaagaaaccctaattctgatttgccttgtggattaagaatcgtgtatgatctatataatttgtgtctgatgatttcaaatgtttgtgttaaaacagaggagacacaccgttctgtagtgaagagtgtagag

SEQ ID NO: 471 - DNA, 511 bp, Arabidopsis thaliana
  Intron number 1 from transcript AT4G18550.1 (locus AT4G185 50) derived from phytozome v7.0 (chr-ID Chr4; pos 10226138 to 10226648 reverse strand)
ctagcatctactctagaaaagacttcttcgccaaggtaacattaaaaaaaaaatacttataaacgttctgattgataatctctagaaccgagaaacatggatttttttcttgtcaacatgaatgattttgtaattctgtacgtttttctggtcattgctgaagtaatttatgttttatagaaaaatcaaatcatttatgcaatattgaaatgtaaaaaaaaaaaatacaaaaatatatatcgaggatggaatgaaataatttaattaaaaagagcacaaaaatgataatttatgatttcattaagcacatatactatatttcattcagtcaacttttcttttaagattatagtattccgtaatgtcaccaatcgaagtaaaataaatatttatttcttagcaaaactaaagggagaaggtactttcttgtaaagcaagaaacctaaatcgcatttttgtaaattcttaaaacacaggttggtttagagatagcacacccgtacacaaagta

SEQ ID NO: 472 - DNA, 467 bp, Arabidopsis thaliana
  Intron number 1 from transcript AT4G21160.1 (locus AT4G211 60) derived from phytozome v7.0 (chr-ID Chr4; pos 11284201 to 11284667)
agaacatatctctctctctctctctcctcaccttggtaagaacgtccaatccaatctataaatctccttgatggaatttccgtacatattacttgttcctttctgatctcttcttcatcggttttatgtttcatcgagtttgaatatttctttgtaagtcttttcctgtcggttatgttttcgtcgttgaaatggtttcaggaattaacaaagatcagatttttggcctttttttctcttctaaatttgaatttcgattttgggaacacgaatcgatgatgctgatgatctacaaatgggtattgaaaacgatttgttcatggttattctgcggtcgtggtttccccaaaaaagtttggtttttaaatttgcaaagcagagtttgatctctcatttaacaataccatgttctaaccatattgtgcgtgatgggtgatttctttggtctgtgaaggattctctgtttg

SEQ ID NO: 473 - DNA, 522 bp, Arabidopsis thaliana
  Intron number 1 from transcript AT4G21450.2 (locus AT4G214 50) derived from phytozome v7.0 (chr-ID Chr4; pos 11426459 to 11426980)
gaagcttgatccttctgagaaactctattttccttgtgagcttttttcgaatctcattttgatcggagtagtttctctggaattacagtctttttttcattgtctagggtttgtttctgaagatttgagatccattgacactagtctaaaatttctatcttttagtagaatttgagtatttgactgatctgattatgtggattgatacataagtttgataattgactcaataggaaacataaagtttgaaactttttggaagttaagagcagaatcttgacattggattataattctaacttaccattactctaaatatggtcttcctttaagcattctgaaattaggagtcttttatagatacgaatgattttagctatcaaatgattttgcaggaaggttttggtgtatacttaggccatgttttttttttcttcatgatttggattttggaagtttagttgttttctgttacaagtaatgctgtggagtactgaattagattattactttgttttgaag

SEQ ID NO: 474 - DNA, 393 bp, Arabidopsis thaliana
  Intron number 2 from transcript AT4G21450.3 (locus AT4G214 50) derived from phytozome v7.0 (chr-ID Chr4; pos 11426588 to 11426980)
atccattgacactagtctaaaatttctatcttttagtagaatttgagtatttgactgatctgattatgtggattgatacataagtttgataattgactcaataggaaacataaagtttgaaactttttggaagttaagagcagaatcttgacattggattataattctaacttaccattactctaaatatggtcttcctttaagcattctgaaattaggagtcttttatagatacgaatgattttagctatcaaatgattttgcaggaaggttttggtgtatacttaggccatgttttttttttcttcatgatttggattttggaagtttagttgttttctgttacaagtaatgctgtggagtactgaattagattattactttgttttgaag

SEQ ID NO: 475 - DNA, 360 bp, Arabidopsis thaliana
  Intron number 1 from transcript AT4G23910.1 (locus AT4G239 10) derived from phytozome v7.0 (chr-ID Chr4; pos 12426695 to 12427054)
tcgttttctcttgcaaggttcttacttcataattcgtaagagtttcctcctttcttgacgagtcctgatataggttttgattcgtgttcaattgaattgttagggtttagtgcttctcagggattcggggaacatatacttaattgttttcatttcatgcttggattaaatttctttatcttccctggattcgattcttcctttatcttctatcttttgactctcttgactaatttctcactattgtaacggagttttgtttgatttgtgtcaaatttttaaagaacagtgtataatttcttacatatcgtataaaagtttgtgtttttttcggtaaaagaatttgctttgtttgtgcag

SEQ ID NO: 476 - DNA, 1029 bp, Arabidopsis thaliana
  Intron number 5 from transcript AT4G23910.1 (locus AT4G239 10) derived from phytozome v7.0 (chr-ID Chr4; pos 12427715 to 12428743)
actagtgccaatcagtcaaggtctagaatgctggataactctctgacctgtttgttaatctgaagtccttatagtatcttcgattgtgtctgattcaagaagcttcttttctaagctcctggtcactagatgactgcatagctatacagatttatgtagttgagtttatgatgatgcttgaaggagtcagttcatattttgggattggagatttgggtagaagaaaacaattcagaacgttaaggttgagcataaactttgctgatgagtggctagggtgtttttctcaagactgggttggcctttgatatgaccttgggtggttatggctaggttgagcataaactttgcttttggttgaagttggtgtttttagttattgtcagagtaacaagtcaagcaatctgatactgtgcttggcctttgattttacctcagtggattcatgaaactcatttgcattcattcagtctcctaggtgttatgtttcatcttcttgctacatcctgaagattatagcttcctctctgaggttgtgacactgtcttggtaaatacctgttactgggaaaagagtcagactcaggatcttcgtcaatatacattaattgttacttcgttgtacttcgggtcatctctcgagctactctcttagtcattgataagttgctttgtcggaacaaatgccatcttttggtctgttgaccaggagatctgtcaagagcatgcactttttctgtctagtttaattggaatttggagttgtgtcagtgtcttggcgcttttaacactgggaagtgaagtgttgcatccttataatgccatccttctttgttacttggataactggatttcgcttagatccttctatgtatgaagaggttcagcttttgttgctaacaactcgataacagatcattttatctgttgatgccagtaccgtctgtacgtcttttctcggttcctcagcacttcttctttgtttttttgtgcaggcttattgctccaccagttcaaaatatatctgtac

SEQ ID NO: 477 - DNA, 378 bp, Arabidopsis thaliana
  Intron number 1 from transcript AT4G23910.2 (locus AT4G239 10) derived from phytozome v7.0 (chr-ID Chr4; pos 12426677 to 12427054)
cttcgtcgctttccctaatcgttttctcttgcaaggttcttacttcataattcgtaagagtttcctcctttcttgacgagtcctgatataggttttgattcgtgttcaattgaattgttagggtttagtgcttctcagggattcggggaacatatacttaattgttttcatttcatgcttggattaaatttctttatcttccctggattcgattcttcctttatcttctatcttttgactctcttgactaatttctcactattgtaacggagttttgtttgatttgtgtcaaatttttaaagaacagtgtataatttcttacatatcgtataaaagtttgtgtttttttcggtaaaagaatttgctttgtttgtgcag

SEQ ID NO: 478 - DNA, 799 bp, Arabidopsis thaliana
  Intron number 2 from transcript AT4G25100.2 (locus AT4G251 00) derived from phytozome v7.0 (chr-ID Chr4; pos 12885678 to 12886476 reverse strand)
caaactacgtcctcaagccacctccattcgcactggtactttcttatgataaagattgatattgtcggcaaatgtcattttgttttcgttggactatagattttgcttttctattactagatgatataacttgttgctcccacaaagccctaaaaatatcttttcatcctcgtcaaaggcgttacaaatgattttcagctattattaacggaaaaccaataccaaaaaggcgttacaaatgaactcctctaattcatatttgaagaaaataaaaatcgaatcaatctacgcattagtgtttttcccggaaattaattgtaggaacgggtcaagttgggtggtccatattgggtaaaggccgtgaatgttctagttggtacgtactatccgacatttgtcaaatgggaaatttgggtatggccataggggttaggtatgggtcaacatatctgaaatgattttgaaaccatagctttcatagaacattgattcttaattgaccctcaattgaactagtgaaaatttgttgtttttgtatacaaaaactatctcaatctgacccgttactcaaactacactaaactgtccaaatcatattactttgtaagaaaattgttacgttgtgtaatgtcaatgttagattcataaatctttaactagtatatgaccactcctagttcaaattcagatgttccttggtctgatattttcgttccttctagtggacctattggttgagtcatgagtgagagcaatagccaatatgatgaaatgtttttttgatataaaattggaaagg

SEQ ID NO: 479 - DNA, 277 bp, Arabidopsis thaliana
  Intron number 1 from transcript AT4G26910.1 (locus AT4G269 10) derived from phytozome v7.0 (chr-ID Chr4; pos 13522890 to 13523166 reverse strand)
tttgattagtccttctgggtttccacagccttgaggtttgatttttttattttcgatctttcttgattcatttttgttttcggtagcgagaaaatatctgaatcggaaaaaacatatgaatctgagttttgttctttggtttgaaagttcttcaaatataatttagctgacaaactatagatgaggatgaaaaaatccttcctttttgatttttaatcattttgctgatcaattgttccgacctgtgttcttcaaaaaaaacagagattcggaacca

SEQ ID NO: 480 - DNA, 421 bp, Arabidopsis thaliana
  Intron number 1 from transcript AT4G26965.2 (locus AT4G269 65) derived from phytozome v7.0 (chr-ID Chr4; pos 13539810 to 13540230)
gaggagattgacggattcggcgagtattgttcttccaacctcttatttccttaaaaaatctttttttttgtttgatttatgttggaatttggttattgcgtgaaatttatgtatctcttaaatttgtcaagttgctgaatttctttggttttctccgtacgatttgatgaatcagctgtctttgcatatcgcgagttgcagtgaagcaaatggatttagaaaaattaatatcgtattgttttaaagaacattgtctgcttcttttcatacatgaaaagattcagctaagtgtgatcatgtaaaatgaaactaacagaggttatttagatgatcaaaacgaatattaagactcttgtagaatccatttgtagagtaatatattctgatgtgcttctttctactatccagtgaaggagaaaag

SEQ ID NO: 481 - DNA, 421 bp, Arabidopsis thaliana; identical to SEQ ID NO: 480
  Intron number 1 from transcript AT4G26965.1 (locus AT4G269 65) derived from phytozome v7.0 (chr-ID Chr4; pos 13539810 to 13540230)

SEQ ID NO: 482 - DNA, 407 bp, Arabidopsis thaliana
  Intron number 1 from transcript AT4G30340.1 (locus AT4G303 40) derived from phytozome v7.0 (chr-ID Chr4; pos 14840178 to 14840584 reverse strand)
actgaagaacaggtctgttttttaaaaaacaaaaactttttttttgtttgcaacttatgaaatgagctcactttacttaacttttgaaatgaacttgagatcatatttttgtttgaagaagattttaaatcttgatttgggagtttactttctttttgacttcactagatttgtggttagattgtgaatggaaacactctgttttggtttaatgagtataactatgagcctatggcattcttattgttctgacatcatcaaatgttctgttttttttttctctgtaattttgtttagaagaagttataaactgttttgtcttaaaaagactgtgattcctccttagttagtgagctcatgttaatatttgcaatgacaggtatttgatctcacagaagtgaagcctc

SEQ ID NO: 483 - DNA, 689 bp, Arabidopsis thaliana
  Intron number 1 from transcript AT4G37310.1 (locus AT4G373 10) derived from phytozome v7.0 (chr-ID Chr4; pos 17557670 to 17558358 reverse strand)
agcttcacgatttatctgtcgaacgcccggctaaagtaggttcatcataccttaaaatcttatattatatttaattcattgaaatgtttaaaccacacaatatgtatatgatattttatacttatataggtatgagaaaattaactggaaaacaaattcaactgccgttatataatcatatgttttcacgttgcattttttgtttatatttttttatagattgtcaaatttaagacaataaatagcttacactacgaataaaattttgagaaaacatgaaattcaggtaattaataatattttaagaaaaaaataactacatagaatccatgaattgataaacaatgattttttatttttttattttaaaagctttaaccttgttaaaaatcgttgattacatatggatacatgatagaactaaatttgctcgatttagtaagtggatcaaacagttcatcttctttccgttgctatcaatatcaaattatagaaactagaaagtactatctatccttaaacgtctcttagtttttttttttttttttaatgtatcttaggttacataataacaaaatgtgataatggctcgtaaaccagttaatatcaaatcataacaaaataagaacttcattttaattttttgttatctaggtggagttacgacagttactaacgggtcttaccct

SEQ ID NO: 484 - DNA, 766 bp, Arabidopsis thaliana
  Intron number 1 from transcript AT4G39060.1 (locus AT4G390 60) derived from phytozome v7.0 (chr-ID Chr4; pos 18202610 to 18203375)
gtattttggtttttgatttctcaacgaagaagaagaaacgagagttggagtatttatcagcaaacgctccattgaaaaaaaaggaaattgtctcctttattatgttttgcgaagaaaaggaaattgatcaaggtaacaaaaagtcaaattaagttaccgttacaagaataaatatgtttcttctgtaatttatatgatgtttaaaatttagagcgattgttgaaagagatggaaacatcaacaaaacaagccttgtaaagtaacacaaatctataaaagtcaaacctagtcatctattagcataatgctcggaacagaatgaaaaatatgccactagcacaatcttactcaatcatatatagttgttcttactatttttatttgttattgctctgagtagagcgagagagtagagtccactttcattttcagtcgtaatcgtttctttgattttcaacacacattgtaattattagttaatatttatgttaatttgattagaagtttttaatacatgtcaagatctaataaatcaaatatatacctaatatagttaccaaaaagaaaagttaagaaaaaatatatatatatatatatatatatatatattcatgattagtatatataaatatactttaaaaaaatagtttttctatttcgagaattatatatatatatatatatatatcccttatttctattttatatataggttttattattaaagaaccctagtcgtgtattttcttaacaacaatttagctac

SEQ ID NO: 485 - DNA, 611 bp, Arabidopsis thaliana
  Intron number 1 from transcript AT4G39210.1 (locus AT4G392 10) derived from phytozome v7.0 (chr-ID Chr4; pos 18259721 to 18260331)
acattaaccaaaaccagagaactacgaattattcggtgagttctctcattgatacgatcctcttctatatatctccgtgttcttctagcttgaaagcattttaaaagtttttacttttggaggtttcacattctctccctgaacgattttgctttattttgttcagcttcggttctcgtcgaatcttctgtttctctgtcgattcattgatctgaaaatctaaaaatggattcattctgatttaacttttatcttgttcaaactcatttatgatcccaaatttgttcgtttcattctttataaattagaatccttttttgttcttgtggcaattatcttcctccttttctctgttttgaaagatttgttacctgcagaagttaattccattgatttcttgaagatgcagtatctcttgctacttaaaagagttagattttttgtctgatacgttaaaattatgagaggctcgttcgttctttaatctgtgtggtcaaagtttcctactttccgagaatttctttattgttgtgttgttcactttgcatttataatagtttttactaacgagctttacgattctgttcttgtctcattccagctaaaaaaag

SEQ ID NO: 486 - DNA, 551 bp, Arabidopsis thaliana
  Intron number 1 from transcript AT4G39350.1 (locus AT4G393 50) derived from phytozome v7.0 (chr-ID Chr4; pos 18297148 to 18297698)
agagtgccagagtaagaataacttttgtatgaatttgtgacgaaaaaagtttaattttttctctttctttgggatctagattatgagaatctagatggaatattttgatctgaaattggaagtttctagggagtaatgccgcaacccacatgttctgttttttcttttttcttttcttcaagtagtgttgcatgattcatacgtgtcggcagagatgtcctgagaaccgaattcaatgttgtagcagtagcaataagttcaaagaaagtccatttttttatattactaattctgttcttggtttatttgagctggtctttattgcatttcacctggattcagatactaataactgtctcaattatgtaaaaatgacaactttatgaaattcagtttcacaattatgtaattcataatcgatgaatgttttcttgagtctttatcatctttaggatttgattaagatgcaatttgatgaaaatactaaaaagactcatgtgttctcatttctctatgtagatacgatcagtacaagaactgagtgggcaaac

SEQ ID NO: 487 - DNA, 407 bp, Arabidopsis thaliana
  Intron number 1 from transcript AT4G39850.2 (locus AT4G398 50) derived from phytozome v7.0 (chr-ID Chr4; pos 18488765 to 18489171)
ctgaggtaattcgtcatggatttgtttaattgcataagcttttttgcaattgtctaagcttttatcggtttgttttgttttttgatttacgaatctagattttgcgctttcttatgtatgtaatcaggatcaaatttgctgggttgttaaacaatttttgtctgtgttaggattctaattacgcgtgttactatacatgaatcattttcattgtttttcttcttgatccaaaagtgtgagaatcttactttaggcgtaattcacattttttgcattaatttcaacggttacacgttttttttctttgctttagatttgttataatttggttgttctaatattcataaccttggagttttggtattacttcaggtgttttggacacttgttgtcaagaagaaaccagt

SEQ ID NO: 488 - DNA, 517 bp, Arabidopsis thaliana
  Intron number 1 from transcript AT5G02960.1 (locus AT5G029 60) derived from phytozome v7.0 (chr-ID Chr5; pos 693877 t o 694393 reverse strand)
gggtacgtttctcctctattagatctatccttcgtgttcctatctcatttctctgtttagcgttttatttatctgattcacttgctgtttccatgaattatgaaggattctatagagtctgctgtgttttttttttgtttgaaattgttacatgttttcgacttttgattgtggtttttgattggaactgattctatagcaaatgcgtcttcatttctggatatgtttgctaaatgttttttatgtatagatccacaatagattgtgtaaattttgagctactctggagttctagtatggttgataactggagatttaaaattcgctgtatgagtatctatggtctcttgggttttgaagctcacttttgctgatgtattagagataaatcttctatcgtcttgttattatttagatgaatttcttattgattttctgagttttaactatggtttatcgagtgaagttgttctcaaatgttattttgtgatgatttgttaacagtaagacacgtggt

SEQ ID NO: 489 - DNA, 405 bp, Arabidopsis thaliana
  Intron number 1 from transcript AT5G06690.1 (locus AT5G066 90) derived from phytozome v7.0 (chr-ID Chr5; pos 2061210 to 2061614 reverse strand)
gcacgccaactctctcagcctatcatcatcgagtaaacacaccaaaatcatatcttatccaatctccacaatccaaattagatttggttctctataggaaagctagtccagagcatggtcaacacttacggaaaaattaggttaactaaaaaatcatacaaaaatgcgttcaagttttttttttatcccggctccgattggtttgttgaactctcttttgttataatgatggatatcaaaggagttcaatattttttgtagttttcttgctaggttatatttttctcgcaagtcgcaagatcattttgccggatttttactttatttttgacaactcaaccacacaccaatcaaagcctttatatatgtttggttatgaagaattgtgagaaatatttgggcagg

SEQ ID NO: 490 - DNA, 412 bp, Arabidopsis thaliana
  Intron number 1 from transcript AT5G14060.2 (locus AT5G140 60) derived from phytozome v7.0 (chr-ID Chr5; pos 4535690 to 4536101)
ttttatctgtttttcttcacggaaatccagttaaggtaattgtctacatttctcgatttactttggtttctctgggttttgctgttttcttttctaatttctcgaatgattcatcatttcttgcatttggggtgatgaagaagcacaagtttacacattttctggtttatatgcttcacaagtgcttctcttatgatgttgtttattagtattggttgtttgatttcactgaaaattagtcagtcaacttacagtgtattaattggttcaataaatttttcataattcatttcttaacatgattttacctcattcattatatttatagatttagatcccttgataatgatctgatattctttctgtgaatttgaaagttgcaggtttccacattgcacagctgtaccatttg

SEQ ID NO: 491 - DNA, 418 bp, Arabidopsis thaliana
  Intron number 1 from transcript AT5G14060.1 (locus AT5G140 60) derived from phytozome v7.0 (chr-ID Chr5; pos 4535690 to 4536107)
ttttatctgtttttcttcacggaaatccagttaaggtaattgtctacatttctcgatttactttggtttctctgggttttgctgttttcttttctaatttctcgaatgattcatcatttcttgcatttggggtgatgaagaagcacaagtttacacattttctggtttatatgcttcacaagtgcttctcttatgatgttgtttattagtattggttgtttgatttcactgaaaattagtcagtcaacttacagtgtattaattggttcaataaatttttcataattcatttcttaacatgattttacctcattcattatatttatagatttagatcccttgataatgatctgatattctttctgtgaatttgaaagttgcaggtttccacattgcacagctgtaccatttgtcgaga

SEQ ID NO: 492 - DNA, 495 bp, Arabidopsis thaliana
  Intron number 1 from transcript AT5G15060.1 (locus AT5G150 60) derived from phytozome v7.0 (chr-ID Chr5; pos 4874568 to 4875062 reverse strand)
tctctcttggaagctcaagtttcccgccacaagtggtacgttttccgatttcctcatttcattacttgcactatttaattttatgattttttttaggatcaaaaactgttacattatatgattaaaactacgcataactttaaatatttaatacaatggcataaacaaaaatatctccttgtttattcttgattccgtgtttatgtcgttctataacttgaaagaactttttttttttcacagttggtagtgcttgccaaagtttttttaatgtagtagttaacatttatttgattagttatgactttagtgactagtctaaagattaatagaccgtatactatatagtatacatttaaaggaagaatacgtgggaccaataagctatgcttttggcctaaaatggcttacgcattttattattatttataattacacgataccatcctactaatgctgtttcttttgtttttaattaacagtgcatatcaatct

SEQ ID NO: 493 - DNA, 595 bp, Arabidopsis thaliana
  Intron number 1 from transcript AT5G16110.1 (locus AT5G161 10) derived from phytozome v7.0 (chr-ID Chr5; pos 5261941 to 5262535 reverse strand)
tctctctctctcctctcccggagatttttactcaggtacatctctctctcattctccttcttcttcttcttcttcgtttcttaagttcctttcatggcggattttacagatcgaagttactttaccttttgttcatccacaatcatttctcatagatgttagatctgtgcttttttaattcccatcgttttttgagtcttggttgaattcgagtcaaaacttctctgtgttgttctattttttttaaaattcgtatgaattttgaattttctcggatctgagtttcggcttagccatacggtcaaacttcatcgttggctttatccgaaaatggtttccgtttttttcaaaaatcctttttatagccgatctctctgaaaactttgaatgatctactttttcttcctcacaaagcgattcgttgaatttggctaataaatcaaagaggaaaaactctgaattcagatccgttgttttcttcgttttccttgagagaatttctcagatcttataaagtaaatctcttgctctgtgatggatctgatctgatttgatttgaattcaggcgttcttctgtggatcagaggtgaaaaag

SEQ ID NO: 494 - DNA, 751 bp, Arabidopsis thaliana
  Intron number 1 from transcript AT5G16840.3 (locus AT5G168 40) derived from phytozome v7.0 (chr-ID Chr5; pos 5536045 to 5536795)
gcggtatgctctactttttttttgtgtataattttgttttatgcggaaaaggtttaggtttcctctgctggtagatattgttgcgatccatttgtttatcgggaaattttctcaggattgatatttttggctattgatttgatttcttcttcaatttggatgatctgttgtttgattgctgcacttgccgacataatatctccaatgctatttggacgagtttgatgattattattgtcgttattaattgattctgtatctctgtgtgatctgtattcgtgcaattatctctattatctccttgatttctcggttttggttttcgtttatcgtagtaaatcgcgattgtgttattctcaatttggaaccgaatctcgctagccaatttacttttagattcctccatacattgtcgattagtttccttaattggtagccttcatggttcattcgagttttctttttgtatagtgagatgatgacagtcatcttctaagccactataatattatccctttacttgcataattgtataatcttgtgataaatctaggcttctttgagtttgagctgatttgattaaaatgggactttcggtcgattagatatgcttggatacaaaaagtagttgtactgtaaacattctcatgaaacacctgtttattgttttcgttaatgattctttcccttttgattctttatgatgacagtcacaggtaaggtcagtaaaagttggcaatctctcttcagg

SEQ ID NO: 495 - DNA, 745 bp, Arabidopsis thaliana
  Intron number 1 from transcript AT5G16840.2 (locus AT5G168 40) derived from phytozome v7.0 (chr-ID Chr5; pos 5536045 to 5536789)
gcggtatgctctactttttttttgtgtataattttgttttatgcggaaaaggtttaggtttcctctgctggtagatattgttgcgatccatttgtttatcgggaaattttctcaggattgatatttttggctattgatttgatttcttcttcaatttggatgatctgttgtttgattgctgcacttgccgacataatatctccaatgctatttggacgagtttgatgattattattgtcgttattaattgattctgtatctctgtgtgatctgtattcgtgcaattatctctattatctccttgatttctcggttttggttttcgtttatcgtagtaaatcgcgattgtgttattctcaatttggaaccgaatctcgctagccaatttacttttagattcctccatacattgtcgattagtttccttaattggtagccttcatggttcattcgagttttctttttgtatagtgagatgatgacagtcatcttctaagccactataatattatccctttacttgcataattgtataatcttgtgataaatctaggcttctttgagtttgagctgatttgattaaaatgggactttcggtcgattagatatgcttggatacaaaaagtagttgtactgtaaacattctcatgaaacacctgtttattgttttcgttaatgattctttcccttttgattctttatgatgacagtcacaggtaaggtcagtaaaagttggcaatctctc

SEQ ID NO: 496 - DNA, 375 bp, Arabidopsis thaliana
  Intron number 1 from transcript AT5G18650.1 (locus AT5G186 50) derived from phytozome v7.0 (chr-ID Chr5; pos 6218302 to 6218676)
ggtttcgggtaaaaaaaacattcctctgttttttactctgtttcttcaaatctctgcttttaacagatctcttgggtttgtacttttgtgggtcgtctcttgttttcacgtatggtccacgacgatttgtctcttgttcttagtgatccgtagattccatatgatttgattcacaaagtttgttcctttttccgtttctgattcaagagtcttcatttgtttccggcttttgattcattatagaataatcgattcgtttctttacttcaaatcatagatctgtcctcgatccacataatttgtcatccattctgatccatgtagatccgtttctcttttcatgtgtattattaggtgtaagcattacaagaggag

SEQ ID NO: 497 - DNA, 291 bp, Arabidopsis thaliana
  Intron number 1 from transcript AT5G23820.1 (locus AT5G238 20) derived from phytozome v7.0 (chr-ID Chr5; pos 8031448 to 8031738)
tttgcgtggcgccatagatttcgaatactgcgccagtaagtatctatttgttaagtcttcagttacttttctatatgatttttgtgtgtttattagtttataaatgaattataaattcagatagaccttgatttcatagattctggcttgctcatggctctgttttttgtttcttttagtaaaccaatatttgaactctttgacatttgaattggattccaattttttttaacctaccggggactcgtaagttatagcttccacaattaatatatgcgactgttgcagaaa

SEQ ID NO: 498 - DNA, 620 bp, Arabidopsis thaliana
  Intron number 3 from transcript AT5G23820.1 (locus AT5G238 20) derived from phytozome v7.0 (chr-ID Chr5; pos 8032108 to 8032727)
aggtaactacatttctactcttagcataggaaaataaaaagcatgaatgaatgtgaattttccttaatcctaggaccaatgtttcaaacccaaggttggactaattaaataaccgtaattgaccggcaaaacccctaaaactagtacaaccggttcacattggtttatttatttttcattttcatttttatttttattttttcaagacttggctttatgctttaacatcacatcttctattagaaattttttatacttcctttttctcaacacgtttaattttattttatatttcttataagttatttagggtatactataataattctgttgatatttaagatttcactttgatattgttattttgagtttaactacaattccatgcttacaaagttaacttcaaaagtaatgtttttggtttcatgatgttatatatttctcattaactctacttcttttccattttatcatgtgttgtatatcttagtgataaatataaaaacattttatgtatattatactattagtgaaattaaatataaataatcaaaccggtctgacttgattcacattacttggcaggaaatcaagtactcggtatctttgcgccgaaagac

SEQ ID NO: 499 - DNA, 586 bp, Arabidopsis thaliana
  Intron number 1 from transcript AT5G26594.1 (locus AT5G265 94) derived from phytozome v7.0 (chr-ID Chr5; pos 9269507 to 9270092)
aacggtattcaggtaactaaaaatttagattttactctttaaattcttcgttacttgatattaaactttggacactaaaatttggttactacctagaagaagaattatttctatggtgcaatatttttttcttttaacttttcaaaacatttttagaaaaaaagattaaaaaatcttaggcctttcaacaaaaaaaaagattaaaaagattgtctttatgtgaagttcgttttcatcttatttttatttgagaattcttccatcttaaactatttgtagccttgtatgtagtgaaaaaaattcactaaaggtataatttgatttgtcaaaatattttattagagattatagaccctaatatatattacgtatatttttaagaaataaatatgctaaaaaccggtcctggattgttattttcagaacctatgaaacataaatagctgaagaaataaaagttttatgtggtctatggaaaatttatttttaaagagattattggttatatcaaaataattaattaatggatttttttcttctcttttgattgaatattgaaatataggcaacaaagagactaagggag

SEQ ID NO: 500 - DNA, 454 bp, Arabidopsis thaliana
  Intron number 1 from transcript AT5G37370.3 (locus AT5G373 70) derived from phytozome v7.0 (chr-ID Chr5; pos 14816012 to 14816465 reverse strand)
tcctgtaatcgctaacacagttcgtcaaatttcaggtttctctcttttactccttacgattttgataaacttctcgagaattaagtttgtttgcttatagaaattgtttttaaccggctgatacatagattcgactttgtttctagcttgatcgatttgatttcaccagttccttccgaaattgatatcgattttcaccttttcttatctgggattgacgaaatttagttcctttccggtttaattttgaggttgatcccatagattttgctttgctatttctagggtttcgtttcaatttaggattaatagttggtttagttgggtttttaggattagttattgtttctgtatctatggccaaaaagtttcaagctttagcttgttgtatttcctaatgtgtttaatttctctttcaggttttttgggctcgtaggctttttctgtatctctc

SEQ ID NO: 501 - DNA, 906 bp, Arabidopsis thaliana
  Intron number 2 from transcript AT5G37370.2 (locus AT5G373 70) derived from phytozome v7.0 (chr-ID Chr5; pos 14814827 to 14815732 reverse strand)
tgttaaagcacacagattctccttatattagagcggtgagtgaatctcttaaccatcttttttgcattattgtcctgcataaagtatgagctaccgtgatgctataaccttgtctttttggtattggttttcttagtagaatcttaaaatatgtctttccatcttctggcttcttcttgattttcagtaagatctagaaatctaacagtgtgtgctgcttgttcctatacctgttcctcctgttacttgttaccaagctgagttgttcttattagtcaattttaacccgaaaaaggtaggtgttccttttgattgtcaaataattatagagcatattacagtcaggtaatagcattccttacctctgggttccatctgaaactattcttttctcatcccgtattgaaggtatgagcgtacacataattgttctcgtgttttcatagcagattttcacaaccacaatcaaagttgggatgtcattctttctttgagttgctgagactttctcccaccaaaatatataagacctttctttgctaggagtatccgcatatcaaggtttgaggtgtcttttctattttagctactctatctctctaggatcacctctctgcccatttaacagtatagaacgtagctactgacaaataatctgtttatgatacccggtgttccagataaagttcaggatatatctgaagtgttttctttttaatgagacagtgcatacatgcttccttggtgtatgggaagttatgtttgtcttgcattttatatcaatgtttgttttgctttgcgtttttttcatgttacaacaacttgtttgatctgttttacatgtccattgcttttgatctaaccacagggtactgaatgtgcaggttggattcctatatttaagat

SEQ ID NO: 502 - DNA, 702 bp, Arabidopsis thaliana
  Intron number 1 from transcript AT5G40890.1 (locus AT5G408 90) derived from phytozome v7.0 (chr-ID Chr5; pos 16384120 to 16384821 reverse strand)
agtatgtcttctttatcttctagatcttgattatttgattcttattctgttttcatatcgaattttacttttcttgaattgttttttggatgagtcttaatcttgttctataaagagtgacaaaaaaaaaaccttattctataaagttttgagctttactctgtttccagataaatcttcactttctgatggtttattgagtttgtcattatcttttttttttgtaaagtttcaatcttactattttttcagctaattttcattttagaaagaaataaaattgaatggattatttgtctcaatctctttctataaatttttaaatctttatcctgattttcagaacataaattatgaaaatattagagataattttgacaagaagaatgaaaatattagtgatggagacatatgacctgttgtgatacttcaattatttctcacattttcaatttgccgcaagcaatcataaaccaaatcttgtacaagatccagataattaggttaccttttgtttattagttgtatgataagtcttggtctcaaatctctttctataacgtttatttatctttactctgttttcagacaatcttcatatatttttttttcttaaacttggtggaaaataatcagtgatggagacatatacttgtatagatttttgatttgagattttggatttctgcagaataaacgaga

SEQ ID NO: 503 - DNA, 617 bp, Arabidopsis thaliana
  Intron number 1 from transcript AT5G43880.1 (locus AT5G438 80) derived from phytozome v7.0 (chr-ID Chr5; pos 17642849 to 17643465 reverse strand)
tagattccggcacacaggtgtttatctttctcttactgtatttgtccgttactgttacatttctttattgcgttaatcaaaattccggcgataaagtttgtacctttcgccggagaatgcagattccggcagactggtctttgtctctctgtttttttgcagtctttgtcagttgaaacgccgtcgttttttggtgaaattacttttacagttcttttagcgaaatgtttggtgaagaaagaaagcagaagactttaattttgcgatcgctttctcttataacgttttctgcgttgtttttcgcccaacttgcctttttttctctctctgttcttatggtgtcggtaacgcagtttctgcgtttgcgtttgtaaacgttactggaagtttagtgtatgtgtatctctttgtgattgatacgaagtttgattaataaatgcttctgatttgatgaatatttggttgctcttaattttcaagattctttctttatttcccaagattttgtttcctttcaaagtccaagtaaaatattcagtaaggttttcttttcttaaatccgaaatttgattgagaaaaatctcttctgattttgtgatgtttcaggctttgaagaa

SEQ ID NO: 504 - DNA, 387 bp, Arabidopsis thaliana
  Intron number 1 from transcript AT5G45360.1 (locus AT5G453 60) derived from phytozome v7.0 (chr-ID Chr5; pos 18386256 to 18386642 reverse strand)
gtttcgctcgattcctcgaatcagaagtctcatcggtataaaaatttctccgtttattcaaattttcgatttcatttagggtttagtaatttcttctccatcaatctttgaattttgtagctgaatctgaaattctgtcgagattttcccgttcccctagttttttttttcatttttgataacttcagttccttgatctgtaaatttgatcttatatgcatacatttgaaatttttgaaaaatcacataatttttgttcatgttcttcgattgatgtccattgtgattttgctcttgttcagcgttgtcctgtgaaaggttagattatttattgatgctttggtttttgtaggtagaggataaagaagaaacgaaagaacctgaggc

SEQ ID NO: 505 - DNA, 596 bp, Arabidopsis thaliana
  Intron number 1 from transcript AT5G47320.1 (locus AT5G473 20) derived from phytozome v7.0 (chr-ID Chr5; pos 19203205 to 19203800)
ttcacctggctagggttcttggtcgtcgttaactggtacgtttcaatggtctctctgtactatcatttctgcgaaatgggtcttctctttggaggctaatcgacgttgtgcttaatctaattgctcttttaggttgtttagaggaatatatcacaggttttcaattagattgatctgcttagttttgtaatcagtgtaggttaccagtgaatcatgaacttccgttagggttataagctctctgtttcttttcctgacttatcaatgtcactaatttagatttgatgcgtagtttagcttttgaagatcagggaactgaatatatctggtttaaggaagctttgaattttctgcttgccatggacattcgacttatcagtatttttgtacattttggttaatgtttatcgaattggtttgatcagtctgtggattttaactttacaagttaagatgctattcttttaggtctagttgataggtcatggatttgttgttatatggagtctagacattttgccactgctttagtgttcttagcttctaagggtttcgttgatatattgtactgggtttatcgtttccaggcatctagt

SEQ ID NO: 506 - DNA, 662 bp, Arabidopsis thaliana
  Intron number 1 from transcript AT5G47710.1 (locus AT5G477 10) derived from phytozome v7.0 (chr-ID Chr5; pos 19329808 to 19330469)
caagaagacgattttttattcttgtttccaaactggtaaagttgttcagtaattttctgtttcttatttattagtttttttcttctaaagtttgcaaatttctcagtgaaacactgaaacttccttttcagttcgtaccgttcttcgctactttactcattctttagggtttcaaggttttctattggtcttgttgtagactcgagtagcttctgggttcaacccacaaagtttgagccttttttgatttgcagagtcctctgtgtttcttggtttgtctcttgatcaaggtctgcttgcgatttttgtttctttctctaccttactcgctagatagatgtttctgtagattggcagcatttggtctctctgtgtggttttattatttactgatataagtgtgaatctttcccagaatttcgttttctatatcaagaagctctcagaaaattttgggcttggcgtagttgtttagatatatcctagcttcctagagattgaatgttgaatgttgaatgactagtacttccttctctttctctgtgtcttggttgtcatattcaactgattgtctaataaagacagttgctttagctctgttattcacgaggattgtctcaagaagtttctaaagttggtagcatgtgtttgtagaatctgag

SEQ ID NO: 507 - DNA, 620 bp, Arabidopsis thaliana
  Intron number 1 from transcript AT5G48385.1 (locus AT5G483 85) derived from phytozome v7.0 (chr-ID Chr5; pos 19608702 to 19609321)
cttcttacgggtttttacttcgtttgattttcctggtaaagttgctttttttttatcttctcttgaggtatatactttttttttgttttgagttcatgttcgtgttctcttcactgtagctagggtttgttgatttctccacaatatagctcaaaatttctgctatgaccttgaattttggtcgtgaagtttgtttatgtgatggattaagctgggatttcatagaatcactgaatcagcttgcttgtttctactctcatttcgtcatctactcttctcttaatctgtatttgtattatttcagctaatttttttataagtacgtctgattagttcttgaggttgaattatctttgtgactaaaaaatagtgtgaatttttcttgaatggattcatttttttgggggtttcttgttcatttgtctttacttgccttgtaggccattttcttacatagttgtccactatgacttgtacggtcttgttacagagctaatttgtttttatctttaacgagtgatattgtcattggatagttttgactgatctttgtttatctgttcttgatgatttttttttttgtagttgtttgttgttcaaggatcgagatttcgtggagc

SEQ ID NO: 508 - DNA, 312 bp, Arabidopsis thaliana
  Intron number 1 from transcript AT5G48590.1 (locus AT5G485 90) derived from phytozome v7.0 (chr-ID Chr5; pos 19698804 to 19699115)
aagcttccctccacaggttccttttaacctccacttttcttaatcacaatcgcaagtgtttgttgtcactgtagaatcgccgagttgtagaagaaaacaaaatctgtaaaattgcagaatccagaaatgtttgaatctttggttgaatccagaaattatgctaatcaatggtttattagtgttggttatcactatggaatggttgtttctgttttatgttctatgatctggcttttatatggagactgattaacgtatttgaatcgatgttttgcagaaggatagctcaacttaaggagagtgattgccaaa

SEQ ID NO: 509 - DNA, 555 bp, Arabidopsis thaliana
  Intron number 1 from transcript AT5G54600.1 (locus AT5G546 00) derived from phytozome v7.0 (chr-ID Chr5; pos 22183125 to 22183679)
taatttccccgatttccctctccgtcacttctccggtaactttaattttcgatttctggtcaattcaggtttttaatcattgttcaagcttttaggttatgtagttcacttgtttgcgtaatagattaggttcatgtcttcgcttttcatatccaaacccatttcatcaagtaactctcaaattgaatctgtgttgttgctcattttaagtttgaattttgcttactgggatataaaattttgtgcattgtctatgtttaagtgtaactactgaattgagatgaaagttatgaggacttaaaacgtcatcctttagactgattgactagttattggtttggaatcaatggactagtacttgtaaatgctatactttttaaacgaacgaaaatgtgcgtgtgatggctcacattgagtaaagtggctatcttgttcatttggttgtgattttttgcattttcttatgaaatgcaaaatagctgcaataggatatggtttctttgttactctgctgattattttatactcattgcaggtcaagcccgctgagaaccc

SEQ ID NO: 510 - DNA, 796 bp, Arabidopsis thaliana
  Intron number 1 from transcript AT5G55730.2 (locus AT5G557 30) derived from phytozome v7.0 (chr-ID Chr5; pos 22558990 to 22559785 reverse strand)
ttctcactaaccctggagcttcaaaaacctatcaggtactatactaaacccctgattagtaattaattacgataattagtaatcttctgtttaattaatcaataattatatgcatgtggctgtgtactaattaataaatgtaattggtacacttatcactactaaccctgattttagtaaaagtattagttttctgttttccatttataacataaataatcaataagtagatgcatgtgtctgtataaatttagaaattattaaaaaaagaaatcagatatttactacttacataattaacactgattagtagctctatctaaaatgattatccttttaatttccgttgttaaatgagaagttacttattcagaaaagatgcatgtgattgtactgttgtattgtagccaatagctattgccacattggttttgaaacaaaaagaaaaaggtcaaaaggtgttgactgtttcgtaagcaattagcaaatatagtcaaacatatagacttaattacctcaattatcggaacataattagttagttttccaattcaaatttatgaaaccaaattctattaactaaatttttaaaaatggttcatctttttcaaatatgaaaagtaacaataatttgtctccactaactcacactagccattataattgagtagctacaaaagtttcaacttcactatcttaatcaagtcaacttcaagatagaccaaattgatcttgagagattaaaaccgggttttggattgtgtttatgttgtaacaggagagtttagaaggaggc

SEQ ID NO: 511 - DNA, 590 bp, Arabidopsis thaliana
  Intron number 1 from transcript AT5G56270.1 (locus AT5G562 70) derived from phytozome v7.0 (chr-ID Chr5; pos 22780211 to 22780800)
acggtgtttgtgtgtcgtcttcttttatcaatcaggtaaatagtcacaatcgagtttttgtgattccattttcatatgattaaaatgtttcatctttaacttaaattctggattttgaacaaaccttgatttgtttaatcgtctccttttaggttctttttgcttacagtctgggttaagctataatcacacgtttttttctttctctttgtcgtttttaatcttcgtggctcgatcatttttgattcatttccaaaattctcgaagctaattcgttagaatctaaaatcctatgttttgattttgtgagattccatgaaagtggcttaacgtgtgaaaaagaaaaagtccttcattttcttacatttttttcttttgtctgaatgaattattttatatattttttgtccactttgaaataaaaaagttttaaactttgagaaacttaagctcactggtttagtgacacttgtctctaatcatcgttgtgtttagctagattattgtttttttggtagtaatctgaagttttgtgattctttatcatattttcaggagtttcatcacagtttgatcagagattcagccaa

SEQ ID NO: 512 - DNA, 464 bp, Arabidopsis thaliana
  Intron number 1 from transcript AT5G57000.2 (locus AT5G570 00) derived from phytozome v7.0 (chr-ID Chr5; pos 23064737 to 23065200 reverse strand)
acgactgctgtcaacacagtttctggtaattccatcgaattctctcatcctcgatttgatttttttctcgttcttaaattgattttgtgtttattctgattttgagatgatatttttcttcttctggggtttaatgatgatttattagttttactgaagttatttaaggatcaatcaaattattgttttctcttctgcgattgattggtttatggtgaatgtatgaatctaatcattgagattcttagaaggcaatttgtatattatcattgagttcattgcagatatttttttttgggggttttactggtgatttattgagcttaatcaacgatgatttatggttatgttctaggaaattagtgttttttgggatgtgttatattgtaatgttgaacaacactgtggatttgttgtgtgtctcatgttataagatttttggcttttgtttgtttgtttaggtg

SEQ ID NO: 513 - DNA, 237 bp, Arabidopsis thaliana
  Intron number 1 from transcript AT5G58140.2 (locus AT5G581 40) derived from phytozome v7.0 (chr-ID Chr5; pos 23524521 to 23524757)
agttgcagctgataaagctactctggttggtatatatatatttttcatttattttatctacttcaccttctttaacgtgttttgttgatttgcttctaaagacttttaatggcatttattactttgtttctcgaacctacagttgtgtctgcctcttctttctatctaacttgtctatgtggtgtctggttttgatttgcagactattcattactctgtttcgccataagaaagaga

SEQ ID NO: 514 - DNA, 237 bp, Arabidopsis thaliana; identical to SEQ ID NO: 513
  Intron number 1 from transcript AT5G58140.4 (locus AT5G581 40) derived from phytozome v7.0 (chr-ID Chr5; pos 23524521 to 23524757)

SEQ ID NO: 515 - DNA, 496 bp, Arabidopsis thaliana
  Intron number 1 from transcript AT5G59420.1 (locus AT5G594 20) derived from phytozome v7.0 (chr-ID Chr5; pos 23961797 to 23962292)
ttcggtaccgccgtgtcgagatccgttaacgggtcagtttcttttgaacttcttttttcttatctatcagaattttgcattaaagttcttgtttttgtgtgtataaaacactaaagatgaaaactttgcgtatgtgaatcgctgtgtttgtgtgatactctgtagttttaatagttaatacaataatatttcatgatatgttgtgttatcgagtctatgtgtgatggtctgatggataagcttattctctgttttgattcttcatgtgtttcattttgttgaattttatattagaaacttggataattctattattaattcttatcaagtcaataaacagatcaaagtttgtcaatcttttgtctgaagttttctggatatagcatatgacctagttttgaatcttctaagtgaattgtgttatggtactgaagatccaaccatgtagattttgctaatagcagttagatgcattttatcttcagcgtgcaaggta

SEQ ID NO: 516 - DNA, 397 bp, Arabidopsis thaliana
  Intron number 1 from transcript AT5G59960.1 (locus AT5G599 60) derived from phytozome v7.0 (chr-ID Chr5; pos 24144686 to 24145082 reverse strand)
ctcttacacaagagattaagaagaagcttacacgggtttgctctttttcttcttcgttattctcgatttgtattgatcgggtttcgattttgcccagaaaacacgatttctctaattcgagacacatgcattagataattccacgaaattctgattaagaaatggtttcttcgattttttttggttttgattcattttgaatctaccgtttccgattgagatcaatgtcatgcagcaaatctgattaatgtttatcaatcaacaaatgttatatacctgttttcagcttttttcacggctagatttctggattttgtcatcttcaatttgagactataaaattgattttggaatttgtataggctgttgtctctccagcacaaacacgcaacttgtt

SEQ ID NO: 517 - DNA, 660 bp, Arabidopsis thaliana
  Intron number 1 from transcript AT5G60170.2 (locus AT5G601 70) derived from phytozome v7.0 (chr-ID Chr5; pos 24227518 to 24228177)
atctccagctatctcaaatcgatccttctcgaatcgtatgttttcttatcacctcttattgaatctccttcgttctcgttgagtttgaatctgctgaatctcaaaaccctaattctgtttcctccgaggttttttttattggcatcatcggtttattagtttggatcgagaaattgagattgaagattgagatttttggattaatctacatgtgtttatatttcctgtgattgatttataatgatttgttttcacttttgtccgttgacgcgtctttaattgaaccgtcgcggcgcatgcatagatcgatactgtgaagttcttcattgtagattcattttgttgtttgtaattatattgttagtattcgatctgaaatgttgaatatttagagtaaatttaagattttttaagttggcctatgataacgttgatgagatgagtgaacatagatgatttctaggattggatttcgaatgttatcatttagtttcttctgataattaatgaagttgccagcaaaaaaaaaaaaagttttttcattgcgtttggtttttacatgtgttttatctgatagctcatgaaataaaatttactttcttagcctgtggccttagctttgatgattaatgtgtcttatattctttctcttagaccatc

SEQ ID NO: 518 - DNA, 597 bp, Arabidopsis thaliana
  Intron number 1 from transcript AT5G61250.2 (locus AT5G612 50) derived from phytozome v7.0 (chr-ID Chr5; pos 24634598 to 24635194 reverse strand)
gatccttgattctgaggtcagtttctgttcttgaggttttttttcattctgctttctctctcaatcagattttcatatcatctcttcgagaaacataaattataaatatttagttatgacttatgaaggttacaagattaaaattagaaattaatgattaaatcatccaaaaagtcaactaatgcccttatccatgcttctctgacaccaacatttgactaatctaattaaattaggaacaaaattattatcattaacaaatacacctccaacattaagtaaaatttctatatacacaaattttcaaacactaatggtttacttttcaactcaaaattcgaaataaattttccaagaaatataattcttatatcattgaacaagcctccaagttttcttaataagtttttcctctgtaatcatcatttgcttgttaagataagcaggtttcagttctattattcctcttttctaatttttttggattatattttccatcttcttgatatgtttttggttgtaactgattactaattcttgatcgctctaaaagttcacttttctttcttacagatcaaccaatcgaaagaaaccaaa

SEQ ID NO: 519 - DNA, 415 bp, Arabidopsis thaliana
  Intron number 1 from transcript AT5G62400.1 (locus AT5G624 00) derived from phytozome v7.0 (chr-ID Chr5; pos 25054747 to 25055161 reverse strand)
ttagttttggtatagttggttttgttacgagtgtaagtttctatggttatctttgtaatcaaatgaacgaggaaaccatttttctcactcctacttaactttggtgacaaattttcgttgttttcattgaacctactttgttttgattatgatgggatcatgtgaatgttaaattacaatgattatgatgtaattttcaataggttttggctttctattaatgttttacaatgattctgatgtaattttcaatagatctttgctttctatttatgttttttttgtttgtttcgattctcttggcattttttgtcttcgtgataaaacacattcaaaataacgtaagatttgtttggtgtggctcacgtgggagtaaccaggccccacgtgccatcttttacccggttgtaatccc

SEQ ID NO: 520 - DNA, 530 bp, Arabidopsis thaliana
  Intron number 1 from transcript AT5G62880.1 (locus AT5G628 80) derived from phytozome v7.0 (chr-ID Chr5; pos 25237306 to 25237835)
tgctcatctgctacaccagcaataaattccccactgtaagttctctttaaaaagacctctctttctctcttgaattttgatcaggaatctcatctggatttatcagatttagctcaaattttacaaaattttaatcaatttcagtatctgggtctactaaatttcagcttcttattgccataaaggttcttagaatctatctgggtatgtcaaagttagctcctttttcctaggaactgtgcatgatataagatccatttttggagattttgattttttttacttttcataagtatgtgtggcgcatctgggtttttgcagcttttgtgtatagtccagctttatgttatcttttttcatttaacatcctctggagtctggattcgtcagactttttcttcattgctattattattattattatatgtatatatgcttgatttgatgattgaaagtttgaaactgtgtattgatttgatgaattgtttgtaacaggactacataccaacagtttttgacaactttagtgc

SEQ ID NO: 521 - DNA, 286 bp, Arabidopsis thaliana
  Intron number 1 from transcript AT5G62900.1 (locus AT5G629 00) derived from phytozome v7.0 (chr-ID Chr5; pos 25249095 to 25249380)
tttatagactcatctcctccgaaggtatataatatattaatcacaattcacacagaacatgtttcagttttaaattcaggaaagaacagaaccctaacttatagggttttcttcaatttgtttcttctgcttcacgtttgattacaatcatcatatacgaagtgtataaaatttacaaatcagaactaaaagctttaattttcaggattcttatcaatttatttgttctgcttcactttttgatgttaagtcagtctttcttttttgtgttctattaatagaggtg

SEQ ID NO: 522 - DNA, 515 bp, Arabidopsis thaliana
  Intron number 1 from transcript AT5G65640.2 (locus AT5G656 40) derived from phytozome v7.0 (chr-ID Chr5; pos 26237725 to 26238239)
ctccgatccatcgtcccaaaaatcagtaaggtaaattacaaaatgctaatcttttttttctttcaaaccattaataataattgtagtcaaaatcagcaaaagatttgatcatttttttaatgagtaggttaatgactgtattattatatgtgttcataaagaaaatgacctttttaatcttcttgatttacctcaaaatctaaccctagctaaggtttttgtgttctttgaagatttatttaacatttaattcaaaaaattggtctcaggaaaatcaacaaaagattcgtccttttaaatgagtgaattagttataaaattggtttcaaattcagccttttgtattttaacattatgtgtttgtttcttcttttttgaaaccttagttttcttcttcaagattgtttaattattgtgttcttacttttaagggaatctacagaaccggctgaaaagtgataaatcatttaaaagtgttttaaaataatgattattggtatgttcaaaaaaatcag

SEQ ID NO: 523 - DNA, 489 bp, Arabidopsis thaliana
  Intron number 1 from transcript AT5G65810.1 (locus AT5G658 10) derived from phytozome v7.0 (chr-ID Chr5; pos 26339145 to 26339633 reverse strand)
tccgaacatcgtttatttcaaatcgtttattcaaggtatgtacatttttaatcttcctcttcgaattcttcaggattgattttgtgtttttttatcttccgcttatcggattttttgtagcgtgaatcctctgtttcatggatctatccattggtagtgatttgtttctgtgcatttatgttctgcttggtaatttcttgctattatgttactgaaatggtacaatgggtttgagcgaaatctgttttggtaattttgtataccagattcatggatctattattttaaattgattctatatctggtaattcttttatgcattaatgattattgcatcactgaacgaaggaagtagcttgaaatcaaaattttgaattttgtgggtaatgcagagagtgttttaggttataagaaaaagttttgaatgaatctattctaatgtctattttggtttgaaggtctaaaaaaaagttttgaagaatcatagcc

SEQ ID NO: 524 - DNA, 556 bp, Arabidopsis thaliana
  Intron number 1 from transcript AT5G67390.1 (locus AT5G673 90) derived from phytozome v7.0 (chr-ID Chr5; pos 26888571 to 26889126 reverse strand)
ataatcatcagctcctaaaccctaattggtttcaggtcagtaatgataacctagcactacgtacttattatctcttcttagtttgattttatttcttcatcagctttttaatttcagttttttttttttttttggatttaattcaattcgattattttgagattggtttgttttcattttagatagaacagctctattattattcccaccaaacttgacatcaattcttactgtgaaaaccacaaaagtccataagaatgtaaaagaatctttattgatgaaaagacaagattgacatgcgtataagggaaagaacatgaaccaccaaattggttttcaaagtacgatatctatatgttatgaaattttgtatgtatagatagatgaagatatttttgtgcatgtgtgctcagatttgttagcattagtggctaaaaattgcagaatctaaatcgagtactactagcagacaatttttttttaattttttttctgtccctaacaactttcaaatctcacaggttattacaaaaccgaagttccaagtttcgtcata

SEQ ID NO: 525 - DNA, 299 bp, Arabidopsis thaliana
  Intron number 1 from transcript AT5G67500.2 (locus AT5G675 00) derived from phytozome v7.0 (chr-ID Chr5; pos 26935237 to 26935535)
aggactcttcaccgatatcggcaagaaagccaaaggtataattatcatcgtatcgctcttcttctatattccttctctcatcgttaagattccggttgaaatcgcgcaattagtgcgtgcgtttatgcctgttcattgattcgaagttctggtgtttcgaatttgtttatcctgtagattgaaatgatttttagattttgattatattttgggtgatcctatcgagtttaagctgtttctgttttgatttttccttctttgtagatctgttgacgagagactacaattccgatcagaag

SEQ ID NO: 526 - DNA, 649 bp, Arabidopsis thaliana
  Intron number 2 from transcript AT5G67500.1 (locus AT5G675 00) derived from phytozome v7.0 (chr-ID Chr5; pos 26935534 to 26936182)
agttcagtatctccacttacagtgcctccggcgtggtatgtttattatatcgatgcaaactctgtactattttcagactcttgttcgatttcggttttaatgcgtggttaaatttgtggagtatcgttttgatattcgttttcaaccattgtgttttccgtttttatttagctgcgattagacctttaagagtatatgttcttggtctgatcgatctccatgttgaaatcgatttcttaagttctgtgttggtaattgtcaagggaactgagagagagaacgagtatcaggatgatatttacttctgtttaagaactagatgtttgataatgagtgaaaatgaggtcaacgtttgtatagatttcactttggttacaaaaatatgccataagaactccactatatgattcattttacaatttcttctttaggtgcgctgcttatagtaaaattattaagttattgtttgtgacagtttcaattagctaattgcacttttgtatttagaaacctaatgattgtctgcatatgatctagcagtctaactccatggttaattatacgaatggagagccttaattttttttatttttggtctgtgttctgttgtttaggcccttacgtctactgctctgaagaaaggaggagt

SEQ ID NO: 527 - DNA, 625 bp, Arabidopsis thaliana
  Intron number 1 from transcript AT1G04300.2 (locus AT1G043 00) derived from phytozome v7.0 (chr-ID Chr1; pos 1153906 to 1154530 reverse strand)
ttagcttctctttgctctttcttccaccatctcaggttcgcttcgatctacaaccaataagcttcttctatatctcctcctttgttcttcggattttgcgaggctttatgttccgattacagtctttcattttgataccacaccgattttgattttccccgatcgttgatttcatctgggctttgttttgttttccgatgtctttgatgaaattatgaggtttctctggatattttagctgattgaaatgatatattgcttcgccgccctctaatttttcggctgatttttttttgtttgtttgtaattttaccaatctaattttgaaaattggaaattagggtttattgcccatcgattatctgatgtgggttttaaagggtttcgattttttagccatgaattcgttatactcacggataaaatctagaaatgattgcggattggtatagtttgagagagccagatcgttgaatatctttgtccatttcaaatcatgacttggcatattgttttctgggtatacataattgtggggattacagaattcaaaatctaatttatttgctccaatcgttaattgctgatagttgaaggagagagagagctttgacgaaacaatttc

SEQ ID NO: 528 - DNA, 620 bp, Arabidopsis thaliana
  Intron number 1 from transcript AT1G54400.1 (locus AT1G544 00) derived from phytozome v7.0 (chr-ID Chr1; pos 20307744 to 20308363)
agacatcgacattcttgagctacatcttccttcaggtacaacaattatttcctacaataaatttataacaaaaaaaataaaaaataatacatagtagttcttttcttagtttactatatatacatatatatatatatatatatatatatatatatagcattgtaagtctgcattgcactttgtttgatatatatatatatatatatatatatatatatatatatatatcttttccaaccgaaatatagcacagcacgagagaattgttaaaagctttgattatactttgcttccacattgctactttgtttctctatttctccaaccattgtaaagtatactttgattccacattgctacttttgcttctcaaactctctttggctccacgttgtttaaatgtccaaacggaccttttggccagtagtgctaggtctacgaatttagatgagtaatatgtaaagaatattttccccgtatggatctctagctagaccggttgtttaattcaatgtgtggttgtagaaaaaaaagaaagaactaaagagtatagttatttatcaatgaaaagtggaattggtgtaggtttgaagaaagagcatcttaaaatacagatcaac

SEQ ID NO: 529 - DNA, 797 bp, Arabidopsis thaliana
  Intron number 1 from transcript AT1G80420.2 (locus AT1G804 20) derived from phytozome v7.0 (chr-ID Chr1; pos 30237697 to 30238493 reverse strand)
tcaaaagtccaaaaacagtttgcggttaaagaagggtacgttattttttttataacttttttttcattttttcatcaaagaaaggtacgttaaagacaaagtgaagacgtagtttaattttgacatgtttagactcattgatattcagaaacttagtcctggaattgtgttgtagcaaaaacaacaacacaacgagagaaagataagataaaagcatatatgatgggtttgtgttgcggatgttacgagaatatgagacatgacacatcatgacatcaatgatatggacaagcatacgatatatttcagaagaaataggatgtttcctccccttgcaagctttagcttctccagtgcattaagtctaattcatcgagctcattgtaggtatacgaaggatttgactgagctaacttaggaaaaaaagattgaaacgaggaatgatttagtaatggtaatttgaccttggttttgtacttcttttaattcataaaccccctccaccgtaaaaatgaaacattagaaatcctaaaagggcagacaagttgatgtccaaaaaaaaagaaaaaagggcagaagagtaaaaacgcgaatgaaagagtcaaagcaaaaaattggtaaaaaaaagcgtgaacggcaggattcgaacctgcgcgggcaaagcccacatgatttctagtcatgcccgataaccactccggcacgtccacctttgctagttgaatcatttgttaaattgaaaacccgtcattttgatctgattttgtactgtatgttgacaaattgaatagtctctg

SEQ ID NO: 530 - DNA, 635 bp, Arabidopsis thaliana
  Intron number 1 from transcript AT2G26320.1 (locus AT2G263 20) derived from phytozome v7.0 (chr-ID Chr2; pos 11205455 to 11206089 reverse strand)
accgagaagcctacagtttttaacactcgttctaggtataaatcattctgaaatgaagttttcaaaaaaaaaaatttatttatttcaacatgacatatatactatcatatttcaacaactgataaattaaaaataaaaataaactattgttgtctttagattttttttgtttgtttaatctataagttctaaatttatatccgtaatcaattattatttgctcaatttataatagcgcgctaaattatcgtggatatatcaaatattttgcacttgttcttgtttttattttcataaaagagttttgaaacaattataatttagattcatttttcttctttcttaattacttagaattaggagtgacatggtaattgctgtaatttacaaaaatataaaaaatgatgattaaaaaacaattgtaatagggagtgtaatattttgtattgtttttcaacaacatgaaccattaggctacatatccaatatgaagtttattataaaatcattaatttgttagttatgattgaaattatcaatacattcttaaaactcctgcgaagatatctactaattacgtaatcatatgattttgatattgcagatcattccatacaatccttgagaggttttgc

SEQ ID NO: 531 - DNA, 586 bp, Arabidopsis thaliana
  Intron number 1 from transcript AT5G47820.2 (locus AT5G478 20) derived from phytozome v7.0 (chr-ID Chr5; pos 19366596 to 19367181)
aagattgtgtcactgtcgttaccggtaaaccacaggtacagttgttttttcttcttcttcttccagtttcgttaaatgttaaagctctcttcttttgttctgtctgattaatctgaacttgtagaagaataatcttttttaggtgaaatatatttcaactgattagcttttttttttttttaagcggaattgtctctccctgagatctagatctcgcgacgtttttagaatcagtgactttttatcagtgtttactttatgcatgtttgaccaagtacttctgtttttagtattattgcatcattaatatcttttcctttattaattagctcactaatcaattgtttttgttgctaattctgatcactgacctccttaccaaaaaaaattctgatcactgacctttttactcaatatgtgaattggaattggggttttggaatatatataagttttggcccatgcttgttaaattgttagttagaaatttttattgtaatcataatcaaatatttctttgaaaattggatttttgtgaaataatgctgcaggtacaaattggatcacattcttttacatttgatca

SEQ ID NO: 532 - DNA, 527 bp, Arabidopsis thaliana
  Intron number 1 from transcript AT1G32050.1 (locus AT1G320 50) derived from phytozome v7.0 (chr-ID Chr1; pos 11528650 to 11529176)
aggacgaagaaatcgtcaatcctttttcggtaacgttttctctttctccctgaatcttcgatttcttttcgtttttttctctagttggattttgtgtgttcgcgacggtagtggaatctagatctctcacttgttgagtttttatttagttttgtgcaaatggaaaatagcagaaactgaggactgagaactgtgtaatgtcattttgattacggaaggttcatttctatttgaaaatgatattaacagtgttgagattatggatctctcgatgtttattcggaatactgaacttatatctgtggatctggaaactaggttaaaaaatttctagaaatgaatagtgtttgtgagtaatttcttccaatttggagtgtgactcattcgtttagttttggagaatcaaactcattgttgattgattctttgtgttattggtgcttgacgtttgatagttttttgaattttagtaacttttgataaattttgcagaaaggtggtggaagggttcctgctgcatctaggcc

SEQ ID NO: 533 - DNA, 709 bp, Arabidopsis thaliana
  Intron number 1 from transcript AT3G12130.1 (locus AT3G121 30) derived from phytozome v7.0 (chr-ID Chr3; pos 3865646 to 3866354 reverse strand)
gcggcggatacaagaagtctaagcaaggttagttcttttactctttatctactggaattctgttgtaccgatcttttttagttccttatgtttcactgtctctgattaaggtttaaattcgagatcttaagttgtgggtaaaattaagacttttttttgctagttatgagatttactaggaggcaaaattttcttctttcgttctcggtgctttgttttggtgatttcgtgttctgtttgcttacttatcttgttaattagctagattactgcaaaaagtactggccttttttatctgatgtaaatctaaattgagtgatgatagatcagctttagctaagttgttactattgttaaatgttaattactgggttttgttggtctcaagcttatatcttccactgtccttgagttttagtatttctttactttaatccctcttctcaaatataaagctaataacagtttataaccataccaaggatttagttttgttgattgaataagcctttttcctctgcaaagtgtttttgtgtccagttggttagttatcctgaaaacattaaaaaacattatgcatcttttgatttgaaagtttcatatagatgataagatgaatgtatgaatgatatgttggattctaaaagcaatatattgaacttcagataagtttttaactaaaggaaaacacttaatgtttggaacagag

SEQ ID NO: 534 - DNA, 278 bp, Arabidopsis thaliana
  Intron number 1 from transcript AT3G27350.1 (locus AT3G273 50) derived from phytozome v7.0 (chr-ID Chr3; pos 10126308 to 10126585)
aggttagttttttttttcttttttgttcttacgattttattgactccataaattttccggcaaccgaagaattttccgggacaattcgacggaaactgggctggttctatgtttccgatgaatacccatcaagaaaaatttgaccttttgaagttatttcgcttttgggatttttccctggaaaattcaacataaagtttcgttttttaatctaatcctttgaatctgaaagctttatttgatttgttgtttgtgtgtgttgcaggagaatacgattc

SEQ ID NO: 535 - DNA, 608 bp, Arabidopsis thaliana
  Intron number 1 from transcript AT3G59280.1 (locus AT3G592 80) derived from phytozome v7.0 (chr-ID Chr3; pos 21909941 to 21910548 reverse strand)
tcgagatttaaaccatcaattaatcggctgccgtgggtttcctcctcctctcttcgttttttccaaatttttaattgtttcttgccgctttaatctcttgagtgatgactcttttatcatttggtaaatcaattgatgttagcatgatttgagatcatctattagatttatgttgttcaattgtataaattagagaggcagatgggttttatgaattgggtacggattattcaactggttgtttcattttgagataatttcggaaaattttggtgtttattactaacgaaaattttctcgttgtatgattgattgattgattgaaattcatccatattcgtattcgcagtgaatagaacattttccaattgaaaaaaacaaacaaattttttcggttctcatttgttctttctaggcaaagatgtctcaatgttgaagttttaatgtattggcgatagatcgatgattttgagctggcttgaatttggacatgtttctttgtttacaaatcccttcttcatctctacttgtcatgttgcatttattctataacattctcatttcttttctttttacaggctgggagactacttgcaaatttgattgtg

SEQ ID NO: 536 - DNA, 392 bp, Arabidopsis thaliana
  Intron number 1 from transcript AT3G59040.2 (locus AT3G590 40) derived from phytozome v7.0 (chr-ID Chr3; pos 21823151 to 21823542 reverse strand)
gaaccttgtcagtgaggtatgtggagaatgaatgactcccttttctgttttgatacttttagatacaattgagaatctgaaaagaattggaccctttaagtatatatctccatgttagattggctggaaagaatttcatgaacttagtcttgaatcttgattgagaaattagatgagtcatcttaatctacttttgaggatttcaatagtggtgctgcggaaagctttttgttatttatacctgaagaatttacgtcagcatgaaagaaactgtgattactctcagcactgttagaagattggctattgcaagctcctagttttgataggaaagttgtcgggttgtatctgatatttggttccttcctttcttttgatttgcagattcttga

SEQ ID NO: 537 - DNA, 613 bp, Arabidopsis thaliana
  Intron number 2 from transcript AT5G13710.1 (locus AT5G137 10) derived from phytozome v7.0 (chr-ID Chr5; pos 4426208 to 4426820 reverse strand)
ttctcaccgccgtcgaaaagtaatttcttctcccttcttctttgatcgtagtttccatctccgattcacttacaattcgcttttttcgtctcatgcatattgatctcgttggtttttatctataatcaactcctaagattaagatttgattgttgttttgtgtagcatctccatatttttggaatcaacgtatattttgagcctactatttccatacgtttacgctttttaccaattccacgaataccatgatggcattggatttcgcctctgtttttatgtttgttttggtttttaatgcttcatggaactgagctttcaatacagcagaaaaaagaaaaatgatgagtgagagatggtccctagtttcgtttttggctctataaaagatccatttgacgtgtatttcactactgtcacgttcttgagggcccgaccaccaatcttattgtcattgacttcatctatctatctatatagaacaattggtttgttttttttggccaaagtttttcagagttctatgaattaaaaaaaaaaaaaaaatgttatttggtggacttttttttttgtcctggacattattaatttttagtgatttggtgattcaggt

SEQ ID NO: 538 - DNA, 393 bp, Arabidopsis thaliana
  Intron number 1 from transcript AT1G01050.1 (locus AT1G010 50) derived from phytozome v7.0 (chr-ID Chr1; pos 32671 to 33063 reverse strand)
aaaacaacaatcggctgtttcgtttcgatccaaaggtacgtttttttttcttttgtcatcgttctaagatcatcaaagtttgatgcttttccatgtttaatcttctgggtattttgttgcttcaaatctcaatcatccatcgagtctatagagaaaaagtgaacagatttggtatacatcttttcagtaatcgatacgttaacaatatatgaatccataatttgggtatgatcgatctcaagtctgctttaaggattgttttcccttgtggggtcttgattcgctttttccatttaatactcttgattcgattgattctctctctgccaattagggttatgatgttagattcagtcaatatcaatgagtgatgaaacgttctgattttgacag

SEQ ID NO: 539 - DNA, 601 bp, Arabidopsis thaliana
  Intron number 1 from transcript AT1G01550.2 (locus AT1G015 50) derived from phytozome v7.0 (chr-ID Chr1; pos 199925 t o 200525)
tggtctagtttttgtccaccgatctatctctttaggtgagttttgtttatttttttcggctttatagtttgtctacgcttcatgttgttgttgttattataatcttgtgtttgaattgaggtctttgatctcgtttctttctgaatttagatatgtgttattcggatttcagatcttttaagatctgggtttggctttttatacagaagaaaatggttttgacttaaaaaattagagatagctcttacctcttacgcttgagtcttggatctgttgattttaaagctttatagatcttaccacagttagagaattgttgttgacttttgtatgatgagttcaaatttgtgaattgaagaacagatctgatgttgtttgtgtttttctttatatgagaggtttcattacctttgtttttaagatctgttgagaaaagatccatactttagaaaaaaatccaaacatttgatcttttgtattggatatctaatatggatctagaatataatcaaagttataatgtttttgtattatggtttgtgacaattgatgtgttatctttcttcttctttcttgtttttttcagttgaaacttatcaga

SEQ ID NO: 540 - DNA, 457 bp, Arabidopsis thaliana
  Intron number 1 from transcript AT1G03040.1 (locus AT1G030 40) derived from phytozome v7.0 (chr-ID Chr1; pos 705650 t o 706106 reverse strand)
aaacctgtaagtttctcttcagaatcttcactttgtctttttcttttgtgttctcgagaaaataaagtgaaattcaaatctttagggtttcaaaatggtgtcgtttttgagaaaacccagcttaggtctaaatttgatagttaccgagagtttttggctcagattggtgagatttgatgtttttgaagaaacccaagttgaagattttgatgtgttttaaagtcataacactaaaattagttttgcaagaaactttagtataaaagagtgttcttttatgtccaaattatattgtaagaaaatttgctctttagtttcttttctcatgtggataattccgtcatagtttgaattgttgctataactactctagtggcgaccgttcttgtgagaagcggtttttaagcttttcttaatgttattacggcattgttttgtgttttgttgaagattttcc

SEQ ID NO: 541 - DNA, 468 bp, Arabidopsis thaliana
  Intron number 1 from transcript AT1G03040.2 (locus AT1G030 40) derived from phytozome v7.0 (chr-ID Chr1; pos 705639 t o 706106 reverse strand)
aaacctgtaagtttctcttcagaatcttcactttgtctttttcttttgtgttctcgagaaaataaagtgaaattcaaatctttagggtttcaaaatggtgtcgtttttgagaaaacccagcttaggtctaaatttgatagttaccgagagtttttggctcagattggtgagatttgatgtttttgaagaaacccaagttgaagattttgatgtgttttaaagtcataacactaaaattagttttgcaagaaactttagtataaaagagtgttcttttatgtccaaattatattgtaagaaaatttgctctttagtttcttttctcatgtggataattccgtcatagtttgaattgttgctataactactctagtggcgaccgttcttgtgagaagcggtttttaagcttttcttaatgttattacggcattgttttgtgttttgttgaagattttccatgggcagcca

SEQ ID NO: 542 - DNA, 449 bp, Arabidopsis thaliana
  Intron number 1 from transcript AT1G05055.1 (locus AT1G050 55) derived from phytozome v7.0 (chr-ID Chr1; pos 1450163 to 1450611 reverse strand)
ttcgatatctctacatcgtcattgacttctctcgggtaaatatttttctttgcaatccgccgctgctgctgctgattttgtgatttttagcttcaatgccgtttcctttgagtttgatggcgtgaaattgagcttatgttgctttcatcagagcttatataaaagagaaactatgcactttgggtcactgataagtaactttaatgtaatcgtcgttctagttttggagatctctgctctttagtcttctcaataggttctataattggctctgtattgtttgcaatgataatcttactctaagtgggtttgtagagcttaaggatgtgatccttattcagattctttattgaaggcaacattatgatttgggttcaaatttctctagttccaaggtatgcaaagtcttacactttggactgttttgtcgtgtctaggcagctgcggaa

SEQ ID NO: 543 - DNA, 447 bp, Arabidopsis thaliana
  Intron number 1 from transcript AT1G06190.1 (locus AT1G061 90) derived from phytozome v7.0 (chr-ID Chr1; pos 1893592 to 1894038 reverse strand)
tccctggtacttcgctatcctgtacccttttcatgtctctctctttctcgcttgtcgataatttttctgttttattttgataattgtgaaggcatctatctatgtgcgtctctatttgttttccgggaatattgttactgttcttccttgaattctcgccgagcacctagtgttttatgcccctgtcactgtaggcggaaacggcatgtgtgtggagaaatcattttgcttttggtttgttgtccaccagttgttcgatgaaatgattctcttgagttttatagacttctgcttattcgtgtgtgtaatgcaacttgcttctgtactggcctgcctctagggttctatgaataacgaatgttctatctttcaatctgcttactctatgttgtgtatttgcttggtaatacaggttacacactttcagacagccgttgcttctttaac

SEQ ID NO: 544 - DNA, 480 bp, Arabidopsis thaliana
  Intron number 1 from transcript AT1G06430.1 (locus AT1G064 30) derived from phytozome v7.0 (chr-ID Chr1; pos 1962526 to 1963005 reverse strand)
acaatctctttctcttcttctgccaaattccacaggtgcgtttcactcttagctcatctgtgtaatctcaagcattttctgctttgtttggtctgaatttctgaaatcttttgatgataaaaatttctatgaaatctcggtctgcttgttgcatgattcttactacctgggttttgttcagcaagtctatttgtctttatctgttttcttcttaatttgactttaggaatgtctaataatggtggattcatgtgttgaaatatagactaatgttatatccagtggcaatttctacaaatttttttatcttggagcatgaaaatgttccaatctttcttcatatgcgtcgctaatgatcgcttatgttgattatagtcttaccagaaacttgcatgttgttaaaggtctcgttttgtttggttgttctttgttcagattgtttttttttgttcacgccatggcttgtaatcgtctgtgcag

SEQ ID NO: 545 - DNA, 460 bp, Arabidopsis thaliana
  Intron number 1 from transcript AT1G07350.2 (locus AT1G073 50) derived from phytozome v7.0 (chr-ID Chr1; pos 2259587 to 2260046 reverse strand)
tggaatatccattgcgcttggagaatcgttcgccggtaatttgcttcatcgattgtattatccttcgttttttagtttccgatttagagccgttttacagagttgttttcgaaattctgtggaactatcgtcttttaggtgttgttagatctgaatcgttgctgtaaatttcgatgtgcttaagcttgattctagacttgtaaggaaaataactagatagatgtcagcatttatatcatgtgatcgagtatgatgaagttcttaaatcttgttttatgtggaagttgattattaagaataagataattatgtcgtcttcatattacaatagcttaaaatttgaattgttcttgtagattttgtgattttgtggttcgatttagcatgttcatataagtttagacaatacacttgaagctaataagagtcttaattctttaattgttctattttcttgtag

SEQ ID NO: 546 - DNA, 527 bp, Arabidopsis thaliana
  Intron number 2 from transcript AT1G08450.1 (locus AT1G084 50) derived from phytozome v7.0 (chr-ID Chr1; pos 2670785 to 2671311 reverse strand)
gcccggcgatcctgacaataaaggtacttcctttcgcccacctttaagcacactgcagaactccgtctttttggcgttaagggtctcacttgattttcagaatacgagaatctatatcaccattctccctgtgatctttgttatgttgcagtgttttagttctttgatatgttcttgttagctgccacttgtgtgtagatcttcagctcttttgttatgtggactaagacatggagttcgcaagtctactgcctttcgatatttgaagttatcttgaagaaaattaaatctttaattggttataattaggatttctattttagttcttagatatgtttgtttcagcagcaggtttgtgtgtagatcttgagctcttttgttctgtgatacaattatggatcgtcaagtgtactagctttcgatctcgaaagttaacttgaggaatatagaatctttatttggtttaacttagtatctttttctttcttttttgattttcttgatgtgtttaggtattcagacttata

SEQ ID NO: 547 - DNA, 331 bp, Arabidopsis thaliana
  Intron number 1 from transcript AT1G08450.1 (locus AT1G084 50) derived from phytozome v7.0 (chr-ID Chr1; pos 2671393 to 2671723 reverse strand)
tttctccgagatcttcttagaggagcatttcgaaggtgaagtatatatataaacactcttctctcttttttttccttttctgggaaacaaaacaacgatttgttatttttgtttcctttttgaatatattgctatgattagtaagtagtaactttccttggtagattttgatttgattaggatagtgaatccgaatccatccttcactagaatcttctattataggctttgcttttcctattctggttaatataacgattctatggttctggattttggctttctatttataggtttatggaattaacttagtaagattgtgttcaggtgg

SEQ ID NO: 548 - DNA, 753 bp, Arabidopsis thaliana
  Intron number 2 from transcript AT1G08630.1 (locus AT1G086 30) derived from phytozome v7.0 (chr-ID Chr1; pos 2745686 to 2746438 reverse strand)
atcagaaacaagagcatccttcttcatttacacaggtactcactcctctagtttcatttagaattgtgcttgttttttttaacacaatttgtctcggctatctgaatattactctttaacattttatttcttcgaaacctctgttcttaatttactaactgaatcttacatatttgattactttagattacttcaggggttattatttaaaattaattgttatttcataatgcatgagcatcattttcatgtctcaacagactcaacaccatatttgttcttgtctttttatattttaaattttttcttcttcttacattccctattttgatattatggttaatgcttttactatatttcacattggggggagtgaatctaaattatagtctgaaatattcctcgtgatattctcctcattccattttataatattgaaaacagagtacttttgtgagattcgtacggacatttgcaatttagtaggagagtgattttgttgtccccaagaccagttcaattctaagatgatattatagtattctttaaggttcttccgtcaaactgttgaaacaatttcttgataataaattataaacaattgggacaggagattctcttttcttgattcttcggatagaattatttcataggtcaaactcagactaattccgacgttataggtgttggtactcaaaagtgttcctagggttttctcacaaacaatatcttataggtaaattaggtgtaaaa

SEQ ID NO: 549 - DNA, 753 bp, Arabidopsis thaliana; identical to SEQ ID NO: 548
  Intron number 2 from transcript AT1G08630.4 (locus AT1G086 30) derived from phytozome v7.0 (chr-ID Chr1; pos 2745686 to 2746438 reverse strand)

SEQ ID NO: 550 - DNA, 384 bp, Arabidopsis thaliana
  Intron number 1 from transcript AT1G11900.1 (locus AT1G119 00) derived from phytozome v7.0 (chr-ID Chr1; pos 4014204 to 4014587 reverse strand)
gaggttccttcatttctgtatgaattccaaaaatccagaaccgttttcgtgattcatgttatgctctcgttgttgttttctgattgttactgctcagcgagtttcttctatcaatgtttgattcgatgaagatgcgaaatttcgaaccattgctgttcttctgagtttgatcgttttttagtttcggggctttcacgcttcagctagtgtttgattacgaagttttctgattaaatgtgtgagtttttttgtagtcatctcgaaaactgagaaatccatttttatagatttacattgttcatagttatatgtggaagttgatgattgatggtgattctgcaaattgatgatttggttttctgtttattggcattgcagaaacat

SEQ ID NO: 551 - DNA, 854 bp, Arabidopsis thaliana
  Intron number 1 from transcript AT1G12120.1 (locus AT1G121 20) derived from phytozome v7.0 (chr-ID Chr1; pos 4116479 to 4117332 reverse strand)
ggaaagcttcaagcttcctttttttctctatctgggtaattccttaatttacagtaaaatatttatagattgttattctttttatagttttttttatgtaaagtcgaagtagtactatgttttatgttcgtcatgaagttgatgcttttacttttcctcttatagttcttctgttgaattcaggatttaggaatatgtttatatatctatcatcaaaatgtgaatatatgtgcgattgtttctttttatggaatcatcttctgaataattttacttatttgcatgcttttagagttttatttataagcagaagcctgaagatttttgtgttttggatattatcaatgtacactaggtttaattttcatctaatggcttttagaatcaaaccattacagaggaaacataatattgattcttttttttaagatcaatatggatcatttgatagtttatccaattatgagcattgatgttgttttactttcatgggggttttgatagtgggagggtttagcagaggtttttagtatcaaacctatcataggaacagatcaccgagaattttgtgtccaattatgattatatcattgttctttgtttcaaacatttaagtttcagaatgacctgtttatatgctcttgtagccaatttccttgtgttacatagaatctgtcaggggatgtttttgccttgagtaaactcttattcatgaactgatattagaatgttcatgttgatccttttttatacagtttgtttttttggtattgatcatctcattttgttatttgtatttgcgttgttggcatttgatagggacgggaccgttgtataaaagagttagaccagac

SEQ ID NO: 552 - DNA, 508 bp, Arabidopsis thaliana
  Intron number 1 from transcript AT1G12420.1 (locus AT1G124 20) derived from phytozome v7.0 (chr-ID Chr1; pos 4228359 to 4228866 reverse strand)
aacactccaaggtttgttttcttcttcttctctgtttttttttttacaaaatttttctttaagaacagagctttaaaattgaaaaacttatattttaggtttctttttgtctcgtttttttttctggtgggaaaattctcccggaaaatatatttttatcagtccgggaaaaaatcattttcaaatgttcacaattgagttttgaaatttgaaatttttttcttttcttttttggtcatcgtttgatttactttttgtttttccaaaatatatatataaaatatttaaaagtttgtactttctgtcttcctcaaagaagatttttccaaatttctttgcttggccttatttttcatcaacttgaatttttcttattatgacttatcttctctaacatttaattgataaataaatcccattattgtagatatttaattttattttgtcggaaaagagaaaaatctaaagcaaattttcctacattattattacagggtcgttatcgaca

SEQ ID NO: 553 - DNA, 346 bp, Arabidopsis thaliana
  Intron number 1 from transcript AT1G13570.1 (locus AT1G135 70) derived from phytozome v7.0 (chr-ID Chr1; pos 4643931 to 4644276 reverse strand)
gctccaacggaccggcggaacaaggagacaaaaaggttgagtctttttctcaaatctttctgggtaattcaaatttcgagtttttgttttgttgcattgcaaatcgcaatctctgtctctttctttcgtagataaaaaggtgaaacttttgtctatcttattgtggtttaattcaagtaattttttagagtggtgattagggttctaaggttttgaatgggtttctgggaattgaattgaaattcatcaatttttctaggtttgaagtcaaatgcaacaactttatcttctgtttgcatgttaatgagcattgatgtgattttgcatgtgttgaaaatgtttttag

SEQ ID NO: 554 - DNA, 621 bp, Arabidopsis thaliana
  Intron number 1 from transcript AT1G14440.2 (locus AT1G144 40) derived from phytozome v7.0 (chr-ID Chr1; pos 4940015 to 4940635 reverse strand)
gatatcaaagtaattttctacttttagttgtgaaggtatgtgttcctaattcagttcaatgttcaagaacctgattcaaatttctttcataaccagttttgacttctctctctctctatcttttgttaatttctcatcaaaattaggagagaagaggagattggtaatcaaagaacagttgttatttattttctttttacttactggtcatgataataaatttcccacttgaattgaagtagaagacttctttcgaagtgcgtttgtcagcttttgtttgcgcaggcttgcaataagagttttattttccttaattaccatttttttgtattctttcgttttgtcctataattttgggttttgtaaattttggttgtttcttttagtaaaattatttgaaaaatgctttccgtgagttgtttctaaaaaagtggaaacttcttaagattttaatcaagaaagtattcacctttaatagtttaatcattttggtattagttactaatattttcctccaattgtcttgttttcttcttagctagtctctcctctgtccccaaaccaagaaacaatttgcaaagagaaagcaaaaggtttttgaagaagacccaattaaaaaag

SEQ ID NO: 555 - DNA, 853 bp, Arabidopsis thaliana
  Intron number 2 from transcript AT1G17060.1 (locus AT1G170 60) derived from phytozome v7.0 (chr-ID Chr1; pos 5833477 to 5834329 reverse strand)
ttcttaatcctgcttttcgtattgataatttgaaggtatgtttttcttttaccaaaaaagaagaagagaatatatagaatgctcattttgactctaataattatattttgttttttttataattgatttttaactctgacataatgtgaactttgtggacgtcattttcgtctcattctttagattttggtcagtttcattctctctttactttttttcgaaaaaagtcagataaagtaacgtctttcctcttgtttcttagctcagagatttaaacaataattatattaaaaaaaaaatcatgtattaactatttaaaaaaaataaaaaaatcaagatataacagaaaagaaaaaaaaaatctcttaaacaaaaaaatattaaatatcccggaaagaacataaagaaatacctaaaaaaggtatttatagaaaaagaagaaacggagaaaaaaaaaagtcagcaaagaactaaagaatccacgccacgccaccaagtcacccaacttaaaagtctaaaagcaaaaaaaacagaaaaagccaaaaaggcacattacaagaaggtgaaaatgaaatcatcatatttcaactcaagaatttctaaaataccaaatttatttcgacaaaaagaatttatcatttcattatcagtgtagaaacctcacatatgcagagcactcatcatctttaacaaaaacattatgagcaaataagtagcaataaataatatacaaaatgtaagcttctttaaagacccatttctgtgattttttttggtgtgaaatttggtagtgattttgaaatggtataaatgaacagagcatactaccagcatttaactcgagttgcaaaga

SEQ ID NO: 556 - DNA, 504 bp, Arabidopsis thaliana
  Intron number 1 from transcript AT1G17060.1 (locus AT1G170 60) derived from phytozome v7.0 (chr-ID Chr1; pos 5834497 to 5835000 reverse strand)
ccttttctccaccacactgttctaaaacgtatgatcccatcaacctcaacttaaattgtatatcaattgttttaattatggggttatttaattacttgaaagaaatgtgaatctatataagaaccaattatatatacttgacatatcttgggttagattcataacgattatttataattttgactaggagtaggtcatcttcttccatcatgacttttttttttttttatcattttcaaaaagtataatatatgaacagagaaattcagagttaagaaataaaaggagtttaatgtgtatacagattatagaatgatacacattttcataattaagatctaaatctgataccctttgtttccctggttttgtctaaatctagttcaatatacatatgattgttgtatgtgctttgttttgtttcatttgtgaatttggtaatttaaaagtaacaaatggtaataattaatgaatatatgtttgaatagggaagaagtgtttcac

SEQ ID NO: 557 - DNA, 301 bp, Arabidopsis thaliana
  Intron number 1 from transcript AT1G20610.1 (locus AT1G206 10) derived from phytozome v7.0 (chr-ID Chr1; pos 7137274 to 7137574 reverse strand)
atctcgcgttggttctttgaattgactgtgaaaaggtgatttttttgaaaaaccaattcgtgggttttcgttatcttctgggtatttgagatttaggtctttgttgttcttgattgggtctttcattgagattattaaaccggatctatagggttttgattgtcaagactgtttttttagtttcaattttgaaaacccctgcttttaagttgggggatgtttcgattttgaaatttgatttcttcaagagaagagatttaatgaaaataaataacttccgcagataacgaagaagaagaaa

SEQ ID NO: 558 - DNA, 407 bp, Arabidopsis thaliana
  Intron number 1 from transcript AT1G20816.1 (locus AT1G208 16) derived from phytozome v7.0 (chr-ID Chr1; pos 7233872 to 7234278)
agaagtttccggtgaactccaaaactcgcctgcaggtgaatttcttcaaattattggctgttatggtggattttagcactattcttcaatttgattgcgatatattcttttgattttcttccttaggattatttaatgcacaaagcctcttacttatttataggctaatggttttcagggtttatggaaattgtaattaggatgttattttctatgtacacaggctttagagtcttttagtctttagcagaaagagctgtgtaggcttaaagaagaatcgatagctttttggaagattatacttaacttgttttttggctacactctatccccttgtcgagattatggagcagggaatgtttgtgttcttactttcttttgttggttttacatttgtgattagcttc

SEQ ID NO: 559 - DNA, 460 bp, Arabidopsis thaliana
  Intron number 1 from transcript AT1G21390.1 (locus AT1G213 90) derived from phytozome v7.0 (chr-ID Chr1; pos 7489480 to 7489939 reverse strand)
agcaacaacagtattaggagccgaagcagcttaaggtatgttttcaaactgaagaatcaaagttttcatctttcatatcttacttacgcaatactacttggatttgctttgctaataagatttgatgaaagtttttgtttgccaagaaaagaaaaagctgacttttgattgtttccactttttcattgtgttttttcatcacgtgagtcttttactatcttgttggttgtatgaaaatgttgttgtctagttgatgaccttttgaaagagtgtgaatggtgtgagtgaagctctttatcttccccgttagaaatgaaactgtctagactacaattttagtgaagttttgattcaagaatatctatctgaatgattcctagtctcattatgcaaatcttgttgccatttattgaaactctcgaggtttgatgtttgaaactgtctgctgtattttgcaggg

SEQ ID NO: 560 - DNA, 584 bp, Arabidopsis thaliana
  Intron number 1 from transcript AT1G27600.1 (locus AT1G276 00) derived from phytozome v7.0 (chr-ID Chr1; pos 9604569 to 9605152 reverse strand)
tcgcttgagctctttcaaagcttgagacaaatcaggtgactcaaaaagactgctcattacttttgctgtctctaattgatggtaattttgtgtgaaatagacttattagagagactgcggtttatgtttgagtttgttagttgagcaactctatcgtctgcgcttattttattggcatctttttggctttattgcgtgcagtctttgtgattctagtgttgttgaacaccgaatatacgcctattactttgatgttgaaagtaatgagaatttgaagttttctgcacagaatctgagtttttttttgtctgcctgcctctattcttacttttctgcttgctctgccatgtgctcagtcttgtttgtttgagacttgagagaatacttcatttttcgttattggaaaggactctgttaaacattctttttgtaccttgtcttggttaatctaagcatccattgagtgtaaatgctgatggcttgatttccaaagcttttcttcttctaaagtatttgtccccaattttaatttgctatacttatctgttacattgtgtagccgatttgggacttggcctgttgct

SEQ ID NO: 561 - DNA, 412 bp, Arabidopsis thaliana
  Intron number 1 from transcript AT1G28280.2 (locus AT1G282 80) derived from phytozome v7.0 (chr-ID Chr1; pos 9886301 to 9886712 reverse strand)
tcctctattcccggtgacttctcctagagtctcaggttcttcatcagcttctacttcttgaaaaaaagacctaatttttcttttttactcaaatttttattatccttttgtgatcttaattatatattataattggggaattgagatgaatcatgttgagaattatacgagaaaatttgtaatgttgagatgtttgctaaatccaattcgcgatttcaattgtattaatggtttaatattgatgagtttattctgcagaatttgataaattagattagtactgataataattcagtgagttttgtacaattttagtgaaatgagcaaattgttttttgtttctattctattttatttccataaacacacaattagttgcattctacatttgttttttttcagtaaacaaaag

SEQ ID NO: 562 - DNA, 393 bp, Arabidopsis thaliana
  Intron number 2 from transcript AT1G29270.1 (locus AT1G292 70) derived from phytozome v7.0 (chr-ID Chr1; pos 10230401 to 10230793)
agattaccaaaaaagaatctttgcaccaatttcaggtttctcctttcatctatttctttatcattggtgaagctcttctatgtatattacatagtcatattgagaaacttttgtctatcctatgaaaaattgaggagtttttttaccaaaatgtaatcgaatatttttatataacaacaccacatataactttgatcatagaaaaagtggatcatatttttttggaactgattagcttaatctataaacttctaagctcaaatataagctcaagataaatgagatgttcatatggcactctaattgagttgttcacatggcactctaagttcaatattattcttcttcttttttgaactttggcaggaggtgaaggtagagaagattggggaa

SEQ ID NO: 563 - DNA, 371 bp, Arabidopsis thaliana
  Intron number 1 from transcript AT1G30070.2 (locus AT1G300 70) derived from phytozome v7.0 (chr-ID Chr1; pos 10547626 to 10547996 reverse strand)
atctcatcaattccgagatttcaaacttggagaaggtaccaaatcccccttttacccttttctcgccataatcgtttccttacaatggttaggctataagtagtagttgctcttatctgaaatggaacattagtttttagtttccagaagaactatttcgttctgtgtatgtttgtgtgtgtgtctcagtttctggagctttgatttagtcttcattggatgattataaggcaaaaaaatgataactttgagttctgtgactgaaattattataaacttatctcttggattgaggttaaaaaggactacttttgatttttaattagcatgaatcttcttgctgtagctgagagactctgcagtcagttcaa

SEQ ID NO: 564 - DNA, 546 bp, Arabidopsis thaliana
  Intron number 1 from transcript AT1G30490.1 (locus AT1G304 90) derived from phytozome v7.0 (chr-ID Chr1; pos 10800013 to 10800558 reverse strand)
cctcgacagatcaaagtttggttccagaatcgcaggttattatttctttattaattgtctttaatggaatgttttttgtgttctttgattgtttctgtaattataaaattgaatttcttttgtttgtatttggagacaaaaatgttcttgtctgacaatgtttttggtaatcttcttgtttttggtctaattggtgattgttaagcttttgaaactttcagatctatgtctataaatttgtttttctctttttgcttattaggcttttgttgacacagttgaaagttaaaatcacaaggaaaagtgacagctaatcaaactgtctttgatgagctttaaaacgcctctctctttttttccttctgcagagaatatgttggaaattacattatcttttgttctttatgtcattctggtatcattctaaagcaaaaaagtgtgtgtttcttctgttcatttttctattatttcaacacatttatcatactgctataggtttgtctttaacttttctggtttcttttggttgttttgttgactttttag

SEQ ID NO: 565 - DNA, 702 bp, Arabidopsis thaliana
  Intron number 1 from transcript AT1G33990.1 (locus AT1G339 90) derived from phytozome v7.0 (chr-ID Chr1; pos 12356156 to 12356857)
gcaagcaggttaagtcactactgattctcaatcttctccacacttataaaagtttcaatcttgaaaagttcaaaaggtttcatttttatatgatttaatgatcgtttcgactgagtctttgcctttttgccggttttaatgattgtttgggaactttttatatattttggttactataaaagtggaggaagagaagattctgtgttaagattagaaaagagatgtgaaaaagtgttgtaagatttctgacttttttgttggtaatgttaactttatcatgaaatgaaaagttctaaactctgatactgatactgacactgggttgggaccagatgagctataaaactatggagtgtctgtctttagccacaccccataaccttacaacagaagtactgataaacttttaattgtctttcaattgcattttgtctctcctcttgtttctctataaatttatgcttgctatgactagaagaatgagtgagaagagaagatctttttctttgtttaaagaacttaagttacatcactttgttcgatagtgaatcatctttgctgattgtttgtttctgtctcaccttgtcattgctatagagattgatgatgttattgttataaactagctttcagatgttagagcaatgaatctatgttcctttttcaggtacctgatttttcagagagcttgatagtgaagaa

SEQ ID NO: 566 - DNA, 476 bp, Arabidopsis thaliana
  Intron number 1 from transcript AT1G45248.5 (locus AT1G452 48) derived from phytozome v7.0 (chr-ID Chr1; pos 17164230 to 17164705 reverse strand)
ttcgtctccggtgtaaaatcaaatactatctttaggtatttcgtcttacccaactctatctttccatgttttccgaggacaaaataaaaggttaattattcatgactaacgtctgtaatgggttttattgtgatgtatgtttgaaatttggaacatttcgatatagcattgtgttactaatgcttttgaatttgttagaaacgagcagtaaaattggttttttcttcatcttttttttcaaaaatttggacttctctgtggaaatttctgggttttgtcaatgttagtgaacaaatttccttattttattgtcttcttcttatagtgtttcaagattttttgtttttctttttgttgcataggtttgaaaactgatcactcttgtgtaacctttgtttgtttgattttgaatccaaagactggaaactgatatttttctcctccaaattcttcagaaacgatcagagaagatagaa

SEQ ID NO: 567 - DNA, 408 bp, Arabidopsis thaliana
  Intron number 1 from transcript AT1G45248.1 (locus AT1G452 48) derived from phytozome v7.0 (chr-ID Chr1; pos 17164230 to 17164637 reverse strand)
ttttccgaggacaaaataaaaggttaattattcatgactaacgtctgtaatgggttttattgtgatgtatgtttgaaatttggaacatttcgatatagcattgtgttactaatgcttttgaatttgttagaaacgagcagtaaaattggttttttcttcatcttttttttcaaaaatttggacttctctgtggaaatttctgggttttgtcaatgttagtgaacaaatttccttattttattgtcttcttcttatagtgtttcaagattttttgtttttctttttgttgcataggtttgaaaactgatcactcttgtgtaacctttgtttgtttgattttgaatccaaagactggaaactgatatttttctcctccaaattcttcagaaacgatcagagaagatagaa

SEQ ID NO: 568 - DNA, 392 bp, Arabidopsis thaliana
  Intron number 1 from transcript AT1G45249.2 (locus AT1G452 49) derived from phytozome v7.0 (chr-ID Chr1; pos 17167416 to 17167807 reverse strand)
gggaaaattacaaagcacacgaatttagcaaaaaggtaatagatttttcttctctttgtgtgtatagaagaaactgtggtttttgttcatcttcttttaattctttcgatttatgtccacacttaatttttggataaaattactaattgtgcctaatacttgtcataaacgcattcatattctcctgttggtttaatctgtttttatccatttgactattaaagttttgaaatctgttagtgtttttgaattgggttttgcagatttcttgatttttatttatagattagggttctgatactaaagtttggatttttaaactaaagtttggatttttttttgtattcatggttcagatccagttattaggtggaagcagattttgtagaaaa

SEQ ID NO: 569 - DNA, 391 bp, Arabidopsis thaliana
  Intron number 1 from transcript AT1G45249.3 (locus AT1G452 49) derived from phytozome v7.0 (chr-ID Chr1; pos 17167417 to 17167807 reverse strand)
gggaaaattacaaagcacacgaatttagcaaaaaggtaatagatttttcttctctttgtgtgtatagaagaaactgtggtttttgttcatcttcttttaattctttcgatttatgtccacacttaatttttggataaaattactaattgtgcctaatacttgtcataaacgcattcatattctcctgttggtttaatctgtttttatccatttgactattaaagttttgaaatctgttagtgtttttgaattgggttttgcagatttcttgatttttatttatagattagggttctgatactaaagtttggatttttaaactaaagtttggatttttttttgtattcatggttcagatccagttattaggtggaagcagattttgtagaaa

SEQ ID NO: 570 - DNA, 388 bp, Arabidopsis thaliana
  Intron number 1 from transcript AT1G50510.1 (locus AT1G505 10) derived from phytozome v7.0 (chr-ID Chr1; pos 18716190 to 18716577)
cttcatataaacttagtgagcggaactggatttgggtaattctctaccaaacgagttctttgttggttacttttccactgttttggcagtaagattagactagaacacagaaagggcgttcttttcggatcctcttagaggtttcagtgttctaaattcatgaatttatgatgctccagaagacaattcatctgtgtagtgtttttagttttaggttaccgtaaattcagaaattttcatgcttcttatgtatttgactcgaaaattttgtcatttctgatcattagggtcgtgttttgattcgtcatcgagaatttggaagctggatttttttgagtagtttattggcttttctgatgacttcaaaaaactctatctttcagggaga

SEQ ID NO: 571 - DNA, 456 bp, Arabidopsis thaliana
  Intron number 1 from transcript AT1G50630.1 (locus AT1G506 30) derived from phytozome v7.0 (chr-ID Chr1; pos 18752714 to 18753169 reverse strand)
aaaccgttcgacgaaattataccaatcaactcaatgtgagtttctctattttcgaatcacaatttttttgatttctttacaaattctgtaatcgcaaaaaaagaaaaaaaaataatcatatctgtcacaaactcatatctgtcatatctgttaatattctattcttttaggattatgtcaaataatttgtccaaagaataaagtcagatttgaaaaaaaataatagaataaagtagaagaatcatgaatattataaagtaaggaaacaactcgacgcatcttaaggattgagcaacaaaaacaattatgttatttttttcactatttgctgtaaacatttttgtgtaaaaagtaaaaacctagattttaccatattacttgtttcacaagcattacaattgttttttattttattttgcagacttcgcttcatattgtgtcctactttgtgattcc

SEQ ID NO: 572 - DNA, 683 bp, Arabidopsis thaliana
  Intron number 1 from transcript AT1G52030.1 (locus AT1G520 30) derived from phytozome v7.0 (chr-ID Chr1; pos 19348283 to 19348965 reverse strand)
actctctcattcctcatcgtaccctctttactcaggttactatgtctcagtctcacttctttttttgttttactcgagttttcttgagtattaatcagcgaaaaaacgtattttgaatattttatgttttgtgtttcttctctaactagtgactacttctagatttcaaagaacttataaacaaattattatattattttcttttttctttccaattttgtatttcttccttcttaacaatagctttaagctaggcttctttttctctttataacgtcaaaactgattagtttgttaggaaattgcagaggcaaattaaagtaatgatagtgtaaaccatgaatttgtcaaaatccagaaattttttctaatgatttcctcttgttaagtatgtaaaaataataattatgtcaaagactcaaaagaagacaaagatctgaaaaagtatttcctgaatcatggaacctgagaaataatattcaacaaaaaaagtaattaattatctagggttataacgttttttgcttcacagttgtgataagtaaaaaaaaaacatagtttgtgttgcttcctcttattctgtttttcatatgaggagaccattcggttctttgtttcttagtgtgtttctatgaaaacgtttccatctttcaggtattttctgaagttaaaagatagaaata

SEQ ID NO: 573 - DNA, 268 bp, Arabidopsis thaliana
  Intron number 3 from transcript AT1G52100.2 (locus AT1G521 00) derived from phytozome v7.0 (chr-ID Chr1; pos 19384126 to 19384393 reverse strand)
aggttgtcataataattcctcatctttaattgatattaaaaatttatctactatatatgagtgtttccaactatcatggacgggaatcaaagtttaattagttctactttttgagtacatacttagatttaacatctaaatgtattatttttttctgtttttcttcaatataattaacatctaaatgttgttggtatccaaatttactaatttgattttgtgataattattgtactattattgttgcagtttacggtcaatcatccat

SEQ ID NO: 574 - DNA, 391 bp, Arabidopsis thaliana
  Intron number 1 from transcript AT1G52100.1 (locus AT1G521 00) derived from phytozome v7.0 (chr-ID Chr1; pos 19385124 to 19385514 reverse strand)
ctctccttatcgctctctaaaatccactataagaggttctatcttcttataatttggaaagtatatagcatcgaaacactttgaatgtaaaaatatatacatattataatagttatgcagtacttaaatatgcttagttaattagtttgattaaaatatgtagcttagtggttaatattaatatttagattgggttaccacttagcttagattcaagctttcaacactacgtcaacccacgtaatatatgttgttaacaaaaaacttagttttcttcaagaagtgagtgtttcattactcttgctttaatttgtgtatgcaaaatgattttgcgttttttccttaagtaataaaaatgaatttatatatggcagattcgtaaccgtaagtg

SEQ ID NO: 575 - DNA, 404 bp, Arabidopsis thaliana
  Intron number 1 from transcript AT1G53100.1 (locus AT1G531 00) derived from phytozome v7.0 (chr-ID Chr1; pos 19788564 to 19788967 reverse strand)
ttctcttgcaccaatacagacgaaaaaaaactcaggttccaatctctctattccttcaattcctagatttgattttgcttattgaaatactctgtgagacgttttcttgtaactttttttttttttactttcttatgtgatcatatcaaaccttaaagcaatttccaacgattcttttttgttcaaatctcttttggaaatccataaatgtttgttttgtgtggttttggtgaagagttacttagtctaaggttaatctagctgtttagttgtctgattgattaattaactcataaattctgatcagagatgttttagaggacaaaaacattctctgtttctgaaaattaatgcacttaaagtttatctgaatcttaattttgtttaataggaattagtgtctg

SEQ ID NO: 576 - DNA, 460 bp, Arabidopsis thaliana
  Intron number 1 from transcript AT1G53660.1 (locus AT1G536 60) derived from phytozome v7.0 (chr-ID Chr1; pos 20034105 to 20034564)
tcactctctctagcggtcaaatcttcttcaataaggttttaagtcaaatctcacattcatatgttattggatctatgttttctatttgcagtctttttgctcaagatttgattttattagatctggtggacattagtagattttaaagcttttaactttgacaatcttggtaaagttctgttacaatgcgatttggttttggacaagaaatataataataataaaattcttgttaatacaacagtaggttcaaatgtatggttcaatggtgagttatgtacttccattacacaaatgattattcgcttaaacaacttttttactgttcaaacttttgtaaattttggttcattccatttctctttagcttctttcagtttcttttttccagcactaatttttatttctgactcaatctgatgcagtgggtattgtcatctaaggaaataaacttccctta

SEQ ID NO: 577 - DNA, 395 bp, Arabidopsis thaliana
  Intron number 1 from transcript AT1G53690.1 (locus AT1G536 90) derived from phytozome v7.0 (chr-ID Chr1; pos 20042918 to 20043312 reverse strand)
acagcccgaacaactagttatttacgtctgcggaggtaaagctcagaaaatttcatttaactctgactttttggtttatgaaccctaatcttttaagcaatttcataattggctttagctaggaagcaacaaaaatcaatcagattgttctgatctatctgacttgaggtctttttgattaggagctttgctttacttttaaatcaagatgttcctaattaagcagcgtcagacattaacatgcaaaacccaaaactaaatcatacgaagatttatcatatttttttgtaagtaataggttgtgttctttttttctatggtttgcttaacttgtttgtctaaattatgtttgttttgaagattgtggacaagagaacattttgaagcgtggagat

SEQ ID NO: 578 - DNA, 465 bp, Arabidopsis thaliana
  Intron number 1 from transcript AT1G56520.2 (locus AT1G565 20) derived from phytozome v7.0 (chr-ID Chr1; pos 21178021 to 21178485 reverse strand)
gtgggcaacattgccggagaagactttaaacactggtttgtatttagttaagtacagtttatttttcttatgatgaataatggtgttttatgattttatgtgggatgacatgggttgtgaagtttggaatttgattaatctgataaatttgaaacttttaagtatatttgacagggattttgctatggtatgttatagcgtgtaatgaataggagtttgattactatagttataaatatcaattctttaagtatatttgatcaaaatttgttgtggttctaattactgttatatttcgtcgttatgaatatcagatattaattaatatctgatattgcattctattttagagtaggtttaattgttgaggggaaccataaatcggtagtgtccatgcaaggaaacagaggaatggtctctttatgattttttctcatgaattttcttttctttttgttaggccca

SEQ ID NO: 579 - DNA, 337 bp, Arabidopsis thaliana
  Intron number 1 from transcript AT1G58470.1 (locus AT1G584 70) derived from phytozome v7.0 (chr-ID Chr1; pos 21727027 to 21727363)
gtgtcaaatcaatctactgttctctctcctatctggtaaacttttcctcttcgccatgaaatttttttcttgctagggttttagtttctacagttcgcttcccaaaaattaggggttttgtcacaatttctcaatttcttgttccatttttcttcttttctccataatcattgcttaatttagaatcccaaattttacaaattagggtttttgtttaattttaggggtttttgattttcaactgttaatagtgttctcgatgtcataattctgattttttttattatctattccgaaattagggcaaaaatctcagacaaacctgcaaaattagggt

SEQ ID NO: 580 - DNA, 273 bp, Arabidopsis thaliana
  Intron number 1 from transcript AT1G59990.1 (locus AT1G599 90) derived from phytozome v7.0 (chr-ID Chr1; pos 22092327 to 22092599 reverse strand)
gagattctgggttcgatagaccatctcttactcaggtaagttttcaaattttggtgaaatctaacagaagaacttagagaagcatttgttgattgggaaatgataagttagagtttctgtttttatgtaaagtcttgagacattgtttagtgaatgggaaaaaaggaatcatttttgcgtttttgattctgaaatgtttgattgtgaatctgattttatactgttttcttacctgtaggctgtttgcataccgtctatattgtctgggaaaga

SEQ ID NO: 581 - DNA, 338 bp, Arabidopsis thaliana
  Intron number 1 from transcript AT1G61210.1 (locus AT1G612 10) derived from phytozome v7.0 (chr-ID Chr1; pos 22564788 to 22565125)
gcgaagcgtggttataagctacgtatccttatattgacgattttgagaaattttaacagtttctttatcactgaatcgcttggggtttatttcataaacaagctttggtttattagctcttcgtcaatttggtcaaaatgtttctattattgtttgcttaattaaactgagagcaaattgatagaaaaagacactgcaattaatatgtttgtcttctccaattttttttttctggatatgctttgaatttatttttgttgatatgttattctctgtgggtttgtttataacttaacttgattttggaaacttagaggagtttttggcacattctgcaa

SEQ ID NO: 582 - DNA, 575 bp, Arabidopsis thaliana
  Intron number 1 from transcript AT1G61390.2 (locus AT1G613 90) derived from phytozome v7.0 (chr-ID Chr1; pos 22653478 to 22654052 reverse strand)
tttaaatacgtacagtgtttcaggttagcttcactttctagtttgcactttatctatcaataaagttatataacgtttgaaagaaatttctaaatctgttttgccttttggaaattgaaaaagctgcaaacttaattgctgtgtaggtttgacttatgagagaccaaaatgtggaaaaaacaaaactcatttactagattctatctttaaggaagagtaacatggaacttcttgtcaaggctgtctatacagattattttaatgcttatgtttagattatagttataattattctctttgacaaaagaaaacataatcaactagtgcaatgcttaagatatagaggataacatgaaagtcttgatttcttttgtctcattgatctctgttcctctacgtaaagttttgctcatatgtacaaacttccacaaagaaattgtgcagacaaacaggagtacactgtacacatgagaaagatgggtatggttatatttgcttgcttgctcttgctgattatatttccaacttttggctatgcagatataaacacatcaagtcctttgtcaataggacaa

SEQ ID NO: 583 - DNA, 336 bp, Arabidopsis thaliana
  Intron number 1 from transcript AT1G61890.1 (locus AT1G618 90) derived from phytozome v7.0 (chr-ID Chr1; pos 22870530 to 22870865 reverse strand)
gacttctggtaacataacaaaatgatttttcatctctttttgtttagatttagttgtaaccactaatatggttacgaatcaccaaagcgatttttttctttttggttaaaaccaatcaccaaaatgatcagatgtattatatcaaattattaataaaaaataacattgaaaatttattaaaattgagaaaaaagtagaaaatttactgaaatttgactaaagttttaccggttttttcctgatcagttgaaaaaacagagaaaatttcttgaaattttgattaaaattcctctgaatctaattgttttcttttctctggtgatgatatagcttgga

SEQ ID NO: 584 - DNA, 474 bp, Arabidopsis thaliana
  Intron number 1 from transcript AT1G65660.1 (locus AT1G656 60) derived from phytozome v7.0 (chr-ID Chr1; pos 24420755 to 24421228 reverse strand)
gcgacggcttcaggtacccatttccttcaacatttcttctaattcatttgaaactggttttcaatttagctttaaatttcccttttggtggtaaaaaaatctcgatttcgaatcatactctcgtaattttgtatcattaattttaaggttcttactgttttggaagttgtattatcattgattttctctattttggttttacatccattttgttttacttacgagtctgattcaaatttttgctattcttattgatttgagactttctgtgattggtggttctctctctgttatggttttggttagattcaaattgtgattcttaagagtctgattcaaagttcactattcttattgatttggttctttgttagcaatcaattttcttaaagttctatccttttatctttctgacatatgtttttggacttttttgcagttgcttttaagtctagggaagaccataggaagcaa

SEQ ID NO: 585 - DNA, 800 bp, Arabidopsis thaliana
  Intron number 1 from transcript AT1G67390.1 (locus AT1G673 90) derived from phytozome v7.0 (chr-ID Chr1; pos 25244985 to 25245784)
ctctttccaatagtgttgcggaatcgataacccaggtttctctccatttttccttattctgctcttatgagtttccagtcaaatgttttgttttttatctgtctcgtttcccttaacttaactgattagattgcattacattttgattcgtagaagaaatgttatacgtgaaccaattgaaatcaaatgcacttgcttatataaatatgaaagtcacatgtttaactttgtggttaggtgattatctggttttatcttattttcccgcaataataaatggtaagcataacggtatttcaagcgaaaacatagattatttctttaaaatagttttcatttaagattttttacgagtattaagaaaacattcattgttttaattctaattactgtattattttagttgatatcatcaattaataagcttaaagaatagagatagaattagaaaatctatcaagtgcattgaaaaccgaaaatgacaactaattcaaaataaaatttaacttttaaaacgacagctaatacgaaatggagggagtatttttttaaaaaatttgtttattaatatatttgaaagtgagcactgattttgaatgtattattctattagctaatgaaaatatataaaaaatgatctcttgccatatatctttcaattttattgaatttaacaattgatcaacttattcacaagatataaaagaattggcttttgttgacaactttttacattgtatatgtgtatcaatctttaactaaaaccactatttttgttctcaaggttataaacaatcaca

SEQ ID NO: 586 - DNA, 728 bp, Arabidopsis thaliana
  Intron number 1 from transcript AT1G68210.1 (locus AT1G682 10) derived from phytozome v7.0 (chr-ID Chr1; pos 25566076 to 25566803)
cttcaacaattttcaaaaagaggtaaagaatcgaccaacccgcataattgtttttttttttcgtcgtttatactagcattgattatttattttttcattcacatatcaaattgttaaaaaaattcttaatttttgcacttgttctgttaaaattttataatttgttaaaacatattatgatgattaattctaaatctcttgatactgtggtttatgcattgtattgatacgatctaagaattaatcacgatctacgaaattaatttgaagaaatctcaaataagatataaatgtataaatcacagtgtttgtcacataaaaaagatttgaagctatttggtcttagatctcaatgatttaaccacatctttttttaaatcaaaattagtatttgcgaaggtttacgacgaataataaagtgatttacatatcctttgctatctgagaaaccgtaatgattttaaaatataacctatatttttgtcggatattaagatttcgagatattcgatgataccaagaaaaaatacattccaattataatataattatgtatttattgaccgattataaattttaactaacatacatgtgttcatcattatattcctttttattttattttttattgaatgaataatctaacaatttgtttttttaataattatatgtcttaaccatttttcaaaagttgatatacatcttacatacaaatttatgtattagtg

SEQ ID NO: 587 - DNA, 291 bp, Arabidopsis thaliana
  Intron number 1 from transcript AT1G68580.1 (locus AT1G685 80) derived from phytozome v7.0 (chr-ID Chr1; pos 25753089 to 25753379)
ttgcgctttggctcgattctattgtttctggtaatttttcttaatctatctttcgaattcttctctacccttttctaaattttgaattttagatctgggttcgtatcaatttctgaaatttctgaaagaatctgttttttttttctcaacatgatttgaagaatttgataatttgattttatgggtgtttagtatcatcatgtgcgtttatctaaataaattggaaatattgtttctttgtgttagagatcttaactggttccgttgcaccttttgcagctaaacctatta

SEQ ID NO: 588 - DNA, 467 bp, Arabidopsis thaliana
  Intron number 1 from transcript AT1G68580.2 (locus AT1G685 80) derived from phytozome v7.0 (chr-ID Chr1; pos 25753089 to 25753555)
ttgcgctttggctcgattctattgtttctggtaatttttcttaatctatctttcgaattcttctctacccttttctaaattttgaattttagatctgggttcgtatcaatttctgaaatttctgaaagaatctgttttttttttctcaacatgatttgaagaatttgataatttgattttatgggtgtttagtatcatcatgtgcgtttatctaaataaattggaaatattgtttctttgtgttagagatcttaactggttccgttgcaccttttgcagctaaacctattaatgacttaattttgctgcagacagatccggtttccaccttttggtactgagcatgtctgcacgaattgatatacttcaagttttgattgattttctgattagagatcaatgtttattgatgtgtattgctgatcttttgttattggttttgcttcaatttttaggtgagatacctc

SEQ ID NO: 589 - DNA, 599 bp, Arabidopsis thaliana
  Intron number 1 from transcript AT1G69230.1 (locus AT1G692 30) derived from phytozome v7.0 (chr-ID Chr1; pos 26027085 to 26027683 reverse strand)
cctttcttctccaatcaccttagcttgctgatcaggtaaactagattggtgtttcgtgttgttttcttctcaacttaggtgtttgatttgagaagtttttctatgtatgttggcatgttgcgttcgtagcattgcatatcaacggataggtttgaataggtagaattaatttgattgatatatgaaagaatgtttgtatatatactctaggtctaggttattgaatattgagaaatttattttgttaggtttagatgaattattcttcgatgagtggttcaaagttcaattggcaagtcttttcaatgattgtagtattttggtgatgataagtaagttgttaatgactctcaagtctgaattcatgttttggttttgtttccttgtaaaaatgtgaacgtttttcttacagaagctttcacaaacaaagtatggttaattgagtgactaatccactaattctcttttgttgttttatatcgtttattaggtaatgttttttttttttgggtgtgtaaaatatgatactgactcaagattttatcatatttctgaatccataagctaaagtacatttgagagaagcaagagagatagaa

SEQ ID NO: 590 - DNA, 598 bp, Arabidopsis thaliana
  Intron number 1 from transcript AT1G69230.2 (locus AT1G692 30) derived from phytozome v7.0 (chr-ID Chr1; pos 26027086 to 26027683 reverse strand)
cctttcttctccaatcaccttagcttgctgatcaggtaaactagattggtgtttcgtgttgttttcttctcaacttaggtgtttgatttgagaagtttttctatgtatgttggcatgttgcgttcgtagcattgcatatcaacggataggtttgaataggtagaattaatttgattgatatatgaaagaatgtttgtatatatactctaggtctaggttattgaatattgagaaatttattttgttaggtttagatgaattattcttcgatgagtggttcaaagttcaattggcaagtcttttcaatgattgtagtattttggtgatgataagtaagttgttaatgactctcaagtctgaattcatgttttggttttgtttccttgtaaaaatgtgaacgtttttcttacagaagctttcacaaacaaagtatggttaattgagtgactaatccactaattctcttttgttgttttatatcgtttattaggtaatgttttttttttttgggtgtgtaaaatatgatactgactcaagattttatcatatttctgaatccataagctaaagtacatttgagagaagcaagagagataga

SEQ ID NO: 591 - DNA, 373 bp, Arabidopsis thaliana
  Intron number 1 from transcript AT1G78240.1 (locus AT1G782 40) derived from phytozome v7.0 (chr-ID Chr1; pos 29435816 to 29436188 reverse strand)
tttgtatatatatatatacagagcagcgtagaaaagtacgatttttgcttcttttcctcactcttattcatcttcttgattttgattcgatttggtgtttattcgcttgattaatttaagggttgttggggttttttgtccaatttttctgggttttcgttcgatttcgatttccacgagtttaccaatttcgtctctcctcagaatttgtggatctgcttatgtaaaaattgagtctttttacttgttttgttcgaatttgtttacaaacgcgtgatctcgagtttcagagatctcaaagcttaaatttttataatctgatggacttgttttttatttacagggatcttagatttatagcagcaacaaaaaa

SEQ ID NO: 592 - DNA, 743 bp, Arabidopsis thaliana
  Intron number 1 from transcript AT2G03250.1 (locus AT2G032 50) derived from phytozome v7.0 (chr-ID Chr2; pos 985480 t o 986222 reverse strand)
ggtttctccggcggagctcgccaaaaatccatctagtaagcgaaatatgaaatattttaaccttttaccaaaaaattatatcaaatatttgatagaaataaagcgaaaatttgataatctaaaagccctgaaataacatatgataataataataaagatatcatcaaaatctcctaaagatatcactttttatgattttcatgtattcatttgtgtttgaaattcgagacaaatatttgacaaaaaatgtttttttgcgaataatgtaaatattcattgaaattgaaattgtttagactttacatgattgaataacctatgaattttgtcacttggcaaaaaaagatgaaaaacatggaagcaaaatcaaattttaggtgtaaaactctctattagaaaaacagaaaaatatcaaattttaatatttagtccattgaagcaatgaagctcacaatatcagctgaagtgataaacgatctaaaagttagaatatgaatcctccaggacgagaagaaaataattcttgtaacatcacaaaatataaatgaaaacgaattgatactaaaagttttatttccaagttctagcttgtccacctctatcaaaagctgattaaacacacatagtaaagccatatttttttatagttatattcaaatgaacagtaacaatatatatcaaactcgccaaattttaaaattgaccttttttgtcttctggtgttaattgtagtgaaagttcat

SEQ ID NO: 593 - DNA, 260 bp, Arabidopsis thaliana
  Intron number 1 from transcript AT2G04425.1 (locus AT2G044 25) derived from phytozome v7.0 (chr-ID Chr2; pos 1537173 to 1537432 reverse strand)
atttcaggtaaaaaatttatctgtttataagtaattatctcatttttttcatagattatcttaagaaaatgatagttttgccacttgagtcttttttttggtggaaatccacttgagtctaaatagtaaatagtagatgcaaagaagaagaaaaaaaattatgtgggggcaataaaaatctttaaatgttctattgactatttttttactgttgatatatgaatcaaatagggcaattcagaggaatcaaacagtgtgag

SEQ ID NO: 594 - DNA, 269 bp, Arabidopsis thaliana
  Intron number 1 from transcript AT2G13542.1 (locus AT2G135 42) derived from phytozome v7.0 (chr-ID Chr2; pos 5643321 to 5643589 reverse strand)
tattttcgttgtagcgatattgacaatttcggtttgtaattacaacatcttggcaacacaaggaatgtttttattattcaatttacagagattattaatttatcgaatattaatttagagaggttaactgtttttttgatcatttgaagagcaatggttaaacattatcttttcagaaattagaaaaatgttttcatggaatgtcttacatacacatatatatatatataacttgggttataaaattgcagtgatccaaatccaacaat

SEQ ID NO: 595 - DNA, 411 bp, Arabidopsis thaliana
  Intron number 1 from transcript AT2G15310.1 (locus AT2G153 10) derived from phytozome v7.0 (chr-ID Chr2; pos 6654060 to 6654470)
gcttggagaagttgtcacaacagtgcctactattggtatgtgacatggacttttcttctcttgtttttttggttctgttgagacttctatctattgattctgaagttagagcaagatgttgattcactctatatatctatttattgaggattatgaaggaaactttgtttggctagttagaactgctccaaccatatatacttttgtgtatctttattgtggatcatagctcatgtgtagatactagatcatagttacatttttatttacctttgattgtgtttgcattggtgaggaagaatattcttaatagcttgataaatctcatattgatgattaaccttttttggtttttggttgttttgcgattttccaggtttcaacctcgagacagtagaatacaaaggcatc

SEQ ID NO: 596 - DNA, 814 bp, Arabidopsis thaliana
  Intron number 1 from transcript AT2G16050.1 (locus AT2G160 50) derived from phytozome v7.0 (chr-ID Chr2; pos 6980869 to 6981682)
tggaaaaaaaggccgtagctggagttacaggtctctcttcttgattctcttcttgttctttcattattatgataccaaagattagcatgtaagaaaaataaaaattgtttcgtcttttttttataattattagcatgttttatttgaaaacatatatagttcgctatattagaaatatagtatgttatatgttagaaaataactaagatacaactcaaatcaaatatatagaatggtaattggaaaaaaaaatgagcattgctttagttgtttttgtttttatttattttagttcgctgttttcattggtgttttaagtcaacatcagcatatattccaaatcaacatctctaaagaatattttaaagcaatatgataaaattttggattacgtttatttattgattcttgaacattaatttcggctttaaaccgaatatatgttagagaaaaaggaaaaattaaagcaatggcattcaaacacaaactttctcttttctcaaagaaatgcttgtgcttggtaattggtagacatgttacatagcgtgcactctaagttagaactttacaagtttatacactgacttagcacattatatatgtgtcatcgccgaagtttttaaatagataacgttagttcttagttatcaaaattatataccaaaatagaaattttagagtcaaattccttgattaatgcattgcaacataattttgagccagttaataataaaaatcaggttttaaatcagctaaatatgtttgttttttttgtcacaaaaatacaggtcatcttgcaaaaagtacaatctcc

SEQ ID NO: 597 - DNA, 617 bp, Arabidopsis thaliana
  Intron number 1 from transcript AT2G17060.1 (locus AT2G170 60) derived from phytozome v7.0 (chr-ID Chr2; pos 7422861 to 7423477)
cccttaattttaggcatcacttacgacgggcagaggtacgcgaatttattattattaattgtccacttaattaaggggaaacaaaactgccctcttaactgaaagacctagaatctggaaattctacgcagactttaattttgatgatactacagcggaatacagagaagaacaagaaacataatatggaaaccaaggagtagcgtgttagtggtacttgttgagagttgtcacgtaggtctaggacgacaaaatgtattttgaagaaactatgattaataaccaattttttaataactaatcaaaatacaacaatatgtcgtgtcatattttatttaaaataaattaaaattaaaattaaaattaaaattaaaattagaaaacaaaataaattaaggaaataaaatttgaaccaaagaatttttctagaccttcacccgcaaaaaaaatctaccttagacctgaagttggatcatacgctttccaaaaacctaaagtttgacacatcttttattttaaattttcctttattaccactgataatggtaaattaactttttattcaaacttttactattgcagcgaagaacaacttttaatcaatcaaatcgttgggg

SEQ ID NO: 598 - DNA, 737 bp, Arabidopsis thaliana
  Intron number 1 from transcript AT2G18196.1 (locus AT2G181 96) derived from phytozome v7.0 (chr-ID Chr2; pos 7921415 to 7922151 reverse strand)
gctcgtccactttctttacaggtattctctttcctttttatgtatctatatagtataatcgaccataattttcatgtatctatgtagttttagtctcaaattgactctatgatcatgatattagtttttcattaaaatagaataaattttggtaacaattatctttcaaaccgttattattctgatacatgcctaattgaacgaagagtgcaaatgatttttgtttttagagaaaggtatgactttgttaggtttgtgatgatggtagctagagcgaattaagttgctttttttttttagctaaacataaagatcaaagttcaaactatagttagctgatctcctctaattttgtaaataagttggcaaaacagattctcgatcgcaaaaagaatattaaagtactcattgtgctcatttttttttttctcttttgttagttaaaaaatgtcttttcaatttttattgattcgtttaggggaatcggacaaaactgaaacggaatgtcataagtttgtctcactagtggatgttactatatgtgattataatatcctttggctgattcagcagagagttggtcatttaaataattattcttctaattaattacctttttctttatggacatatatcacatattaatactaattgtttttgaagcagtcatattagttctaattagtttgtaatatatgaatggtgctaattaacagacgatagacctgaaagtaagg

SEQ ID NO: 599 - DNA, 532 bp, Arabidopsis thaliana
  Intron number 1 from transcript AT2G19110.1 (locus AT2G191 10) derived from phytozome v7.0 (chr-ID Chr2; pos 8278946 to 8279477)
tcttccttttgctactagctctcctctcttctccggtatttttgtctctcttcttaattcacacagatttcatgataagtgatgatctataacaagacgctaactcttctcttgcatttctcgtgttttcattttcttgttacgccaaatttatcccttcaaaatcatttttttatgcgtatagaatccaaataataagtaaaagctgattcgtcttcttccacttaacacaagtaagcaatgagagggtgaagatttttctttaggaaaaaaaagagagtgaagatattttttggcttgatctcaacattattttttcttaaaagtaaacattttcaataagaaaatacaagacccataccgaaagtttcttcttaaaaaaaaaaaaaaggttttgaactgtttcatgataatgataactaaaaaagtttttgctttcttgttttttttcctccgcaaaacagtcttaaagtataaccaaaaagcctataaatcaatataatttgttgttttgatttacgttttacagaaa

SEQ ID NO: 600 - DNA, 424 bp, Arabidopsis thaliana
  Intron number 1 from transcript AT2G19410.1 (locus AT2G194 10) derived from phytozome v7.0 (chr-ID Chr2; pos 8408401 to 8408824 reverse strand)
cgtcatccctaccattacttctattcctactccgagtaagtctctctcaatcattcacatttttcttgttattgttattaaaaacctaatgtaaatgatataaagataaaatgaagtaaaaaccaaaagacagaaaggaaataataattactgagtttttttttttttttttttcacaccaaatatatagaacatgaaggaagaaaatgtgaaaagtaagtttcacaaatcttacaaattatgttcgtatgataatcaaatgattaagtaattactttttcgtagtttgattttaatgaggtgaaattgttccgttttttgtatgttaaaaagtaaattagctaattcgacttatcaaaatttttgtttgacatctttttaaatacttaatttatcattgtaatttaaagatattttgatatta

SEQ ID NO: 601 - DNA, 363 bp, Arabidopsis thaliana
  Intron number 1 from transcript AT2G20580.1 (locus AT2G205 80) derived from phytozome v7.0 (chr-ID Chr2; pos 8859320 to 8859682)
aggatttggtaaagtttcttctttctcggttttttgatttatcgaatcctttttcgacattgtgtgtcgtgtttagtatctgggttcatcagaaacgaattaatttcaaatctgtaagatctgcagttaggtttttaattggagtctcgatcgagttgaagtaggggtgttatagaattagggtttttaatctggcaaagtgagtgttttgttcgtcattagactagccggattagaaagttgttaacttgtgatgtgaggaaagttttttttgtttgtatatggtcactttcttaatgactcgacttacattgggttgtgattgtagtctgaagaggacttggaactaaagcagaaccttga

SEQ ID NO: 602 - DNA, 498 bp, Arabidopsis thaliana
  Intron number 1 from transcript AT2G21500.1 (locus AT2G215 00) derived from phytozome v7.0 (chr-ID Chr2; pos 9209645 to 9210142 reverse strand)
actttccggcgacgttttccgacttccgagagcaggttcggtgttcatcacttgtcctctcacatgcttaattcttttcgattttgttatttagttttttttttagtttctattttgggtaatctcgacttggtttgcaagtcccttggccataatatcggatctgtttaatgttagttatgtagatattgcccgattcaatttctatttttagtgcctttgagaagatttttcattttggattttcttagtgaagaatagtcatcacagttcactcacctacatgttagtcagcaatggattactggatttgattctctctttattttcattctactttgaacttcatttatcttggccatggccagtttaagttattgtgtagattaatggtaagctcttttttttagtgttattgttgaggttatagtcataattgattctgattgagttcttaaaattgtgtttttttttgttggaaggttttgaggtggtttt

SEQ ID NO: 603 - DNA, 333 bp, Arabidopsis thaliana
  Intron number 1 from transcript AT2G22000.1 (locus AT2G220 00) derived from phytozome v7.0 (chr-ID Chr2; pos 9362589 to 9362921)
ccttagtagaagaagaagattcaggaactgaaactgtaagctctctaatctctatgtactacaatctgttcttataataattatataatcaaagatgcatcagaagtacatagtttaggaattaaacgtggagaaaaaagaagttaatttaggaagctaggaattagttaaaccctaattgaaaatttgatctttcttcttttgttggtcaaacacacttaaactaaaaaggttatactacttatattggacttaatgttagaagtcatgaaatttgcaataaattaaacatcgtatttatgtttcattatataggttgaagaaacaggattt

SEQ ID NO: 604 - DNA, 564 bp, Arabidopsis thaliana
  Intron number 1 from transcript AT2G22720.1 (locus AT2G227 20) derived from phytozome v7.0 (chr-ID Chr2; pos 9657611 to 9658174)
ttctcgtcgtttcatcggttccaggtcaaatccaggtatgtcaattgtaaaatttcgatcagattcgtcgatttcgatcagctttttcgattttggatctattttctatgaaatatcagatctggtgattgttttacatatttttgggttgaattcacaagattttctggaaacgagatcgattaattgagttttctgtgtttttatcttaagctagatctcgatttctatgtttttggattgatttgataagattttcgagaattttttgtgtttttgtcaaagttcgatctcgatttctatatttttggttgaattcacaagactttctggaaacgagatcgattttgtgagttttctttgtttttaatctcgatttttggattgatttgagaagattttctgaaagcgagatcgatgtttttggggattttctttgttttgttcaataattcggtctctgttttcttatcaaaaaattcgttttccatctcaaatcgatgttcttattgatttaattgagttttagtttgcagggatttgatcgttggtaagctatctttc

SEQ ID NO: 605 - DNA, 376 bp, Arabidopsis thaliana
  Intron number 2 from transcript AT2G22720.2 (locus AT2G227 20) derived from phytozome v7.0 (chr-ID Chr2; pos 9657925 to 9658300)
aattcacaagactttctggaaacgagatcgattttgtgagttttctttgtttttaatctcgatttttggattgatttgagaagattttctgaaagcgagatcgatgtttttggggattttctttgttttgttcaataattcggtctctgttttcttatcaaaaaattcgttttccatctcaaatcgatgttcttattgatttaattgagttttagtttgcagggatttgatcgttggtaagctatctttcagcaaacatgcatggttatgaagatgtaagcacgctcatgaatttttgttttcagtgattttgtcgaattcaatttaaggtagatagatttgacattgttcgataatgttatattgcaggaccttg

SEQ ID NO: 606 - DNA, 571 bp, Arabidopsis thaliana
  Intron number 1 from transcript AT2G22720.3 (locus AT2G227 20) derived from phytozome v7.0 (chr-ID Chr2; pos 9657611 to 9658181)
ttctcgtcgtttcatcggttccaggtcaaatccaggtatgtcaattgtaaaatttcgatcagattcgtcgatttcgatcagctttttcgattttggatctattttctatgaaatatcagatctggtgattgttttacatatttttgggttgaattcacaagattttctggaaacgagatcgattaattgagttttctgtgtttttatcttaagctagatctcgatttctatgtttttggattgatttgataagattttcgagaattttttgtgtttttgtcaaagttcgatctcgatttctatatttttggttgaattcacaagactttctggaaacgagatcgattttgtgagttttctttgtttttaatctcgatttttggattgatttgagaagattttctgaaagcgagatcgatgtttttggggattttctttgttttgttcaataattcggtctctgttttcttatcaaaaaattcgttttccatctcaaatcgatgttcttattgatttaattgagttttagtttgcagggatttgatcgttggtaagctatctttcagcaaac

SEQ ID NO: 607 - DNA, 270 bp, Arabidopsis thaliana
  Intron number 1 from transcript AT2G22740.1 (locus AT2G227 40) derived from phytozome v7.0 (chr-ID Chr2; pos 9666629 to 9666898 reverse strand)
accatttttcgatcgcagacgaagatctttcaccggttgatttctctatcctttaatctgatcggttaatctcggttccgttgtgtatttaatcttcgtttcttcgtagatatcgtctttgattaagtttttgtttctgcgaaatcgaattctgaaattagatttgagaaagaaaaaaaaatggatgaaacagtttcgtattattgaacatttgtggtttaacaatctgtttatagtgatgatgttttgttgtttgttgatagattgtga

SEQ ID NO: 608 - DNA, 253 bp, Arabidopsis thaliana
  Intron number 1 from transcript AT2G23990.2 (locus AT2G239 90) derived from phytozome v7.0 (chr-ID Chr2; pos 10207506 to 10207758 reverse strand)
tccgtccggttccaagtcggagacgctctttgttcgtatctaattctttcttctaaattatacttttgacgttttttaattggttttgaatattttgatctacatgctagctagttttatcaagtgacattattaccatggttttccacaaaattccattatgattaaatgggtcttaatcttttagcatgttaataaaatttaacataggttgacattttaaaaaaaaaattgatgctaccatagtttcgtc

SEQ ID NO: 609 - DNA, 523 bp, Arabidopsis thaliana
  Intron number 1 from transcript AT2G23990.1 (locus AT2G239 90) derived from phytozome v7.0 (chr-ID Chr2; pos 10207240 to 10207762 reverse strand)
tgagtccgtccggttccaagtcggagacgctctttgttcgtatctaattctttcttctaaattatacttttgacgttttttaattggttttgaatattttgatctacatgctagctagttttatcaagtgacattattaccatggttttccacaaaattccattatgattaaatgggtcttaatcttttagcatgttaataaaatttaacataggttgacattttaaaaaaaaaattgatgctaccatagtttcgtcatgatggtcaagatccggatgttagttattgttggatacacttttagtctgcaaaggcttctggtttgaatatcagaagtcttgagttgggtttggttatttgatatgtcaataatccaaatcatttagatatattcaaggaacttaaaacacatttaagatatataattattttttcatatatacgaatgcataagatagtaagctaaggattgtttttgcatgtgacagtgtttaaatacgattcaaagatcgattcggtgtta

SEQ ID NO: 610 - DNA, 627 bp, Arabidopsis thaliana
  Intron number 1 from transcript AT2G24860.1 (locus AT2G248 60) derived from phytozome v7.0 (chr-ID Chr2; pos 10587431 to 10588057 reverse strand)
gatcaagcttggattatctcacaggttcgtatctccagagagttgttgatgtgtataattttgttgaatctgagtaatcacaagaactgatccttgatgtagtcatgtacgagtgaagagctatatgcaattttgtatgagattaagaacttggatctgtgatgaaatgttgtaaatttcagattatgaggtgaatagtatcagcaagtttcaaaaggatttgtatcgaaaatctgtaattgcaaagtaccttttagttggtttctagcaaaaaatgtttgttcacaattcatttgatttgtgcatatgatgagaacatgttagctacttaatcaggttgtagctgttctctatgatccctgagtgatgaggcttaagcaggcttatctcgcaacgcaatgtagttttgtagctttgcatgtacaattgttggattctctgctttttctctaatattgctcttagagaatctatcaaaagttcagactttgaagcctttcttctagcacttgcaatttgatattgagctcgtgtgaattttctagatgttacttgttgacctgtgtttcgattcaatgattttctttgtctgtttttttcttcactgcagcaaccaagtcctgttgg

SEQ ID NO: 611 - DNA, 348 bp, Arabidopsis thaliana
  Intron number 1 from transcript AT2G25220.1 (locus AT2G252 20) derived from phytozome v7.0 (chr-ID Chr2; pos 10745124 to 10745471 reverse strand)
gctacattctctcctcgtattattcctcgttgacttcatttcattttatttttttagtttctgtgtttcttgatttgatctatgcctatgcgttctcgaacttcgaaaaatataaagaaaaaatagtttttaaaacttgataaattaaatgctatttatgagctactcacttcttgtctttttgtttttgtttttaaaaaaaaaaattgaaaatattatatttttcttatcagaattctttcttgaatttcgaaatatgggtttgattcagaatttctaagaaccatacttgacaaatttgacagttgaaaatcattaaaaggatttttttctgtgtcaggaatccaa

SEQ ID NO: 612 - DNA, 297 bp, Arabidopsis thaliana
  Intron number 1 from transcript AT2G25295.1 (locus AT2G252 95) derived from phytozome v7.0 (chr-ID Chr2; pos 10769987 to 10770283)
ttcttgatcacaggtgagtcaatgatacaaaatattattaaatgcatatagttatcaggatatgatatacaattattcaaagttaaaagtttggaagaacataatgaatgttctttgattctttttcttcccacaaaaaaaaaattattctttcttgctcacttttacggataactatttattacacatgttaatcacttcacacttatgataactatatatgcttggtttttggtttatgataaacataaaatatttacaggagtaaaaccagaggtaagagatatttgtccagga

SEQ ID NO: 613 - DNA, 714 bp, Arabidopsis thaliana
  Intron number 1 from transcript AT2G25344.1 (locus AT2G253 44) derived from phytozome v7.0 (chr-ID Chr2; pos 10795161 to 10795874)
cgtcattttgattatcttcaccgttcttgtgttaggtatgtatttacatttataattgttttattatatcacccataatcgttgtagaaattttactttataaaaactagttgaccaaaaaagtttaaatagcatattgaatttaatatattattatcaactcacctatgctatacaaatttgtgtcaaatcctctttgtacaatatagattgccatagtatcaagtttagctttttctatgtcttaatacataccatagctatccctaacaaacggatcccaataattattattttcagaatttcctgattccgtaaagttctatggtcttaacgcttaacacattatacagaactattgtgacatgaattgattaaacatacttctattgattctagttttttcatcaccaattcttctctttccgcgctgcatatatataaatgtttcaaaatacagtttttttctgttttataactattgatgttatatactttatctccatataattataaaattcagttacaactgcatgctttttaagaaaaaaaatattgaatcaaaaaatgcttaattgatgttttaaatcgcttaattataattttaatatccacataaatatatattttcttgaaaaaataaataaaatagtatttttttatatagagactaacatattatgttttaaacatatgacaggagtggtgggaaat

SEQ ID NO: 614 - DNA, 667 bp, Arabidopsis thaliana
  Intron number 1 from transcript AT2G25565.1 (locus AT2G255 65) derived from phytozome v7.0 (chr-ID Chr2; pos 10884168 to 10884834 reverse strand)
tttggagaattttttgaacgattacgtcaacggtaagagaataaaaaagttggcacattgctcacatcgatttcataaagaatgtatctctgagtggttaaggaggtgtaattcttgccctatctgccgtagaattgtgctcgaagagagtcaacaatcatataatatatagattctgaatagtctatgcttacccttgtttttattaatgtaatgcaattgaaactgcttatgctgcctaggcatgtaataatgaaacaatttagattcgtttaagtttgtttcctttagtagaaacttaatgaaaaatcaaattttaaagtctccttgtttctattatagtatgttacctataatatcaacaatcgcttgtctttttgtatctcaacatcttcttctgacgatttcatctctctcttgtttctctgcttgaatttgttgacaatgaagactacagctggtaaagtaaacatcaatgcaaagatcagtcaaacctcatcatctcatagttctctcttgccaaatttcggagatgcttaatagacgaaatcaatggaagtgtcactttacgcagttctccttcccgtccctctaacccttttccgctcatcaattcctgtctccatgatcctcccttgtcccaagaggtgttctccgtgattccaaa

SEQ ID NO: 615 - DNA, 284 bp, Arabidopsis thaliana
  Intron number 1 from transcript AT2G26290.1 (locus AT2G262 90) derived from phytozome v7.0 (chr-ID Chr2; pos 11193569 to 11193852 reverse strand)
gctggtaacatttctttctctttatgtatgtttttgtctacattcaagacttttctattcacaaggaacaatttaattacgaagaccgtctcgattattttatatattttttgaattttggtttatcttcttaattagctatatgaatctggccatttttcagtatgttattaaatatatatatcttttgtgaaatttcttcataaagttttttttttcagtgtatacaaaatttatttttgtttgcaggcggagatattatttttgggacaactaagtaacaa

SEQ ID NO: 616 - DNA, 688 bp, Arabidopsis thaliana
  Intron number 1 from transcript AT2G29100.1 (locus AT2G291 00) derived from phytozome v7.0 (chr-ID Chr2; pos 12503997 to 12504684 reverse strand)
gaagatactgttcaggcttcagctgcaggttcgttacttctctatgtcttgcttcagcttcccgtcattttgatttattacttattagttgcggttgaatgaaacatattacgtatagacatggtttagctaattactattttattgaatgtgaccaatattttagatcagtattaaaaatcaaagtatcatatgggggtatatgctaagagtcttggtgacgatttatcttttagactatacttcaaaaaccaagtgtattcttatgtggtctaatgtctatggtaagagcaatctcttgatagagaagtccaatttttttctcttctagaaattcatggtgacggttgtatggtcgcagaaatcctgattactattagtctcgttaattatatttaactcatgagtcttaatatattagatgaatagtcgaaaactattggtgacatgtcttatgatacctctacaattttaactatttatgtaaattaatattgtcttattactttgcaactagagctcttttggactcgacaaacatggcttagccttataagttgtaactcttccattgaaaatggaagatattatatccaaaaacagaggatatttaacctttcttcttttctttatgttgcttgtggtgcaagcagccttggacctaatcaaaaccgagcaagtgagcgcc

SEQ ID NO: 617 - DNA, 784 bp, Arabidopsis thaliana
  Intron number 1 from transcript AT2G30380.1 (locus AT2G303 80) derived from phytozome v7.0 (chr-ID Chr2; pos 12949235 to 12950018)
aggggactagttttgcttggtaagcatccaagaacgatgttttaccaaatctttgctaaaatggcaaagtgggtatggattcttggatcgtttgcagcttctttagatcttaaagcaaagatctttgtggtcagaagaggaaccagtttctcaggtgtctacatggaatctgtagtgggtgatgaaaaagaagatggaagaggcgatttaagcgttgagttcgtcacaatgccggggtttaaaatcggagattctgtatttaaatctcaggtttatctttctaaaacataagagtaaaaacaccactctcactctgcagatttgattatttcaatagtttcatgtaaagagctctctgctttttaacaagttttgtaggtaagtaaaagaattctttgttcaaggatcatttggtttgtattattgttcacattcaagttttggtctatagttaataaatccaagtttcttcgttatgtgaaactaaaaaacatacaatcttttatagttttcacacatgagctctccatcaaatctgtagacaagttcagtgaagacttgaatgtgtatttataaataaatcgtcataattatccttcataattttacttttatttgatctaaaaaaaaacacatactcactatataatttagaatttatacgcaagagatttaaaattataaaaaagcaaaaattccatatttatcaaatccatacgattttagtctactttgcatccccgtaccaggctgggtcaacgttttgaacccttgcaccggagaa

SEQ ID NO: 618 - DNA, 302 bp, Arabidopsis thaliana
  Intron number 1 from transcript AT2G30470.1 (locus AT2G304 70) derived from phytozome v7.0 (chr-ID Chr2; pos 12984330 to 12984631 reverse strand)
tctggtcttctcgctgatctctgttatcgttgcgggtatttctcaatctctctaatttcctattctaaactccaaatttcgtttgatttttgactaaagtctcgatcttttcgtgaccctcttcttgattctctgtttagctcttagtttgttcatgttctgtttttttgactacgtatatggtttcttagtgcgaatcttgactcttttaatctataaatagggaaaaaatatgtgactttggtacataaaaggaaaaaaattgagactttggttgtaatgattttgttatagatctgcgt

SEQ ID NO: 619 - DNA, 596 bp, Arabidopsis thaliana
  Intron number 1 from transcript AT2G30990.2 (locus AT2G309 90) derived from phytozome v7.0 (chr-ID Chr2; pos 13189762 to 13190357 reverse strand)
tctttctctatctgcaatcccgcgttttctcactggtatttcacttcctctctctgtatatgtgtatctatatatctgtgtgtatagttcgtcttcttcatcttcctctatttttactctgtttcttttaaaagaaacacaatcttgagctggttttttccaattctatgttcttctgcttctaattcttatacacaataagtacgaatacgtatctgtgtatacagatttagattttgattggaaaagaaaaaaaaaaaaattcaatatttttctttgcgtacataaatgttctcacgcgtatacatttgaatctgtatttcttctgtgttcttaactattgtggggttttagataagttttctaagaagcttgtgaaaattccatcaaggcggctaaagaaagactttatctctctctttcaagtttttggattttgaatctgatggctctctgacacattagtgaatagtgataatcttgacttaagagttttgacatggaagaacaaagctagttgaagaggtttattatgaaaattacatgatgtttgaagttattgcaagtcttcttaatgatgattttgattatgcaga

SEQ ID NO: 620 - DNA, 365 bp, Arabidopsis thaliana
  Intron number 1 from transcript AT2G32645.1 (locus AT2G326 45) derived from phytozome v7.0 (chr-ID Chr2; pos 13852051 to 13852415 reverse strand)
gtgcttctacttgaggtgaatctggtcaggtaccgttacccattccttcggcagtagattctagccactctggccaaggctgttcaggagagagcagctctagttcttcctaatcataactctgcttattgcttaagccacaagtaaaacggatttagttttcaggcaaatctggcttggttttctttcttttttttgttcagttgatgaaatagtggggttttgtccaaatatgatgttttgatttgagtttctttctttatgtttgatttttttttatctctctctgatgctgcctatgtttacttatgattagcattgaaaatgcagaacaaaggagagagaacttgttttcttatattatc

SEQ ID NO: 621 - DNA, 482 bp, Arabidopsis thaliana
  Intron number 1 from transcript AT2G33150.1 (locus AT2G331 50) derived from phytozome v7.0 (chr-ID Chr2; pos 14050447 to 14050928 reverse strand)
cttcttcttcgcacaattacgaggcttctctatctgtaagcattctatcaccacacactctctctctctcgatctatcgcgatcttttggttgtcttctcttgtgtttgcagtctggggattatggatcgttgttgatctggattcattatatggaattttcgattttgattttgatgctgaattataatttgattcgaggcgtgcctgtgagctgaaaattttaagtttcagctcgattgagatcaaattcaagacttggattttgtttttgtatttcgttcactggattgagatagatatcttttttttttttgttgttgtttgatttttgttcgattgggttgaattatccgtgctctgcatgtactgatgatttcttaaaagtcaaagcttgatttcaattactacgtgtgatctctttaacgtgttctttccaaattcccaggcttctgcttgcttggctggggacagtgctgcata

SEQ ID NO: 622 - DNA, 779 bp, Arabidopsis thaliana
  Intron number 1 from transcript AT2G33510.1 (locus AT2G335 10) derived from phytozome v7.0 (chr-ID Chr2; pos 14194370 to 14195148)
ttccttgtcactgggaacagtgtcttgatcttaaggtaaactttaaacaaatgagattcatctttctattttttttcttcttttttttctgctttctaggttaaactaatcactacagaaacttcgaactcgtgtcgttttcgtgttttggattgcattaaatgtacattgggggataaatttttcatgttaatataatgttttttcttgtatctttgtgatgcatttattgcttcagaccgtataaatgtttactcatagggctttttggtttcaggctttgtgtttagggaaagatgtttgccttatatggaaaacttttgcagagattttaaatggctaaaaaaagtttgaaagcttgaccatgaaactaaattctgggatttttgcttttggataaaaacaaaataatttttgtaaagctatttgatgctttttatcagccaatctttcatctcctagatatgattattctcataaggaagtaaaacaaacaaacaaatgtttttgtttttcatgttcaatgatttgtctaaagaaatcaatgccgcactaccacaaaacatacatacaaaaagtacatagtcatttgctcatatatagatctaggaccaaagctttttgtcttaaccaaaatttgggaggtgcattgcaatttgccaagaaagaaaaaagataaaactttatagtaataagagcactttatgattgaattcatgaggtgagctttttgttttgttttagacaggagagatttactacataaactggaaaaacgg

SEQ ID NO: 623 - DNA, 670 bp, Arabidopsis thaliana
  Intron number 2 from transcript AT2G33510.2 (locus AT2G335 10) derived from phytozome v7.0 (chr-ID Chr2; pos 14194479 to 14195148)
tcactacagaaacttcgaactcgtgtcgttttcgtgttttggattgcattaaatgtacattgggggataaatttttcatgttaatataatgttttttcttgtatctttgtgatgcatttattgcttcagaccgtataaatgtttactcatagggctttttggtttcaggctttgtgtttagggaaagatgtttgccttatatggaaaacttttgcagagattttaaatggctaaaaaaagtttgaaagcttgaccatgaaactaaattctgggatttttgcttttggataaaaacaaaataatttttgtaaagctatttgatgctttttatcagccaatctttcatctcctagatatgattattctcataaggaagtaaaacaaacaaacaaatgtttttgtttttcatgttcaatgatttgtctaaagaaatcaatgccgcactaccacaaaacatacatacaaaaagtacatagtcatttgctcatatatagatctaggaccaaagctttttgtcttaaccaaaatttgggaggtgcattgcaatttgccaagaaagaaaaaagataaaactttatagtaataagagcactttatgattgaattcatgaggtgagctttttgttttgttttagacaggagagatttactacataaactggaaaaacgg

SEQ ID NO: 624 - DNA, 282 bp, Arabidopsis thaliana
  Intron number 1 from transcript AT2G34123.1 (locus AT2G341 23) derived from phytozome v7.0 (chr-ID Chr2; pos 14406292 to 14406573)
ttttggccgtctccggtattacgatgctttttttttcttgacaatcacactccatatatcaattcatgatgttttttttatgatgctttttacagaagatttgtgtttattttattattatttctttatctttgatcgtttttagagaaatagtgaaatttatatttttctccaaatatagaaccggcaacaagcattcaatctatatgtaagtatcaatattttacatgtttttatgagttttgttttaattgatatatatttatatgtagggccaccgaa

SEQ ID NO: 625 - DNA, 321 bp, Arabidopsis thaliana
  Intron number 1 from transcript AT2G35130.1 (locus AT2G351 30) derived from phytozome v7.0 (chr-ID Chr2; pos 14809844 to 14810164 reverse strand)
atgtaagaaccatatgttcttttagcggttttagaaaatgagtagttgagactacccatctgcagaatttcttcaactctgttagttagcggatgttcgttcataaagtctattgctttggacattaaccgttgcctatttttgtatataactgattatctgtgtcaacttagctcaggtgttattatggttttctgctgaaacattttgagaattgcttgctttggtacttactaccttagtgttttgagtaacattttcatgaaattgggtttttgatttacaggttggtagctggaaacgctttgaattgcttattca

SEQ ID NO: 626 - DNA, 207 bp, Arabidopsis thaliana
  Intron number 1 from transcript AT2G36325.1 (locus AT2G363 25) derived from phytozome v7.0 (chr-ID Chr2; pos 15231432 to 15231638)
ttggtttcttttctcgtgtctgattcttctatcaggtattattagtctataactttcattttcttcttcttgatctgtttaatgtatgtatcgtatatcaaattacagcaattaatttgtattaaatcagtttcatcgattaatttctttttccttttgatatacgtgctagactacataaaggtaaacagctcaatttctccatct

SEQ ID NO: 627 - DNA, 529 bp, Arabidopsis thaliana
  Intron number 1 from transcript AT2G36620.1 (locus AT2G366 20) derived from phytozome v7.0 (chr-ID Chr2; pos 15351288 to 15351816 reverse strand)
gttctcaagtaatcaatctcttctctatatctctcttctccatgcttctctgttcataggtttacattgttgctaatgatccatgtgaatattgctactgttgaaaatgccaatttgctaaaatgagcttcttttggttcaaatctgtttatttcccgatcagaaatgtctgcaaattgtgattttctggtacgagatatggcttgtgttcggcaataactagatcttattgtttcccttcactttgcaacatttttgtttgtaattctgtacattgaattaattgtgtttggtctctgtttcaaatcattgtgactcttgtgaatcgtattgtttctctcattgggcagatatctaattagccatttactagttctgcttttaggacattgtaaaatgagatggctttgaatgtgtgtcctgtgactgtttgtgattgtgaccagggttggttttggattatcactaaaccattgattatctttgtattgtaggactgagctttgccgattcagtggccagaaaattt

SEQ ID NO: 628 - DNA, 227 bp, Arabidopsis thaliana
  Intron number 1 from transcript AT2G37260.1 (locus AT2G372 60) derived from phytozome v7.0 (chr-ID Chr2; pos 15645050 to 15645276)
tttttgcattcaccgtcgtgagtgttctacttttggtaatgattcactagtcaagtttctttctttatgctataacttgcaactagatcttgtactaatggaattgatgtttctccaatcatcttctttgattttgctccatctttcttttcctaatttggaaaaatgagtctttacctatagaatctgataaatatgtctcttacataattgattaaggtcaagta

SEQ ID NO: 629 - DNA, 301 bp, Arabidopsis thaliana
  Intron number 1 from transcript AT2G41510.1 (locus AT2G415 10) derived from phytozome v7.0 (chr-ID Chr2; pos 17315258 to 17315558)
aatcaacaacgtctaccagctagagattgttacaggtatttcattcatgctttatctctgcggtagtctcaaaaaaatatgcacctgtaaagaatatccatctcttcatgagcaaaaacactgacgactttaaataatttttgactataaaacaagagtgcataggcacaaatgtgaaatatgcaacacacaattgtaacttgcaccaagaaaaaagttataaaaacaaacaactgataagcaatatatttccaatatttaatcagggaaaggagaagtcgtaacctgttctgagaagcgg

SEQ ID NO: 630 - DNA, 284 bp, Arabidopsis thaliana
  Intron number 1 from transcript AT2G41540.1 (locus AT2G415 40) derived from phytozome v7.0 (chr-ID Chr2; pos 17326262 to 17326545)
gttgccgacacgaaaggtttgttgttcttgacttgtgtttttattttattggacagtcttcttttggtagatgaacaactcaaagacggagctaacaaagttgtttttttgatattccattaattttcctttattttattccttaatctttctttgatttttctctgcattgtgtcatgttttgtggcattactatttaaaggaattttttggtatctatgcattaatgtctgatttcttacatgacagaagaagctaggacacaaaacaactcaaattttgtt

SEQ ID NO: 631 - DNA, 274 bp, Arabidopsis thaliana
  Intron number 1 from transcript AT2G41830.1 (locus AT2G418 30) derived from phytozome v7.0 (chr-ID Chr2; pos 17456595 to 17456868 reverse strand)
agttaccaactggcttatttgtgctttgatctgaggtaaattgatttttcttttgcagcattacgttgaaatcttctgatcaatctgggttttgttaaatcattgattcctcgggatgtgatgatttttttgggtaattcgttttcggcggaatttgactctggattatacaatgaattggtttcgttttgatcaacattacatcgtttttgaatttttttaaattttggatgtttcaggcgaaggtttgagttctaaggagtgtatcgtttaa

SEQ ID NO: 632 - DNA, 595 bp, Arabidopsis thaliana
  Intron number 1 from transcript AT2G41840.1 (locus AT2G418 40) derived from phytozome v7.0 (chr-ID Chr2; pos 17460143 to 17460737 reverse strand)
ggggatccaccaaaactcttggaaacttcgtcaaggtttgttcttttttactttcatgtagttacctatacacgagattcgtttccttttgattggtttctggtagtttctttgaaatcacaatttgattattcgaaatttgagcattttctgtcattttagtacagtagtagctatataagtagttccaggagtccatttggttaggaaaaattctgacttcacactgtatttgatgaaatatctctggaaatgttattggtgtattgatggaagagaaaaagtgtttctctttcgtctagtgattctctttagctgtaatgaatgatcgctttgtaggaaacctttaatgtagcaaatgaagaatagattcagtttggcatctcttgatacttgactgttttcacttgcttatgatgtgtttgttttcttgctaattcacgagttttgtaacttgaatacaatataccctcagttttttatccatgtatagtattcacttgtaccttagtttttttcacggatgaataattgttttcatgatgttgattaaattgcaggctacattcgattgccttcagaagacttacggatt

SEQ ID NO: 633 - DNA, 356 bp, Arabidopsis thaliana
  Intron number 1 from transcript AT3G04440.1 (locus AT3G044 40) derived from phytozome v7.0 (chr-ID Chr3; pos 1178785 to 1179140)
ctcttcctccttcttcttctccattcgccttcaaggtatttctctcttttgaatcaagaatcaggaaacaccttgatctctgtatcttctctctctctgggttctgttttgctttctactttatgctctctgttttgatcctctctcgttgacttccatcactatttcttgactcaagaacaaaaccaagacccagcttctcttttgtctcttcttgttttcttcatggtgctttttacttgcatgttcataacgaattcacattaatcagctttgaataacctgttgatgagacaccattttgtttctttttttttgcaggaacaacaaggtagaccacctccaacaacacaaca

SEQ ID NO: 634 - DNA, 457 bp, Arabidopsis thaliana
  Intron number 2 from transcript AT3G05890.1 (locus AT3G058 90) derived from phytozome v7.0 (chr-ID Chr3; pos 1757720 to 1758176 reverse strand)
tttcctatctcctctgttctttcctcttgctcctcgtaagctctctttctccacgatctctccccctcaatgtatattaatctaatcatacaaacatacatgcgtagctgtgatgaatatagaacgagatttaagatgaaatatctttgattaactatatatgttttccacaaagaaattacgaatatcttcttaataaaattaaataaaaagaaaaataaattaatgttaggtgaaccacatttttagtgagatattgttataacgattcactttgtaacattttcagaaaattatcgaataattatcaattaaaaaaaaaaggttaaaataacactataagattttatcattttgatttacatttttattagtaaaaggaattgaccaaagttttaactttacatttgttatttgtgtaggaagaacagctgtttcgtcgtgctcttctcccttt

SEQ ID NO: 635 - DNA, 282 bp, Arabidopsis thaliana
  Intron number 1 from transcript AT3G06350.1 (locus AT3G063 50) derived from phytozome v7.0 (chr-ID Chr3; pos 1927203 to 1927484 reverse strand)
tctatgttagtgattcttcctttagttcagttttcttttgttgttttctgttccgtttttattggagaaggataggtaatgatgaatttgcagatttatcgcttcaaataaatttggtattagttttggatgaagactttgatgtttcgtgtacaacattggtttagctatttagaatcgatcttcagaatttttgtttagttctgagaagtagttggatttttaattgattgtggaatttatcctgttttgtgatctcaggtggcttcaaattccacggaa

SEQ ID NO: 636 - DNA, 394 bp, Arabidopsis thaliana
  Intron number 1 from transcript AT3G06440.2 (locus AT3G064 40) derived from phytozome v7.0 (chr-ID Chr3; pos 1975273 to 1975666 reverse strand)
tacttgaaagatcatcgaaattcaatataaaacgggtaaagcttctcaattttacaataaacacaacttttcagctattgaaacagtgactaagctgtttttcttttgagctatatttctttgttagtgctaagtaatagtaaacaacaatttactatgatcttgcttctgggtctccttatatccattaaagactgatcctttctgcaccaattcagtttaatctttcttcttttagcttaaatgtctctggttagttatgtctgaagtatacaacaccggttccaaagttcgttgaccattgtttgagttcttcttttattaggattgtgagaataagaatcggattatgctaactctaattcgtaatctgcgttttactttaggttactca

SEQ ID NO: 637 - DNA, 550 bp, Arabidopsis thaliana
  Intron number 1 from transcript AT3G07190.1 (locus AT3G071 90) derived from phytozome v7.0 (chr-ID Chr3; pos 2286321 to 2286870 reverse strand)
ggtcagtttctcttttcctttgtttgaactttgaatcatttctcagtgttgatatgttttagattgaaatttggggcaaatttagttatcttcctcccctgtacttcagctcttgctcctatcttagttgttattagcaatggcttgtgaaagagccatctttcatgttttcttgtctgctgatttggcttgaatttcaaggctgattcaacatctactgggttatataactgaaggatgatatctatataagcaaaacaaaagctttcactgctgtgattttagtgagtgggaaaactaagaacactttataggtatctttcctacatcagtatttaactgatttgtgatatagatatctttggcaaggaggatctctatgtttgtttccactccgttgcttccatagttgtgcttggtactgcttatgttcactaaatttgggaggatttgaaggagtggtgaaatttgttgtgatgattggaatcacgttttgagctcatatgttcttgcaggtgttgtgctcttttttggcttcattattgaccgg

SEQ ID NO: 638 - DNA, 866 bp, Arabidopsis thaliana
  Intron number 1 from transcript AT3G09920.2 (locus AT3G099 20) derived from phytozome v7.0 (chr-ID Chr3; pos 3043834 to 3044699 reverse strand)
agaagaaagtgaagagctttgagcttgtccgtacggtttgtgaatctcctttacttccccagtttccttatttagtgagcttgatttggtttttggatccggtttcattctcgaattcgggcatttctctgtttttggttctctttggattgaagaagtctttaaccgggatcttcggtttttgttgctttcgttttatctttgttgaagattgaagattgaaatggagttgcttgttgattgtgttaatcaaagtttttaacttttgtttccatcgacacgactctgatatgtacttatatagagctctgatggggtttcattatgaatttcaaattcagattgaaacattgaaactttgttatgaacattttttgtttttcatttgctcaattcctaaaaagtaggattctttctagctttttggtttggtaaatttggcatactctgcctttatttgggagacgtggaggaatctcttctttttaaatgtgaattcaatataaaagtttagatttttttttatataaaggctttatgattgtagactcgtcttcttccataaaaggctttctttttgataggaaaaagggatttttgtttgctcctctctcattctctgcctctctctgtgaaatttagaagttcttgttctttcaagtgggaccaagaatcagatgcgtgtcttaattttcttgtttgatagagatttgagcaagtctttgcttttgtgaccatttatctattttcatgttttcctcattagttttagattattgcatgcatcaaaagttagttactcttttttattctttctgattctgattctagattcatacatcgtgacttggaacctgattcttgca

SEQ ID NO: 639 - DNA, 325 bp, Arabidopsis thaliana
  Intron number 1 from transcript AT3G09960.1 (locus AT3G099 60) derived from phytozome v7.0 (chr-ID Chr3; pos 3062498 to 3062822)
gatcttctggtgacattctccattgattcttctttctggttatagtttatgattagacgtttgtctttgtcggaaactgtaaatataggtcaagtgatcgatcatgtaattggtgatcagtcaaataagtaatgattggatctttggttaaccaaaaatataattgaatctttctcgatttggagttttcatgttctcatctctgtactagtgaaattatgaaattttataactgttttgaatctattggtattggttttgaaacttgtttgttttcttttccttgatagatttgataaaggcagtacctgagagtcacaagaaa

SEQ ID NO: 640 - DNA, 351 bp, Arabidopsis thaliana
  Intron number 1 from transcript AT3G09970.1 (locus AT3G099 70) derived from phytozome v7.0 (chr-ID Chr3; pos 3064315 to 3064665)
gatcttctggtaaatttctcaatcattgtgttttgggttcttcataggttttaatttgttattacatttggtggaaacttgtaagctggttgaagttgtttgtgaaatttggttatttaagctgcgattgaatctgtacacacttctattctctcgtacaagtcattcttgtgaatttggtggtcatgcaacgattggatctgttcacatttcaatatagagctacgtggttggctaaagtttgaatctttctcgatttggagtttacatgttctcatgagtctcatctttgtgctgatgaaatgatgacattttaatacttgtttgttatctattccgttgatagatttg

SEQ ID NO: 641 - DNA, 684 bp, Arabidopsis thaliana
  Intron number 1 from transcript AT3G09980.1 (locus AT3G099 80) derived from phytozome v7.0 (chr-ID Chr3; pos 3069593 to 3070276)
aagaagagactaagcgtcttgctttgatccgtgaggtatgtatctatattggttatttcatatataaaaaaaagattgttttttttttggagaattgtgcttcaattttggtttttgttatggaaattttttggattgggatgtgaaattgaacatttggggtttttatattgtatagaatgtggatttaattcatgtttaaggggaaattgtaggacccaactgttggaaatttcaagatctgacaattgcattgaacaaattcttttataattttcctttggtttttgtgtggtttatgccatttggggagaaaattttggggcttttgtgtttgttttaggattttaaatgatcaatagcaagtaaacctggatttgctaaaaataagctatttggattaagttttttgtgaaaagaaccatttgcttcttctgggtgatgttaaagtttatgaatctggtcttagtctctggttttagtactttttcccctcaatttatgggcagaacagtgaaagtttctacatttatagcactacttgatagagattagctctgtggatcaaagctctttcctttctatgaaaagaacaatttgcttttcctgggtgatgttatgttgatgactaagaagctcagtggttaaactgcatttcaggaacttgaaggattagctgatccc

SEQ ID NO: 642 - DNA, 350 bp, Arabidopsis thaliana
  Intron number 1 from transcript AT3G10300.2 (locus AT3G103 00) derived from phytozome v7.0 (chr-ID Chr3; pos 3187085 to 3187434)
tcaggaagattggtcagtttcttctttctttcaaactgatctcaaattgattgttctaggtctttccttttttgcgctttctagaactagaagattgtcttgcttcaacaatctaggtttgagtttttggaattatcttgttgaattttcctctgcatattgtttggtttgactttgatgatcgttggtgccaaatcctcaagttgtattattattaattcaagttgaaagtattaaaaaaagtcaaatttttaattattctccctgctagcctggtttttgagtatatactgatttaagaactccaaattgcaggaccaaaagagtttacttcacttttctttagtctt

SEQ ID NO: 643 - DNA, 350 bp, Arabidopsis thaliana; identical to SEQ ID NO: 642
  Intron number 1 from transcript AT3G10300.5 (locus AT3G103 00) derived from phytozome v7.0 (chr-ID Chr3; pos 3187085 to 3187434)

SEQ ID NO: 644 - DNA, 364 bp, Arabidopsis thaliana
  Intron number 1 from transcript AT3G13226.1 (locus AT3G132 26) derived from phytozome v7.0 (chr-ID Chr3; pos 4265890 to 4266253 reverse strand)
ggcattcaacatcatcgcctcttccgtattccgttagtttataattttagttcaattcgtaatacaaaatcgccgaaatcaaactaaaatcccataaatctgtttttttttcttcttcgttgaaatcttcattgtattgtcacatttgaattttacatatgcttcaaagttttatctctttgagagaatttaattatttggctgttgaggaagttctaagtggctatcttcttcacttttgttactgattgttttgtatttgttatgtgatcttctactttcatggtgattgttttaatcctaagtgtttcacttctgatattgtgtagggcgaagagacactctgtacctagaatcttgtgtt

SEQ ID NO: 645 - DNA, 518 bp, Arabidopsis thaliana
  Intron number 1 from transcript AT3G14790.1 (locus AT3G147 90) derived from phytozome v7.0 (chr-ID Chr3; pos 4964273 to 4964790)
ttgggttcatcttcatcttgatctgaatcgatccggtatgtgaactctttctctttccctcaattctctataaatctctaagctcaattcgttattgtacgtcttcgttctgcgtttgatgccgtatcctgaagtttttttttttttttcggttcatgatgctttctcatcgttttccactggatctgctgctaaatctgggaaattttagcgtatttggatttgctacatttgtcatacatacttctggatctagatctgccttattttttccttgatcatttcgaattttggattaatagttgtagcttgtccttttatcaattcgaatctcatgactttgattgtactgaatcacacagtgaaattttgtaaaaaaggatagatttttgaatggttctgcttagtgtgtagtctaactgtttgattaaatgtcgcaagatgaagtttttcttgtgctgtttcgtctgtcaatgaagcttttctgaattgaattttcatgggttttgatgttgcag

SEQ ID NO: 646 - DNA, 823 bp, Arabidopsis thaliana
  Intron number 1 from transcript AT3G17010.1 (locus AT3G170 10) derived from phytozome v7.0 (chr-ID Chr3; pos 5800533 to 5801355)
tttttcagagggcagatctatcctctgactgcgtaacgttgttcttgatatctttgtttgaaaagtgggaatctttttcttctttttgttgaatgggtttcaagtctacggcttattcatcttttggttctctttgttttaaagattgcaactgtttttcctctgaatcttttacgttctctgtctttgaaacgttgaatctgttgtttccctggtgttttaagggtctcagcttctcgagggttgaatctttaggttctgtgtgttttaaaagttagatcttgtaaaaaaaataaaaaaagttagatcttgttagcttttggctgtctttgtttaatgaaaggttgaatctgttaaatctctgaatatttacgttctctgactttgaaacgttgaatctgttgtttctctgctctcaagactcttaacagtttaatctttgagttctctgtgttttaaaagttaaatcttataatctttgtttaaatggtagagtcttttggttgtctttgtttaataaaaggttaatctctgactctttacgttctatatgtttgaaacgttgaatctgttctttctctgggtttttatgggtctcaacggttgaatgttaggttctctgtatttgaaaagttagatctttcagctttggctagaaggtagaatcttttggttgtctttgtttaataaaagtttaaattctgaatcttcacgttctctgtctttgaaacgttgaatctgttgtttctctggtgtttttaacactcttcattgtttgttccaaccagagagcgcttccttacagcttcataagcaaagtctc

SEQ ID NO: 647 - DNA, 600 bp, Arabidopsis thaliana
  Intron number 1 from transcript AT3G18750.3 (locus AT3G187 50) derived from phytozome v7.0 (chr-ID Chr3; pos 6456831 to 6457430 reverse strand)
cgtctcaattacagaacaaagcttcgtttctccaggtataatcgaaacgtcagaatcttattaatacaaatttacgcgattctgttgccttataccgtttttttttttgagagagaaaatcttttaatcgtgtgttttctatgttcatatgaatgtatgcattgatgtgaatgtatatgaatgtatactcatgtatgcattttttttttctcctctcaaaattatgaaatagttcatgtcaattgtttatacctgtgtcgaatgtggatattttgacagaatataatctgagaagaagagtattggattgttttttataaaaattatgtcacgatcctaaattttgacgagctttactttaattttgtttttgttctgttttgtctttgttgttgatatgagctggatagtaatcgaaggttaaaaagtttcacaaaaaattggatttagagttgaattagcgtgtgagtatcttgttgtccttgaaattctttttatttcaaggtgttgcacccaaaagaatctaaagggtttctatgatcgttctgtgtttttatggatttgttttctgttgtcaacttttgcaaggtttaagaaaga

SEQ ID NO: 648 - DNA, 600 bp, Arabidopsis thaliana; identical to SEQ ID NO: 647
  Intron number 1 from transcript AT3G18750.1 (locus AT3G187 50) derived from phytozome v7.0 (chr-ID Chr3; pos 6456831 to 6457430 reverse strand)

SEQ ID NO: 649 - DNA, 445 bp, Arabidopsis thaliana
  Intron number 1 from transcript AT3G18750.2 (locus AT3G187 50) derived from phytozome v7.0 (chr-ID Chr3; pos 6456986 to 6457430 reverse strand)
cgtctcaattacagaacaaagcttcgtttctccaggtataatcgaaacgtcagaatcttattaatacaaatttacgcgattctgttgccttataccgtttttttttttgagagagaaaatcttttaatcgtgtgttttctatgttcatatgaatgtatgcattgatgtgaatgtatatgaatgtatactcatgtatgcattttttttttctcctctcaaaattatgaaatagttcatgtcaattgtttatacctgtgtcgaatgtggatattttgacagaatataatctgagaagaagagtattggattgttttttataaaaattatgtcacgatcctaaattttgacgagctttactttaattttgtttttgttctgttttgtctttgttgttgatatgagctggatagtaatcgaaggttaaaaagtttcacaaaaaattgga

SEQ ID NO: 650 - DNA, 561 bp, Arabidopsis thaliana
  Intron number 1 from transcript AT3G19220.1 (locus AT3G192 20) derived from phytozome v7.0 (chr-ID Chr3; pos 6659557 to 6660117)
tgatcctgtagtcgaggttttttgctttgcttcaactttcatttactaattttgatgattgaataagactcaacatacttgcacttaatttagatgaacattttaattgctttagctgacgattggctgtttgatttgctctatagtttaatcttcgaaccaatcaatatgcacaaatatatgagttgatcttgtagcttgacgaatgacattaagtttaattggtctttcttatggagcgataagcttagattctggaaggtgaatgatgtttctgaaatgtgaaactcaacaatggacttattttataaaagcatgtgtgtcaaaaacatgaaaaatatagatgcaagctcttgtcgatataagataggaattaaattttgacatgaattatcctttttcggaaagatttgctccgagttactcttcaccccagttttgggtgtgtttaggcaatattttctttttgatgcagtatttgctttagaatgcctttttgggattgttttttctgatcacaatataacccgaccaatttttaggattgccgggaagtggttt

SEQ ID NO: 651 - DNA, 441 bp, Arabidopsis thaliana
  Intron number 1 from transcript AT3G19550.1 (locus AT3G195 50) derived from phytozome v7.0 (chr-ID Chr3; pos 6787716 to 6788156 reverse strand)
actgggatcgccaaagcaccaaagctgctgttaaggtcaaaaccatatcttttctcatcattcttcttttattttcattaatcaaatgctattagccacaaaacataggtggacagtacccacatacacataaatcatcaagttaattgcttaatagatataattttctcttcatatattttattttggaaattttaactttaccaaaaaaaaagttatcattttgtcaaatctagctaaaataaattcataaaataatttcttacaattcagttgttaaaaaaaaaacaagtttcttaccaaagattttttctaaaattttgatacacactataacaagctataaaatgtgtaacaaatttaaaaagaagtaaatgtaattttgtgataattaatgatgatttaggagttggaagcaatttcaagggcgagcagggataa

SEQ ID NO: 652 - DNA, 327 bp, Arabidopsis thaliana
  Intron number 1 from transcript AT3G23175.1 (locus AT3G231 75) derived from phytozome v7.0 (chr-ID Chr3; pos 8274974 to 8275300 reverse strand)
cttgatcgttcgttcatagtttgcttccggaacaagtaagtatcttctgcaccattgatcatcatgtgattcttgattcttgtttccgattattagttcttacataggatgatttgattacaccataggttttaaagaagttactgttataatttctgcgaaaataaaatcattttttgagttcttgttttttgtatgtcttgatatcatgtaaaccctagatttctctgttatgatttgattttcttctacaagacgtattcagactctgatctaaatctgaatcttttttaatattatagaaaacattgacattaagatcacaat

SEQ ID NO: 653 - DNA, 284 bp, Arabidopsis thaliana
  Intron number 1 from transcript AT3G23390.1 (locus AT3G233 90) derived from phytozome v7.0 (chr-ID Chr3; pos 8375398 to 8375681)
caaaagcttcaccggagatcagagacgcgaaagtaaattgtttcttctctttcgatgtgattttggaatttgtaaagttcgttgactttgaagaacaacaatacatggttgattgatttattgtattgtttttcagatctatcataaaagttttcaatctaaatgatgtttgtattttgattaaccttaaaagtctcttgattttgtatgtgtgtgagtgattcatttttgattttatgaattttgaaggtgaacattccaaagacaaagaacacttactgtaa

SEQ ID NO: 654 - DNA, 503 bp, Arabidopsis thaliana
  Intron number 1 from transcript AT3G24506.1 (locus AT3G245 06) derived from phytozome v7.0 (chr-ID Chr3; pos 8928556 to 8929058 reverse strand)
agctcactcgtcgcaatcctctcgatttccctatcgttagtctctctctttgcttcgattccttatagaaaattgcatacagattcgtcgaaatttcacattgctactgtgcttgtaatgtcaattttgatacagaaatttgaaattaagtcacaaatatacttgagagattgtatttggaatctgaaattttcatgagcagattcgtgtcctgtgcctgtgtagatcatacttatcagtttgatttaggtaatgatttggtagcagatgagattgtgagtcttatctatctgaagctttcattgttcattacttgctagacttatcaggtgtagagagttctttggttacagaacttttgagtttatgtatgaatcaattagagagaagctgtatctagtgacaacgatgctgtgttttcttttctttagagattgggctatcgttttgcttagtgatcggaattgttttatgtaaatgatgttttggggtttgtggtagga

SEQ ID NO: 655 - DNA, 569 bp, Arabidopsis thaliana
  Intron number 1 from transcript AT3G27470.1 (locus AT3G274 70) derived from phytozome v7.0 (chr-ID Chr3; pos 10163139 to 10163707)
ccaaacattgtgaagatagaatccgtttactagtgatcgatcgctttctgagttttgtgtttatcgaattctgaatttggtgttgtcgccaattagtcagacaggacagaaactggttttctttctattttggtatatgatcgcatgttcttccattgtcgtacatgattatgttgtcgtgtttattgtttttaccgtatatagaattttgaatgcataattgaaattctgacttttgagtaatggaaaggagttagcaaaatctaattacgtttaggtttaggtgtgtaatttagaatggatttgttgttttttgatatgattgaagtgatttggtgtaatttttgattaatttggaacacatgatatttggttattgttgtcaagaaacaaggaacaattgttaatccatttggaattgtacagttgaattttgtgattctattgtggatattgaattttccactttgtgattgcttaagtattgagtataggcttttaacaaagctcatttcttactattactgtttatatgtttgtgtgtgttttgtagttagaagcatcgaaga

SEQ ID NO: 656 - DNA, 472 bp, Arabidopsis thaliana
  Intron number 1 from transcript AT3G27470.2 (locus AT3G274 70) derived from phytozome v7.0 (chr-ID Chr3; pos 10163236 to 10163707)
cagacaggacagaaactggttttctttctattttggtatatgatcgcatgttcttccattgtcgtacatgattatgttgtcgtgtttattgtttttaccgtatatagaattttgaatgcataattgaaattctgacttttgagtaatggaaaggagttagcaaaatctaattacgtttaggtttaggtgtgtaatttagaatggatttgttgttttttgatatgattgaagtgatttggtgtaatttttgattaatttggaacacatgatatttggttattgttgtcaagaaacaaggaacaattgttaatccatttggaattgtacagttgaattttgtgattctattgtggatattgaattttccactttgtgattgcttaagtattgagtataggcttttaacaaagctcatttcttactattactgtttatatgtttgtgtgtgttttgtagttagaagcatcgaaga

SEQ ID NO: 657 - DNA, 273 bp, Arabidopsis thaliana
  Intron number 1 from transcript AT3G27540.1 (locus AT3G275 40) derived from phytozome v7.0 (chr-ID Chr3; pos 10205541 to 10205813)
tttgtggacaggtttgattcttaaagatatatttttttacacacttgaaaaatcatgtttttttttctttctgaaaaaaaaaattgtaactttttgaagaatttaatcttgagagttttttttttctctgaaagaaatgatttttaattggtcagattgttttctgttgcttgaaaagatctttgaatttttgttaatttgttccatctcttatgaattgttttttattattttgtagggatcaaaagcagcaaaaacaatctcaaggctaaa

SEQ ID NO: 658 - DNA, 364 bp, Arabidopsis thaliana
  Intron number 1 from transcript AT3G27560.1 (locus AT3G275 60) derived from phytozome v7.0 (chr-ID Chr3; pos 10212020 to 10212383 reverse strand)
agggaaagtaagctttgacttacaatctttatcatccatatatactaagaatcaaaagttaaaagttgtctctttttatctataatcattgcttgctacagaaatttcaaatctttgtttaagtttgaaaaaaaagaacttagtcttgaaaaaagtttgactctttgcgtatatgaagcacaagagaatcttttattgtctggttcagttacttattaggctaattggtttaatctttctttctagtatttattgaagcttatctgtttctggagatgcttgaagattgttgtttgatggattgaaaatgtgttttttgttttgtttaggtatagaaaccaaacagtggcgattaagattatta

SEQ ID NO: 659 - DNA, 523 bp, Arabidopsis thaliana
  Intron number 1 from transcript AT3G28455.1 (locus AT3G284 55) derived from phytozome v7.0 (chr-ID Chr3; pos 10670222 to 10670744 reverse strand)
gacctgatcctatccacaacaggttcttatcccttctctctcgaattttcaatcttttacttttgcttctttgagtttgctaccagagatcaagcgttttgagaactttgtcatgaagtttgtttaaagttcgtttatacaaaaactaatcatccaatattagtgtttcctctgttcaagtttttttgttgtcactgtatacacagataccgataatcactggtttctaaaaagattattagcatgcagaattcttgttctttccttcttttcagtgtcactatacattttgtgtacattaaagagctcgtcttttgaaagcagacaatgttatcatgttttagtaaaagcttcttctttatctaattttaaagccttagagaagaattaaaggcacttgtgaagaactttgaccactttagttaaagtttattactgcagaaagaactctactttaataagcttttgtttcaaatctatttcttcaggaaagcagaaacttcgagacggccaccaagagtat

SEQ ID NO: 660 - DNA, 153 bp, Arabidopsis thaliana
  Intron number 1 from transcript AT3G42660.1 (locus AT3G426 60) derived from phytozome v7.0 (chr-ID Chr3; pos 14751522 to 14751674)
tatcgatcattgcgtcaagctctacaagttcccaagtatattattcaaatcacttcttctcattctcaatctcaattacatttcaattcgtgttgataagtttttgattttgccttaggtggggaatttcagacgaacattactagatttaca

SEQ ID NO: 661 - DNA, 588 bp, Arabidopsis thaliana
  Intron number 1 from transcript AT3G45630.1 (locus AT3G456 30) derived from phytozome v7.0 (chr-ID Chr3; pos 16753191 to 16753778 reverse strand)
ttccacaatctccgatcgaatctctctactcagccgtatgttttcacttctctcgtaattgactctttcatgttgggatttgaatcgccgaatctcaaaaccctaattctggtgtttcgattttagttccggagtagttattgagatcaacgtgtttactgattccgattgtatgtagaaatctcatggagattttggattgtcgtcgatatgtttttttttcgattgtactgtttcgttgacgcgtctcttattgaaccgtcgcgtcccatgcacggattcattatggactttggcttgttagattctcgatttcgatctgaaagtttgatactttggattagtttaagatttgctaactcaattttattggattagtgtataatattagtttctttgatcgggaagatgttcaatttgaactgttattagtaaaactgtcgatctttttattctgtgccactatacacgaatgttgctgaattactaaagtttaggtagttttgtcagtatggtttgcttttgcttgtatgtcttatgatgagacatgattccagtctttttatctctgtcttgttcaggaaaaaa

SEQ ID NO: 662 - DNA, 635 bp, Arabidopsis thaliana
  Intron number 1 from transcript AT3G46000.1 (locus AT3G460 00) derived from phytozome v7.0 (chr-ID Chr3; pos 16908217 to 16908851 reverse strand)
gaacttttatttgaaatcggtttgatttagccgtgagctcaattttctcttgtttctgttttaagtttttcgattttgaagctttcttctcgaaaatttcgattgcttgctagtcgatttcgagttcaaatccgtttgcttctcttttggataacgattctcgctcgtttagatagatctggagatgatttcagatactcgatctttggtagttgtagtgtgtgatcggattagagatccgattaaagaactcgtaactttgttgttctgcttcttcgctagcttatctgaaatcaggaagaatctgctgtttttcacttcaagttcaaatcaagtgttaaattctacgaatttttgactttttcatcagtgtttgtcaattgttcgatctatgttgtgcttcttgcctcttgatgtgtcaaaattgaagtcaaaatcgttctacaaagttgtgaggagctacttagcttctcttccttgtgatgttaacaatgttagagatgatgataatattatccaatttctgtgttaagttgtgatctttgttttagaaaatgtgtttttgaagagatgtgcatcttctcagtgttttgttatgtgtattgatatgataacaggcaaacgcggcatcggga

SEQ ID NO: 663 - DNA, 684 bp, Arabidopsis thaliana
  Intron number 1 from transcript AT3G47640.3 (locus AT3G476 40) derived from phytozome v7.0 (chr-ID Chr3; pos 17567184 to 17567867)
cccctgttttttttttttggtgttctacggtatatttttgtgaaaatgttacttttcatctactcgataaaattcttaaacagatagtacaactttttacccgattaatctgtagaaaatacaatgttatttacactcaacaaacatttccattaatagaactttacccgatttaaaccactcttccactcgattaatattattattttattaattaaagatacgatgacgtgtccatgagagatgagctttagtggcacgcaacgtaagagaagaagacaaaagtaaaaaagagaaaggcacatgtcgaactcacgtgtccacttaaacgcaccaccttcttctgtgctctccacgcgcctccacacgccctcctcaacttcggaccttcttcctccaaaaaaaacaatttcactcttcattttctcagattctcttattatttcttctactcgtttcgaatcctaatcgtctacagtttccgacgagattctcaccggagaaagaaaggtagttcttttctctgaatctgttgtgttgagaacttagccgtaatttttgagaattattcttcactatttgatttgacaagaatatgggtaataaagacagaatctaaaacacttgcttcagtttttgaggaatcaaaaatcacacgaaagttttttttttttttctgctcct

SEQ ID NO: 664 - DNA, 371 bp, Arabidopsis thaliana
  Intron number 1 from transcript AT3G47640.1 (locus AT3G476 40) derived from phytozome v7.0 (chr-ID Chr3; pos 17567659 to 17568029)
cagtttccgacgagattctcaccggagaaagaaaggtagttcttttctctgaatctgttgtgttgagaacttagccgtaatttttgagaattattcttcactatttgatttgacaagaatatgggtaataaagacagaatctaaaacacttgcttcagtttttgaggaatcaaaaatcacacgaaagttttttttttttttctgctcctatgtttcttggtgcgtttgtgtttatttgacattaggagtgattgattgattataaagatgaatgatttgttagattcattaagatcactgttctttttgattaatcatcttatgtctaaattttaggtgacttgacagagaatcttgttctgtaataaaag

SEQ ID NO: 665 - DNA, 684 bp, Arabidopsis thaliana; identical to SEQ ID NO: 663
  Intron number 1 from transcript AT3G47640.2 (locus AT3G476 40) derived from phytozome v7.0 (chr-ID Chr3; pos 17567184 to 17567867)

SEQ ID NO: 666 - DNA, 354 bp, Arabidopsis thaliana
  Intron number 1 from transcript AT3G49307.1 (locus AT3G493 07) derived from phytozome v7.0 (chr-ID Chr3; pos 18282620 to 18282973 reverse strand)
ttttcattgtgttcttcaggtaatctcaagttaaataaataaaatcgatattttaataagaacatattgattaagtttaaataataacaactttgaatgccatataaaaaaattgttgtttgatttaaaaaatgatccatacaagtagtactggtgcccaagtcatagtctggttcttaaggatttcacacataaagtttaatagtattatttttcttgtcaacgtttaattatatgttttatcgcaatacataaatatataccccgtttattaattaattttgcatattcttttgttattctctatttgttttcttagggtttaaggaggaccttggtgctattcatatcgat

SEQ ID NO: 667 - DNA, 156 bp, Arabidopsis thaliana
  Intron number 1 from transcript AT3G54550.1 (locus AT3G545 50) derived from phytozome v7.0 (chr-ID Chr3; pos 20194201 to 20194356 reverse strand)
cttcttcttctagaagagttcttcgaagcctcaaggtatgatgaataatatctctgatgctcacatttgatgtttggaatctgttataaacagagtttcttttcttttcaatgttttgtagagtcttttactttgtgcgaacgtatctgagcgtga

SEQ ID NO: 668 - DNA, 390 bp, Arabidopsis thaliana
  Intron number 1 from transcript AT3G56480.1 (locus AT3G564 80) derived from phytozome v7.0 (chr-ID Chr3; pos 20938987 to 20939376 reverse strand)
ttgagattctctgtttcttggtcttgagtttatccgtaagtttgtttgtgtttttcttgagttgattgattctactttcatttctcctgatttttgtcgtatactgtttcatgacatcaatgtttggttacatgagttagaaattctccacttttttaaaaatatatataaaatgtttgttctgtttttttaactgccctttgatgttctgattctttctcatttagtgtaatcgatagtataatgcatttcttgttctgccttaaatcttttcctatgaactagattagagctaatctagtaatcttccttccaattcaaatcatctaatgattttttgatttgctctttgtttattgttgttgaaacagataaagatccggagataaa

SEQ ID NO: 669 - DNA, 756 bp, Arabidopsis thaliana
  Intron number 1 from transcript AT3G58500.1 (locus AT3G585 00) derived from phytozome v7.0 (chr-ID Chr3; pos 21638090 to 21638845 reverse strand)
cagtgcaagcctctctccgagcaacaggtgcctgtgattgtgttagaatatagctttcctcgcaccttttcgttttcttcgtttaaaattggatctgtaatttagtttttcgagtgaactttgggccatttcggtgattagatctcagattttgtttcaaatcaagggtggattatttctgtgagtatatgatgatctgattcttcgagaaggatcttctagtataggtgtagagctcatttcacgtcagttttacgggttgatagaaatggatttcatttttttttgtttcttaatgatttctggctgtattggattctgaataggcgattagctcgcatttcaatatgctttgtattgtggatttgtctcacccacagccaaaattgtatccttttgattaggtgattggctagttaaaatctcatcagttagatgcattactggattttccaattgggggaatgtatcttaaatgataatagatttagctgaagttgagagagaggttgcaattcgataaaagttcttctaagctaatatcgagggaaaaactgatcagtagctgtaaaaaagtcttcttggctgtagatgatctttgtgcttgttgcttgtgtcaaattggtgtatctaatttgacattttaatgttaaactggataatactgttagtcctgtatttctctaggaagtaaaagaggggaaagatgaatttattatgtgcagtgtttttttatttgctttaggtcagagcatt

SEQ ID NO: 670 - DNA, 269 bp, Arabidopsis thaliana
  Intron number 1 from transcript AT3G58980.1 (locus AT3G589 80) derived from phytozome v7.0 (chr-ID Chr3; pos 21795856 to 21796124 reverse strand)
aacttgcaatctcctaatacttttcaggttagtgtgctattgtttcttctttctctgtaacatgttattacagtttgagtttgattaaaacaaaaatatgaagaatcaaaatcgttttaacattcaggtgtgcatcttaggtttcttaagatgttccagttctcttgttacataaatgaaaatatatcctagaggtcgtcttcatccaaatatatacatataatgaatgactaattgatttattttgtttcaggcattttcttacttcc

SEQ ID NO: 671 - DNA, 330 bp, Arabidopsis thaliana
  Intron number 1 from transcript AT3G59790.1 (locus AT3G597 90) derived from phytozome v7.0 (chr-ID Chr3; pos 22092637 to 22092966)
aggcctattggcagaggtgcttgtggcatcgtttggtaatatccttttaacagaattaatagtttcatttcttttcctaatcattttgagcactttagaatgtagatgccatgaccatttttgtgtgtaatttatggtttgggttgataagtttcatctttttatgagaaaagttcaaatcgtttctatcatagagatctctaaacagttattataccattcatgacttttatgttattcttgttacttttaaaatttcctcacttgacacattagtttttacttttctttttaactttttttacagttcggctgtggactccgagacca

SEQ ID NO: 672 - DNA, 427 bp, Arabidopsis thaliana
  Intron number 1 from transcript AT3G59870.1 (locus AT3G598 70) derived from phytozome v7.0 (chr-ID Chr3; pos 22117457 to 22117883 reverse strand)
gccgatccagatcctcctctccctctattcccgtaatttctgatcactcgccttcttattctattactgctttttgattcgagattgattttttgaagactttgttagccattggtataggttgattatgtggccaattgattaccttctcttaagaactcaaatagttattcattgcattgaataagacgatgcactcttttgatcgtcaatgaatgaaaagcttagttttctcagaacatcagctttgatttgtcgaagatgtggtgtgccctctttgtttcgagcttaaatgctcacaacataccaataatctatgtgttatgaattgcatttgggttttcactaatgatttactcccaggggctctgtttctatgtgatgctgtatagtgctttcctgaacaaacgagagatcaagacgacgt

SEQ ID NO: 673 - DNA, 334 bp, Arabidopsis thaliana
  Intron number 1 from transcript AT3G59920.1 (locus AT3G599 20) derived from phytozome v7.0 (chr-ID Chr3; pos 22135236 to 22135569)
gtgtcaaggtctccttcctctctttccccgattcgtttttcgtttttcttctctcttattttcaattgaacctttgaattcatgattgaatttcgcataattgctttgatccggattcaaaaaaacggatctcggtgagattagattagatctccccgattgtatgatctgagctcaggttttcgatcttgataatgatgatgagatttgattgtctagtttgagcatggagatgattgaaaatgttttggggcttttacatatgtacattgacctcttagtgttcccgcgatctgattattggttttgtggatgtgacgagtaggtgcttcac

SEQ ID NO: 674 - DNA, 434 bp, Arabidopsis thaliana
  Intron number 1 from transcript AT4G01120.1 (locus AT4G011 20) derived from phytozome v7.0 (chr-ID Chr4; pos 483971 t o 484404 reverse strand)
gggttcaattcgaattgttttccctgagactcaaggtacgtttttggattttggttttcgttattttcttcaatgaatatctgagtgattatatatgaacgctctgttttctcgagaaagtgtgtattgagtgaagaaaattactaggaaagttaaaggtagattgaattgtgtaactctactagttggtgatagttttgaacttttgacagaggaaaaaactcgactttgaatcttttactggtagattcagtggtgctatactttatagttactcggatctctgttatatttatagtttgatgtccacaattgcgagatctaggtgtaattgaatactgttcttttagatttatgctttacagaggaactgctaaaagatctgatcatttttttgtttataaagttactgtgtcattactctgcattgagca

SEQ ID NO: 675 - DNA, 633 bp, Arabidopsis thaliana
  Intron number 1 from transcript AT4G03510.1 (locus AT4G035 10) derived from phytozome v7.0 (chr-ID Chr4; pos 1558655 to 1559287 reverse strand)
gctttgggtttccctcaaacggcgccgattgtctggttcgtctccctaaatctctcttcatagctcctatatacgtgcctttgcgtatgtataggtgttttctcatctctgtgactatctatattcgccggcaaaatttctcggtctgttgattttgatttttttctctgtaccatttagatttgaattggtgttgaattttccttgaggtgatgagtttgttgtctctctgtttctgctaaagtctttctctaatcattctctttcttgggtttcgataaatttctcgaatttgtaagctaaacttaatccgacgatgatcaatggaaaatttggatgattggttatgagttttcggaagattctaactttcaatcccaagtttttatgggtcgtttttaatttcatctgtttccaaaatttcaaattttagggttcttcgataatatagggttttagattttctggattttttaaaatcttttgcattttttctgattaacctaattctcatctggataaaaataggctatctttgtgtgtttcacttgtaaatcttataatatattgcattcaatctggatctaatgttggggaaataaacacatttttttttcaggattttgaccactg

SEQ ID NO: 676 - DNA, 165 bp, Arabidopsis thaliana
  Intron number 1 from transcript AT4G09795.1 (locus AT4G097 95) derived from phytozome v7.0 (chr-ID Chr4; pos 6169668 to 6169832)
gttgttttggttattggtatgctctaaactttaatgtatattaaatattatgtgtttcttcatatattttgatttgatggttttcttttcatcaccttattattatttttaacaaacagtaattgaaatgatattagtctatgttttaaatatgtattattagaa

SEQ ID NO: 677 - DNA, 370 bp, Arabidopsis thaliana
  Intron number 1 from transcript AT4G11220.1 (locus AT4G112 20) derived from phytozome v7.0 (chr-ID Chr4; pos 6838991 to 6839360 reverse strand)
gagacctgttcataaggttctcggcggcggaaaacgtatgtttactctgatcccgtttcgatatttgttctcagttttttaaaacgaattcgtttgcgttggcttgatctgtttgattttctcactagtttaagggatccgtgaagaagatcgtttgaatctacatagaggtttacattgatttgaattcgatttcgattttgatttctgactagtttgagagaatttgtgatggaattgatttttttttttttggaaatgtgtataatgatcttgtgagattcttgtagttattgatgatatggttcttatttcgtgattgataaaccctaatttggtgatctttttaattgcagcggcagatatattt

SEQ ID NO: 678 - DNA, 422 bp, Arabidopsis thaliana
  Intron number 1 from transcript AT4G11960.2 (locus AT4G119 60) derived from phytozome v7.0 (chr-ID Chr4; pos 7177157 to 7177578 reverse strand)
cttattgccccttaaagcttctactgatcaatcaggtctcgatttttatttgcctctttaaagtttcgatttttttatttgtttttgcctctgatctttctttgggaacgaaattggtgtgaaaagttgagatttttatgatcatagaagataattagataaatgatttccaatttgtagcctttttaggattaaaatttgtgtgtagcttaaggttcttaagttattaactcatcgttatgtgatcgaaacaaaaaagcactcaatcttcaaatttagttgagaaaagctgttgtattgtagctttgattttgtctctgatcattgtttgggaacacagtggcttttgagaaagttttgattttattcaatcatagaataaaatcactcaagctttaattctagttaagaaaagttgttat

SEQ ID NO: 679 - DNA, 568 bp, Arabidopsis thaliana
  Intron number 1 from transcript AT4G11960.1 (locus AT4G119 60) derived from phytozome v7.0 (chr-ID Chr4; pos 7177011 to 7177578 reverse strand)
cttattgccccttaaagcttctactgatcaatcaggtctcgatttttatttgcctctttaaagtttcgatttttttatttgtttttgcctctgatctttctttgggaacgaaattggtgtgaaaagttgagatttttatgatcatagaagataattagataaatgatttccaatttgtagcctttttaggattaaaatttgtgtgtagcttaaggttcttaagttattaactcatcgttatgtgatcgaaacaaaaaagcactcaatcttcaaatttagttgagaaaagctgttgtattgtagctttgattttgtctctgatcattgtttgggaacacagtggcttttgagaaagttttgattttattcaatcatagaataaaatcactcaagctttaattctagttaagaaaagttgttatatggaacttttttcctctgtggatttttagtttttatactctaatccactaaaagattgctccttgagagtttccttacttcttaaaatcatttttatgacttgtcttcaggtcaggtgggtggggaagaagttgatagcaagatt

SEQ ID NO: 680 - DNA, 1034 bp, Arabidopsis thaliana
  Intron number 1 from transcript AT4G12460.1 (locus AT4G124 60) derived from phytozome v7.0 (chr-ID Chr4; pos 7391692 to 7392725)
aacatcacaaaaacattggcattgttcatctcaaggtatttcttagttcgaatttcaatgttttttgaattagcaatagttaggttttgaattagtactattgttgtttggcttatcatcttctatattctggtttctgaaaagtttttgagtagctacttatctgtagtgggccatatcaacaggtattggcagtactatgagtctcaaagttcattgtcgaaaaaccaaatagccaaaatacaaaaaccttttttttggctggtgctactacaatctggtattgcaggaccagatcagggtctcaatttgttgaacacattttacatcttgttagaatttggtttattttgtagtaaagccaagaagtgttagaaatttgtcacctttggtcacatgtaaaaactctttatcttttgatttttttgtttgtttcttgattttgtttcccaggcatgggcctgagttcttttgatttgtgtttgattttttttctttgccatcttatccttggctaattccatggatcattgaccagtagatttagttatatcctttttagtggagtttctacatgattggtgaatggtaggtgtagctagtcggtaggaaataatcaagtgtggataaataatggagtgtagctgtgttggagctgaaggcctcctcttggagaaattctagccatatatttttttgttaacttgtaagagttatatttgcttattctaaatactccaaagcttatccagacataagctttgagtctgtgtttatttctttctctgagtaattgcattcttctgtgtttgctttttaattttttcgttagaacatggaacttgtaattattaattgttcacagtttgtttttgaacatgagagcctctaatctgatcttaacttatagacttttattagttggaaaaatgtttactcgtttgagggcttaagcctgtaattagatgaatatcatttcattcttttgttttccagcaggtttcatcttaccgagaaagcaagtctgatcatag

SEQ ID NO: 681 - DNA, 363 bp, Arabidopsis thaliana
  Intron number 1 from transcript AT4G12460.2 (locus AT4G124 60) derived from phytozome v7.0 (chr-ID Chr4; pos 7392363 to 7392725)
ggagaaattctagccatatatttttttgttaacttgtaagagttatatttgcttattctaaatactccaaagcttatccagacataagctttgagtctgtgtttatttctttctctgagtaattgcattcttctgtgtttgctttttaattttttcgttagaacatggaacttgtaattattaattgttcacagtttgtttttgaacatgagagcctctaatctgatcttaacttatagacttttattagttggaaaaatgtttactcgtttgagggcttaagcctgtaattagatgaatatcatttcattcttttgttttccagcaggtttcatcttaccgagaaagcaagtctgatcatag

SEQ ID NO: 682 - DNA, 729 bp, Arabidopsis thaliana
  Intron number 2 from transcript AT4G16695.2 (locus AT4G166 95) derived from phytozome v7.0 (chr-ID Chr4; pos 9394539 to 9395267)
tccccttctcatcttcgtactctaaacagacgtaggtgtgctttttctttcactcttctgtgtttctttcatctgatctgctgaaacaactcatagctctaggtatcttcacgtttgttgtagtcatagttaaaatcacaattagaatcagttgttgattgctttacatgaacgtataagaatgatctaaattgagtagtattgcgacttgttttggtgtgtaggagatcagtaaccatcattttagtttgccctgaaattaaaaacctaagcttggtgtgtaggatatcaaataaccatgggttttaagcttgaagtctactaaaagttttgaataagttagggaagtgaattagcattgttctctaatccttactatttgtgaacgttgaagagatgtaaaatgatatgtatgtttccagtgaaagaagactgaaagctttgtttgtaaatgttagtcctgtcaatgctttgtagagactgaatgctttagtgtactttgtgtgtttggatcgagttcaggtggggaatccatggttgatagatgatcaaaaattatagttgctcctcttcgttaaagcttgtttaggctaaaaattggaaggtgatccttttgtgctagtcaagtaaccatggagtttatcatcttctcactgattggtactaataatctgtacttatatctacttttcaggaacaaagttttgatatagggggccagaggctgtg

SEQ ID NO: 683 - DNA, 733 bp, Arabidopsis thaliana
  Intron number 2 from transcript AT4G16695.1 (locus AT4G166 95) derived from phytozome v7.0 (chr-ID Chr4; pos 9394535 to 9395267)
cgcgtccccttctcatcttcgtactctaaacagacgtaggtgtgctttttctttcactcttctgtgtttctttcatctgatctgctgaaacaactcatagctctaggtatcttcacgtttgttgtagtcatagttaaaatcacaattagaatcagttgttgattgctttacatgaacgtataagaatgatctaaattgagtagtattgcgacttgttttggtgtgtaggagatcagtaaccatcattttagtttgccctgaaattaaaaacctaagcttggtgtgtaggatatcaaataaccatgggttttaagcttgaagtctactaaaagttttgaataagttagggaagtgaattagcattgttctctaatccttactatttgtgaacgttgaagagatgtaaaatgatatgtatgtttccagtgaaagaagactgaaagctttgtttgtaaatgttagtcctgtcaatgctttgtagagactgaatgctttagtgtactttgtgtgtttggatcgagttcaggtggggaatccatggttgatagatgatcaaaaattatagttgctcctcttcgttaaagcttgtttaggctaaaaattggaaggtgatccttttgtgctagtcaagtaaccatggagtttatcatcttctcactgattggtactaataatctgtacttatatctacttttcaggaacaaagttttgatatagggggccagaggctgtg

SEQ ID NO: 684 - DNA, 548 bp, Arabidopsis thaliana
  Intron number 1 from transcript AT4G17530.1 (locus AT4G175 30) derived from phytozome v7.0 (chr-ID Chr4; pos 9774874 to 9775421 reverse strand)
aatcctgaatagtaagaaccttcttcttcttcttcttctctaatcgttcagatcgattttgaaatttataacatgttatgtaatttagtttctctatagattttcttcgtatcatttttttacaaggagattcatgaaattaaccttatgttgatgctggctttgttaatctgtctgatcaatttcgtgattggagtctcgtttcgttgatcggaattttgattagatctagaataaaattggttgagatctgttgtttctcttcaatacacagatgattctcttagtttgaaaattctacgggtgtgacgtgaatccatagtcgattttgattatggtgcttgagattgtgttttgaatatggcgtttagaaatctatgagcttcttcacaatgtttagcaactttgaaatatgtcataagctcttaatatagctggagaaatgtcaaaaatgatttatactctcttacttacatgtgtcttatgcttctttctaatttttttgatctgcagtgactatttgttcaagcttttgctcattggtgatt

SEQ ID NO: 685 - DNA, 623 bp, Arabidopsis thaliana
  Intron number 1 from transcript AT4G17570.1 (locus AT4G175 70) derived from phytozome v7.0 (chr-ID Chr4; pos 9786347 to 9786969 reverse strand)
gaagcaaggaccttgctaccactgtggagttacaagtgagtgtctccaattcctatttgatgatgtgaaaatctgtatgaatatgaatattcaacctttgttttttttacttctgggtgagatgctctcttttctgggaaaatgatttgattatatgctttttgtgtagcaaattgtaataatgattgaagtgatacagcaaagacttcctggactcaagaatatctatgaacattttggaattatgttcctttaactatatatattgtttctgttgaatgatcttaagtaacaactgtttgtgacttgtgttgttgttctcagtatgattagaactaatggattaggcaacaaagacatgatcttgggatctgaatttgtgtttatgattcgcaattgttgtacaaagaagctaaattttgttctggttgctgcttaaagactttaagatgtttggtgttttgagatcattgttcttctgattgatttggagtttgaatttgcagtattaagtcacatttcaagtgttgtctgatgttgaactcttatgttgtcttgatttcaaagctcaaatttgtgaaattttgtttctttcattgaaacagacacacctttgtggagaa

SEQ ID NO: 686 - DNA, 553 bp, Arabidopsis thaliana
  Intron number 1 from transcript AT4G17570.2 (locus AT4G175 70) derived from phytozome v7.0 (chr-ID Chr4; pos 9786645 to 9787197 reverse strand)
tttttttctgggtttttttccttagcagagaaaaggttcttaatagttttaagactctggttttgtatattccaattatagctgaatattaaacacaatttataaaacttaaatttctttccaaaaaatctcttctttttaagtctataaaaattgcaactttcttctgaaattattcatttttgaaaaacacaaaagaaacaaagagagagatagagatattatggggaagcaaggaccttgctaccactgtggagttacaagtgagtgtctccaattcctatttgatgatgtgaaaatctgtatgaatatgaatattcaacctttgttttttttacttctgggtgagatgctctcttttctgggaaaatgatttgattatatgctttttgtgtagcaaattgtaataatgattgaagtgatacagcaaagacttcctggactcaagaatatctatgaacattttggaattatgttcctttaactatatatattgtttctgttgaatgatcttaagtaacaactgtttgtgacttgtgttgttgttctcagt

SEQ ID NO: 687 - DNA, 478 bp, Arabidopsis thaliana
  Intron number 1 from transcript AT4G17615.1 (locus AT4G176 15) derived from phytozome v7.0 (chr-ID Chr4; pos 9816576 to 9817053)
tctggatctcgccggcgaaccgtttctcttgggtggtgagtgttgcttcttatttttaagaatctttttcttttatttccatcgaatttcgtttttttgagtttgatttttggcctgtggaattctcgatgtttctacattgatcgtctggtttcgaatcgtgttttactggtacaattttgattccatctccgtatcttatggattcgaagaactttgtgttttttttttctttcttcattgatgctactttgctagggtttacacttttttcttccatggtaaaaaaatttgagcaaagttgttgagattcttctagactgttttcaattttacgtttcacaaagatttttttagatgatttgtttctaatgaaatggcattgtttgtgttctgtttccatatgtgtagattttgaaaatatgtttgtgatgattgtgcagtaaacagtagcaatcaagctatagaatctcagata

SEQ ID NO: 688 - DNA, 348 bp, Arabidopsis thaliana
  Intron number 3 from transcript AT4G17615.1 (locus AT4G176 15) derived from phytozome v7.0 (chr-ID Chr4; pos 9817704 to 9818051)
gtctgattaacaaggtacaaagtttgtttcttttgacccaatttggatcttttcatgaccccatcgttgtatctttttgttctttacgctattcatctacagtatttttcaacttagttgactttatttgagcaataattattcttccatgacgatatgtctgttccatattgcatcgattcaatgtatcgtagcccttaatgtttgacttgaacttaacttattttattgattgctttgattttgaattttgaagccttcatggcccaccttgtttatgttgttttttaatcctggcttcacatgtatgcaggaggagtttcaacttgctttgttcaaaagccggaa

SEQ ID NO: 689 - DNA, 556 bp, Arabidopsis thaliana
  Intron number 1 from transcript AT4G18050.1 (locus AT4G180 50) derived from phytozome v7.0 (chr-ID Chr4; pos 10022412 to 10022967)
gttagagaagtgtggaaggttagggtttttttcttttaattttgattatttattaattaatttgggtttgattagattatcgagccgggtcaagattttctcgatcaagaaataaaacatccttgattttaggattagggtgaataataatcttgatttgagttattacttattccatttgagttatttcggcttattaatctacaattttgattataaaaaaaaattatgatgtaacttaaatagtaaacacccttaaatttctgctttaaaaaatcacattgattgatctaattacactttatttctttagatgagttacatgaaattttcatgataaatacattaatggagtttactgttttctttgtcttgaagatatagacaaagatactgtttattttagcctttactttaaagttaaagattgaaagcaactttagttttcattttttggaatttggcgtggaaaataatcgaatgatttagtaactaattcatcaaacttatgacttttacaggttgctgtaaagtttatataccttgcagtatactc

SEQ ID NO: 690 - DNA, 352 bp, Arabidopsis thaliana
  Intron number 1 from transcript AT4G19200.1 (locus AT4G192 00) derived from phytozome v7.0 (chr-ID Chr4; pos 10498925 to 10499276)
aattccttctgaaatattcatcgcaattcgtatcggtaatttttccttttgatcgcattttttttttatctttgatcttccgtattaaacgtgctcgatctatatactcaatgatcttatatgtgtatgatcatgtaatttggaagttgaaatgtaaatcatctattccttggtaaattattcttcgattttttttctgatataggttaatggtaattcctgtgatttttactgatgtaatctggtgttgattgttgtgaattcttgatctatgagattatgtcttagatttgccaaatgttaagtttgtttgatctttgacaaaatattgtaggtttaaagtaaaaaagca

SEQ ID NO: 691 - DNA, 133 bp, Arabidopsis thaliana
  Intron number 1 from transcript AT4G19910.1 (locus AT4G199 10) derived from phytozome v7.0 (chr-ID Chr4; pos 10796129 to 10796261 reverse strand)
tgcacagatactggtttcacctcagcagattacaggtaataattttattttatttacgtgactatagaagaagattggaaagagttttggttttgactgttttagtttttttttcatgatttgcatagcagca

SEQ ID NO: 692 - DNA, 848 bp, Arabidopsis thaliana
  Intron number 1 from transcript AT4G20870.1 (locus AT4G208 70) derived from phytozome v7.0 (chr-ID Chr4; pos 11175879 to 11176726 reverse strand)
agagagagaggcttgtttgttttctctcctctaaggtaaaataatcctcagatctctgagtctcattctcttcaaattcttccgatttcttctctcagattctatgtttttctcattatctcttccccgatttatagatcttttctgcaaaaagttcgggattttttttcgtgaatttcgaagaatgttggcttttttcttcgtctaagtttctttttctctcgtgggatttgatgatttgatgttttaatttgattcatagctgaaagttttgttctttaatacattgtcaaggttctcttcgttgattggctctgtctttaggtaatgctgagaatgttataatcttataatgtctcccttatgttggatcattgacccttgattagatttcttctttggatgtgttctcttttgcaaatcgagctttaccaaatcctcagatgccaaatgcagtcttttagttttagattgcctttaaagcaatagatttcctagtaattgacattgaatttttcagtttggatgatcaacagatttatgttcttgtcagatgaagatgttgtcattttttttctattgatatttgtatttgaatgagtactgtttcatatgagcagaattttgcagcacagtaggattatctttttattgttttgggatcaatttggttggaatttcttttatgagctagctagaacttaaatcttctaacactatcgtgaattttgtttcacctttaatgatatattgttcattctcaatgtttgtttctcaacagtactgcatttaagatttttggttttggatttacttgcagaaacaatcagtctcataaagtggcaaag

SEQ ID NO: 693 - DNA, 564 bp, Arabidopsis thaliana
  Intron number 1 from transcript AT4G21105.1 (locus AT4G211 05) derived from phytozome v7.0 (chr-ID Chr4; pos 11265709 to 11266272)
caaaattccttatctcgtcgattaatttctctcaggtaagcttctgagatttttcctcgtagatcgattttgatttcgcatcaatcgggttctttcgttggtaatcgttaattttgtccattttttaaaaggtttgtgtcaatctcaaatttcagagaatgataaacctaatttgtttccgttagattgttgaaatttgacctaatttaatcgggatttcaccgtaaagttttttaattgcgttgatttgatctctgcgatgtagaaatcctaattggatattttgcagtcactcagatccagccctgattatgtggctttatcattgcccttttgatgaacgacagaaaacaagaataatttgaatgtaatcgctgtcaatttagtgtcttgatttgaatactacgtatactttatcaaatggtttgttttatcagtatgttattgtttataaaatgtgttgttatctcatatattggtcaaatggtttgtctaatcagtatgttcttctatataaatgacttgaacgataatggttattgtgtggctatggaattgcagatc

SEQ ID NO: 694 - DNA, 403 bp, Arabidopsis thaliana
  Intron number 1 from transcript AT4G22130.1 (locus AT4G221 30) derived from phytozome v7.0 (chr-ID Chr4; pos 11723801 to 11724203)
ctctgttgttcgttgtgttactgatccatctggtaaagtattcagctttatgagttttcttcttctctgcttttaacctcattgttttgattgatcatctatgtgatttgagagtgaagggtttttaaaagttgattactttagatttagaagatgaaacccttttgcattaatgtagatttgatgatttttgacaccgtctgttttcctgagaacccgccggaaaataatatttctgctttacttacttttttagctcaaaaaggaaagttgtaaactttatgaaagatttttcttctttcttgatagatcctttgatgtgtttttctgacttgtgagctgttttcttctttctggtattattgcagttcaagcccttcaagttttgtatacttcactaaat

SEQ ID NO: 695 - DNA, 313 bp, Arabidopsis thaliana
  Intron number 1 from transcript AT4G23290.2 (locus AT4G232 90) derived from phytozome v7.0 (chr-ID Chr4; pos 12179705 to 12180017 reverse strand)
gtcactctaacacaaccaagaaaggtatataatataaagatatgaactcttcatttgaactttttctgctgtgttggatctcgatttttgctgatgtgtttgcatttatttttgtttacttgaaaatacaaactcaaaaagaaaacacaacctcctgttatttttgtgtaataatgtttcatattcgtttcacaaaaaaaaattgtttcatattcaaaaaatttaaaagaagtttctaaaaaaattcgcatttaaaatactttatgcccttaaaccaatttggattgtattctgagtgacagctttcgcgcag

SEQ ID NO: 696 - DNA, 314 bp, Arabidopsis thaliana
  Intron number 1 from transcript AT4G23895.3 (locus AT4G238 95) derived from phytozome v7.0 (chr-ID Chr4; pos 12422145 to 12422458)
actttcccttgaatacagagatcacattcgatcaggtaaaaacaaggtctcgatcttctcttcagtcaattttttcaaattattcgaggttcccgtcattcgattccgacttccgagcttctatttctgctcaatgtttttgtattttgttagggtttccagaaaattcgattctgttgtttttaatttgagctaataaaatctagaatgggaaaaagaaagagttcattttcgtcctctttctttttgtagaagctgaactttgtttttcttttacagcgagctgatttctcacaagggatatcaaaatttct

SEQ ID NO: 697 - DNA, 655 bp, Arabidopsis thaliana
  Intron number 1 from transcript AT4G24760.1 (locus AT4G247 60) derived from phytozome v7.0 (chr-ID Chr4; pos 12762610 to 12763264 reverse strand)
gggttagtaaatctcccagatcagatttttctttctatatttagctcaggatcttgctcagaaagtcctcgccttttttggttttgctctgttttctggatttgtgcaagtagatttgaagcttctagatgcagaattttggtcttagtgttagagagaagtggactttattaagctgtggatttgtgattcacaaagcttttgaaagtttaagttgcagactcataaaatcttggatttttgctggaagagtttgtctttagggtttgtctgaatcaggatctctactgatcctttatcaaagagacaaaaagtagttttgaggttgagatgtttgagtttgattgttgacacttgacaacaagtggtcttgggcaaacattaccatttctagaaattcaagatctgttattgtttctgtttctaaaggcaagtactgaatacccaaaatgtagttctttgatgtaacaactttttggctcattcaggtataacttgggattctgggatagattggtttctcaaattagtacgctatttttttctgtcgtatcttcaagtgaacctgaaattagtagaatttacttctgtaaggttatgatttccatcttatgacattggaaaatcctctaaatatgttgtggtgtttataggt

SEQ ID NO: 698 - DNA, 380 bp, Arabidopsis thaliana
  Intron number 1 from transcript AT4G24840.1 (locus AT4G248 40) derived from phytozome v7.0 (chr-ID Chr4; pos 12800084 to 12800463 reverse strand)
tggtatccaaggtacatgattctggtttctcaatcttaattttccactttgcaagtgtaatcttgcgtctgcttctaatttcgttggcgacatattccagtgattatttgctttgattgatatagatctagatcacgggatttgagtaagcttgtcgatcttcttagtgtacgcttgaagcaggataacttctttaatatcctcaatgcaagtttgatctatctgtgaaccttaatggttttgcattgtagttccgtttaaaatgagcaaaaatgtttctcattgctgttttcatttttttgttagatactcagaatgcttgacgtaaaatcattgtaaatgtaggttgaaaaacttattaaagttctaccaagtactcc

SEQ ID NO: 699 - DNA, 511 bp, Arabidopsis thaliana
  Intron number 1 from transcript AT4G25830.1 (locus AT4G258 30) derived from phytozome v7.0 (chr-ID Chr4; pos 13133844 to 13134354)
aagaacgtcagtttcagatatttgttagctctcgagtaagtccattttcctttattttttgtcaattgtatagatctatgtgtaatgtaactattaatctcatctctttatacagtattgatctcatgatgagatcattattgtgttaaaaaaaaacttgaaactggccatcaatgtctttaaaactcactgaaataataagtctgataaagattctatttaatgatttgagtttttatgagctctgaaaaagagggtaatgatttcacagttttttgaaggatcttgtttattattttagtaaaattttctgttttggttaagtctacatgaaaatgacattttgttcagtggggactgctactcttttttgtttttggtttaacaactcttcaaatatcctcccacaaaaaagttggatataagttttcattttataattatgtttttgtgttatgtatgattattaattaaaagatgtgtatatatgacagggctgagttatacatag

SEQ ID NO: 700 - DNA, 335 bp, Arabidopsis thaliana
  Intron number 1 from transcript AT4G27180.1 (locus AT4G271 80) derived from phytozome v7.0 (chr-ID Chr4; pos 13618792 to 13619126 reverse strand)
atttcaaagctaaacaaccagataataatactgaggtgttttcttcttttctcactgatttctctatgaaattgccacacccaaagtttgagtcttttatgttttgtttcctcactgatagtgtttttgttgtttagctcaaatcattgcttaattttttttctctttgtaacaactttactgtctttgaaaattgaaagaaaaaaaaacccaatgattcacgggtttcaatccttttcgatttaatctttatataagccaccattgaatcattaataaaataaagatctttgatgagaagaagaaaataaaaatcattttttttgcaggttttt

SEQ ID NO: 701 - DNA, 388 bp, Arabidopsis thaliana
  Intron number 1 from transcript AT4G28470.1 (locus AT4G284 70) derived from phytozome v7.0 (chr-ID Chr4; pos 14071873 to 14072260 reverse strand)
ataaaaaggaagaggatctggtgagttttctttatatcgatttcgattattagttggaatcgtgcttagctgagttagaaagaatccagggagatcggaaaaaactcacgattaagctgtagattttccgagatgtacggtttagctgatatattgtgaatgtcgcattgctatttagaaagcgaggttaagaagttggttaaatccacattataactcgttctgggaagatacaattcttgttagggtttaagtcacatggagttaaattaataggaatcttttgtactatggctatggttttagctggtttgattggcagctgactcaatttgcatatgatgttattgtagtctgaagaggacttgcaactaaagcagaatctgga

SEQ ID NO: 702 - DNA, 480 bp, Arabidopsis thaliana
  Intron number 1 from transcript AT4G28640.3 (locus AT4G286 40) derived from phytozome v7.0 (chr-ID Chr4; pos 14142534 to 14143013)
gctgcaactagtgggtgagtgaaattctcttccctttcctcttttacattttgatcaattatggtttatttggggattcttaatatcatgattatcaatagaactataaataaagatttgatttttgctttttatggttatgggattgattagacagaatgtccttgatcacagttatctgaaaagattcgacctttgttacgtatagatgactttgaatgtatcttcctgatcattagatagtttgctttggtcattatatcttcaaattgaatcttactatcgttttctagagatgacagtttttttcttcttggattctaaagtatttattagctttggagagaaagtgattaatcctgtatagtgattctcttggtatctgattttacaaggccctgaagtgtttataaccctttttatgtgtttactcttatttgagcaatttgaaacctttgaaaatggcaggcaagttgtggg

SEQ ID NO: 703 - DNA, 423 bp, Arabidopsis thaliana
  Intron number 1 from transcript AT4G29450.1 (locus AT4G294 50) derived from phytozome v7.0 (chr-ID Chr4; pos 14482163 to 14482585 reverse strand)
taccaccattttagttcacggccaagaccaatcaggttccctcttctcctctctgttttgatttgaaattgaggcgaggttcagactgaagaaagcttgagttttattatgaaaagtttttgtcttttaaacatgtcttggatttttagtcaaacccttatacaatgtcttgtgttacaagtaatcatacaattctctcttttctctgttttctaatttgaaattgaccgatgttcttgaaggttcttgaaagttgtgatctacgtttttgtcaatatagagaaacgaagttaggcagatttttaaacctatccatgaacgttctcagacgtcataaacaattttacttgtgttggaagtaactcccctttcttctcctctgatccaggttacatcagcatcgattgtggcatacctccttac

SEQ ID NO: 704 - DNA, 721 bp, Arabidopsis thaliana
  Intron number 1 from transcript AT4G30020.1 (locus AT4G300 20) derived from phytozome v7.0 (chr-ID Chr4; pos 14677516 to 14678236)
ttactttatctgcttgattcgtttcgtgaatccaagtaagttttacactttttgtttttgctttttggctttattctattcaagtttcaagtttaaaggatcctcttttactaatgtagaagcatttttttttttttgttgttttggtttctgggctttgttatattgcttattccttgcttggatgatttgtgaaagtgggttaattcttctcatctttaaacttttgatgtgtgtttataattttctcaagatttgtttttttttgtctttctctgttccactgattgctcagcaacagttgctactgtagtttctgtatcgtcttcaaacagttgaatttgtttaggtatatttgtctatagagatgttgagtttaccaatctacagtgtgattgaagtttccccaagtttttatctttaagttactttggagtagcctttctttatgtgcttgaatctcttctctgctcatttgattttgagttgtcagacgtataaagtttagtcttttatcactgtgaaagatagcaacactatctcataatttctgagaagagtgtggagattaacttgtgtagtggtttttaatacaattccaattctgtgaagtgattgttgttgttgctcaatatctgttgtttttcagggatgctaatgttatacattggattttgatactgcagatttagtctgaagagaattaagcttggcgcttctt

SEQ ID NO: 705 - DNA, 404 bp, Arabidopsis thaliana
  Intron number 2 from transcript AT4G30510.2 (locus AT4G305 10) derived from phytozome v7.0 (chr-ID Chr4; pos 14906916 to 14907319 reverse strand)
aacgaggcaagttttatctgttcgttttggttctgcagtttctgtgttttaatcaaaagatccaacttttgttgtctatatcctttaaattgaatccgtgggcgtttataattgatggatttgatagaaaacttggttagatgaatcgaaatcttaagtatgatctgatattgaagacaacttcctgtaatgcagttgcagacattaaacacttattaatgttgtaaattttagattggttagtgtctgaatattgatgatacctggtaaaaaaagctaatgcaattggcataagatcatccttattccaagcttcaatttttactttaaaactgtgtattgaagtttttttttcccttttgtttgtttttttgttagctgctggagcctttgttattgttgag

SEQ ID NO: 706 - DNA, 653 bp, Arabidopsis thaliana
  Intron number 1 from transcript AT4G30530.1 (locus AT4G305 30) derived from phytozome v7.0 (chr-ID Chr4; pos 14920882 to 14921534)
agaagaaaattcttggcatctgctttggtcatcaggttcttttcttttttctattatcccctattttaaatatattggattttttttgtcatttcaacttttaattattggtttaaagtgaatcattttattaatttgtgaatttaatgggtatatgaacatcccctgttttttttatttcatgaattttgttagttgtctaagattctaaacaactagtacttaaattgaacctaaattgtgcataacatcgagtgaaaagttaaagatgctcatttagagaaaacaaaatccaatttatgaatgaataaatgggtcatttccgtgaaaatatttaatgaacaaagtaaatcacacttcttggtttggctgttttgatgaatgggtcattaattaataaatgtatgcactagtggagagtattcaataaagcatgacaataaagattattatctataagagtaagggactgattcttcactagtggcgagtattcatcttattttttttattggtttgaattagtgttgtgatatcatttggaatgattcaaaaactgaatagtgcatgttgttgattaaaaaatattcttctaattgaaaacgatttttcctttagatcatagccagggtaaggggaggaacagtcggaag

SEQ ID NO: 707 - DNA, 375 bp, Arabidopsis thaliana
  Intron number 1 from transcript AT4G31430.3 (locus AT4G314 30) derived from phytozome v7.0 (chr-ID Chr4; pos 15248746 to 15249120)
ctcatcttcggaggaggacgaggattcatcttcaggtttgtaccatttatttcagtttagataggattaatttgaatttttggtttattgtctggtcgaatctgaaagctaccgtttcgtttgaaatgtgaagtttgacttaaagctttcccattttctctttcctttaatatgtgggacttaagagcagttaagcattgttgtactctatttagttaggttacttctaagctataaacttcatactaattctaaagctctaatttttattcatataatgtagttctgggattgagaataccaaccagctttgttgtgtcttattcttttaatgtatggatttttatatgttttcttctttgtttgcagatattg

SEQ ID NO: 708 - DNA, 232 bp, Arabidopsis thaliana
  Intron number 1 from transcript AT4G31860.2 (locus AT4G318 60) derived from phytozome v7.0 (chr-ID Chr4; pos 15408590 to 15408821 reverse strand)
catcacctacttccttttgacgttttcaaatcttggtatgtttaaaactcttatcgattcagccctctctgttttggtttctgtttgtagattgatttcttaattagctctaaaagattaagatcacaggggtccattgtcaaaattctcttttgattttgtttttgtaatcaagaatagtttctttttttgattcatgaagaaatgtctaattttttcgttgcagagagag

SEQ ID NO: 709 - DNA, 367 bp, Arabidopsis thaliana
  Intron number 2 from transcript AT4G32980.1 (locus AT4G329 80) derived from phytozome v7.0 (chr-ID Chr4; pos 15916874 to 15917240 reverse strand)
ttcccaaaggttctatcagaagaagaaggataaaggcaagtttcaacatttttaatgttctatggacatttgtagtaatctaaagctttcttttttacttattagttcactgtttatcacagatagctttgagatattattggtctgtgtatcattgagcctagttacggcttcattaactcatgtttcggttctttatatattttaatgaaatatttaatgacatagtgagcgatgttctctgtctcttgcagcattttacatttagtactattctccaaagatttggtttcttagattttctgaaatcttttgtctaagtcttaaatacttgtcttctttggtaatgcagtttcatagaaaccca

SEQ ID NO: 710 - DNA, 247 bp, Arabidopsis thaliana
  Intron number 2 from transcript AT4G35740.2 (locus AT4G357 40) derived from phytozome v7.0 (chr-ID Chr4; pos 16936541 to 16936787)
acctggaatcgtccttgttgtgtctcctttgattggtaaatctgttttttttccctgattcgttaatggagaatctctgttttgattggtctctctaacgatgtgctttgtttctcgtgtttttcaacttctcagctttgatggtaagtgcattgtccttttcttattgtgttcttctcttttaagcttttttttgttaatggtttttgaagaaacgttttttgtttctacttaggaaaatcaagta

SEQ ID NO: 711 - DNA, 521 bp, Arabidopsis thaliana
  Intron number 1 from transcript AT4G36860.1 (locus AT4G368 60) derived from phytozome v7.0 (chr-ID Chr4; pos 17361190 to 17361710 reverse strand)
tctaattttgctaattttattgtcatctccttcaggtaatttgcgatttctctttactctgtttttgacttgtacttagattccttttctttaacagtaataaacttcataaagatttcatttttcttcttatgggtatttggaatgatgaatgtagattaggttgattgttttgaggatgatgtggataatctttttctggatattattacaatttagggtcttgagattgtttgtaataagctccgtactttggttccttattttcaattcagtctttaagatttcggtaacccttttatatttgatgcaatctccctataataataccttcttcaattgctgttttgccatttgcatattatttaactttctttgttggatcagtctgattctttcttaccaattattgtcttaatccttgattaaggaaaaacaaaaaaacaaaagacatggagtttcttctctttcttggatgtataacagtgtttctctatgcaggtaagggattgttgttgcca

SEQ ID NO: 712 - DNA, 534 bp, Arabidopsis thaliana
  Intron number 1 from transcript AT4G37470.1 (locus AT4G374 70) derived from phytozome v7.0 (chr-ID Chr4; pos 17617479 to 17618012 reverse strand)
atctctgcttctccgaggtataactttttcacaagttgtacatagaaatatgttttgctttttatctcatcctgacatagtttagacaaaagggcttctctgttccttctcttgtctgatttcataaaaactattaaacattacaatttaaataaaaaaaaatcatcttaagtccttaaatttacacaattatctattatttcgaaatatttatttctcattctgacataatttcgacaaagtgcctctttgtttatcctcttgtctgaattatcctatttctcaaaatcagtgaagcatttcattatatatttcaataaaaatccgtaaattatgaacaaaaaatcatgaaatacccatttgtttatttgtttttttttatttggttttactgaggtgttacttacactttttttaaaaaaaattgttgaaacggtgctcacacagtatattatatattttaattttcttctgacaaaagaaacatatataatcaaattatattgttttggtacgtttatagatacgtaaacg

SEQ ID NO: 713 - DNA, 576 bp, Arabidopsis thaliana
  Intron number 1 from transcript AT5G01180.1 (locus AT5G011 80) derived from phytozome v7.0 (chr-ID Chr5; pos 63240 to 63815 reverse strand)
ggcacaaaactctgtcgtcgcttccccgagaaaaggtaaacgaatctttcaccaacgattaaccgtttctaaatattaaatctggttatctttgatctgtcttttttttgattctatgaacaatttctgttactagtaatcacacattttcgggaggagtgttcttagatttattttcattttcaaacgaaatttgcgattgtgtgttttcgagttttcagatccgtagctttcttcgacgaaattatatatgtatgtatggcttccgattttgtcagtttgtgtctagaaaacgcgttatgtttttgtcatgatgcatgtaatggacattactttggctattgctcataaaataaatcgatgtttttcaattctgtttcttcgtggagtcacacatatatatatatggaggcttatctgtctaaatccgataattagtcgtagaaatatcgttgtgtagattttacttggcaaagaagtcatcttttgtcctttttctcagtaaatcaggtcaaaaattctcacattgttgaaaactcaggggtcacacttaaacttgtcgaaaccaaacaacaa

SEQ ID NO: 714 - DNA, 420 bp, Arabidopsis thaliana
  Intron number 1 from transcript AT5G01200.1 (locus AT5G012 00) derived from phytozome v7.0 (chr-ID Chr5; pos 77542 to 77961)
aagaaaggagttccgtggaccgaggacgaacacctgtaactaccaaatttcttcactacttctaattaatgttataaagatttgttctaaaaaaatcgatattttatgttataatactatagaatttaagtttctaagcctaacaatttgtttattttggtaaataattttggaactaaatcttgttttgtggtattttgaggtaaatatatctcttttattaatatttacttgaaattctctgtttttatatgaactcactgaggagaatatttcttttgataattaaaatgcctaggatttatacttttcttacaatttatatctattttcaaatactttcttgaaattatttatcttatgtgaagttaactaaatataatattgatttacttttctttgtttgacagacgatttctg

SEQ ID NO: 715 - DNA, 495 bp, Arabidopsis thaliana
  Intron number 1 from transcript AT5G04270.1 (locus AT5G042 70) derived from phytozome v7.0 (chr-ID Chr5; pos 1184043 to 1184537 reverse strand)
ttgaggactctggctggtccaatagtaacgtaagctctcccctgtgtacctctgaatttgaagcatttggggatttatgttttgttgctcttttgaactagtagtagtgatgaatctgtgaatctttggggtttgctagttcttagaatttcactgattaagaaagattgatccttttgccttgatcgatcggtaacagattcttatagtgtcattgaagaagtttagtcttttgaatttcataataggtgaaagtcgatggcttttttctttggtgttacaaaaggaggtttgatgttggtgttaagcttaggaagaatggctttatcgttgatgctgtttgatataaagtagctgcttaaattttgaagtccttaagtttctgaatttgcttcctcctggaatatttgagattgcaagtaggcatagcattatgttgttctgatttgattttcccggggtttgattttactgataggttacagaaacaaggaa

SEQ ID NO: 716 - DNA, 547 bp, Arabidopsis thaliana
  Intron number 1 from transcript AT5G05900.1 (locus AT5G059 00) derived from phytozome v7.0 (chr-ID Chr5; pos 1774987 to 1775533)
tatcttccattacaaggtattatttacttctcactttaccaaaagctttcttatatgattaccaacatttccctatattgttgagtgttgacctttttgatccgatcttcttttgataaatctgaaaataacattatttgttaagtattattacaggcaagttcatacgaatacctcaacttttggccttttcttggtcattactcattagaaatcttatatagcaaaaatatcatttttctataaatttcgaagattactttgagtctcggtctatagtatacttcgactaccaaaaaaccatatgaaaatataatccatcaacatttgttgttcacatatgaatttacattaataattttggtttcatttgtgaatacaagtctttttcatttgctaataacaaaaaatgcacatgtaagtatagaatcttttggcaataatatataagatttttctagattaacaaatttattttcgtggtgttagttccaatcaagaaaattttgattttatctcaattgttttacagattcagaacaaggtg

SEQ ID NO: 717 - DNA, 413 bp, Arabidopsis thaliana
  Intron number 1 from transcript AT5G06510.3 (locus AT5G065 10) derived from phytozome v7.0 (chr-ID Chr5; pos 1985026 to 1985438)
ctaataggaatctcaagcttctcactctctcttgtgtaagtttcttctacttatgttttctttactccattttggattcttcttctctttattgtgtcctcgagtatctattgtggatcttgtctagcatttttcacattaatgtttcgtttgacgatttgatttttgggtctacttttatagtttctcccaaattttctttctttagacaacaaagtctgtttcttgactgtgaacttgagatgggttcgtgtgctttgcttttaaaactaaagtctaaaaattctttccttgttaagagtttttacacaactaagagaagtcttttagttgttgacttttttttttagcttgttcaacagatattttgtggctctctttcagttttccattggacttttggaacataagct

SEQ ID NO: 718 - DNA, 405 bp, Arabidopsis thaliana
  Intron number 1 from transcript AT5G06750.1 (locus AT5G067 50) derived from phytozome v7.0 (chr-ID Chr5; pos 2087520 to 2087924 reverse strand)
agttagttttttttaatctctttttgtcttcttcaagtcaaacaaaatctctttttgtgttcttcaagtcaaacactaagtccactttgatattctgtgtctgtgtgtgtttcttcttcttgatttggttttgatgatcggataatttttgtagaaagttgaaatctttatgcatctgatgaacagtgaagtgaatcttgactttttctttatcattttttggtgagctacctactttttggcaggttatctttgtcttgtgtgtctctctgtttgttcgtttctggatttttgtagctttgtcttgttccttttgtggattacaatggttttcattagctgcttattgattaaagttttgatcttttaggagtttcgagagaaaggagttgtatttcagaggag

SEQ ID NO: 719 - DNA, 372 bp, Arabidopsis thaliana
  Intron number 1 from transcript AT5G08270.1 (locus AT5G082 70) derived from phytozome v7.0 (chr-ID Chr5; pos 2661768 to 2662139)
tttcttttcggaaaatttcagcaggtgaatatatgaagttcttatcttctaatctgacttatttttgaaacttcctctctggtacgtgttttttgatgttgggtatgaagaaagttcgaggcttttcaaaggatttagtcttcactgtaatatgattcctgtgactatattttgtagcttgtatagacttcagaacatatgtgagtacttgaaaatgattgaattctcaatgatttgctttctgtccataaaatgtaatttgaagttgctcatacgataataataggcattgtcaattttgattcaatggtgaatttgcttttaattttcttttcagggtgttggtgttctagcaaagagtaccacttttgc

SEQ ID NO: 720 - DNA, 475 bp, Arabidopsis thaliana
  Intron number 1 from transcript AT5G09780.1 (locus AT5G097 80) derived from phytozome v7.0 (chr-ID Chr5; pos 3037926 to 3038400 reverse strand)
tcttcagaggacacggtaaactatgttctaaactctttatgttgttgaattagcttagtctagaaaggttaaactttcggtttcttaaaggtttgaatcttgtcgttaactgtctttatgggtctagaaaaagcttttgtttttcttttctgaggaacttttttcatggttttgtgcttctcttagttctcagttctctgtctgaatgtgaagatgtgtactttatttcttgtggatgagatctgttctgttcattttcaccgtcttgttgtgtttgtcatttgtgtgttatagctcactgatttcatggttagatttgaaactttgtactcagattcttgatgggatgtgtaaaagctcactgatttttcactgttttatattaatatcagacatgtatcttacttatatcttttcatctttcttttatataaccacagcgagcgattccgtacgactttgtgataaacttctc

SEQ ID NO: 721 - DNA, 209 bp, Arabidopsis thaliana
  Intron number 1 from transcript AT5G10440.1 (locus AT5G104 40) derived from phytozome v7.0 (chr-ID Chr5; pos 3281932 to 3282140 reverse strand)
tcagaatccaagcccttggttggatttggaaggtcagtaaatcagacaaaaatttcttctttgtttcttctgttgactcaattcttacccaagtcaataatctgatgactttgatatgaaaaaagacatgacttttgccttatctttgttttgtgtctttgattattattacaggcctgtgaggaacttcaatttggaccattgtgtat

SEQ ID NO: 722 - DNA, 661 bp, Arabidopsis thaliana
  Intron number 3 from transcript AT5G10810.1 (locus AT5G108 10) derived from phytozome v7.0 (chr-ID Chr5; pos 3418995 to 3419655 reverse strand)
gtcttgctgacttgagcgctttggtgtaagtcttgcccctttctcttctcttaaatgctttaggtccttccaggtactgtcaaattcacatcaccctttcacatttttacataaactaaaaggaggatccacattgcatcatctataaagagcatgaattgtgtttattcttactctttccctctaaataatagtattctgttcccactcataccattcttttgaattcctggatgttttggtagtcgttaaaaacatttaggaatgtttaaactcaaagctgcaacaggcacatgcacagttgttcttttgcaaagaaactttcttcagaaattctctcttaatattcgataaactgcatatatcttgttcttaactagttctccacttgcaagttcacagtagatattatagaaatctcttgctagtaatgtttatagagattagtaggattcccatgttgtataacaaaactgtcaatgatcatttaattgctagtttgctactaagttcattgatagcttggtgctaattaaacaagtaaagaatcattattagtatcatgattttcctaaaaagatggttattgcgtgtgaatcgtgaagggatttgtcaatgttcttatgattttctaacaaaatcctctggtcattttgcagct

SEQ ID NO: 723 - DNA, 320 bp, Arabidopsis thaliana
  Intron number 1 from transcript AT5G10810.1 (locus AT5G108 10) derived from phytozome v7.0 (chr-ID Chr5; pos 3420266 to 3420585 reverse strand)
ctctgctagcgaagtcacaatatcactcgaaggtaatcgatttcttctcctaacgttccttttgtgtagttttagtgattccttagtcaatcgcgaagaaatttgagcaaatccttttggttagatcgtgttaggttttcgaatatcgttccttacgcagtttgaatctcagtttctgatgatttctcgttagtttacggaacatagagaaggaaattcaaacttgttttgattgtctcagttcttataagctgactattatcaactttcttctttgttgtgtaggctaatcacaacagtagtaggcacacaatcatctt

SEQ ID NO: 724 - DNA, 477 bp, Arabidopsis thaliana
  Intron number 1 from transcript AT5G11680.1 (locus AT5G116 80) derived from phytozome v7.0 (chr-ID Chr5; pos 3758951 to 3759427)
tccgatcaaaatccttttaagctctgtagacccaggtatgttccttcagcttttctattcgcgagaaaattacgagtaaaggattgcttgaaattgaacttggatcgttctgttactgctttcttattgctatcagattttgattctctaaggaattagatattttctttgttgattgatttgttttgaacacgtattattaatcctagtctttgtttctacattataggaacgtttcgatttgaattagctaaaaacctcaattttatttgctcttttgcatatctgaaattggaagctgatgatatgtggatgttaattggctctagttacttggatctgtgaataattatttgctaatttggagcatgttcctttgaattatcttctgattgtctaagtatatttggaaatgtgtttatattctcatttgtgtgatcaggttacgcagagaagaagaacagaacaaggaattat

SEQ ID NO: 725 - DNA, 347 bp, Arabidopsis thaliana
  Intron number 1 from transcript AT5G12480.2 (locus AT5G124 80) derived from phytozome v7.0 (chr-ID Chr5; pos 4050036 to 4050382 reverse strand)
ctctctctatcactgcatttgtttttcctcacagcgtatgatgacttttctctttaatttatcctttttagctacatatcttcttttgcttcaactgatttatacccatttaaatgtttctacccattataagttctgaggtctgtgttttccctctttcccttgtctttgatcttagctagggtttactaatctggtttgagtatattagattagggttctgtttgatttaggatatgttgttaattagaaatagttattggcttaagttactaatggaaccttgaagaacagtgctcaaagttttaatctttctgggtttttcaggaaccttgagatttgattag

SEQ ID NO: 726 - DNA, 536 bp, Arabidopsis thaliana
  Intron number 1 from transcript AT5G13590.1 (locus AT5G135 90) derived from phytozome v7.0 (chr-ID Chr5; pos 4378691 to 4379226 reverse strand)
tcactcaaacctctccatcactcttccttcttttggtagattcttctctctcccctaacacctttctctttcttccctaaatctggatttcttattctctttcacacttattttgtttttgtcggtagatttgcgaacctctaattctttgattactcttctctctgctctgtgagtcttacgtaactagcttcgatcttgtttttacgtattggattcaatccttttttggatactttttcagatttttctccactaaccatattactttctgatttactttttttgtaatcttatcgttgacttcatttttttcttcttgattgttcttcctttctataggggccttgttgatctctggattcactgtttacttgcgtctattagggtctagttagatagataccttgtgggatttatgtttgtttcatctgaaatccatttgaatttgaattcttcttttgcctttttctctgctttataatgatattgatcttgtaggtgtgttagttggagttagcctgtaaaaaggtaca

SEQ ID NO: 727 - DNA, 355 bp, Arabidopsis thaliana
  Intron number 1 from transcript AT5G15080.1 (locus AT5G150 80) derived from phytozome v7.0 (chr-ID Chr5; pos 4886634 to 4886988)
gctctaactgcactggtaaacataacttctctgatttctccatttttggattttgttggaattgaataaatgaacaatcttttttgtgggttttgtttctataattgtcttctcagctatatgtatgtttccattaagggtttttgttatatatgactatctttgcaaaattcacgtgatgcttgtgatctaaccctttttcaagcttccttgttaccaaatttagggacataagagttaagtgtaattttgaactgtgattgtatttggagttttatttgattacctctttactttcttaatgaatctgagctttacatatttgatgacctctttactttttgtagttacaaca

SEQ ID NO: 728 - DNA, 649 bp, Arabidopsis thaliana
  Intron number 1 from transcript AT5G16170.1 (locus AT5G161 70) derived from phytozome v7.0 (chr-ID Chr5; pos 5278467 to 5279115)
cttccgtcttctattcaagaagaatcccaagtcaggtgataataacagctttagtttgttaattatatctttctcttttcttaaataaacctatttaggtacccctatatatgatcagtatactactaatcagaaattatatcactagttttccaaaaacacatcactatacttttccaaacatatctcttcgatttgacaggttggttttttcacatggcacgtgcattgatcttgattcgacaattgcataatggtccattaaggcatgaacccatttgatattattctaccataaatacatttctttaatcatgttaataatattcaaagatagactattctcaacttttgtaagaacaaatgaacaatacatagaacagtttcaaaatgcatctcaatataaaatttctagatgttatataaactgaaaaagggcgtaggaatgctttttatgtttattaagtttctagatattctaactaattttcaagttaaaagcgacaacaaatctaaattcaataaatctaacaaatttaaaaggcttaaatttgtataaacaattttttaaagattattttaacaataatattgatgttgatttgtgaaactttttgtcaatcagccggtgtattggggaacatcatca

SEQ ID NO: 729 - DNA, 409 bp, Arabidopsis thaliana
  Intron number 1 from transcript AT5G16570.1 (locus AT5G165 70) derived from phytozome v7.0 (chr-ID Chr5; pos 5424073 to 5424481 reverse strand)
gattccactgaccagatcatcgccgagtacatgttcgtaaatttcttcattgatctctctgtcattctcagcgtttgaagttgagtttgcgtctaatataagttttaacgtatattctttgttattttcatttataagagataaaaagttaacttgagtttgcgtttgtgtcttaaaaaaatatctttcttgaggtttccttagattgtttatgaatcaaaagtcttaaacttggtctcatctcatatactacgttgaaagattttgggtttagattgtttatgagtcaaaagtcttaaacttggtctcaactcatctactacgttgaaagattttgggttgattaaaagaattttgatttattttcgtttgtttgatgatgaataggattggtggatcgggcttggat

SEQ ID NO: 730 - DNA, 527 bp, Arabidopsis thaliana
  Intron number 3 from transcript AT5G16650.1 (locus AT5G166 50) derived from phytozome v7.0 (chr-ID Chr5; pos 5463997 to 5464523 reverse strand)
aagcttatagtaagtctttcttttgcattgtcggtttctatcggaacatcaataccatgttactgacatgatatttgattttcttcattggtcgagaaagaataattcatgaagaaaagaaactaagtttaacaatgagtcacttaaagccttctacttttccatttagttccttcagccttatagttcattagctctgcttaagtattgatacacctctatatggtttcaagcctctgataattttaggttccctcttcatctttgcctctctgtttacttatttctcatctctagatccttttcatctttgcctctctgtttacttatttctcatctctagatcctttactgaatgacttttaatacgaagttctgtttgattatgaggatctcttatgttttccatcgacacttgcaaatattttagatcaatgctctctgtctctctttctccctcaagcaatgtctcgaatcaattgttttcgttatgtgatttagcttcttctttctttttggcagtgctg

SEQ ID NO: 731 - DNA, 332 bp, Arabidopsis thaliana
  Intron number 1 from transcript AT5G16650.1 (locus AT5G166 50) derived from phytozome v7.0 (chr-ID Chr5; pos 5464731 to 5465062 reverse strand)
ataagtctccccctaaggtaactaaaaatcaccggtctttcgtttcaattttgcctggaaaaatgcgtgagctccattgaaatttggtttattagataatgtctggtttttgtttgactggaatatggtgatttgatacagtttcgtatagtattactcttatggattctctagtagaagaaagggttactttgaaaaattctggaaaatgattatgtttgcatgttctctttacattttcacaaatgcccatttgatttttgatttgtaagtttttgtttgtttgtttgtttgaaggattactataagattctagaagttgattacgacgc

SEQ ID NO: 732 - DNA, 493 bp, Arabidopsis thaliana
  Intron number 1 from transcript AT5G17640.1 (locus AT5G176 40) derived from phytozome v7.0 (chr-ID Chr5; pos 5812479 to 5812971 reverse strand)
cttacgggttttaacaggtttgttgcttaattcttatttgactcattttggtaaaatcctaattccataaagtttgttgcttttttttctctgtttttcccttgacttcaattggttctggcttgttctttgagcttattttcagctttaatgtttgttacatgtaattgtgttgtttgtttaatctaaactaatttattctcttagagcttactaatggtataagtcatgtgagctttgttcttatggaagaaaaaatagacattaaattctctagcttagtggttttgtaatcaagaaggcagttataaaaaaagagggaaatttcaatttcagtttgaggattatctaattagctgaagactgtgtttttgtcatatttcagttgtgttttaagtttctgttgatatggtttaaagatgaaactaactttgttttgatctctttcgtctctggttttggcctgttaggttgattgattgatcataccacc

SEQ ID NO: 733 - DNA, 388 bp, Arabidopsis thaliana
  Intron number 1 from transcript AT5G22060.1 (locus AT5G220 60) derived from phytozome v7.0 (chr-ID Chr5; pos 7305163 to 7305550 reverse strand)
aaaaccatcctgataagggtggtgatcccgaaaaggtttctcttttcgattctcgcttagattctctgtaaattcaattcgttaatctagtagtttgatttgaattctccgattgatataggcttagatcttcgtattagtattacgaatgttcgattcgatctgaaatctgcgagttttaggtcaactattgatggttgtttttgtcttgtgatagttaaaagttgttagattgtttgttgttgggattacgaatattcagatagccaaatttcttcttttggaacttttgagacaagaatttattgctttggaggttatgatgatttgagtttatagttaacggtttaattcttgtttctgcagtttaaagagttagcacaggctt

SEQ ID NO: 734 - DNA, 367 bp, Arabidopsis thaliana
  Intron number 1 from transcript AT5G24100.1 (locus AT5G241 00) derived from phytozome v7.0 (chr-ID Chr5; pos 8148841 to 8149207)
agattccgcatttgaactgtaagttattttttattttatcttcactttctttgcaattacgtctgaagaatctgtttggcttatacatttgatgacttcaacttttggaatgttctaattcaaatgtcattttaggcatgaataagtgtagttttagtttcgaaccatgtctcagagtgcatacacttgatttgacaagagaaaataaaattataaacaaaatgatgaaaagaccataatattgggggaaagtacaggaatgattttttctttttcttggcaaaatcgttaaaaatctacattttctcatacaataatattatctaatgcagatataaaagtctccatcacataaccagagaaatta

SEQ ID NO: 735 - DNA, 456 bp, Arabidopsis thaliana
  Intron number 1 from transcript AT5G25140.1 (locus AT5G251 40) derived from phytozome v7.0 (chr-ID Chr5; pos 8672533 to 8672988)
aattaaggtaatcttcaattttatatttatttgtgtatatatatgtgtattagatgttgcaatattgtagattttgaacccggaatttaatacaaaaaaaattcttaaacccggaaaacaaaaactaggtgaaattaaaataaataaataaaaacgaaaaggtaaaatttgttaaaagctataagcgttatttattacttattcgaatattgcatgcattttgcctaccgtgatcatataacgaaatttgcaattcttacggcaaattgattctttggtgatcatcttggtttgtgcagctctatatatatttgcatccacttaacatgtttttttttgggtagttggcagcatcatgctatttatttatattctcttgttaatcatcaaataaactgaacaaattgaaaattaatttactttacataaactatccctttttgtgtagaaagcaac

SEQ ID NO: 736 - DNA, 620 bp, Arabidopsis thaliana
  Intron number 1 from transcript AT5G35560.1 (locus AT5G355 60) derived from phytozome v7.0 (chr-ID Chr5; pos 13747465 to 13748084 reverse strand)
gtttttcaattgcttgcttaagtttctttgcgtaggtgagatcttcatcttcttacccttttggtcttatcttatttgtctgattactctctgttctgtttttttttttgtaatcccaaagttactttggtttttgtagttccttaagcttatcagaggtatcttcaaattcctatatttatttgctctctgagaagttcttgcaagtaatgtttcattgtgtgattttgttattctctttcttctgtttactgatttgcgatctaaatttagggattctaacactaagaattgaacaaattgatctaagttataatctcactaacgtcgcttttgcaaattatctgatttttgtcttgtctgtttgtactaattcttaatcaaaatccttaaaaggttgatttttggttatgatttattgctagagagtgtctcattacctacctatcactgtcttgaaatacttgagggaattatattttcctcaatttgagttatgtatcttcacttatggaccatattggtaaactaatatagataaagcatgatcctttaccagtttttaatcaagtgtggttgttactgatactgtgttattgtcttgtagtgttgagtaagtt

SEQ ID NO: 737 - DNA, 503 bp, Arabidopsis thaliana
  Intron number 1 from transcript AT5G35690.1 (locus AT5G356 90) derived from phytozome v7.0 (chr-ID Chr5; pos 13867392 to 13867894 reverse strand)
cgagcttgagtttgcaggaatcaaacataattgaggttagtctttgtttttttagttatatcttaatcagtgcattgaaatcaatcttcttcattgttatgggtaggtttttgcttaaggttagtggtaagaaaataaaagtttcttcctttattgatcatgaactggtggttacaattaggaagctaagagataagttgattttgtcattagtgttattgcattatagcttaagagtgcattttgaggttattgatatgtagcagagtaagtaaaaattcaattttgttcattttcttaggtagatttttgcttaaggttcatgattagcacagaaaagattgttcctttattaatcatgaattggtggttattatcaagaagccaagaacaattgaacaatacctaaagcttgcacttaccaattggtgaaagtcacttaatctgttttaaatatacttctttggtactttcttttcgttttataggataaaactatcaga

SEQ ID NO: 738 - DNA, 274 bp, Arabidopsis thaliana
  Intron number 1 from transcript AT5G36160.1 (locus AT5G361 60) derived from phytozome v7.0 (chr-ID Chr5; pos 14234619 to 14234892 reverse strand)
tactcttcttcttccggtgttcctgtcgctaggaagtaagattacttcttcttcttcgttttttttttgttttcttttggtatctctaagggtctctgttcttgcttcttgattactcaaagacaataatctgaaacgttgaattggttaaaatctttgattagtgtatactttggatcacattggctttttgagaaaggattgatgatttggttggttctgtttctctacctcaatagggctgttgcagagtacctctctagtgatctctctt

SEQ ID NO: 739 - DNA, 207 bp, Arabidopsis thaliana
  Intron number 1 from transcript AT5G40580.1 (locus AT5G405 80) derived from phytozome v7.0 (chr-ID Chr5; pos 16250452 to 16250658 reverse strand)
ttttatttcaggagttttcaaaaaatctgttgttagtatgtgattattagtttctacactctgttcttctggtttcgtatcatcagctagctagctttggttctcgaattttgcttctcaagattcaaatttcacttcgttactcgtttttttttgtttgggtgatgatttgatttttcctcattttgtagagtggtgaatcggaaa

SEQ ID NO: 740 - DNA, 386 bp, Arabidopsis thaliana
  Intron number 1 from transcript AT5G40580.2 (locus AT5G405 80) derived from phytozome v7.0 (chr-ID Chr5; pos 16250452 to 16250837 reverse strand)
agcttccttcctctcagcaaaaccttcaagtaaaggtaacatcactcttctataagcttagatttttcacttttattcttcatactgtcgtctccctggattctatcttctcgattttggtgattcgaacacgattttacctatccttgagcgatctcgatcccaactttttgagttgattttatttcaggagttttcaaaaaatctgttgttagtatgtgattattagtttctacactctgttcttctggtttcgtatcatcagctagctagctttggttctcgaattttgcttctcaagattcaaatttcacttcgttactcgtttttttttgtttgggtgatgatttgatttttcctcattttgtagagtggtgaatcggaaa

SEQ ID NO: 741 - DNA, 593 bp, Arabidopsis thaliana
  Intron number 1 from transcript AT5G42610.1 (locus AT5G426 10) derived from phytozome v7.0 (chr-ID Chr5; pos 17062916 to 17063508)
ttttaggagacatagtttttcttcatccccatcaggtgaattagcaaacacttgtgttcatttttaatgtaattttgttccataatcttttagtatttaagatttgcttttggtgatactaaagaaacttacatagatcatataatataacctatctaagcatatttttgtctttacaagacaatatttttagcttataattttaaaataactttatttaagattttaaatgatttactgattattaaaaattatgttaatccatttttggtttttcgaaaagtgtattggtaggttgatagactccactaatatcaaatttccaaatttttaattaaatttaataattaatcaatatttgttttcttcaaaataccttagtatattgtttcgtttcattttacaattttgttttagtgttctactcgtatgtttcttcatatttataaatgaaatgtataatgggtgtcctaaaattagtggtccaaaatgaaagtttcatcataatcatttccgaaaacgcttacatttttacaaaaatataattttctcattcgtagaattttactattttattttagatagccaagtct

SEQ ID NO: 742 - DNA, 348 bp, Arabidopsis thaliana
  Intron number 2 from transcript AT5G42690.3 (locus AT5G426 90) derived from phytozome v7.0 (chr-ID Chr5; pos 17119090 to 17119437 reverse strand)
gcgttaaaactccatcatctacaaatactaacattgtgagtgaggaatctcaatcgttttgatctctctgttttttttattaatgatgatattttcctcttggtgttcttcaattgttaattttataacaaaattgtaaatctagattttgtatttttttccactgatcttgaaagcgattttttaaaaagtgtagttcttgaggtttttctgtagaaacttatgtaatctccttggactttttcatttttttatattaaagagtgtttaagatccattaactaggctgtgatattgatctgactatgagctgaatgatgcaggggaagaaactgaaaggttgtgaaa

SEQ ID NO: 743 - DNA, 725 bp, Arabidopsis thaliana
  Intron number 1 from transcript AT5G43180.1 (locus AT5G431 80) derived from phytozome v7.0 (chr-ID Chr5; pos 17336962 to 17337686 reverse strand)
caaaacgcaaatcttggttccgtgacatcaaagaggttcttcttcttttctgtttttagaagtttgtttacgtacactttgttttgcgcttatatgtatataaacttatgatataaaaattattttaaaactttaggcaaatatacaaaattttagaaacatttctattgttcttttacgtttgctctcaaaattttcaaaagatgataaatatgaatacgtaaacatgcatacacacttttgttttacatattaataaacaatctagatccttaattgtttttaccaaaaaaaatctttattagttgtataaacgcaagcggaataaaatggtgtttgcgtttagatgtatttagtgaaaaatcgaaaagtaattcacatgttaacacaaagacaaaactttgcgaaacaatcaacccccttatgtctttgtattttttttcttaacaactattaaatacctttgaacaatctataggtattactttaaaaaaatcttcgaggaaacggaataatcatatcgtcgtgtttacatttaacaaatatatttagaggaaaatggaaaggaaaaaaaataactcacatgtaaacgctaagaaaaagttttgcttttaggagtaaatcaattaaatccctaatgcctctgtagtgtttttttatttaataaatagtttcttcctgttttgttgatcataatgaaaacgcagggtgacgataagactggg

SEQ ID NO: 744 - DNA, 485 bp, Arabidopsis thaliana
  Intron number 1 from transcript AT5G44310.2 (locus AT5G443 10) derived from phytozome v7.0 (chr-ID Chr5; pos 17848843 to 17849327 reverse strand)
gtgtcttttttgcatcgtcggttaaccattctaaggtaattaatatatggtcatcaatacagattgatgcataaccggtttttatgcttgtgtgtaaattaactagttgattcacaaatgatcttgatattcaaaactattttatttaattatataaaaaaagaaggaaattgttttgtgtatatgtgaagtgggatctttatttttaaaaataaaaagtttgtatctatttataatatgtggagtttttttccgtgtgataatttggatggtgaatttagcaatatggtattaagctaacgtgtttgacaagaaatcaagtggaatctgaactttgaaaaatgatcaatgagtatgatatttgtttttgatataagatttttacaagactctttaacggtttgtgacacttgttaattcaataagctggtattaggtcaatatgtgtgaagagatatcaatggttgttgattttcagggaagat

SEQ ID NO: 745 - DNA, 299 bp, Arabidopsis thaliana
  Intron number 1 from transcript AT5G44400.1 (locus AT5G444 00) derived from phytozome v7.0 (chr-ID Chr5; pos 17888135 to 17888433 reverse strand)
ttaatctcatctccacaacccttgcagtcaagttggtaagtctcttaaaaatgactttcttttgtttaaactttaaatggcactgagtttttgtggtatcactaaaatcaaacgattcatgatgaaaaacttgacttggttcaatatttattataatcaatgactactttatgtaaaagagtttaggcctttgagcaatgattttcaaagagaagaaaataaagttggacatttgtggaaactttaagatagaggagaaggtttagattttttccttattaatacactgaattttgcag

SEQ ID NO: 746 - DNA, 226 bp, Arabidopsis thaliana
  Intron number 1 from transcript AT5G44910.1 (locus AT5G449 10) derived from phytozome v7.0 (chr-ID Chr5; pos 18137789 to 18138014)
gtagagcggaccggcttaacctccgaagaccacgggtaattattcttttgatgaaatttataagtagtgaaaacacaaactgttttgaattttctatgaattttttttttagtcaattcttgttaatttgttcttaggaagactacttatttgagctcatttaacggtttcttcctgacatatgtttgcagaacgggtttaggtcttgtgagggcaatcgtcacgg

SEQ ID NO: 747 - DNA, 312 bp, Arabidopsis thaliana
  Intron number 1 from transcript AT5G45370.1 (locus AT5G453 70) derived from phytozome v7.0 (chr-ID Chr5; pos 18388591 to 18388902)
tccattctcgcacctctcgcttttttccgtgaaaggtccctttttatcttcttctcaaaatctctctgtttctttatccttttgcttgaattgctaaagtctctgaagtctctgtttctgattgttttgatgagtttatatgcggcaaaatcagacaaatagtttgatctctctggaattggaattagggttgtttttctttgttaattctggttctattgtttaatgatggattgcaattttgtgtgacttggatttgtcttttgataaagatttgctcttttaatttcttgtagaacgatcagacctcct

SEQ ID NO: 748 - DNA, 688 bp, Arabidopsis thaliana
  Intron number 1 from transcript AT5G45370.3 (locus AT5G453 70) derived from phytozome v7.0 (chr-ID Chr5; pos 18388591 to 18389278)
tccattctcgcacctctcgcttttttccgtgaaaggtccctttttatcttcttctcaaaatctctctgtttctttatccttttgcttgaattgctaaagtctctgaagtctctgtttctgattgttttgatgagtttatatgcggcaaaatcagacaaatagtttgatctctctggaattggaattagggttgtttttctttgttaattctggttctattgtttaatgatggattgcaattttgtgtgacttggatttgtcttttgataaagatttgctcttttaatttcttgtagaacgatcagacctcctatgaatagaagcatcttcttttcactcttctttcttggtttagcagggtaaagtaatcagcttgtatctctttatcttttgaatcatgctaatgaaagattctaataacaacattcaatctcaatcttgataggatatttgggaaccagttactatttcttatgggtttatcttacacgaatccaacttatgctgctgctatacaaccatcaatccctgtctttacatttctcttggctgtcttgatggggtgagtatgagtttcctcaacattactgtaaaatgtgaaaatttgtaatataaagtttcaatcttttgatggtcttcttctttgtatacagtacagaaaaagtgaacttgttgaaagtcgagggcc

SEQ ID NO: 749 - DNA, 567 bp, Arabidopsis thaliana
  Intron number 1 from transcript AT5G46020.1 (locus AT5G460 20) derived from phytozome v7.0 (chr-ID Chr5; pos 18664031 to 18664597 reverse strand)
cggccaacgccgattctctagtgctgctgatattcgtaagtaattttgattcgttgctctgatttttgagttcgatttgaaatcaatcttgatttttttggaattttcgtgattgccctaattggttattcttggttgtagcagttttggaattgtgagcttgtttaatctaaatggaataaaatagttgatatataagtaacgattggtaaaaaattacgatttttttattattctgctgtgcaagtccagatatttgttgtttagttgattgatatgagttatatgaccattgagtattcaataagtttaggtttttggtatatcttcgtttgcttatttgtgtttttgagtattcaatgagttatttgtgtttcgtgtctaggattattttatggtctatgatcataggatttgcattacaagcattcagtttcgtgtaatctggtccagttttgggttctctgaagctgtaaaattgagatttatgtggatgaatgttttaaacttattgcctgtgtgtgttttgtagttgctggcacatctgctgcacgtcctcgatcattc

SEQ ID NO: 750 - DNA, 678 bp, Arabidopsis thaliana
  Intron number 1 from transcript AT5G46050.1 (locus AT5G460 50) derived from phytozome v7.0 (chr-ID Chr5; pos 18678314 to 18678991 reverse strand)
tagaggtcgttggaaagcttgctctttcgttgttggtatttattctttcactaatttagtttcctttatattttatattctttatcatagagtttaattacaattaaaatgattattaacagtcttttttcgaagtttttaagatctatcttatatcttaaaagttgccatgagtcttggaaacttttcaatggttacgacagaactaaaagttgatgacgtatcttatcctaattaggaaaagaaaatttataaaattggcataaatattttattttccacataaaagtttaaagtctgaacagatttaacactaggctgatcactagtgtttaaaaccaatattaactatcggcaaaaaaaaaaaccaatatcaactatgttgggaaaaacaatattaactcaaaattaatctttaacgggtaaattaataattcataatccattgtttcgtatataaatttttagttttaattttctttcgacattaagtagtacaaaataaaataaaaaataaatataaacaaaaaaatagtataggaattcctaggaaaatattctacatatttcgacattagattattttttcttttagttatattggcactattttgttcatttttcttgcatcaattaatgatttattttttctgataagtgtacgaggtgtttgaacgg

SEQ ID NO: 751 - DNA, 384 bp, Arabidopsis thaliana
  Intron number 1 from transcript AT5G46220.1 (locus AT5G462 20) derived from phytozome v7.0 (chr-ID Chr5; pos 18739051 to 18739434)
tcgatcttcttgttcttcccctattttcttttcaggtaattaactatttcttcatttaagaaaaataaaataaaactatttcttcatttttaatatttttactaaattttgatttttagataaaataaactttttgatcagtggccatggattcgcaatgtgagtttcaatattgctggccactagaattgctttaaatagcaaaaatatcaaactgtgattcctacattttctcaaatttctatgactaaacggaatttcacattatgtttttttgttatattctttattatatatatttttcctgaaataatcttgaatatgtttatcttgttttttaatgaatcagattattggacagtgttgaaagagatacagagtatc

SEQ ID NO: 752 - DNA, 753 bp, Arabidopsis thaliana
  Intron number 1 from transcript AT5G46710.1 (locus AT5G467 10) derived from phytozome v7.0 (chr-ID Chr5; pos 18953701 to 18954453 reverse strand)
atcgagaaatcaaacctaagaacagaagattcgtaagtctaaccataaacccttttctacattatcacattgttgaaactctgttttctcattgttatatcctctgtttacattgtatgccctttgtgttcatacgaatcttctactccttatttttcgattctaagatatgggttttgattgaattgagattttccactagaaacaagagagttttgtggattttccctaatttttgttgtcagatggtcaaattcgagtacttattgaaaatgctctgttttggtgtaaagaacaatacttaattttctaatgtcacaaagaacaatgcttgaataatgtagttgttagattagggttttaaattgggggaaaatgttgaagaagaagaagaatcttgtgataaaaaattaggatctttatcgaactagattcacggcttaatattcgattccgtacttatcgcccttcaaatttgcttctgtttttataaaaatttataaaaaacagaatatattctgcaagacgaatttgtggattcattattatctttggttgcaagattataaaataaaccattagagtctcctcaagtctatgtaaaggaggagacttttttgataatgtataagacaatggtgtctctggtaggttaaaaagccaactgtttttttttttgttttttgagttcttttgggacaatggctcatgagttatgttgtgtttgcaggaaggagagaatcagtggcctat

SEQ ID NO: 753 - DNA, 325 bp, Arabidopsis thaliana
  Intron number 1 from transcript AT5G47040.1 (locus AT5G470 40) derived from phytozome v7.0 (chr-ID Chr5; pos 19098282 to 19098606 reverse strand)
gccattattcgaatccgttgtacttctcatagcaggtgaattctcaattcctaacattcttacgcttcgatcattttcttcttcttcctctggaatttgcgtttgttttaggtaatttgatgcttgtactggttcgagtcagttccaaaaatcaaaaatagtgcgaaaaaatctatgaattaggaataattttgtgtagtattgatcgttaattggttagacgttttcatatacaacattttggtaagcctaatcatcgaattatgctttgttggtttggtcacttgttttccaaattcagcgtcacactagtggagcaagagct

SEQ ID NO: 754 - DNA, 580 bp, Arabidopsis thaliana
  Intron number 1 from transcript AT5G50570.1 (locus AT5G505 70) derived from phytozome v7.0 (chr-ID Chr5; pos 20583792 to 20584371 reverse strand)
gatttggtaagatttctcaaccttcaaacaacaaacttttcttattctatagttttttttaatgtaataacatgtttataatcttactttaatctttcatttttattgcatttttttaattcttgcttggaattgagtagacagaaaaaaagttttttgtttttttttttgttttcctttcttcccattttgtgggatctgttctagtttctatgtttctgcacttctcatttcgttttttcagtacaattagtttgccttttttgggattttttttttgtttttttttcaatatcaaaatagatcattttgttagagcttcaactacaatttcagagtactctttataattgtgtttttgctttttgcttatgcttttttattttccttcatatgtattgaagttgaagtttaattgagttaaagattcatgggttttatgtttactagttgtttttgctgtttgttcttaaatttagagtaccaatatcaaaaaggacaaatcttgatattgctttgattgctgttgtgtatgtatgtgtttttatagtgagagaagaaaaaaaagcacaatctttga

SEQ ID NO: 755 - DNA, 654 bp, Arabidopsis thaliana
  Intron number 1 from transcript AT5G52330.1 (locus AT5G523 30) derived from phytozome v7.0 (chr-ID Chr5; pos 21249739 to 21250392 reverse strand)
aatcatctatttaggtaaagaatcatatattttattaggtaaacaaaatatcttttaggatacacttcatcgttattatcgatcacaatcatcttatatgtaagaatagagagatggatttttagagtctctacactcagaatcaaagtttctatggttaatctctatcttcttcttcttctttaattttgtttttaaatacgagagagtggttatgattttccgatcgttgatttcataatagaaatgaacttctggtccttctttgattttttaacaatctatttatttattttaagattggaatttagggtttattgcccatccatgatctgatgggggttcttagggtttcgatttaagctatgaattcgatacagttttgagggagtcagattgttgaatataatccaaacctatgtgcttgttctttgttcatttttcagtttttgatcaaatcaattgatttttcagctagtcttactctttagaacttttcaaatcatataatattattttacgataaatttataatagaattgtgcatcttagggggaattacagaattcaataatctaattttatttgctctaatcgttagttttttttttgttcgtagttgaagaaaagagagctttgacgaaaaaatcatcc

SEQ ID NO: 756 - DNA, 196 bp, Arabidopsis thaliana
  Intron number 1 from transcript AT5G53700.1 (locus AT5G537 00) derived from phytozome v7.0 (chr-ID Chr5; pos 21801224 to 21801419)
gaagaatccgccgtcagagtaatcttcttctccttaaattatggatttcttcttacgctctctttgcttaacctctgtttctctattaatggtttcttgcatcacaagaaagaaggaaaatatttgaagtcgtagaatttttgatatgatcttttgtaccgtagggtctggaatcgaaggatacgaacaatcgtaa

SEQ ID NO: 757 - DNA, 725 bp, Arabidopsis thaliana
  Intron number 1 from transcript AT5G54250.2 (locus AT5G542 50) derived from phytozome v7.0 (chr-ID Chr5; pos 22028679 to 22029403 reverse strand)
tcttcgatctcttcgtcatattaccattacctcaggttagtaattaaccaatattttaatattcctattttaaagaaaactgatttaattgttttgaagtgtcttttatattagatgtaatcattcgtatgagcttctatcttaatttcttcctagactacagaacaatccatggagaaaatttcaaaatttataccaaaaaaagaaactcatcgtgcaaaactatgtgaagttttggattagttaaaatattgcttacttattatatagttataatatgccaaaattagatgtagatcaagtggttgtactgagatggttccattatattagtcgaggcagatttttcattttatatgcacacataacacatttaaatgttccaaagtttactatcatttagatagtgactaaacttcaaataagattacaactactaatactgtttaaaggcataatcatagtaatcaaatcttagtacaaatctaaaattgagtaatctagaaaaaaaattataactaaataattatatggtctgaaagaactctcacttagtctgacctaatcatgttcgtgtgtggaccaaaaataatacagttcattcgttttcagttatctattcgtattgtacatttttgttttcttgttacaattatttaattaaaagttatgaataaatattgtgagcaggtggtgttgtgggtagtgataccttctcttctaaa

SEQ ID NO: 758 - DNA, 509 bp, Arabidopsis thaliana
  Intron number 1 from transcript AT5G54620.1 (locus AT5G546 20) derived from phytozome v7.0 (chr-ID Chr5; pos 22188960 to 22189468 reverse strand)
taatcctgatctcgttcttgttgctgggagaaaaggtattatttgcttcgttcttggtttcttaattagtaggtcaatcagaactttgattgttattatgtttgtcttcgtgtttatatgtttaaatgttttaatgttgtgcttgtgttaatatttgatatatatgtctttttcttatcaaacaatagttaaaaaattactgtttgcttttagacttttcaagtgatttaatctttgataaggaaaactaaaataccatgttttcaaaatgaaatattctagttcatatatatatatatccctttcttaatatacaaatatcttacctcgatatttttccaaactgaaaatatttgtttttatgttgatgcgctatagcaggagaaaagtcgatgcatctatgttgtaggggattctataaaagaacttaaattccatatctttataacatataatataaagtttgatgatgtcaaatttcttttttttaatcacataactatacaggc

SEQ ID NO: 759 - DNA, 602 bp, Arabidopsis thaliana
  Intron number 1 from transcript AT5G55230.2 (locus AT5G552 30) derived from phytozome v7.0 (chr-ID Chr5; pos 22402114 to 22402715)
ccattttaaaccctagaaatcaagtgtcaatctcggtaattaaagtttatgcctttttctttttactgttagatttgatcaattttgaggtctttagtctgttccttaaggttttgattgctttggttttatcaccaatgctgtccgattctcttgaagattctgttttttttgttcagagatctgcttcttctttctgtgctttgcttctgcttgatcggattttagatattgcattctgagcttgacttcgtttgctttctgtgtcatggtgaaaaaagggtttttgagcttcgtaagtcaaattttttgtttccgattcttaatgtttggtctgtggagtttaatctttggttagagtgattaagaggttttagattccgaaaaagattctaactttgattgagaatatctacagcgtatcttttggtgtttgttattgttttttcttagcttcgtaatcttagttcagtttcattataatctgatgcagaagaaagatctgatttgagcgatgtataattcattcttagtttagttttagtctctcattggtttttgtttttgatattttctgcaggaaaccttctgattccgcaaca

SEQ ID NO: 760 - DNA, 191 bp, Arabidopsis thaliana
  Intron number 1 from transcript AT5G57350.2 (locus AT5G573 50) derived from phytozome v7.0 (chr-ID Chr5; pos 23236382 to 23236572 reverse strand)
accttcacttgctctcttttttccgaagaatctggttcgtttctctttgaattatctctttctctgttcttcttctttttctaaagtctcgaatatatcttcattatcattactttatttgcttcgttcttccgcagttttgtgcaaagttttaacgattttttggttttgaacgaaggcacagagagaag

SEQ ID NO: 761 - DNA, 191 bp, Arabidopsis thaliana; identical to SEQ ID NO: 760
  Intron number 1 from transcript AT5G57350.1 (locus AT5G573 50) derived from phytozome v7.0 (chr-ID Chr5; pos 23236382 to 23236572 reverse strand)

SEQ ID NO: 762 - DNA, 503 bp, Arabidopsis thaliana
  Intron number 1 from transcript AT5G60100.2 (locus AT5G601 00) derived from phytozome v7.0 (chr-ID Chr5; pos 24200634 to 24201136 reverse strand)
tgaaaaaggtttgcttttgtttgtcttgtcgcttttacaatctgctgctgtttgaattttgtgcttatttcattaagtattatagcttagagccttagagtttgattttgtatctggttctgtagagtttataagaaatttgagaaagtaggagatctttacaatcatctaatgaataaaagaaactgtgttcaaagtttgttaactacttaccaagtactgtgataattttccattggaacattgatagcttttgattttagaaacaacaagtttcagattgttttctaaagctgagtgtgtgctactattgaaatttgatttggcttgtttagtttttctttggacaagtttgatgatttatccaaattcagttttttattttttggttctggtgtgagactgtgatcttcttacggaatgttgcttttttttttgtttctcgtttcttattgggctgaggttttggtgaagggattagaataagtttggggaaagaagaa

SEQ ID NO: 763 - DNA, 503 bp, Arabidopsis thaliana; identical to SEQ ID NO: 762
  Intron number 1 from transcript AT5G60100.3 (locus AT5G601 00) derived from phytozome v7.0 (chr-ID Chr5; pos 24200634 to 24201136 reverse strand)

SEQ ID NO: 764 - DNA, 375 bp, Arabidopsis thaliana
  Intron number 1 from transcript AT5G60700.1 (locus AT5G607 00) derived from phytozome v7.0 (chr-ID Chr5; pos 24404076 to 24404450 reverse strand)
ttcacattctctaccggtgaagatcttcatctcaggttagtttcgtaaattctcgattctgtgatttttcttgggaatttgaatcgtttgagtgtacaataaggcaatgtttgagaatagcttgatcattaaaaaaacggaaaaaacttatatttttaatagaataatctaaaatcattgtagtaacgtctagaagatgatgatcttcgtgagagtaattgaatcacatgttttgtttcatgattataaaaaaaaatagattcaaattctctggggaaaagttataaaaatggattttttttgttatgaagtaataattgtggttttgattttttttgtgtgtgttttgcagttatcagcttcagaaatacagaa

SEQ ID NO: 765 - DNA, 744 bp, Arabidopsis thaliana
  Intron number 1 from transcript AT5G63370.2 (locus AT5G633 70) derived from phytozome v7.0 (chr-ID Chr5; pos 25386391 to 25387134 reverse strand)
tccatccaatcttccgttttcgtattcaccgtccggtaagaccttccggtacttgtgaatcggagaagaggaaggagaaaaattatcgcgttcctggaaattgaatttctagggtttcgtttttttctgaattattctgattctgatttcgtcaagggtgtttttcttaattggttgattgatcgtctttctagttcaattgttgaaaagtaattgaacatctattgaaatctgcttctcgtgatttgattctgggtttcgttgattggtttttttcgaggggtttgtttgttttatccttttttatttctataagatcaatttctcattgagaagaatacgatggcagcagggggtgttgatgtttccagaagttccgttgctgtcaaaaaagactacgacttttacaggaatggttctcgtgatgtgtatgttcgacagagtggtagagatgacgagaggcgtcaaatcaaaaggcctagtgaccatgatctcaggaggaatgatgggcgtcaccgatcacggttggcatatgagaaaggggaactacgggaggaagcagaggttcagagaccctctgagaaaaggaggaagttttcacccatcgtgtggaatgcagaaaaagtgggtagagctccatctagggagaagaccaagtctcctttccctgttccgactacaactgtgatatccaatcaggctgttgctggtaagactacttcaaacgatcaagtgaatgccttg

SEQ ID NO: 766 - DNA, 854 bp, Arabidopsis thaliana
  Intron number 1 from transcript AT5G67440.1 (locus AT5G674 40) derived from phytozome v7.0 (chr-ID Chr5; pos 26914947 to 26915800 reverse strand)
gatcctaaagaaggtttcttttcccaccaccaaaggtatggtttttcgttcattccaaactcattttactctgaattttgctgattttaggtccataagtcgatataaacccctaaaaatcacctttttaagagtttgtgagtaatttgtgtgactctgcacatataaagttcttagttttgtagattttaacacatgttttggtctctaaagaccaaaaatttgttcgatctgatttgttataattagattaatctctagtttttggataattgttttatttcattaacataacagaatcttttttgatctccatagtgtttttgttttattttttcttctctttaatgcttttgttcctcaacacaaaccaagaactgctttattcttaatcggatattcgcacttttttctagggttctgggtttttgtttcttcttcctttgatgctttccgaacctgaaaagattcgttaaagaaacacaacattaaagaaacagagaatattagagaaacagaggatttgataataaagaaacattatgcaacgtgtcggatttacaaagcaagtggagcatctctagctctttcatgttttcctttaatctctcttaaggttagctactgaagaagcgaaataggtttcttctcttatagtttaagtctaagactaaaagtctaacatatataaaaagtttcacaccttatgcttcaacatcactcttcttgtttatactttactcttgatcccttttgcatccaataaggatctcagatttttaaatccttaatgatcttgtcgttacaaaactatttcagagattccaagttgagggaaaaagagagcagaacaa

SEQ ID NO: 767 - DNA, 753 bp, Arabidopsis thaliana
  Intron number 1 from transcript ATCG00130.1 (locus ATCG001 30) derived from phytozome v7.0 (chr-ID ChrC; pos 11936 to 12688 reverse strand)
tttcggtgtattgatcttttttggaaagggagtgtgtgtgagttgttcatttcaagaataggctggattcacccagtggcactataactaggaaagagtgcataatcccgcgaattacttctgaataaaaaaatcatatttgagaaccatagcctttcgttattctttggtaagtccgctttactttgattctctattaaccaaaaattgggacaattaattaacatggttaaagctaaaccgtttgaagttcagatgcaacatggtactctttctactatatatagtctaaatgtagactaaataaaaaaatgaataaaattttcaaaaagaattgttatacttttttcgatataaaacactcatgtcgataaaattttttgagtctttttttataatgcagaattgataacctacgtataaaataataagaattctttggatttcaagaaaaaaagaaacaactttgctgacaattattaatttttcattggtcagaagaatcctccgaatatttttatcttggattggtgatctttttcgatagaaatatatattgaatatgaattgaataaaaaaactcgggagagggtaggctcattgcatgaaaaagatgggaagggaagtctcataaataattgattggaataagtgagcatgagagccaaatgaatcgaaagattcatgtttggttcgggaagggatcatagaactttttttttaatgaatggaaagataatctactttcattaa

SEQ ID NO: 768 - DNA, 840 bp, Arabidopsis thaliana
  Intron number 1 from transcript ATCG00360.1 (locus ATCG003 60) derived from phytozome v7.0 (chr-ID ChrC; pos 42702 to 43541 reverse strand)
gctgtgatctgtcattacgtgcgactatctccactatagaaaaaaagaacgaacgctagtcaataaaatactagaaacacaaaaaaagggctttctacataagcatcgcctaaaacgatttttatcagctgtagcaaataactaaacttcatccatcgaaatatgaagtgaagactagatatgcctaaatactttcttttctatggataaaaaaagatttaattgatagaggaagcaccgtaaagatcaattggaaaggttttggaccgacacaacaagagctgtttatttatatcataatatgagataaatcttaggaatctacttatgtaatagagtaatccccgaaggtattgagcagcggtgtagcatcagatcctaaagacagtaagtctttttcttttttatgaagtatgaaaaagtctttttcaaagattctatataaatttttatatgaaagcgggatagttacctttcagaaaattctaatatctaataacagtggacatgcttttttttctgaaggtaggagaaaagataaaacttattatattaattaatatattaattaaatcaaaatgaaagtttgaaactcatgtaattactctcttttgtttaatccaagaaaaacaaaaaatctataagaaatctcattcaattagacattcaattagatataaagttcaaagtaggttaaagttaaaaaactggtacaccaaaacaaaagagttggttgtcgagccgtatgaggtaggaaactctcaagtacggttctcagggagggaattgatccgcctattccgaccgtggagaacaggccattcaacaaggagattctga

SEQ ID NO: 769 - DNA, 683 bp, Arabidopsis thaliana
  Intron number 1 from transcript AT1G17830.1 (locus AT1G178 30) derived from phytozome v7.0 (chr-ID Chr1; pos 6137411 to 6138093 reverse strand)
tcactccaaaacctccttctttctctttatcacaggtaatctattttatgatattttttaaaaaactactaactgtttctaagtttcttctattggcaatgatcaaaaaaaaaaaaaaaagttttttcaattggtgtgatttttgtttcgcttccgagaatccgcgtcaaagcatttttgctggttttcaactaatcattttagttaaaacaaattccccaaaatctcgtgtttttaattagttagatattgacaatacaattattaaataagaatttgttgaaatttgaaataaggacaaagaaaatttagcattttatgtcccatttcgtgaagttttctttcaccacgtggaaaccttacgacagcaatttgtgtattgaaaatgtaatagagaaaaaaatcaaaatcataaaaaatgtcttatactgaaattggtttgaatattctggatttaccaaggtatattcctgtgtgaatgtgccttcgtcgtctttatgccattagatgactgtctctttcagcaactattgtaattaaatgtgcgattaattgcatgtggtgtatatttatgaacagtatttaatatgtggagtatagttagctttatatcactaaacacatgggctttaattgtttaaaaagctacttaaactttgatgttaatttgcagagctgcaaga

SEQ ID NO: 770 - DNA, 540 bp, Arabidopsis thaliana
  Intron number 1 from transcript AT1G27770.2 (locus AT1G277 70) derived from phytozome v7.0 (chr-ID Chr1; pos 9675329 to 9675868 reverse strand)
gttccgaggccgaggcgattcggcgttccaatcaggtgcttctttcttctcactttgattactgaaacatttctttctatttctgcttgtatactgttggagatctaataagtgatctttctgcattccgagttttttgtttggttgactcactgtacttactggatgggatctaagtgagctcgtttttagtatttttctagttacctatcctcaggttagggattgttatcactagacatgattacattaggttctgtttctaatttaagatgtagatttttaggttcttcgtggtgtttgctagtaagaatgttcaagcaaatatgactcattagtagcaaacaacccatttcaagccttgtgtttcttgtagtttgtattgaaggaggcgttaattagagcgatcaaagcgttctgttcatttttcctttgagaataaattcttactgctattggtgctttgttctaataccattttcctttgtcaaccttatgaatgcaggaaaaatttcgagtggcggtcttagtttcacaagc

SEQ ID NO: 771 - DNA, 381 bp, Arabidopsis thaliana
  Intron number 1 from transcript AT1G50020.1 (locus AT1G500 20) derived from phytozome v7.0 (chr-ID Chr1; pos 18521060 to 18521440 reverse strand)
gtggtgataatcagtccaaaggtcagtttttttttttttttttttgttgcttaactctctaaaagaagtaattagagttgattttgattataactgatatttgattagtcaatagattataaagatgtgattttgattctttccccttttagatagaatttgttgtcattagttctctaatagtatcattagttctccaatcttgtttcttgaatctcttttcataagtcaaaaaggggttttaatatacaagttatccattttacttggactctttcttcttgtaatggtgtgtattcattacttagattttcctctacctgaatttggagtttgatttgtatgagttgtgtaggtgaagaacctccagaatctttattt

SEQ ID NO: 772 - DNA, 402 bp, Arabidopsis thaliana
  Intron number 1 from transcript AT1G50600.1 (locus AT1G506 00) derived from phytozome v7.0 (chr-ID Chr1; pos 18738979 to 18739380 reverse strand)
tcctatctgtctctctgcaaactattaccaaccaggttagattcttgatctcaaagtttccatctttttattttatgtcggttgctttcgctgagttctggtttctttgattttcttagttacagaacacaacttactttgttttttggtttgggctgtgttgaaaattgagcttagggttttatgtaacagttgtcttagctcatagttacggttaaaaagctctcaactttgtctccctaatgataattgaattcaatcttgtttatgatttttctctattgggtcgatctttaactgaatctatctacataaagatccaaccgttttaagaatcttagggttcttatcatcttgttcaaaactaagattctgttttttggtgtggcagataatttagat

SEQ ID NO: 773 - DNA, 538 bp, Arabidopsis thaliana
  Intron number 1 from transcript AT1G70290.1 (locus AT1G702 90) derived from phytozome v7.0 (chr-ID Chr1; pos 26474084 to 26474621 reverse strand)
tcgtttgtttttaacgatcaaaaacaacggcgaaggttagtctccggcggtttcttcgttgagatgtgacgacttttttttttgaacgtttataaagattacatattcatgtatttagatttcttttgttatgttaactgtttcattgatgttcgagttaattttaatttgactcaaacacggtaatttttttttaatcttgatctgttttgttacgtaatttttgggttgattttagcctgaaatgatgattttttttctttctagcttatgtttttcgtgaatcaatctttttcaatataaagattagtattttgttgaaattcattttttatttgattggctatgaggaatcagtttcttgaaatggaaatggtgatttgatttgatatgttcacaatatgaatgaagaagattagggttaatttatatatatgaaacaagaaagtttgtttatttaaggtaattgatatatttgttttgttgttattgccatttttaaggtattggaaataagacagaagctgttagctctgtt

SEQ ID NO: 774 - DNA, 703 bp, Arabidopsis thaliana
  Intron number 1 from transcript AT2G26370.1 (locus AT2G263 70) derived from phytozome v7.0 (chr-ID Chr2; pos 11224701 to 11225403)
tggcgccggcgcatacaattttgaaaactgcaaaagtaagtatcgtttttgttaagtcttatattgttatatagaacatcaattcttgttacttgataagtcaattcaatgaaaagaatatgcctgaatttcatagattgtggtttgctcctatctctgttttttgttttaccaaataaatcttgaaccggaactcacattagtcgtcaattccataaaacagaaatagagtattttgctactgtgaaaacgtttatatagaaagaacagatcaatgaaactatgaaagtactcccatctataaaataacccaataattgtgaagtattcaccgaagacttttttcttttttttttccttcagtgtggttttcgagagccgtggtgtataagtcaagaactgagtattataactaaaatattgcaggtccagagttcctccaatattcaaagatagatcaaacaatttgaaatctgatcgaaatttaaaatagatttatcttttgttaatcctacaaataaataaataaagaaacacttacccctatgaccctatcatttgacataccaaatttccaaataaagaaatttaggatttatttttgtaagaaattaggatgtagatccaagttttttttttacctgccatgacttactgataacttctacaattgttaacatgctctaaatcggtgcgactaaag

SEQ ID NO: 775 - DNA, 525 bp, Arabidopsis thaliana
  Intron number 1 from transcript AT5G36680.1 (locus AT5G366 80) derived from phytozome v7.0 (chr-ID Chr5; pos 14408544 to 14409068 reverse strand)
aaatccatcaaggtaaagtgaaatacataaatacaatactgtgatcttctttagtgttgttatttttactttatgtgattttttttcatcttgtagttgggtaaaaatgttatttacgactgcatggatatttataagcaaccatctcttagtcatccattgctcaaacatcataatattcgggtatcttgttttgcatttttctttaatctattttttgattaaaagacatgaaatatatctatatggaattttgtcttcctttattattgggaagtcttttgcgatcgttgtgtttgttggaaagtctttttcaacaaatctctaagacatgttttgatttttttaagagtcggtcaaaatgttcattattcttgttaaccattctatatttcaatagataaacatatccagaaataaaaactggcatcatataccgtacgtcaattaagatagtatgttaagtgaacattatactttaacacttacatgtgtttttttttttttttttaattttcctattag

SEQ ID NO: 776 - DNA, 525 bp, Arabidopsis thaliana; identical to SEQ ID NO: 775
  Intron number 1 from transcript AT5G36770.1 (locus AT5G367 70) derived from phytozome v7.0 (chr-ID Chr5; pos 14467844 to 14468368 reverse strand)

SEQ ID NO: 777 - DNA, 641 bp, Arabidopsis thaliana
  Intron number 1 from transcript AT5G36960.1 (locus AT5G369 60) derived from phytozome v7.0 (chr-ID Chr5; pos 14598900 to 14599540)
tttatcaccctcctcctccgtagtcctcactcaaggtactctcatttttatggactgatgatgaaattaccggttgaaatttttcttgcttgttttgttttacatatttaagattgttctctttttgaagttattttttttaaaaaacattgtttttctttgtcagattattacatttcacattttaataatcggttgcgtcgattgagtttccaattgccaaaattcagttgattttgacatcacgtcttaatgaaatctcgacatgatttaccaaattagttgacataacatgagtagataactttcatcatgttggaactttttatttgcaacggttttctagaaatctttactttgttcatgttgaaagatatcaaaacataaaaactttgttcttggatttcaggaacaatttacatttggtttcttcaaagtgtttttttttttttaaactttagtagttattataccataatggtcccaaactggagattcatttgactagatttcactattaaaatatcaactatgattgtacggtatacacataaatgttaaaatataagttgccattaattaagttgttgttgatgcattggacagagtcatcaaattgtaactataagcaaaaacataag

SEQ ID NO: 778 - DNA, 392 bp, Arabidopsis thaliana
  Intron number 1 from transcript AT5G39870.1 (locus AT5G398 70) derived from phytozome v7.0 (chr-ID Chr5; pos 15969289 to 15969680 reverse strand)
tcatctccgttaaacacagatctaaagaaggatcagtaagtgacttattttttttttattatgtccatcaaactggaaaaactctaaaaaaaattattcggaggtttatgtgtataatatcaaaccatcaaattaaaaaaaaaaatcaaattgaaacaaatttatttttgaaaaacaaattcaaataatatcttcattaattggtacgaaaattgagttagtatagttgagaagccgatcagattttctttcagtaaataactattctatttttttcatactattggttactttttatttcaaaaatctcttactaaaatgaagtaatggcttaacaaacattttgtttccttctgccaacttaggtgaataagagtctacaacgggaaaaa

SEQ ID NO: 779 - DNA, 861 bp, Arabidopsis thaliana
  Intron number 1 from transcript ATCG00180.1 (locus ATCG001 80) derived from phytozome v7.0 (chr-ID ChrC; pos 21827 to 22687 reverse strand)
ctcttaaagaattagaaggcctagtatactgcgatgtgtgatttgatcgaaatttttcttttacagattaagaatgataaactctcatccccttcaatcaatttgggatgccctcgatctgacatgtctcttgaaaagagtaacatgaagctcagaattgtgggtgtattcaatactcccaaataaaaaaaaaggcgattggtctatggtcgattcagaaattcaaattgataggcgtacctcgtgaaaagaagaccttgttttgtcgaattacgcattcccttatctttctaaaagaaaataaatttggttttttatagttttatattattttatttttatataaagtaaacaaatatgtcatggttgcagaagtctatacatcgcatataagctttaagaatattgtggcataaccatcgaggtgacgcaggacctaaaagatcgaatggaacaatacatagacaaataaatcccgtatgaattttaaggcattcctttcacttaaggtaaagagtattccggcattcgaagggaagtagactactcaagaatttgacatttttttctgtcgtaatttttaattcactaaagaatttaaatagaaatcaaagaagaattaattgaatcaatgaaatgttggttggtttgcactgagaacttgagtaaggcgtagattctttttgggtttttcactttattttataaaatgaaatttgaaagcgagacccctttctttatttggtataactacttgagccggatgagaggaaactttcatgtccggttttgaggggggagatcttatagtggaccctatcccaatttttcttttgctaggcccataactaaaaaacctac

SEQ ID NO: 780 - DNA, 440 bp, Arabidopsis thaliana
  Intron number 1 from transcript AT1G22180.2 (locus AT1G221 80) derived from phytozome v7.0 (chr-ID Chr1; pos 7829746 to 7830185 reverse strand)
cgctgatcactctaattattttttttcttttccaggtgagtatgttctttaacttttgatttattgattctagttatctaagagtaagatcaaggtcagatgtgaattagttcgtcttgcgtaaatcttgattcttttcaaaaaatgtattgtttttgtgttttctgtctttaagaaatggttatttgatcatatcatgtacttcgttttaagtaatcaaagcgagcatttgtatctagttaacatcgttattagcttaataacttcttaaccacggctaaaatctacctctgttaatgcctttattcttgtaatcatccctgtttctggccaaagaattaacaatcaaattacagtgtataaatctctgtattttgactatttatttttctctaatcaattagtttggttgcaactttgctcttgaatttcagcaagat

SEQ ID NO: 781 - DNA, 633 bp, Arabidopsis thaliana
  Intron number 1 from transcript AT1G22180.1 (locus AT1G221 80) derived from phytozome v7.0 (chr-ID Chr1; pos 7829553 to 7830185 reverse strand)
cgctgatcactctaattattttttttcttttccaggtgagtatgttctttaacttttgatttattgattctagttatctaagagtaagatcaaggtcagatgtgaattagttcgtcttgcgtaaatcttgattcttttcaaaaaatgtattgtttttgtgttttctgtctttaagaaatggttatttgatcatatcatgtacttcgttttaagtaatcaaagcgagcatttgtatctagttaacatcgttattagcttaataacttcttaaccacggctaaaatctacctctgttaatgcctttattcttgtaatcatccctgtttctggccaaagaattaacaatcaaattacagtgtataaatctctgtattttgactatttatttttctctaatcaattagtttggttgcaactttgctcttgaatttcagcaagatatgaattctgattctaataaatcatcttcaaatggatttgagaaatctttgacaccagaggagtatctaaacaaggtatatgatgatgatgataaggggaaccattagcagctctgtgatatttcatgcgtgtatcaattttttttttgtcttcttttgatataaagattgtgtgttttgacaacatagataa

SEQ ID NO: 782 - DNA, 857 bp, Arabidopsis thaliana
  Intron number 1 from transcript AT1G04680.1 (locus AT1G046 80) derived from phytozome v7.0 (chr-ID Chr1; pos 1306858 to 1307714 reverse strand)
aacactacacacgacaacatctcttctctccctaggtttttatctctactacaatctctctcttatttttttatgaaatgttaagatccatgtttctttcaatacagagaatcagatttttattattatctgcattagtaatttgatatatttttcattctcgagctacattttgctcagattccacaataaatcttccgaaaataaattcttcgttttcacattagttatttgttatagttttcattcgttctagctacattttccatcggattccaaaaataatttccaaaagtataaaaatattaaatttactgttttagttctattcaaccgacaaaattatcaacgagagaaaatagtttttgtttttttcaccttttcgatatctactacaatattccctcccttcttcaaagtaaatgatctgagccgttaaattgtgttatgatctagatccaacgatctaaaccgtacattccgctttctttctttttgctgcattcagtcaactttattacgtagctacacttgactctgtttcgtctattttacccattttgacctccgacaatgcgatacgttaaaattgttccatagggttgttttcgtcatttaataaacctgtcgacgacacttccttctctaacggtttctccggttagcgaattttatggagcagtgtagtactagtgcagtgtggtgcattccccaataattatattaaaaacattacttattatatactatagtttctcacttgtttagtagcatgtgtcaatcattaatttcctctagattctcaatttttggatttctaatgatttcctaacaaatattagatccgacgaaaccga

SEQ ID NO: 783 - DNA, 815 bp, Arabidopsis thaliana
  Intron number 1 from transcript AT1G05300.1 (locus AT1G053 00) derived from phytozome v7.0 (chr-ID Chr1; pos 1546303 to 1547117 reverse strand)
aggttcagcttcaccggactcgagttgttgcacaggtaattaactaatttattaattaattactttaattgacctctgttttctaaactttcttaaaggaaaaaaagttaaatatatatgaccatgttgagaatatgtcactgaattttcatttgcctattgtttatttttttcttcgtcaacttgtttttgtttttcttaagtaattttgtcgtcaacttccatatttagcattttgtagattatatactcttattttttttggttgattatgtactagtctggtttgacataataaaaagaactatattttttaattgaattatataaaacttacatatatcattaatatatatatcatatagtttttctttatgtaaattaaaattttaaggtccatggttttttggtcctggcgggtaaaagattcttgggagaaatttgtccacatattaattatagggtccccaaaagataaagccagaaaaaccaactcttgctcttaatagagttactggtaatagtcatacgggttgtatcatataagtataagtttgaagtgaaagtgagtcaacaaaatgtcggaaaacctaaaattagatcaagatgaaatcttttcttgtgtatgaaactgtgcataaaaatagagatacaataataagtgatgggtccatatgaggccacatgagtttgcatgtagattccatagaatcctaatccttttagctttatgtaaaaagtgaagctaattacttaataattttgataactataaaataggtgttggaagtgggaataatagtacattcagtggt

SEQ ID NO: 784 - DNA, 765 bp, Arabidopsis thaliana
  Intron number 2 from transcript AT1G11260.1 (locus AT1G112 60) derived from phytozome v7.0 (chr-ID Chr1; pos 3778188 to 3778952)
tcttgcttggtttcggtatcggtttcgctaatcaggtccgtcattaaaaaaccttaattttaattacgttggtttagtttacaaataaccatccataatgtgtttctatcaaaattgatttttttttgtcgaacagaaaactaacaaaaataaaattgtctttaatactactatagaagttattaatgtattgaaagttatatttataaccgttataaatgtaccttggttttggaaaaaaagttatggactaagccaactactttcattaaacataatcataaaatagttaggtcaacttgactttatcaattttcttttgcttttctactacaacgatcattatattccacgttatagagtatatgatattacaattattgaattttgttattgatttgtttttctgctagtatccacaattccacatggtcttttcattagactgtgatgatgtctctttctctccatttccattgttttaattaattaaaaaaatatattgtttttgacgtcatattatatattttttagttaggaaaaaggtcatattcggacctatcttcgagttataacgcaatgacaaaattgaccctgtttaacttccatatttacgttcatatctctatttgatctcgaacaatcagaatcttcactcacttaaaaaagtcagattaggacacgtatctacttaaacctgctaactacgtaactaaccctagttaatatcactatttacaggctgtgccactgtacctctctgag

SEQ ID NO: 785 - DNA, 450 bp, Arabidopsis thaliana
  Intron number 3 from transcript AT1G17330.1 (locus AT1G173 30) derived from phytozome v7.0 (chr-ID Chr1; pos 5930388 to 5930837)
ccctctctcttatcaggtgattacaagtacataaggtttgtttctctaagttttcttttcttttgaaccgcttgagtatagactagtaatgtcccttccaacattcttgatcacacttccaggaaacaaaagtgtttacttttctcatgaaactctctaagttccctgcttttaactttgttttatctaaactggatgaataaagaaacttggaagtgttttgtttgcgaatgccattaggtaaagcttgtgagaattccttgtcagatttgcttaccttaggattgctaggctctactaagtggaacttggtgtggatataaacataaaaactacttaactatgaatgctgaagattgctttccttccgctgatatgttgcttcatggcaaaaataattataaccggaattcagagacccttcggaagagaaacttgttgagaatttcc

SEQ ID NO: 786 - DNA, 335 bp, Arabidopsis thaliana
  Intron number 2 from transcript AT1G49850.1 (locus AT1G498 50) derived from phytozome v7.0 (chr-ID Chr1; pos 18455649 to 18455983 reverse strand)
gaaagattgagaggtgtttctttgtctagtaacaggtctgtgcttaacccactgataaattttacagctttacttgatctgcactctagtctgattttagatttctttaaaaataattgcttttgtctgatcaagattctttgaagcatgttttgattttgctcttgtttcttgtgaggattggtcaagacttagtgtaaaaatcagtttttgtggattattgttgctttgtgtattctttaatatcttctttgaagcctctttttcaaaatttggttacggatttgtttcaactttgtttttctgattcagtcgaagcaacagagtttcattgg

SEQ ID NO: 787 - DNA, 407 bp, Arabidopsis thaliana
  Intron number 2 from transcript AT1G51055.1 (locus AT1G510 55) derived from phytozome v7.0 (chr-ID Chr1; pos 18925778 to 18926184 reverse strand)
ataacacaaagaattttgctcgtaaggtcgctgatcattatagtagaagaacaaatcaaactttagaagaaagagaatcaagtcccatcattcatttaaaaaaacttaacaattgggttagttacttacttagttaatgactgatctttatctcttctaatggaaatttgtaatagcaaaaggagttatgtattcatatctttgattagtttttatattcagattaaaagtgtgttgacaagtttctaggatctcttgcttcaacccaatatctttctctgtgttctgtcacttcagaggtacaaacttttttggttgttagtcatgaatctagccttttctatttgaattcttactctctatgttttgcagaatccggatccgtatcctcctactgggacttcctt

SEQ ID NO: 788 - DNA, 962 bp, Arabidopsis thaliana
  Intron number 2 from transcript AT1G52710.1 (locus AT1G527 10) derived from phytozome v7.0 (chr-ID Chr1; pos 19639039 to 19640000 reverse strand)
acatcgaccaccctgaaagtccttttggtacaaaggttagtcgatttgaagaacatgagtaaatataacgggttgactttattatctcaactgaatttcactgtgaagtttaaactttatccgtattctaagcataatgtcaagtttacatttgttccataaattgacagtgtacctaaatcaagcctagccacacagagtccagttaaattgaataatttgaattaggagaattggcctaatctagatgttcaacatgatctcggaacaacatgatcagatcttctgatgcttattgtctggtcattctctttgaattggttctgggttcttgctggtttttggacctatttggatcaacttgtatcctctgatctttaggtagttttttttagtccttttgtctaactttctcaactgagctccaattagcattagttcctgcggggttgagcatttctcttacaattaataatatggaagaactgccctggatgaatcagtaacttgattttgaaccatttgttgtggtaggtcatgtaagccatttttactatgatacttgactgctgactctatgatacattcatttgtagtaatgttgtttgaatggtgtgattctgttacctaaccattgatttcactggtcacgactccttatgtttattgatgttgacgaaaatttccacaactcaattgacttattatgtgtctaattcagtctctatatgctaagattaatgcaattttttaggattgcatactgtattataaggtataacataatcttgatatattggatgttcttcgttttcttgtattactctttctttgtgggctctttgcgaattgttttggagctctttgagtttactattatgaacttattttcgtaacctcttgatttccaaattctatcatctccaggaatctcctgctgtcgtacagtcctactttgacaa

SEQ ID NO: 789 - DNA, 831 bp, Arabidopsis thaliana
  Intron number 2 from transcript AT1G62660.1 (locus AT1G626 60) derived from phytozome v7.0 (chr-ID Chr1; pos 23200620 to 23201450)
caaatttctggcttcttcgtctgcagatcctagtaagctctagatcctacactgaagtcttctatttttgtgcttctaaagatttcctttgaccattatttattttatataaaataaaatatggattataaaaattttgattggctacacaattgatagatatatttcaaacccgtaaaatagtattggtagatagatatatgacaacaaggcacgtcctttgcggactacaattaatgtcattggataaaattgaaaaagaaatattggcaaaaacatttattaatttacacgtaaaaagtttttttgtttataatgtaaagtaaacagacaaaatctgaacagaaagagtcattaaagccaatcagtttactttgtttttgcctgttttgtatatacaccacgtgagtcatgtgcatattgtacaaatcattgctcacctattattgtgtttggacagtccccatttgactcattctattaacccaattgtaactgaaacgtcatattttatttattttcttccttaaaagtcacaaatatacagtaataacagcttattgaagttatgaaacgtcgtactttattgtggtgttttattaagtaaacgtgtttcttctattgttttttattgtttttaaaccactatctcagcatttcagaacagaggatgaatatattatgctatcatttcgaatttatattagtaaatttgaagtcataattatactttttgaatgctaatactcaatttgtgattattttaccagtgaaatgttaatccgaacaaatgaaatgttaaacgtgtccaggtccattgttctataaggg

SEQ ID NO: 790 - DNA, 513 bp, Arabidopsis thaliana
  Intron number 2 from transcript AT1G62790.2 (locus AT1G627 90) derived from phytozome v7.0 (chr-ID Chr1; pos 23252909 to 23253421)
atcgccaaaagcttctttacctcctccagctccaggtatgaaccaaactcttcacctactccttacaattatttccttgaatactttgttatcaaaaaaaaaaaaaaatgaaatattgatcgacttgattgtgtattaattgaattattcgattgatttgattagtagagttaattaaccaaatcaaatggtgttaatcaaggcaattattcaattgatactctaaatcgatcttataattttcccagatttttctctctttttttgttttctatataaaaaacataaacagagtgtgaatgccagcttttacttgtgtactttattttgtctcgagtattgacttgaataattcggacaaaaccactaaaaaatgaaacttgtcagattttttatttttttataaattttttatttgttatttgctgattgacgatttgtcttatattatatggatgggtttctaaatattcagcagggaataccaaaaaagacgccggagctgggaacaag

SEQ ID NO: 791 - DNA, 510 bp, Arabidopsis thaliana
  Intron number 2 from transcript AT1G62790.1 (locus AT1G627 90) derived from phytozome v7.0 (chr-ID Chr1; pos 23252909 to 23253418)
atcgccaaaagcttctttacctcctccagctccaggtatgaaccaaactcttcacctactccttacaattatttccttgaatactttgttatcaaaaaaaaaaaaaaatgaaatattgatcgacttgattgtgtattaattgaattattcgattgatttgattagtagagttaattaaccaaatcaaatggtgttaatcaaggcaattattcaattgatactctaaatcgatcttataattttcccagatttttctctctttttttgttttctatataaaaaacataaacagagtgtgaatgccagcttttacttgtgtactttattttgtctcgagtattgacttgaataattcggacaaaaccactaaaaaatgaaacttgtcagattttttatttttttataaattttttatttgttatttgctgattgacgatttgtcttatattatatggatgggtttctaaatattcagcagggaataccaaaaaagacgccggagctgggaac

SEQ ID NO: 792 - DNA, 610 bp, Arabidopsis thaliana
  Intron number 4 from transcript AT1G65820.2 (locus AT1G658 20) derived from phytozome v7.0 (chr-ID Chr1; pos 24486028 to 24486637)
aagcgtcttacgatcgggtttgttcttttatcctcttatcagtgttcattatctttattgattgatttagttatgttagtcaataggatatagagtttagacttgtatataaggttgtaacttgcaagtatagtttcattaactgatttcttcggttattgtatcaaagcattgatctaaggctctaagctcaaccattttccgttttgcgtatcaaatgtttctcgctttctttgtctttgattcttgggaaatttctttgtttctgcatacagcttttcccattcttcgtttctttactcggttctgtatttactacgactttgttccacgtcttcgtctctaaatcgagtttacgtagataatcgttgtaatctacaatgttgcagttaagttagtcagagtaatagttaagagttaagacttgtacatacggttgtaagtgaacattttcctaaactgacttcttctgttatggtgtcagagcgtgaagctaagctcaacgatttcttcgtgtttctgataagtaacaagccaccaaagtctgattacttatctttctaatctataatgttgcaggaaatacggtttcttggggttgctaggtctg

SEQ ID NO: 793 - DNA, 310 bp, Arabidopsis thaliana
  Intron number 3 from transcript AT1G65820.3 (locus AT1G658 20) derived from phytozome v7.0 (chr-ID Chr1; pos 24486028 to 24486337)
aagcgtcttacgatcgggtttgttcttttatcctcttatcagtgttcattatctttattgattgatttagttatgttagtcaataggatatagagtttagacttgtatataaggttgtaacttgcaagtatagtttcattaactgatttcttcggttattgtatcaaagcattgatctaaggctctaagctcaaccattttccgttttgcgtatcaaatgtttctcgctttctttgtctttgattcttgggaaatttctttgtttctgcatacagcttttcccattcttcgtttctttactcggttctgt

SEQ ID NO: 794 - DNA, 806 bp, Arabidopsis thaliana
  Intron number 3 from transcript AT1G66260.2 (locus AT1G662 60) derived from phytozome v7.0 (chr-ID Chr1; pos 24696891 to 24697696 reverse strand)
atactcggccatcatcatccttctccataaacaaggcaagctcgaaatcttgattggaactctgtgccaccaaataccgaagcatgctaaaacttaagatggatgatcttttaatgctcttttgtccttggagaagaatcatacatgcatataccgttacttctgatgatgattcagattacaagaatcttctaacatcttcttagaaaagcttctttcctgcaattagtggtttttatggttaaaatctgggaacttcaagaggcatgaatagatgtgcagaagttttcggttgatattgtcactcgctataggtttattgaggagctcctttaagctaagtagtccacatagggttatctacagggggataaagcctgaaaatgtgtgtggttttagggggaatttcagaaattttaacagtaaataggatttatgatgggttatcaaagtgggggtatttgcactatgcatgaagttcacgatggtacatctggaatttcttcggagtgtgacggcagtctcagttttcgtttttggcttcagagactgactgataacaccagtatgattcatatgaagttagtcaaatttacttgtttccctacgtttcatttggtatctccttggatggttcttgactacttcttcctggagctctttgctttagtactttcagccaaatgggtgttttctcctctttcaagaaatttgttgattaatgtggcttcaagattctacagacccttttagctgacttgatatgttctactggatcagcttgcccgcaggaagaggagcttgcc

SEQ ID NO: 795 - DNA, 649 bp, Arabidopsis thaliana
  Intron number 2 from transcript AT1G68560.1 (locus AT1G685 60) derived from phytozome v7.0 (chr-ID Chr1; pos 25736293 to 25736941 reverse strand)
ccgtactggtctttaggtatgttcatttactgctctgtttttttttgttattgttttctctctctcttgtcttaatgttttgtggtaatttaaataggattagtgattatgtttgtggtcctatagtgttttaagcataggttaatgtcttaatgatgagtattagtattggttcaggttcctataagtttgacttttagtcaaacgaagagtcacgtgaacatagattttgtgtatcaaccaaaccaagtgagatcgaaaactattaaattaatgttccattagtgttgatatttcattgtaaagagtatctgattttccgacacaacttttagaatagaaaagctttacccttttctgagggatattggaaagataatgaaaagtttcgctttctaattatggtgtttccaattaaaagataagaacgagagattggtctttgctttccatttttgttgatcttgataagaatgattattgcgattttatttggtccctataggatcttgaaattggaccattatatagacatggaccacggttcttgaaatgagttgaaaataaatgcaaatcttgattttgccatgtgatagatttatggttatactaatcgtttatattaatgttgtgttgtaggatttcatca

SEQ ID NO: 796 - DNA, 1026 bp, Arabidopsis thaliana
  Intron number 1 from transcript AT1G76990.4 (locus AT1G769 90) derived from phytozome v7.0 (chr-ID Chr1; pos 28932348 to 28933373)
acaaattttgagcttctttttttgaagttcttgaggtaactaaatctcactctctttatagttttactttgtttgattttgtcaattttgactctttgaattctggggttttccattaaaaaaactcagaaagttctaagatttatctctgaattgagtaagttctattgaaattggcgtatggattcgacagatttttgagcacgatgtatgttttaaatttcgatgtcgacgcaccataaattttatatatatgaaattgaaatcttgataacaacagatttggtctcatcttcttcaagttgttgttgttgatgtggctgctgcttagagtaatgtttgttgctgcaagttggcttattgtctaatccgttatattattattttattttatttatatacagttgtgtttcgatttgtaacattttagattccgtctttgaccaattaaatctttcctccaaataaaatatttattttcttgctttcatgtttttaattttgacagctactactactaagttcgttttaagcatcaattcgtttatgcaaatagagagaatatcatgtcatgtcttaaaaaacaaagttgctcagaaacaatctttttttggttttgattttcaagttagtagtaggaggaggaggagatcttttaggaatctattcctctgttttttttctttggttgagaaggacccagagaaactcttgttttgttttcagagaatctctgtttgtggtctctctttatgaaatctttatctctatcttctttcagattctgcttcttctgtctagttacttagtggccaagattcacttatttgactcggcaggcaaaatctaccgaatatcttatcttcttgcaacttgtttatagacttaaagctgtgtacttactttgttttgttgcttcttcttatcctttgtcttgttctgtctcttggtcgtgatatgaattagttctttcttcttggttaaattgcagaacaagtgaaagagcttaatatccacaagactctt

SEQ ID NO: 797 - DNA, 415 bp, Arabidopsis thaliana
  Intron number 3 from transcript AT1G79700.1 (locus AT1G797 00) derived from phytozome v7.0 (chr-ID Chr1; pos 29992692 to 29993106 reverse strand)
ctgactcatcaagtgcagtttatctaggtgagttttttttttttcttgccaatatcctatttttttatataagttgcaaaaaaatacacattttgataaagtattgtacttttccttctttttcttttttttttcctgtcactttttcttttaaatactcttcgacaaagtgatgaaaaaagtccatatatacatgtgtgatatggctgtaaattaaagaatgaattccaccgaaattggtagaacctgtttattattagctgttcttttttgggtccaaatccaatgcaattcgtatatgtccttttcgacttatataaatataattcaaacaatattgtataattcttattaaattaatatatggttttatggataaggggcttacgacgaagaagaagcagcagcacgtgcc

SEQ ID NO: 798 - DNA, 483 bp, Arabidopsis thaliana
  Intron number 1 from transcript AT1G80500.1 (locus AT1G805 00) derived from phytozome v7.0 (chr-ID Chr1; pos 30270701 to 30271183)
cacatcagattcacagggttttacttctttttttggtaagattggatttttctctcacccccatttcttattccatgcttcttagatcgttaattgaatctgcatcccgcagtgatcattctttaatttacgaatttgtttttgttgtcttgttgtcgatttttgtcaattttattgtgtaatttaccaagtgtaaattgtgattgaatcgattgggagggcattgcgaggtaaatccatattgtgattttttgtttagtgtctaactagctgtatcgtactccgcataaatcacaggatttttttggtgagaatttggtaacaagaggaaattgttccattgatgacgaagctcctagtgttccattgagaatttttggtttccgattggattattaaagaatagaagaaaaatgttgaaatctggggtttgattttggtatttcaggagacacaagatctaggatttcctttatttagaga

SEQ ID NO: 799 - DNA, 564 bp, Arabidopsis thaliana
  Intron number 2 from transcript AT1G80500.1 (locus AT1G805 00) derived from phytozome v7.0 (chr-ID Chr1; pos 30271250 to 30271813)
aagctgaagttggatctgctgctaaagtacatttctttctccactttctctatttgtatgaatctgagtcattgaagtttatagtacatgttcctgcagttttgctccgttctggctccagctctttctttttgacttagtttcatggtcatagtatagctctctagatttaacccacgggagaggtgcaaagttcatttattaattgtcaccgttgtttatttggctagtgatatgaaaagggttgctatatccattgtttaaattatttttggtcgaggaacgtttcaacctgttttacataaccaagcaagcaggccttgttcttactagataattctaataatatagttctataagatcttctattgcttattgcatgactcattggtttctggtctatcacatagttatttatcctttcttactgacggaagttttcctgtttttgtcttgatcttttcatctagctggtagatatatgtttcaaccaattggtatgtggtctagtcgataagtgcacatcagtctcttacaccattctctctatttggcagagagaag

SEQ ID NO: 800 - DNA, 471 bp, Arabidopsis thaliana
  Intron number 2 from transcript AT2G01090.2 (locus AT2G010 90) derived from phytozome v7.0 (chr-ID Chr2; pos 80146 to 80616)
gagttcaggtcaagctttctttccaatttcgccatgtaagttccttcgtcttgtctagattctgcgttataccaccgttagggatttttctcaccaatgtcctttctttattcttttgctctcttcatttattagatctctagcaatttctctctaaattgagttatccccttaagctatcagatagtattggtattcccgtcttgacacatagtagtaagcacatcctctacagtttagtttgttgggtatttacttaatggcactctccgttttcttgctttacataaaaatcttgaagagctttgtgtgtaacatgggaagcttagcttcatcccttaaacagcctcctactttgacaacaaaaattgctatgtcatagttatgaacgttttattcgttccttagtttgcttatctaacctttgattttccatcctactcgatggttataattacaggccagaagaag

SEQ ID NO: 801 - DNA, 744 bp, Arabidopsis thaliana
  Intron number 4 from transcript AT2G01090.2 (locus AT2G010 90) derived from phytozome v7.0 (chr-ID Chr2; pos 80945 to 81688)
tgtaagtgtgtgagtgctgtttttctgtatacacctaaagtttcgcgaaactaaaatgacaaagacagctacttggagtctatttttctttccagggttatataaaatgatgtggatgcttaacattactactgcaaaccataactaacacgggctccgtccgtgtgggttttgtttctctggcaaactgcgattgctttgttttcgtactgagtttgtgatgcgtccattaatgtttaatgataagtggagtaataaaaaggaagaatccgattctatcttagcttaggtccattttattcaactgtttggtatgaaatcattgaattaattcaaagcacgttggtgttaaacgtctccagtttcaaagtgcaaacatattaacaaggcacgatgacaaaacggcacgctgtgctttggttttgtgcataaacggcacgctaaccaaatgtgtactgtatataaatacataaatactaataattacaagtcttcagaacagaaaggcaaatttctcaaaggaagcgaagccctagcgtcctctctctgtcttctcgtttctgcgccggtaagctctctctcagattttagatctcatcaagatctaacccttatatctctcacggatcatcatcgatctttcagatctgttttccaattttccctgctgatagcgtcttggtttctctaaatccgttgatttgttttcgtctctagttttttttttttttttttcgtttttac

SEQ ID NO: 802 - DNA, 875 bp, Arabidopsis thaliana
  Intron number 1 from transcript AT2G14810.1 (locus AT2G148 10) derived from phytozome v7.0 (chr-ID Chr2; pos 6357496 to 6358370 reverse strand)
cgaatcaagatccaccacacttaatcacacttgttgtaagtgtattctaataagtataattaatgtaatgcagcttaagatgagattaaaaaaatggattaacatgtattgtgactatgttgtgtttgttcaagtcttcaagttccaactatgaagcacatgtttgtggtattagtttattgaaccgtagaagtttgggaacctgcaaaattaaaaataaaacagcatcttggtatcagtagaagataaccaccacaacggtagacaagaagcatctttctttgttttttttaacctttaatttttatttgttatcttggcaattaaagaataattaagcaagactgcaaattgcaggtgctatgatcaattttgaagttgacccttctaaatctgagaaaatttacaagaaaaattcattacagaaactaaagtttaatgctttgggcaagaaaccctagaacaatgactaacaaaacccacaaaaatctctatatctgatatttcccaaaggcggtacctacaccaggttaaattcatctcaaaatttaaatcaagtaaataagatttcaaaatcaaatgtgtttagaagcaactttgtgaaacagcaaaacgaaaggacagtaccctaaaatagctctccgtgtaaagaaaaaccagagaaacccaaatctcaaagctatcacaattttaaaattccaaaaaaaaaatgtaggctgtttctgaatcttcgagactttgacataacagattaaaacagaacataaacaaattcacaacgttgaagtttcgtacgttacacaccaaacttcacttgtttcttattaaaatttgttttagaaagtatttggtgaagatataatcataactttttc

SEQ ID NO: 803 - DNA, 629 bp, Arabidopsis thaliana
  Intron number 2 from transcript AT2G20495.2 (locus AT2G204 95) derived from phytozome v7.0 (chr-ID Chr2; pos 8833456 to 8834084)
cgagctcagtttcctcgtattgaccaggttcgattatttgatcaaattggcatattctcttgaaatcggaccctcttatactctgaaagttgaaacgctgtgaagattattagttaaaagtctctccttttcttgtacttgtagttttgtcaatttctttgtacattgttgtattcttacagctgtttcgtctcctgcctctggctcatctgtttcaggcttcgatcccacccttcatattacagtcgcaattgtacagtagtgtcaatgatagaacccaagtcgatagagaattagaggtaatgctttctgtttctgcacttcctttatacagtagtgtggttttggtttgaaaaatgaaatgtaatttgaacaaataaaaataataacctctgtgttgtatctgtaaggtgtctcctggtaagtttagaactgtaccatttgtgtttttgtatcgtaatgggtgggtctactttggttctattgatgttggaatatttgtactttggattctatctaatttcccatttttatcatctctattggacttcctagagttctttggattgatcaatcaatttgaatttggtgcagtgtttacgaagggagaaagttgttcgtgttttcaa

SEQ ID NO: 804 - DNA, 953 bp, Arabidopsis thaliana
  Intron number 1 from transcript AT2G27490.1 (locus AT2G274 90) derived from phytozome v7.0 (chr-ID Chr2; pos 11749057 to 11750009 reverse strand)
gttaaagtgtgttagtgttcgtgtgttctctaaaggtgattctctaaaggttggtctggaaaaattgaattttgtgtagctatgaacttgtgggttgattcatatttgatttgaaattgtgggtcgattcatttattctcgatacgaataggtacatgtcgagtttctattagtagttcagacatgttttgtatgtgaattgcttgagaatttggcctttgttgcttccgttgctatttgggtttttatctttcctcttgttgtatatgatgtgtttgaattcataagctgcagattctatctttttggttggatatgtctgtgtttgaagttgtatgtttttagttttgaattcataagatgtggtgatacagtatcggtttaaaatgcagtaaaaaacatctcctcaacaattgttgaattcatctatggtttattgccaatttgtttctttgttcaattgatgtttcaatatgtatggctactcaattcatgttcaacttagctttagattcatagatagaaaggattaaattggtccagtcactttgatgtttatagtcaattaattaccccaattttttgtccatctacggcgtcgatttcttcgtattccggtggctgaggaggttactctttcgtattctccactcttctgtttttcctgttcgagccgatgtctctttatctatggtttattgccaattagcttctttgttcatttctttgacaaataaaaaaaaaacttctttgttcattgatttttcaatatctgtggttactctattcatgttcaattttgctttgttcattgatttctaaaaccctgattcagtatttatttttattttgtgtgattcaaatacgttgtcagatccttaacttgtgtatttctggttttgtctactactcttgaaggaaaatcctgaagaaaccaattgtaacttgtacac

SEQ ID NO: 805 - DNA, 939 bp, Arabidopsis thaliana
  Intron number 1 from transcript AT2G27490.2 (locus AT2G274 90) derived from phytozome v7.0 (chr-ID Chr2; pos 11749057 to 11749995 reverse strand)
gtgttcgtgtgttctctaaaggtgattctctaaaggttggtctggaaaaattgaattttgtgtagctatgaacttgtgggttgattcatatttgatttgaaattgtgggtcgattcatttattctcgatacgaataggtacatgtcgagtttctattagtagttcagacatgttttgtatgtgaattgcttgagaatttggcctttgttgcttccgttgctatttgggtttttatctttcctcttgttgtatatgatgtgtttgaattcataagctgcagattctatctttttggttggatatgtctgtgtttgaagttgtatgtttttagttttgaattcataagatgtggtgatacagtatcggtttaaaatgcagtaaaaaacatctcctcaacaattgttgaattcatctatggtttattgccaatttgtttctttgttcaattgatgtttcaatatgtatggctactcaattcatgttcaacttagctttagattcatagatagaaaggattaaattggtccagtcactttgatgtttatagtcaattaattaccccaattttttgtccatctacggcgtcgatttcttcgtattccggtggctgaggaggttactctttcgtattctccactcttctgtttttcctgttcgagccgatgtctctttatctatggtttattgccaattagcttctttgttcatttctttgacaaataaaaaaaaaacttctttgttcattgatttttcaatatctgtggttactctattcatgttcaattttgctttgttcattgatttctaaaaccctgattcagtatttatttttattttgtgtgattcaaatacgttgtcagatccttaacttgtgtatttctggttttgtctactactcttgaaggaaaatcctgaagaaaccaattgtaacttgtacac

SEQ ID NO: 806 - DNA, 379 bp, Arabidopsis thaliana
  Intron number 2 from transcript AT2G27730.1 (locus AT2G277 30) derived from phytozome v7.0 (chr-ID Chr2; pos 11820401 to 11820779 reverse strand)
ttttcattaaggtaaagatcagaagctttccttattgatgtgaacaataatagtagactaagaatcctcgaaaaaactataagtatatttactttccttttgtgatgttgatgatgaacacttattatcaagctcttgtttgattctatctgtctctgttgtaaactattagataatatttggttttacttataagaaacttatcttgtgtcttaatcgtagaagttaaatctatttgttatctaaaccttgtagcatctagcttgaactagaaacctgttacataatacttactcttttcaaaacaatttatatttttgagtaagtcatcttctgtccttatattttaccttgtttatggttttctacattgcagaaa

SEQ ID NO: 807 - DNA, 965 bp, Arabidopsis thaliana
  Intron number 1 from transcript AT2G27730.1 (locus AT2G277 30) derived from phytozome v7.0 (chr-ID Chr2; pos 11820868 to 11821832 reverse strand)
cagacgaaacttttaacgatctaccatcgaaccaggtctctcatatcttccgatcatcttctccgattacgattctttccttctcgtttttagattagctcagaaatttttctaaccttttcttctctgtcgatctaacacctgacctcgatttttcgttaccgataccaccattttcgaggtcagagctaccgttttcgtatctgtgttatcatatccggattaggttttgattttatgattacatttgttataatcagtgatttgttgtttattcgcgatcctcggattttcgctggatgatcttttgtgcttcctctatacgttttctaaacctagatttggatcgatttggtatatgagaagctgtgtttgttacactgttttttgtggtaacaaacacttaacattctacagcctccacaaggatccatgagtatatgtattttgatttgaatgtagtagctgatacttgggatacagtaatagattttttggtgacttccccattgtatgaaatgatgatgacaaaaaggattttgagagacaagtaccaataagtgtttcctcattatagattttctgtaactgtctgtgtggaatcttgagattacctctagcatcgctattgtgctgtagattatgtttctgttaaagtaattcaccattgtcgctgatacgtgggatacagtaatagttgacacttgatacattagtatcttaattcaccatgtttatttagcaaaaacaaatttaccatgttatgattgatgatgacgaaaaggattgtaagagtccaatgttactccttataggttttctgtaatagtttttatggagttttcaaacaatttcagggttttcaaagtgaacgattttgttagttcctagaatctctctcattcactgtctgctttagttaaaatgagtttaatgttttatgcacaggatacttcttcattacc

SEQ ID NO: 808 - DNA, 715 bp, Arabidopsis thaliana
  Intron number 2 from transcript AT2G28950.1 (locus AT2G289 50) derived from phytozome v7.0 (chr-ID Chr2; pos 12432144 to 12432858 reverse strand)
tatcgtgccggaatcgtccccgtctctttccgccggtaagaagagtaatttattgtttcagtggaatcttatatatcagcttaaacctaggctttgtttagttgagaaagacaaattggagttaatttgatagattttaaactttggggtatgaaattaacatcttagaagtattgggtcaaatgattggggttaatgtggcaggattaaaagttttagggtactagtcgagaagtcttgcgtctatattctgttcaattagggttaatgccgacagaactagaagtttagagtatcaaacataacatttataaatattatggtgtagttgataagtcttatttttatagattctgaataatttggtttaatgttgtagaattaaaacatttagggtgtcaaacataatatgttagaagtataggggtacggtcaaaaagtcttgtcttttgattcttggcgcgagccggtgcagcatttatgtcgggtctctcgtacttggctaaattaccaaatctaaaagatcttattttctgcaaaaagacgaaactgtccttccaacaatttcttttttacttttatcagtaccatataataaaagtcaagagttacaataatggaatggtgtcttttagtcaacaacgcgttttctcaacttttcactgaaatgacataactaaccttgtattgtttcttttattcacaacagagtgcc

SEQ ID NO: 809 - DNA, 957 bp, Arabidopsis thaliana
  Intron number 3 from transcript AT2G35600.1 (locus AT2G356 00) derived from phytozome v7.0 (chr-ID Chr2; pos 14942240 to 14943196 reverse strand)
acactaaagaagccgttaaaagcctaactacacaggtctctttctctccctaaagatcaattctttcctttgttgatccttaagactctttttcactttacttttgttgcttttttcctaattgccttggtcttgaaataaacaaagccaaattgagaaaaatggtcctcttaaactgttttaacaattgtagtgaaaagtgaaataaacagttttgaaatttggctgtcaagtacaaaagtatagaggttactgtagttaaggctgcaggttacaaacaatattaggatctttagacaagattttacagtgatgcaacatcacttctctggaatctattacaaatctctctttaataggttatgtcagtgttttattttctgcactctatgtgactagacataaaaaatctagcaaccaatttagtaaaataattaaaatatcaaaattatgtttcacattgaatttaccaatgtagtggctgatgatttgtgtggaaaaggctaatggagtcacgccttgttgaacatgatttttgcttgttattgaagattgatctatatactttcctagaataagtccctagtgggttcttatttagattaggatggtggggcaagtatatagtaaatcaaaagaagcaaaaaaaagaagctatgattatgttctagtcatggagaagacaagatgaactatattatttgtttcaaattatatcagatcttctagctttattcatgctctttatgaatgatgatagtagactctttttttcctagttgggatcaaagaaaaatcatccatttcttgactcttttttttcatgttagtagactttattgcttacttacctgttctgtccaacattattctgtccaatgatcacctagtaaggttgtgttttaagattttactttaatcaacttcttgggcacggatgctatgcagatcaaagat

SEQ ID NO: 810 - DNA, 766 bp, Arabidopsis thaliana
  Intron number 2 from transcript AT2G38880.6 (locus AT2G388 80) derived from phytozome v7.0 (chr-ID Chr2; pos 16238850 to 16239615)
tgcgtctctgagttcatcagcttcatcactagcgagtatgcattcccaatttttcttctttcaatcgaatttgttggaaaatattttgctctttggtgaaaaaaattgatcatttgttggaactttgggtttgtgagagatagttttcttaaactagctatggattgagtttagctcagagagttttttgaagtttatagagcaaagattatgtttttttttttgtcacaatgttaatcaaccattgtttggtatgggtttaccttaacctagttcctttcctatagaccattttgcagattatttcacatgcttctactgtgttatatcttaactctgtcaaataaattgttagatttttttcttcatttaaccatcttagggtataaaagccgtatcttgatcatgtttcaaagattcttttatctttaggatctgtttgtttttgttcctttttgttcatttaaggcaaaagatatgtttttcatcatgaaggaattgcttgtgttgaatgcgttttaggtctctgattgatgagttttatgtttcttataacatcagatgcccccgttctttgttaggaagaaataagttatcatgtatgaaactatgatttatctattggttcaagataagcttgtctgatgttgcgcttaagtctcttttgctggtcttatgttgattcgttgactgtaatggccaattgactggtatctgtttctgctaatcagggccagtgataagtgtcaaaaagagaaaaggaaaa

SEQ ID NO: 811 - DNA, 691 bp, Arabidopsis thaliana
  Intron number 2 from transcript AT2G39340.1 (locus AT2G393 40) derived from phytozome v7.0 (chr-ID Chr2; pos 16424082 to 16424772)
gaccctaattccattgaggtaattaacaatctcttgcgccttctctttcttttaagcttaaatttttccaatttgcagatttatttagtctttatatgcaagtgaaatttcgtgcattggttcaatttttgcgaattgaatttgtttattttagtttgctccagatttaacttggtagatatgaaagttatgcttgttgttagttcaccattgtaatggttagaggaattttgcatgtcagtatgtttatgcagcagaaaaaaagtgactttgattctaggctccgtatgtgaactcttggaacatttcagaaaatcagtttctgctttaagaatagacctatcatcaattctgtggagccgtatgattttcactagtaatatgttatgaatacagctcaatgatgcaaagtacaacattttctattaggtgttaggtattgttacgaaacttagctgctgatcacttacttcatggaaatttgcagttttattgtttgattcaatcagattgatttgagactgtgggaggctttagcatcctaatgtagtctttatctgagatgacatttctgtttgttgtttgtctatgtttcttttcactcttcaactttttgtttatgtctacttgttaaatgaagattctcagaccttggccagtactaatgttttttcttttatgcagaatcgat

SEQ ID NO: 812 - DNA, 666 bp, Arabidopsis thaliana
  Intron number 2 from transcript AT2G40095.1 (locus AT2G400 95) derived from phytozome v7.0 (chr-ID Chr2; pos 16743756 to 16744421)
aaaagcttctcgtcttcaaaatcgacattgaagccgtaagtccacttctccatcttctttttttccgccgttacagaaatttattattttattatatttgattgataatcgatgtagggccaataataccaagttgcatttactttttttcaaatctaggaatgaattagatttttaacctgcaatgggtcagagtcagagatagcatgtgaatgtatattagtcaatgttgaatattaaacacatttttacacatttggtccttttgtgattctagaaactcgatgagatttgtctttccgatatgtttggttaggaaaagactctacttggtgagaaggttttcaaatgaaactaagagaaaacaaaattgaagtttggattggaaaactttcttatagagttatagttttgttttgtaggttagaatttcatgtggaaaccgtgtggcatgtaacctaattttcttagtcattttataataagataatatccgacatgacacgtcacacctcacgcatgcatgcttcatgattgttttcatggaggcaaaaccatcaaacctctttcttcgttatagttattatcaccaatgggaaaactaatgtgttttgattgatccatttttcaggtttcggcttgtaaaaacgtgtacccgagatacca

SEQ ID NO: 813 - DNA, 681 bp, Arabidopsis thaliana
  Intron number 4 from transcript AT3G01540.1 (locus AT3G015 40) derived from phytozome v7.0 (chr-ID Chr3; pos 214755 t o 215435 reverse strand)
aagctactggttttccacctgagcttctgcgggaggtatgattggttaatagtaaactgaaatgacttaggaacccctcaaacctgataattgttctaccaataagcggaatctataaccttataattgttctaccaataagcggaatctgtattgagtgtttttgctaaagtctgatttattaacatagctttgtttttccagtctcagacttttctgtcacttagctaaaatcgacttaggtataacatttagagtcaaagttttatgccatacgcacccttttctctttttttcccaggtgcgatgtttgctcctgggaggagccaatgtcgtacactgtgccacttctttgaggtccttgcaaattatttggagtgccctatatggtggaccaaattttttggaaagggcttcccaaatcatccaagcttgtggcagggcctgttaatggtgtgatgattcatttcaccaccgggtccagacagaagaagaggcgtcctcctgctgcaggtttcatcagtaaccttttgccacctgcaaatgggggatggtgcttcttctgacatgagccaccattccataagcccaaaagaaccttggtgttccccttctcataggacagtgtggttttctgttttcttaggtactcagtgcaggtttctctgctccaactccaat

SEQ ID NO: 814 - DNA, 644 bp, Arabidopsis thaliana
  Intron number 2 from transcript AT3G06310.1 (locus AT3G063 10) derived from phytozome v7.0 (chr-ID Chr3; pos 1913372 to 1914015 reverse strand)
aagggacgtgacgtcactcgctgtgttcttggcctgtacgtttcttctacttcattctcgtttcaatttctctacaagttcttaatttagctgatcttagtcatataacaatttttgggctctttctgttaaaacttgatgaagattgaggataatgtcacattgtagaattaggggtttgatcatatagtttaagaaatgaagaatctttagactttttttgatgtggattacagtgtatttttttaagaccatgaacatacactaagctaagttcatcgagttatgaacatttctagaacttgagtaatctttgtatattatggatcatgatcaaatatttggcctatttgaaagtaattcatggcacacttgtgtttgtaggagcctttatttccgtagattgaaaactgaacccaaaagccctatacaactagccatttgtttagtatctaggaagcagttgtttgactcttgtgtagttagtgatatagtgatggatatcttgagagttcactaactttgcggaggatgatgcattgtccataacaatctgaagttgagtagtttgcagttggtgacttagattgttcttaaaactggtgaaatgattgatattgcaggctgaaggatcttcaccagag

SEQ ID NO: 815 - DNA, 111 bp, Arabidopsis thaliana
  Intron number 2 from transcript AT3G08020.1 (locus AT3G080 20) derived from phytozome v7.0 (chr-ID Chr3; pos 2560966 to 2561076 reverse strand)
acgtgagtttttttttttatgaagatgatattaatttttttctgtattgacttcgctttgattgagttttttgttgttgtttgtttgttgtacagcttacctcaaacgatc

SEQ ID NO: 816 - DNA, 453 bp, Arabidopsis thaliana
  Intron number 3 from transcript AT3G16565.1 (locus AT3G165 65) derived from phytozome v7.0 (chr-ID Chr3; pos 5641714 to 5642166 reverse strand)
aatcaaggcgtaaactcaattccaggcaagtaactgttgattgaatttgattacaacgagagggaagctagatgaatgattgtagttttgaatgaaatgtcaaatgttggattcattcttattatgttatcagaaacactttttttctctgcacatagggtatagatacttcaaattttaagtgaatctgttccttttttgtgttaattattgtaaagtacgagtgatgcagttttgtaatctgctggtggaattcttcagaattcagatataggctgttgaagattgttctcattgttatgcatggcatggttggaacaaaatttcagacgtatggttctgagttgtgcagtttttagtttttacgttgctatcgtagtttgtgcctggactttatcttgaagttaatatttgttcatcatcaggttgcactcagctggacacttgctagat

SEQ ID NO: 817 - DNA, 600 bp, Arabidopsis thaliana
  Intron number 1 from transcript AT3G45780.2 (locus AT3G457 80) derived from phytozome v7.0 (chr-ID Chr3; pos 16819223 to 16819822)
ggttacacttccaaagaagtcgtcggcagaaactggtaaaaagttattcaaaaaattttagagcatttttttaatatataaaatacgtttcgttttctgtaataattaccaaaattgcaaagttttttctaattaaatatcatagttttgtttttaggtttatggttactataaatgtataaagatatcttaaatgacttagtaattctttctaaattttcaaaaattaaacctaactttattttatttttttagaacttttcgaaactgtgtaccaaaattacaaagattaagttttaggtatggttatcctaaatgatttagtaactcttactaaatttctaaaaactttttataaacctaatttttatgttgtttttccaaactaatagccttttataaactaagtttattttttaatgataacttaaaatatttcttttaaatcgaacatttctttgcaaattcgaaaaatttcttacaaaagtttccaccattttttgttcaatgaatgaattttatttacaaaaagaaagaagaaaagaacataatttgggtttttgttttattgtagccgatttttacaaggatcaggtacag

SEQ ID NO: 818 - DNA, 362 bp, Arabidopsis thaliana
  Intron number 2 from transcript AT3G49140.1 (locus AT3G491 40) derived from phytozome v7.0 (chr-ID Chr3; pos 18214928 to 18215289 reverse strand)
ggtaatgaaaaattcactttgttccgtcattaaattgtaaaatagttttgagagttttcgtttcaccaggaggatagattctagtatttgagtgctgagtgtataatacgagtgcaatatgtttcttgtcagctgtgaatattgaatttagtgtgaagcggatgttcctcgattatatgattatatggagatagagcactaagttagatgcttctttagtgagccgtggaaacattcaaagatcgattcttttgaaattacagattctgaatattttggttttctttatataatgtaaatctcacattcatatatgcacttttctaggagtgggtttctgaagtacaacagtgactatataa

SEQ ID NO: 819 - DNA, 555 bp, Arabidopsis thaliana
  Intron number 2 from transcript AT3G49640.2 (locus AT3G496 40) derived from phytozome v7.0 (chr-ID Chr3; pos 18402033 to 18402587 reverse strand)
cgaacgccgactcagtaaacacttttttgtaatcttccttatggtgttaatgtgattttttgaattattcatttggttctcagattctgctagctaacttagtttctcttattgtttgaagtgaaagatgagattgatccaaactactgtgtttaatcgtttagaactaagcattgaaccaacattgtttaagatatatgcaaagaactatctaggttttgatatggtgccatattggggtctcacttgtaactaattgaagtctcctttgaaatggtaaattctgtgtatagctcgctcgatatgattgttctgtctacagtcaatatggactgtttgtaatgactttagctctatagtggaacctggctccattagtgcatctctttggtagacattaatagattttgctacggagagacttaaacaagatattttctttggtgttcccctgcttatctttatgaatcatataggcttctttctgtggttcttcctgattctcaaattcttattgtagttctccctctacagttgcttctgggacatctgagt

SEQ ID NO: 820 - DNA, 569 bp, Arabidopsis thaliana
  Intron number 2 from transcript AT3G49640.1 (locus AT3G496 40) derived from phytozome v7.0 (chr-ID Chr3; pos 18402019 to 18402587 reverse strand)
cgaacgccgactcagtaaacacttttttgtaatcttccttatggtgttaatgtgattttttgaattattcatttggttctcagattctgctagctaacttagtttctcttattgtttgaagtgaaagatgagattgatccaaactactgtgtttaatcgtttagaactaagcattgaaccaacattgtttaagatatatgcaaagaactatctaggttttgatatggtgccatattggggtctcacttgtaactaattgaagtctcctttgaaatggtaaattctgtgtatagctcgctcgatatgattgttctgtctacagtcaatatggactgtttgtaatgactttagctctatagtggaacctggctccattagtgcatctctttggtagacattaatagattttgctacggagagacttaaacaagatattttctttggtgttcccctgcttatctttatgaatcatataggcttctttctgtggttcttcctgattctcaaattcttattgtagttctccctctacagttgcttctgggacatctgagtttgtggagaaagga

SEQ ID NO: 821 - DNA, 333 bp, Arabidopsis thaliana
  Intron number 2 from transcript AT3G55280.2 (locus AT3G552 80) derived from phytozome v7.0 (chr-ID Chr3; pos 20500670 to 20501002)
tctccagctaaaggtacgcctttttttctttcattgttatctgatttgattctacatcgtcttctatttctcttttgcgtgtaattactttgtttatcattattcaatactgtgactgaacttactactgtatacagctttctgaaatgtatgattcttatctggctctgtaaagttcgtattttttatattctcttgctcgtacctactctgttatggattcatctgattatgtgcttgtttgtctgttatttgccaatgatcaaactttccttgaatgagatttgttaccagtagtgtaaatggtttaatgttccattatttttgcagttg

SEQ ID NO: 822 - DNA, 381 bp, Arabidopsis thaliana
  Intron number 6 from transcript AT3G61028.2 (locus AT3G610 28) derived from phytozome v7.0 (chr-ID Chr3; pos 22583442 to 22583822 reverse strand)
gtgatccggtcagactacctggttacccacaggtaaaaatgttaattttattttgggcctgggcctttgttttctcctcttaatgagtgcttcgaagtgttgtttccatatgtgaatggaaaaagagaaattgtagacgggattaacatatattgactatcaggaaaaatatttgactattggagggtctgagtaatttatccgctcaaatctggttttacaaattctaacgtacaaatgtttttttttataactttcttctatacgcaattaaagggtaatagttgaaaagctcttaagatttttttaatatttttattttgggtcttggtttttattttttttccctgacacagttttttttttgttatagcctaatct

SEQ ID NO: 823 - DNA, 327 bp, Arabidopsis thaliana
  Intron number 2 from transcript AT3G61110.1 (locus AT3G611 10) derived from phytozome v7.0 (chr-ID Chr3; pos 22612060 to 22612386)
agcgtcttgtccagtctcccaattccttcttcgtaatcaaaattttaaagctttctccttctcttgaaccctttagcaaataagtctctgtgattagaactgtatgttaatttggagtttaatgattttctcataatccctagctttgacagtgtgttatgtgatggcgatttttggatgtaagtttgagaatctatgtaactagtttcgagtttgtgaattgtatgtatgttttgagtttgtgaatttgatttgtatctgattctcatttactcttttatggactctgattgttgtttcttttcttgtatatcttactactgtagg

SEQ ID NO: 824 - DNA, 428 bp, Arabidopsis thaliana
  Intron number 1 from transcript AT4G02590.2 (locus AT4G025 90) derived from phytozome v7.0 (chr-ID Chr4; pos 1139522 to 1139949 reverse strand)
aaacctgtaagttctgttcttgctttggtgtttgattattagaaatgggaagaaatcgaatttgagggttttgaagagaacatttttggtaacttttgttttagtttttgatttgtggtaagtaactttaacaaagttgatgatttgcgttatgtgctttattttggctcagacttgttgaatctaatcgattttggtttgtttagtaaactaaggttagctcttgttactctatgagcaacttctcactagttcatgtagctgcgtggcttatcttgccttctaagttggtcaaatgagtaatcttaagggtctaacttaaattattctcttacaactaatggagtcaaatccttgtgcaaatggtttattttcgtttggtcttatttcttctgtgtgttgtctggaaggttttccacgggcagcct

SEQ ID NO: 825 - DNA, 973 bp, Arabidopsis thaliana
  Intron number 1 from transcript AT4G05150.1 (locus AT4G051 50) derived from phytozome v7.0 (chr-ID Chr4; pos 2660626 to 2661598)
cgcctctctccttagtaaacttgctaaactctccggtaagttaaaatcattcccttccgattttcgaatcgtgtcatgatgatcattgaaaaccgattagggattttagttggatgattttgatatgatctcttatcgggcctttgtgggcctcgtctaagaaaatcgccacaaggaaatttttagatatgatgagcgaattatttggttaatttttaagatttttttgcagcttaactgatttttatggaaattgggcagatttttattggtctgtggccacaaaaggtctggcatatgatattttttcttcaatcatttaattttgcacgatcatgaaaattatcgactcggaacatttgatccaatgattaattaatattatctccatttcgcaatataaattgttttagttaaaaatacacaaattagtaatatttacttttttaaagttccaaccaatcataaaaaaagattttataatataaataattataaagtatttaaaataatatataatttacataaaaatttgaaaacaatttatattataaaacaaaaaaatggttcaatacaacttatattatgaaacgaatctaatacaacttattttatgaaacagagtgagttcgttagaaataaaaattgggtttagaagaagttatggcgatcactgtcatattacccaaatacaaaattgaatctaaatcatatgatatttttttgttttctttgtcaactatgaattattggtctaaaaaaacatttttgctgtttattaaaatatttttcaaacttattgttggaaattgggcagatattttgttggccatgagattttggaattttgcgggaaagtattcattcaatttataaaaagaaaatattttgattggggaataataatgatgattgttgcgttggaatatttggataaggtaaaagcaacataagcgtgaagtaccagctacca

SEQ ID NO: 826 - DNA, 724 bp, Arabidopsis thaliana
  Intron number 2 from transcript AT4G10040.1 (locus AT4G100 40) derived from phytozome v7.0 (chr-ID Chr4; pos 6277483 to 6278206)
agactctttacgattacttgttgaatcctaagaaggtatttgattgctctttaatctttaatggacttcgatcatagagtctggtgattaaggttcttgattgttcataagctaatttgtggattagtggtctttagttttagaatatttgttgcaaaaggaattatgagtctttataccttcttaagtattgttaggttgatctagaaacacaatttgtttgttcatttcggtttggtgcaaaaatctccatatttgtgaaattggacatcatctttcaaaatggtacactaataagtgcaacatctcaatgttgtgccatttgttttctattgcatgttcaagaatatcaagcaattagcaacatttgttttggttaatacttgagtctttccttcactcttgtctattgtctctttattgagctgatttgtggaattttccacaaatcttatgattcatctttcactctttaagctggtgcatcataacctgtgtgtgcatcatcatctcaacagtgttccaatttattatattgcatattctagaatatcgaaacataatattgtctgtcaagaaaatgctgtttggctaatactgactcctttcttcacacttttgggtcgcttgtttctttttgagcaattatgaagagataagatctcaatttgattgaattggtgtggaatttctttgcttgttacagtacatccctggaacaaaa

SEQ ID NO: 827 - DNA, 786 bp, Arabidopsis thaliana
  Intron number 2 from transcript AT4G10090.1 (locus AT4G100 90) derived from phytozome v7.0 (chr-ID Chr4; pos 6305830 to 6306615)
gttaagtgttcaggtgagacttatcaggtaaaacaatctatttgattagcattagtgtttagctaatgcttaatgttacaataagcttagttagtctttgataaaaacaaacttaattttggatggtttggtagtggtgccttggctttagagagtgttaagatatctctagaacaaatcttcttactagtggttttggtaatcgatattgtttttgatcattggttcttctatgtaagtgactagttaattacatatagtagcaattgtctctgttctgtgcaaatcagattctgaaccaggaagttgtgttttgaacacaaaatgatgagtttttgtgaggctagcttagattctacctttagattctacttagattttggatggtttgggagtgccttggctttagcgagagagagtgaggatatctctagaacaaatcttcttactagttgtttcggttttggtgatcactgcctcttttatgtaagtgacaaattaattacatatagaagcagttttctgtgagtctattatctgcaaaacagattttgaaccaagaggttgtattgtgaacacaaatgatgagttttggtggagctagctttgattctatctcaatatattacttttataattaaacaaatctgattttatctacttgtggtgtgcgtttcattgttttgtgttgtgatctttaaacctttttgtaaggtaccactgccaataactctgtttctcagatatgtaaaaaactttattttactgaaaaaaatcttttagcag

SEQ ID NO: 828 - DNA, 553 bp, Arabidopsis thaliana
  Intron number 2 from transcript AT4G14740.1 (locus AT4G147 40) derived from phytozome v7.0 (chr-ID Chr4; pos 8452639 to 8453191 reverse strand)
ctcctgtgtctcctcccgaatccgacgacattaaggttccaatttcttgaccaaaactgtatttagttttgatactaaagcatgttctgggtttctgagttttggtgttactctctatgtaaatgtttcaatttttactgcgtcactgacaattttgggtacaatgagagactgtgaaaataaaaaaagaatcttcactagaagctttctctttatccaaccatacccagagatcatgtctttctcccactactgtttccgatgattcttcatcatttcaattcaattttataattattccttaaacccattaacgaattgttggttttcttaattaaataagtattatttagtgacactttggtctaaagcaatctcctttacttgatttggttttgtctttttcttgttcatcactcttcttccaaaaacatttccttttttagattttgcttcactcttctgggttctggcgaatctctgatactaaaactcaaatttttaatcttaaaatgcagcaattttgcagagcgaacaaaaattcattgaacag

SEQ ID NO: 829 - DNA, 423 bp, Arabidopsis thaliana
  Intron number 1 from transcript AT4G14740.1 (locus AT4G147 40) derived from phytozome v7.0 (chr-ID Chr4; pos 8453233 to 8453655 reverse strand)
gatcgtatcttgtctcactctgtaagtcttttcttcagataaaaacagagcatttccggacaaaacaaagcattctttttttttttactttcgatgttgacaaattttattttgtttctttcatcagaatttcccaaatatggtcaatcaaagttttaatttttagcaaattatgttcatgaatctctctttattaagtgtgattaatgaagagaaaattttcacgcgcaataattataactattaatcaagaaaaaaagttacgatttttatctacacactcgctttctgggtccctaaaaacataataacaagtttatggatttgtcatcatctcttcttcttgattctacttttgtctcatcttctttaataattttgtttgcagcaagaagtatcaccaagaacatctggtcggctatc

SEQ ID NO: 830 - DNA, 1029 bp, Arabidopsis thaliana
  Intron number 2 from transcript AT4G16146.1 (locus AT4G161 46) derived from phytozome v7.0 (chr-ID Chr4; pos 9143309 to 9144337 reverse strand)
gagtcaacgatttcttgttttctcagcagcaagaggtaattaaatcaattaattgtattttctctaatttcatgaatttttttttctaagccgtggtgcaatgttttggtatttatttaaggtatatttagcgtttttggtttaggagcaaaattgaatattcgattttgaaaattctaaagatggtattgaatctgggtagcaataaaataaaaatttaagggtaaattcctttttgtttaattttaagaaaatatgttgactacaattgaacataattttttatttagaaattaatttgataattttaagttaaggtcggattagtagtcaacaagtcaaaataattgtggtaaattaccaacctaatcgtcggcaatttaacagcggcgtacacgtttggtttcataatacttctatcattcaaacactgtttttgttttaacatatttctggtcaaaattaaatataaatggatttgattacttattaattatcaaattaatattatgatttctaatcttaattgggttgaagattttttattttttatttgtcgggtggaagatatttctgataggtatacaatattttttatgataaaaaatcttatcataagatatttaatgaaacggacggtcgtaaacgataaattcatcttcatctgaaccaactactaaatcaacggtttattgtactgccacgtgatacgtttgatgacacatgtgttcccaatccggatcttcgcctttgatatgtgatccggtccacatgaaattgccgatttcgtcttggtctatgcattctcattttttcctaattttgttttctgtccgattgtgattggtacaatgaacctctttacaaaatccggataatcggtttgtcaaattaaaccctttttgttaacctatagtatgcataccggtatggaaattgctttccggtttttgtatttgtcggtttattttggtttgtattattttgtccttagtctacttctggtgcaaataaatacggaggacttgt

SEQ ID NO: 831 - DNA, 501 bp, Arabidopsis thaliana
  Intron number 1 from transcript AT4G20300.2 (locus AT4G203 00) derived from phytozome v7.0 (chr-ID Chr4; pos 10955819 to 10956319)
aggtttctcttcttcttcttctccgttcttcttctctctgtgttttttccatcttctctgagtttttctattttccactgatttggttttctgttgttttctggatttctaattagtttctatggatctgagtttgattgtaaaaaaacttgagattgactctaatgtcaaaaacttttgatctcctccagatttcgtcttctttggattcaccagtttttaactaatctcaatttgatccaataaccaaattgtttttcgccttttgaacaaaaacaaaataatctcagagcttctccgtcaaattctgatttgggttattttcaattaaaactcagaagaattttgagaagattaactctaaaatctcgcataaaacacagacacatttttacaatttttcacagttcaatcttccttttcgttttcatgattttgatctaattatttttgtgtttttgattaggtatcagagagtaagcccagattgtcttcctctca

SEQ ID NO: 832 - DNA, 542 bp, Arabidopsis thaliana
  Intron number 2 from transcript AT4G21215.1 (locus AT4G212 15) derived from phytozome v7.0 (chr-ID Chr4; pos 11312768 to 11313309 reverse strand)
acaaagacttctcttcttctagtccaagaattactgtgagtttttctaaaatcaaaactttgcttaataatcatcaagaacaccacaatttctattttctcatatctttgtttctattttcttctctgttttatttttttttgttgtcttttgggtatttaattttggtgagaatcatggaagaaacgcccatatcctttaataactactcttgagtcttcgatttaatttttctgcccatttttttcgtctcatttaatatttttttcaagtataaagtaaaaaaccctaatcaaaagttgacttttaatgtgtcagttattttttataaatatttttctgtgttatcaaaaactattactatcatctcacggatttctctgttttcttttcttgtatttggcatttggcatgaagcttctttcagatattttaatttctcttttggagtgttttctagtgaaaactcaattattgagatatttattatgaagtgaaactagaaaactgaaataaataaagaaaataaaagttgcagagga

SEQ ID NO: 833 - DNA, 542 bp, Arabidopsis thaliana; identical to SEQ ID NO: 832
  Intron number 2 from transcript AT4G21215.2 (locus AT4G212 15) derived from phytozome v7.0 (chr-ID Chr4; pos 11312768 to 11313309 reverse strand)

SEQ ID NO: 834 - DNA, 916 bp, Arabidopsis thaliana
  Intron number 3 from transcript AT4G29410.1 (locus AT4G294 10) derived from phytozome v7.0 (chr-ID Chr4; pos 14468524 to 14469439 reverse strand)
agtaaagttgttgccaatcaggtactactcatcttcttaagatcaatgtttgtttgctttatctgcggttatacatgttgggttatttggaaaatcttacggataagtgctttagtgaatttgagacttaggattgagaatagtttaattttatgagctgtgatgagaaagctaacacgtaagaagaggtattcctttgtggggtatttcttcaatgaaatacatttgttacgcttggcttctgagctataaacttttaccattgctttgggacagttttctgtttctatttgtgacaaattttatcagtaatgagtaagctaacataaaaaaattctaatgaaatggaacaataggtttgataatagtttttggtccttttgagctgtgatgagaaagctaacacgtaagaaggggtactcctttgtggggtgtttcttcaatgaaatacatttgttacgcttggcttctgagctaaatccttagctatttgtttcaatttaatgatttcgtctatttttctgtctaattttagctgtgatgagaaagctaacacgtaagaagaagtactcctttgtggtgtatttcttcaatgaaatacatttgttacgcttggcttctgagttaatagtaatatgaattattgtagcatacctagaatttgagattacttttatttagtctgcaattcgtacctatcagtgatgagaaagctaacacgtaagaagaggtactcctttgtggtgtatttcttctatgaaatatatttgttacgcttggcttctgagataaatctttcttctgtgcaccatttcatattgcatctgttttgttttctatcagtaaaagtactaaccgattgattgtcttcaacttttcaggtagtggacaactactacaggcctgatttgaagaa

SEQ ID NO: 835 - DNA, 339 bp, Arabidopsis thaliana
  Intron number 2 from transcript AT4G32480.1 (locus AT4G324 80) derived from phytozome v7.0 (chr-ID Chr4; pos 15677019 to 15677357)
agatccctgcaggtaataaatcaaacccaattttactcttatctttaaattcctagtattcttattttcctaattatggaaggtgatttgtgattcttttatggattagtattgtttatgaagattccgtatgaatttagacatgttttgaaactttcacgtatctttatcaataacattactaattaagaaaccacatcaacggaattatctatatattctatataaataaatagaataaatatatcttgaacgttttcgcccctaaaacaagttgtcattaactataattaacaatttgaattaaccatgacgtttacttatcaaatttaggtgagc

SEQ ID NO: 836 - DNA, 930 bp, Arabidopsis thaliana
  Intron number 1 from transcript AT4G35110.2 (locus AT4G351 10) derived from phytozome v7.0 (chr-ID Chr4; pos 16713988 to 16714917 reverse strand)
ctcatcacatttctctccctcttccgattctcctggtatatctctctctctctttctctttatttctctgtttgttgattgattgcatttttgtgtgaattaaaagtttggttctttgatccacaaatagattcttgatctcgatcagaatcgtgggtttgcttttgttttaagaattaattcaatgatcgatgatgaaactgattgatactgttttattgtcatatgctctgtttctttgctctgttctaaggaaattttgtgacaaacgacaatcatggaaaacgaaatttcaacctattaaaaaaatattatccacaagggtgggccttggaagtttttgtctgttcaagaaaacaagccggtcaaaataatctaccttttaactctggtctaagtcaataactgagtgcttccaccgttgaaatttagtatctcactggaaaattgtacttggaaattgcatggtcggtccatgaaagtattaaggagaagaaacaaaccaaaagtcgtctttttgtatctctctatacctatacattttatgatttgattggttttgtggggatcaatttcactattactcgtaagaaatttctttatggatatgttttggtgaatctctctctgcttctcacaatctccctctttactttttttctttcatcatataaagggttggtgaaatatgaatggaatccaatttcgttgggaggttgttgtatattataagtttttagtgtctaatctttttgaactatttgttgaaattaaggtgtaaaggtttgaccacttacttacccttaatgtgatatgttcagtcctttgacaccacaaatttgaagttcttgtgttgttctttgagtttgtcttctttgagctgattagttatcttgattttgttgcagttgttccattcatcaaaaagct

SEQ ID NO: 837 - DNA, 658 bp, Arabidopsis thaliana
  Intron number 2 from transcript AT5G01390.1 (locus AT5G013 90) derived from phytozome v7.0 (chr-ID Chr5; pos 160904 t o 161561 reverse strand)
ttcttgactcttccgggtttgtttttccattgatgatcacacatttggcttttagtagagggatatatctgctgcttttggccaatttctttctagaacagtttaaactctctttctgtggagtttggttccaaatgtttagtctatgaaagctataatagtctatagagtcagcttattagaaagttcttcttttgaacaggtttttgttagcatctaagttgtgtactctgtgacctttattcagtatttgatctctctatcggcacataaatgatagatgtaagtgtaggaaccgatagctatagctaaccaggacattccttgacctacttaaccactttcattatggattttagcttcatctgttttttcatgaaaacggaaatctcttcaactctacaaattgtaatggtgtctcttgtcttcaatttgattcatctctaatccttgttagaatgtctgcttaaagctctcttgaatatcttccttttcgcaatctcaagtatcgaaattcattcctactttttgtgatttccactaccatgagtataaagacattactgaaattttattttctacgttcttctactgacaaaacctctgtttatcctttaatgcaggaggccaacaccggttgaggagatcttgacgatag

SEQ ID NO: 838 - DNA, 851 bp, Arabidopsis thaliana
  Intron number 2 from transcript AT5G01390.2 (locus AT5G013 90) derived from phytozome v7.0 (chr-ID Chr5; pos 160904 t o 161754 reverse strand)
ggaagcgactcacgcgcaggaccttctggctttaggtatggcgatgatatcttcgcttccttcagggctgctactaccggaggagaagcctccattccttctaggaaatctgctcctattgagagacaattgccttgtagcttggaggatttgtataaaggtgtctccaagaagatgaagatctctcgtgatgttcttgactcttccgggtttgtttttccattgatgatcacacatttggcttttagtagagggatatatctgctgcttttggccaatttctttctagaacagtttaaactctctttctgtggagtttggttccaaatgtttagtctatgaaagctataatagtctatagagtcagcttattagaaagttcttcttttgaacaggtttttgttagcatctaagttgtgtactctgtgacctttattcagtatttgatctctctatcggcacataaatgatagatgtaagtgtaggaaccgatagctatagctaaccaggacattccttgacctacttaaccactttcattatggattttagcttcatctgttttttcatgaaaacggaaatctcttcaactctacaaattgtaatggtgtctcttgtcttcaatttgattcatctctaatccttgttagaatgtctgcttaaagctctcttgaatatcttccttttcgcaatctcaagtatcgaaattcattcctactttttgtgatttccactaccatgagtataaagacattactgaaattttattttctacgttcttctactgacaaaacctctgtttatcctttaatgcaggaggccaacaccggttgaggagatcttgacgatag

SEQ ID NO: 839 - DNA, 371 bp, Arabidopsis thaliana
  Intron number 3 from transcript AT5G03380.1 (locus AT5G033 80) derived from phytozome v7.0 (chr-ID Chr5; pos 833334 t o 833704 reverse strand)
agaagaaagcttctcctccaccaccacctaaagaggtaattaattcattaattgtctctatctgtcatttatctcttctaattaaagaattttataaacaaacttaaaaattcagatagcgaaactatatattaaaagtaatatatatttgtttttgtggtctataacgtgtgtgtgtccacttcgaaactttacggtatttacactcgttcaattccaaatatatttggatgactttttctatctttatataaagatgattcctttagttataattaagattttaactatgatcataatcgttgtttctaatgaaatttctttgatgtgatacagagtactgtggttttgaagaccaagttacattgtga

SEQ ID NO: 840 - DNA, 498 bp, Arabidopsis thaliana
  Intron number 2 from transcript AT5G05965.1 (locus AT5G059 65) derived from phytozome v7.0 (chr-ID Chr5; pos 1791363 to 1791860 reverse strand)
tcctgaagttcaaggcaacatctctcaagccactggtattgtatacagctttctctctttgggttgaatttccaaaatagttttcaaattttgtaaatattagaaaccaattttagggagataaattagtaacctctagtaatttatagttttctttttagggataaattaataagttatatcagggtatatgttgaaatcatctgatttaattatgaaagtaatattttttcatttactaaagatacacatcagggccaatctttgatctaacaaaaaaaagaaggctatttgagttttttttaaaacgtcacttagttttcaccaagttgttttacagaaatgttagttgcaataactctttctgcaaattatagaccttttgattctcatttcttcgaaagttaaaagtagaaaccaaaaaaaaaaaagtaaaaagtaagaaggtgttgatgatttatggttttttctttctttctttttgttgtgtttccaaag

SEQ ID NO: 841 - DNA, 490 bp, Arabidopsis thaliana
  Intron number 2 from transcript AT5G06800.2 (locus AT5G068 00) derived from phytozome v7.0 (chr-ID Chr5; pos 2104079 to 2104568)
tgtggagtgcgttaatcgtcttggtggcgctgatagtaagtcaataaccattacaagattttctcaacgatttgattgagctagtcactttgtatatataaagtcatattacctagtacatgctacaaaggggaccaatttaacttgctttggtcttcggtctgaagaactcactaaaacttagaacttcttggttacccaaaaaaagttgttagatatgcatatgaatcatgattggtcatgaataataggtgaatagaatataattgcatgagatcaaaagtcatcttacgcacatgtggattaataatttcctcttttgagaaaattatgttgcattatttaatttggatagatgtatacatctttcagtaaaagtaattacgtaattgttgtaaggatatagtaacttgtttctttggtgggtcactgataagtgtaagtggtggaaaactatgcagaggcgacgcccaaggcgatattgaagcgg

SEQ ID NO: 842 - DNA, 945 bp, Arabidopsis thaliana
  Intron number 1 from transcript AT5G07470.1 (locus AT5G074 70) derived from phytozome v7.0 (chr-ID Chr5; pos 2363008 to 2363952 reverse strand)
atcccaccactttgaatcgccaggtatttttggatccaagagttgaaagttttaacctttcaagttcggggattgagaaagattctgtctttaggattattgaatctattgggatgtgcctgagtctgttgtgctttggggatttcttgatttttctcaaatctgatagctttctgattttcatcaccagtctttactttgaaactttttaaatttggaaccttgatcatctaagtagaatatgaggaaggaaatgatattgaatcttgatttttgttgaattatgaggcttgagttggtaactttggtcgttgatcttagtatgatccagattatgtagtagctctgtaatctctcccctgttgctccctttttaattgaggtagagatacggatttcagagaggttcttcttgttctgttcatgatcattgattagcattggatttcatgtttgtttatattgatgttagtttggcttatcatttgtcttgcatctgtgcgcagagaactataatcatatgcaagtttctgctagttttgtttgagaaattcactagcttatagtcaaattatctcgttggggttcatagcgaagtattctcaaattctacgcatgtacgaaaccaaatcgtaagcggtctgtttaggttatatggttttagcaatttctgttgttgcaaactcgggacaactatctcgatgatgttaaccttgtgtattatgatgaaaaaaaatcctatttatgcttttttccgacaatttacatttgcatcttctctgactttcaatagcatatactgaccagtcttatgactgtttatctcatgagtttgaattctctgtgtttactatcataattttagtttaagtactcagttttctcggcagcctacttccatgctaaattgatactttgatttatgactttgctgtgatcagggaa

SEQ ID NO: 843 - DNA, 403 bp, Arabidopsis thaliana
  Intron number 2 from transcript AT5G11710.1 (locus AT5G117 10) derived from phytozome v7.0 (chr-ID Chr5; pos 3773156 to 3773558)
gagcaaaaggtgaatttatttgattcgtatccatatgtgcaaattgtatccatgattactaggcaaaatgatcgaaaactttctatagatttagctattgcacgaaaataaaaattgctagatcgaaaatcgacactaatcctgaatatttgagctggatttgttatgtttctgtgttcggatgctgagtttcttcacagttgctatttcctagagattagatccatctttgggactcacaaatatcgagttcatatttctatagaagataagcttgagccgtcatgtaaacttaaattggcggcaatgtttcatggattttgagtttgatcatctcttcaaattcagtattatgtgataccctttcataattatatatggctatgtttagtacaggtattgg

SEQ ID NO: 844 - DNA, 212 bp, Arabidopsis thaliana
  Intron number 1 from transcript AT5G15230.1 (locus AT5G152 30) derived from phytozome v7.0 (chr-ID Chr5; pos 4945074 to 4945285)
cttcaaaccgtaacacctctattatttttttcttctttcaatgtttgaaaatattgaagataatatatttgattgttttccttattgacgaacgatatgagacaaatgtgggttctattattgtacttttagttggaatatatttaatttagcctttttaatgaaattaattttacttgtttttcctctctctttttttcgttttttaggtt

SEQ ID NO: 845 - DNA, 395 bp, Arabidopsis thaliana
  Intron number 3 from transcript AT5G15230.1 (locus AT5G152 30) derived from phytozome v7.0 (chr-ID Chr5; pos 4945450 to 4945844)
gaccaggaagcctgaaacgtacccgtaagttttttcttcacagctattcttaaacaatttttttttaatctcataatcgacgaaaaataaacaattcaagaaatcttttattgtgttataataaaaaaaaataagcatttcagttgcagaaaataagttgaaagtgaagtgttaagtggactgtttggtcagatccgtagactcaaaatatattagatattgacgaaattgccccttaatatggtcatacagtcaaagcaacccactatcttgagacccacaaaacagtaaaaaaaaaagctaatgaatttccactagattctgttgtttttattagtaataaaaaatttttgagtgttaacattttgatattgtttgtatttgaaacaaccaga

SEQ ID NO: 846 - DNA, 549 bp, Arabidopsis thaliana
  Intron number 3 from transcript AT5G20350.1 (locus AT5G203 50) derived from phytozome v7.0 (chr-ID Chr5; pos 6877490 to 6878038)
gaagaagccccttgcattggtatgcttgctgcaaagcttgccttcgtgaaattgttacttagtaattggtttttggcttctttttattttttcttacaattgtttagccttgcacgcttatttggagactggataattggttttatttgttcccttttcttattattcctatagatttaatatctcttcgttcaattttgttctagttgccaagtatactgggtggattagaattaatttttgtcaactatttgcctatgatagttctcgagtttttgttatgaagatttgtgaatacgtattactgttttccatctagagactaaggttacataggttattttctctcccgtttttcttactgagacttcgttaccgttacatggattattctactgcatgatttttagctttcttatgttgaccttttgattttatcctatttttacagtatcttttcagaagacagttctaatttcgtctttatattcttctcataatttgagaaattcagggctgcatataaaggttttgcagattccattcgcc

SEQ ID NO: 847 - DNA, 557 bp, Arabidopsis thaliana
  Intron number 2 from transcript AT5G23760.1 (locus AT5G237 60) derived from phytozome v7.0 (chr-ID Chr5; pos 8013443 to 8013999 reverse strand)
gcagaaagccatagaagctgcagctgatatcttcggtgattatttcttcctactacttcttcttttctttaactactttttgattgaatttcaattcttgtttctgtttattattgtacttttcagatttttaggatttgaaaaaacaaaaagaaaggattaatcaagtttgctgctggtgttttcactcactaaattaccatttttagctaaagttatgtgaaacaatcggtatgaaatctagctcgattgtagtataattgcgtcagaatcttgagagcttggattatttgacctttttgacacatatagtcaacgaaatgatattctgaacattttgaaagcccgtattttatgggccggaaaaagcaggtttagtttgggcttagttaaggctgactcggtaaattcgaaaacgtattatggaatgtgttatagcaagtgttccatttgctttagatttaaaacgacgaatgtatgaccaaagatgatacaatgtagtagttcatatgctaagaggattttgttaagcaggagttgattccatagcagcggat

SEQ ID NO: 848 - DNA, 921 bp, Arabidopsis thaliana
  Intron number 1 from transcript AT5G49810.1 (locus AT5G498 10) derived from phytozome v7.0 (chr-ID Chr5; pos 20239609 to 20240529)
tcatatccaggacatctatctcgatcaatacgaaggtaacatcatcgatccgattctttgttgttcctctttcacgatccttgagaattgttctgtgattatttgtcaaatggatttgattcagctgattatactgatttggtgattccctgtgtgtaatctcgccgatcttacgttactttgtttagttgacttcatgatcgattaaaatgatctgatttctggcttcttttgcttgatttcccggagaattgggatgattccggtatcaatctgcgcttttgtttactggaatcgccgagtactcgaaaaacacgtctgcttgattgtctaatgaataggctacggatatagaaatttagcttttcgagatcttttgtcgttttcttaggattttagtgacatagtgaagaactacacatttcacttctttttctttttgcatccttttactacttttgttatctgtcattctcattagtttccaaaatgtgtcacatgtgtcatataccaccttcttagcattggaaaaaactgatcatggtttaaggtttgaattccagacttttgggaaaccatatgagctttaggttttacaaattcaatactgacactgatatttttttcttatatgatttgtgatcgtatttttagaacagtaaatttatccatagcagaaatttttacaaaacgttctgttgctatgagccgtattgacagagaggcatgatcatcaggagtttaagttaaaattgttttggatggtccttttttctttctaggaacttcttgcaatatatctctaacatcccattgctgcagatattggctaccttatgttcaggaaaccattcttgtatcagacaccaacatatctttatatttttttctataggctttcagtccaggaaaaagttaacc

SEQ ID NO: 849 - DNA, 984 bp, Arabidopsis thaliana
  Intron number 1 from transcript AT5G52120.1 (locus AT5G521 20) derived from phytozome v7.0 (chr-ID Chr5; pos 21178862 to 21179845 reverse strand)
tttgccgaccaaacctcttcgacaccggcacaaaggttctatactttccatcttttttttttgtcaaataatattaatttatgttttttttttgtttttctgtgtttagaaacttttgattatttgatggccaattacgtccaccttagatttttctttggggtgttaaaatattttccttcagagtggttattaaaaatatattatttggagtattttttgtcaatatgtctaatttatcctattatttcattttatgaccaataacaagtgttagaaaagcttctagagacagtagaatatgttctacgaatccattgataatgttagaaattcatgcctaaagtataatagttattcccatcatgcctaaatatattaactaacacataaaagctattactattttccacacttttcctttacctttttcttttcttttgaattaaacacactttcgttacattttgggtttaaaatttctttataatctaagcttttcgcatctttttcggtcgtaggatgttttttaataacaataaatacaatttgtatagaaagaggaactattaaaataagaaaaactgaaatgaatggaggataacatgcatcactagtttgaaagatattttcgtgactcggtttcattaccaattatatttagggaatgcagaggaaataaaattgaaaaatatgaataaaatctggttcatattatagataagtggttccggtatgtttggatttgacttgcaaatcatatcaaaatgctacgtttaaaattcgggcgatcggggtttgtcatgtgtacaaaagaaaaaaaaaaaaaaaagatgattcctatctttttaaaaatataaaaatattgtaaaagttggttgcgaatttttttttttttttttttggaacaaaggttgcgatttatttgataaattaatattaatataaaagtaaatgtttggattgtaatattgagaaggaagc

SEQ ID NO: 850 - DNA, 915 bp, Arabidopsis thaliana
  Intron number 1 from transcript AT5G52200.1 (locus AT5G522 00) derived from phytozome v7.0 (chr-ID Chr5; pos 21203802 to 21204716 reverse strand)
accgaaccaaagaggtaaataaattttattgttttgattgttttctcttagtttgaatctttgatgattgtcacgaaagatctatctttgattttagttttggtctttgtagaaccaaacataggctagggtttcttacagtgtctttcgggatatgttatgggtgaatgattgaggaaagtgataagcttttgatatcaattggttatttaggttaaaccctttctgattgaaaccattactcagcaaatttgagaaatttaggaggtttttgctttatagattttaggatactttagctcaatgatcatgagagaggtagatactgattcctgcttcttcgtatttaaaggtttgtgattttgagtggtcagttataccattgtgttcttttgtttggaaagttagcagattggattgattttgatggatttctttgaagtatgtttctccttttcaaatttttactttcgcttgtgtctttagtttctattagatttgagaatgcttgctgcatcagaacggtaccttttcaatgtgttcaaataagatcaattgtgaagtcaatgggctgtgttatgtcatttttgtggagggatgtatattcatagatatgaagttctaagccttatatggcggtctttttatgaaggaatcgtaaaacagatatattttctactacacccattgaaaaaggaaatggaagagggaggtcttattgtgttaatgttcatggattttcatattccagcagaattgtttaactgtaagattctgtgaactttattgtctttagtttaaggcttagacatcgtcattcttttgtaaagagaggtgatcttttgtataatctagtatagtttctcatggaattgtcactaagtatgtttgttattatggcagggggcgtgttca

SEQ ID NO: 851 - DNA, 934 bp, Arabidopsis thaliana
  Intron number 2 from transcript AT5G59990.1 (locus AT5G599 90) derived from phytozome v7.0 (chr-ID Chr5; pos 24151375 to 24152308 reverse strand)
aacgaaaccttaggaatttcaacaagaggattaaggtaattttataaatgttttacagttgtttctttgttctaaactgtttgttagcataaattcttatatcttattttaacatataagaatttatcatttgattcatattgttcttcatcacatagagtccatgtacacctaacctatattatatattcaacatgtgtatatatgtgtcgcatggaaaacttttgaggacttgacatgtacagtagttgtatggaacagtgacatgcaccttcacatatattgatgcaaccattttctaatcaagcatacaatttcctataaatttcttcattaatcaactaataatgatttctgtataatttcatacacaagagcatatataaatgtctattttcttaaaatcaaatgtataagatatcttttcttagtaatactgtttttttttcacatttaatacaaaactaaatggttcgttgaccaaaaaaaaaaaaaaaaacaggctcaatgtatcatatcaatcactcttatcactaaaaagtaacattgaatttttcttttcaatcttatcttcaaacataaatagaatttcatctgatatatatgagtatgtgaacgagaattaatgttctgtcacatcatatttgggtctaaggaatcctttgagatagacacatcaagctccaaggttgctacaagtttttttctccattagttttttcttacaagaaggtccacaaatatatttcattgctaattaaagatcggattggagtattcatgtactaacatattcaaaccgtatctcaatgagatatttctgctcgcgttataattttttgaccgacaagttttgacttgtgaatgatctaaaaactatcacaatactttgggacaggtttaataataatcttttatctttctattagtacga

SEQ ID NO: 852 - DNA, 317 bp, Arabidopsis thaliana
  Intron number 2 from transcript AT5G62300.1 (locus AT5G623 00) derived from phytozome v7.0 (chr-ID Chr5; pos 25021819 to 25022135 reverse strand)
tcaagaacttggaaaaaggtctttcttttttatccttttattttgattatcttatcatttcgcttcagcaatttagttttgagctgctttcaaaaccgtaaagaatgtttgaggattcaatgttttcctagttttagtgaattttgaaggtttagttttttcagtagaagatgatagatttattgacttcgatttgcttcagtgatgattcgaatggtttgagagtggacattttgatactgatttattgttattgttctgtttctacaaaatgatatgtagtgtgtactgatttggttcgtggagctaaggacaag

SEQ ID NO: 853 - DNA, 933 bp, Arabidopsis thaliana
  Intron number 2 from transcript AT1G05320.3 (locus AT1G053 20) derived from phytozome v7.0 (chr-ID Chr1; pos 1553915 to 1554847)
cagatttcgatcgatcatcttttcaagtattagtggtaaaactcaacgtctctttgagaaactcaaattctttgtttatattaatcgccgttagttttccatattggattgtactattaaaaatttaatggtatgtggtaaatctttgatttgatttctttcaagatttaggtgcaactttcaagagatgtctttattgatgtaactggttttgtgagtcttttagcttagtcgaatttatttttatttttgaattttattcgcctgcaagatcattcaagtgctttaatatagtgttcattttttttaatttatgataatgttttttttttaatcaaatttttggttagaattccacatgttcttataagagagctactagtttggtgagcatttaatatgtgttttttttttatttgttgggtagtttttatttattgacatcataaagtttgatcacattgtaatttagatgatcataaacctattagccagattaaaaacttgtgaaaatacagacgttgacctttatttggagatcttccaaaccttctcaattctgttttctcttattatatttgaaagaatgttgttggcaataataaatccaccattgaatatcgtattattgaatataaacaatgtatatatatgctctctgtcgtcacaaggagattatcttatcttgttagttattttatataatctctggggaaatggttttcttgcaagttagggctttatttttcgctttaaacaatgaaattgttgcggttggattgttcaactgaacttgatcatatttcttgttgattattgagactttaacgtgtgacatttcattcatatatacaaaaagtatactctttaacaccaatttaaagccttaaattctcagcggttgcagaacacaaaataagaggaattgcttga

SEQ ID NO: 854 - DNA, 585 bp, Arabidopsis thaliana
  Intron number 2 from transcript AT1G29320.1 (locus AT1G293 20) derived from phytozome v7.0 (chr-ID Chr1; pos 10255613 to 10256197)
accggttaaggaatccggtaaaaagtttcattcttttcatgtttatgttaagctatgaggattgaatctaggcgtggcttagttatcaggttcagattgatatctactgctgaaatgagctcattttttgaatttagcttataagatttgaatttgtgattcttggacttgaagatcattgtattaatcttgagccaaatttgaggttttcgttagattcctcgctctaatcagactgttggtagttttagtttattgttttgctttggcattttgaaccacgagttttggctttgttttggttgcaattgagaacttatcggtaatatgttatcatttcgtttgcaactatgctacagtttcataatctctgactccactgttactacaagatagctcttcagattttttcctcctttcttaagcatacatgataacatctatgctttggaaatgtattagcaaattttgagttcttaactttgatttcttcttgtttccgtatttgcgtcaaaatggtaactcataactttttctctctttttcttttcttccaattgcagcttttggctgttgcaagaaaag

SEQ ID NO: 855 - DNA, 1018 bp, Arabidopsis thaliana
  Intron number 2 from transcript AT3G05165.2 (locus AT3G051 65) derived from phytozome v7.0 (chr-ID Chr3; pos 1461429 to 1462446 reverse strand)
gcacaagtatgtaatttgtttttttttcatttcttagcttttatcactataaatactcaattaatccctaattaattatgcttaaaatgcataattacacctgtttatgaactaaaacatcagctgcttgtaaatcttcttgtatggattactaaactatcagacctaaccaggtcggttatgaagaaaatcaaatggataatcatacgcaattacgtgtaaagacgtcattgataaattatagcttcgctactgaaagtgaattattattatttattactattattctataataaatattatcttacgaattatttattttattgcggtccaaagttaactatattgagagaccacatgtacagacgttctgagagatgcgtatgtgaatattagagagatacgtattttaatattggaaaatgaatattttcccatatataaagtattatatttttaaaaaaacaaaagtgaatattatgaaaatgcgatatgatagctgttttgtacttggagagatcagagatgcattcatgcatatgtgacgccgacaccgtatgtcatatttgaacatgagcaatattaaaatgttgtatatagctgtattttcaattatattaataattatttcagttatcgaatatagttcttctgacaaattttaatatgataggtaaactaatcaaaagatcacacgatttacttacctaacaaaaaaaagttagcaaacagcatagcattttaatttgaattaattttataataatcaaatagtatacgaagtacttagaaatgtttacaaaagctttttaagtactactgttggaatttttgaaaaaaagttgaggtatttaattcttaaaaattaagtatttgtgattagtaactctttaccacacaacttactgctaacttttttccaccattttatgtaatcgataagtattttaaggctaatttttctcaataactaaatcacattttctaaatcagttttcagcgtttggctcctttctga

SEQ ID NO: 856 - DNA, 896 bp, Arabidopsis thaliana
  Intron number 1 from transcript AT4G19410.1 (locus AT4G194 10) derived from phytozome v7.0 (chr-ID Chr4; pos 10584767 to 10585662 reverse strand)
ctaaccaaacaagaagaggactccattttcgcaaggtatgcttcatttgtatcgatctttttatagttctgcaagtttgatatgtactcagaataaattgaatattttgttttagtcttgttagttagaactacagtatatattactattagccatttaggatttcaagaagattgcatattaatatcagatcattaatgtgaatgacatcgaaggttacttcggggaattgataatttgaaacgattcaacacatttctctgcgatccaacaagttgaatatgaataaggggatgatatgatttttcttacatagtaaaagttgagatgatgtgaaagggtatttttggtatctcaagatacaagcatcccataatagcgattagcaatttttttttttttttttttttttgtcaaaccgattagcaatgttaagtaatgaattatgatagatttgtaatgataataattgtttagtgctctacactctgagcaaggttataattacagacaactagaaaagttggtctgagaaaagctataagatatttaaagacgcacatggacgatggatgtctttttgtttgtttgttttgttcttggctagttatcacatttgacatttctgataatctacttttgaatagtctaaatttccaatttgtaataacgtggattcgaggaatcttaaaacaatggattacataatagtataattataaaaaatattatccactcgaaaatgtaggtaatttcaaaataaataaatttgtcagtccgcatgttaccatatgaaagcagtaattaattcgcattagaaatgtactattatattattattgaaattaaccaaatcgtaagcttgtttatttatttattttccaaaaaatgataga

SEQ ID NO: 857 - DNA, 441 bp, Arabidopsis thaliana
  Intron number 2 from transcript AT1G01070.2 (locus AT1G010 70) derived from phytozome v7.0 (chr-ID Chr1; pos 39807 to 40247 reverse strand)
cctgcaatcaccttcgctttggcccttattttcaggtaacgatggaaccatctaacctctttatcatcaattgataatatatattaatctagatttttaaaaagcactactgaaagtattgacaacataatatagaacattatattttcttattaattgtaatgcaatctgattggttttcttttccatcaaattaccttaagtatacgtaactgcatccactgagccctctttctaaagcttttcctgaaaaaatgtcttttcttagctatacgtcgcatttttataaactttgatggaatgatgcggaaaattattaaaaagcgactctattttgtaacgccaggaaagaaaaaaaacaaatactttctactatgattcatattctcaataacttgtttcaaaataatcattaaaattttactttttttaggactgaaa

SEQ ID NO: 858 - DNA, 150 bp, Arabidopsis thaliana
  Intron number 2 from transcript AT1G01695.1 (locus AT1G016 95) derived from phytozome v7.0 (chr-ID Chr1; pos 253660 t o 253809)
aaggtgaattcttggaagaggcaagttcacttttgatttctatacaaatttttacatgaaaaaaacacagagaataactataaactaatttggttgcttttgtttcttctaacagacactgtctctcccctctgtgggctcaccatctca

SEQ ID NO: 859 - DNA, 306 bp, Arabidopsis thaliana
  Intron number 2 from transcript AT1G03250.2 (locus AT1G032 50) derived from phytozome v7.0 (chr-ID Chr1; pos 794628 t o 794933 reverse strand)
agaaaattgaggcccttgagagcctggccggacaagtgagtgcctttttcactcttgtttgattttcttcattacattttctgggaaatgttgtctatcgtatcggacagccaaaattgtgattctgttagtcagtttttttctgattaatacttgagatgtgattttcctgtatttcttcatctaaaggttgcttatttaagacaatgagattgattttacttgagatgaataattgaggttgatatacttgtagctaatgagtttttttttgctaatgcaggttagtaacaggcgatctcggag

SEQ ID NO: 860 - DNA, 508 bp, Arabidopsis thaliana
  Intron number 2 from transcript AT1G03470.1 (locus AT1G034 70) derived from phytozome v7.0 (chr-ID Chr1; pos 866936 t o 867443 reverse strand)
taatttctctccttggcttcattctactctctctggtaaaaatttctctttttgggttccaagaatttttatatatttacttatgatttgattcttctttcgaattcgaagtgttgattttggtatatgtgtgtctattgatttcaaaggtaagctattgcgtttttgcttgatgaattttagtcacaaagctttgttgttgttggagaagatgctcttctcttggtatcttctcttggtatcttatcggtatttagtttcatcaaggtttgacacgtttattttggttcttttaatgtcttaatccaagtgttgatattggtgtatgggtctttggtcctctcaaaggtctttggttatcaagatacttgttgtaattgggttataatagtcgtagatgattctcttttggtatcttatctttctgagactaagtaatgatacacaattatttaacttcattgaggttttgacatggtgaactttgattgtgttattgaagaattgg

SEQ ID NO: 861 - DNA, 230 bp, Arabidopsis thaliana
  Intron number 2 from transcript AT1G08660.2 (locus AT1G086 60) derived from phytozome v7.0 (chr-ID Chr1; pos 2759211 to 2759440 reverse strand)
tgtcagattttcagtccagcgttcaacagtgcgtggtttgtctcctttcccagtttctttgattctggacttgttacttttctatatggattcttcggatttggatcgatgccacagttttggtttattatggcgcactagttttgattttggataaatcagatgtgtttgggagttacaataatgttgttgcaggctaacagagggcttggactctctgcccatattat

SEQ ID NO: 862 - DNA, 585 bp, Arabidopsis thaliana
  Intron number 2 from transcript AT1G09790.1 (locus AT1G097 90) derived from phytozome v7.0 (chr-ID Chr1; pos 3170025 to 3170609 reverse strand)
gggatcttcttttatcatcacctggccaacaccacgtaactcttcttccttctcttgtttttttttattcctctccatattttctcgtaagttttatttctgtgtctgattataggacccgcatgagcctcagataatctggggttcctttttttgttcttgggagaatctgggtttataaaaaaaaatacttaatgatataacaaaagaaaataactaaattagtgtccgaatattaagcttgagacgaagaagttactcaaaagtttgttttgtttcctgcaaagttgattttgtcaaaatcattttctgattataaaaagcttgtaaagtttggttttcttttctcgttttttttgttctcttgacgttttatgaaatctgttatgtcttataaagtaatgtggcccttgttcaatgatgattcaaatttattatatattgttaagtttaggtttactgattttacctaaaattgaaagatactcctacattaattttgcaaacgaaaaagtaaaaactaaagcttataatgcttggaatgttgaaaatgtaatgttgcaggtacaagtaacgttagagaac

SEQ ID NO: 863 - DNA, 433 bp, Arabidopsis thaliana
  Intron number 3 from transcript AT1G12600.1 (locus AT1G126 00) derived from phytozome v7.0 (chr-ID Chr1; pos 4287554 to 4287986 reverse strand)
ttcaaatccactaaggtatataatatttcacttaaccaactaatggtgtatatatatactatagatttttatttaaaaaaagaagtaatgcatggtatagtccaataccatcattagttgagcgagggatcaaagtttagattaatctctgagatcaatttcgttcaatatatatagatcattgcatttgtttatctcggctttgtaatcaaagactccttacattattacattgtcagtaacggtttgaactcacatggattttgtatcaataaatgttacggtaggaatttaaaaagtcacattcttgtttaatcccaggggtattggttagcaagatatgttacattttcttaattggtgaatcattgtgtaattctcgcagtatctcttaacattgatttcttcctctgttatctaggttttgccggtt

SEQ ID NO: 864 - DNA, 393 bp, Arabidopsis thaliana
  Intron number 2 from transcript AT1G14620.2 (locus AT1G146 20) derived from phytozome v7.0 (chr-ID Chr1; pos 5015678 to 5016070 reverse strand)
agttcttagacattgctaagaacaggtaaaagtttctgtttttctcaatcttcttttgatatcatcatgtgtccaagcatataatctgctcgaaggtttcttctgcattcaactttgtgtcatccttgttagttattatgacaatagcaaagaatgttagattgggagtttttccgagtagctccgtgagttattgttgctcaattcttcagcagaattaccttgcctgaagtgaactatattagaagtgttacatgctcatagatatatagtgaaggttctgtataggtcagtttcatttttctccaagtgcggtgaagcttctatgaaaatttcatttcgtctttggttaatcttatgatacgtgaatacagagccaagggtgaataccaa

SEQ ID NO: 865 - DNA, 579 bp, Arabidopsis thaliana
  Intron number 3 from transcript AT1G15270.1 (locus AT1G152 70) derived from phytozome v7.0 (chr-ID Chr1; pos 5250879 to 5251457 reverse strand)
aggaaaaggtgagttcccactttgatgctctgacttgttttctctttttgttcatatgaagttttgtgattggaaaaatgcatctagttaaacttatatgtttgggctcctctttcaatggaaagctataaaatacgaatcaaagattgtatcttcacaagagagcttctgtttagatacataggtttgtaaaggttttgtaaaggttgtgcattaatatgttccactttgtcagtttggtctactaatcaagctgactctaattatgactttatagctggtgactacaactagatgggtcatttctattaattatttgttagtttaggggtattcattacagattcttttgagatgatatggactagtttcttcttactttgatgaaatagtgaccatttgcccatgttaggatgtttagtctactttttttccacccaattgtgtgaaagactcattagcctttctttcgcatgagaagtacagtgatcatttgttaccgaaagcctgacctgttttgttttgaatgaaaatgataaaacaggcccttaaagagcttagagccaaggcatcgcagaa

SEQ ID NO: 866 - DNA, 422 bp, Arabidopsis thaliana
  Intron number 2 from transcript AT1G20220.1 (locus AT1G202 20) derived from phytozome v7.0 (chr-ID Chr1; pos 7006753 to 7007174 reverse strand)
gctcttcttcaggtattgcgaaaagatgatctggtattcatggttctatgaattggtgtagtgatgagatttggtacagtgtagattatctatatgatataattgtaagttcaaaaaatgcggtttcataatccagttgcatttatgttatttggatgcatcttggtgatttatatcaatttcttacgtttcgtgtcggatttagtagaaaacttgtacatgaatttgctttctcaaaagtgcaagttattgattaactgttttctttaattactttctcgctgcttgctattcaaacttttttagtacttagtcatgtgattagttgattttttgacatagaaattttgcttttgcttcttcttgaaacttttgtttttgtaacggaagttgttttgttatcttataggaaaacaaatcga

SEQ ID NO: 867 - DNA, 566 bp, Arabidopsis thaliana
  Intron number 3 from transcript AT1G21690.2 (locus AT1G216 90) derived from phytozome v7.0 (chr-ID Chr1; pos 7616073 to 7616638)
actactgctcttgccatcgctcaccagctctttgggtaacgtattcatttgataatttgtgatagctgaaattcggatgactttttgattgattcatttgtgtgtacttagtttgtatgagaccttgtgatctctaatatgatacattcagatttgtgattcaaataactcggtttttttttttttttatgtagaagctgatataatatgcacactcagactctgtggttgcataatgatataccaacttctcccattaggtagctagacagtataccaagatgtgaattcataggaatagtaatcattatgatttttctatgtaagtggttagtttttgaagctgaattgtcttgttcttctttccattgcctccatgggtgtcgtcccatatgagtcggtttcagcttcttttgagagtaataatcacagatttattttcatgagcctggccttgttttgttatttcattttgctatattatgtggatttttacaatgggcatgtgaactaactatagagtgtttacagacctgaactatacaagtctagggtgttggagctta

SEQ ID NO: 868 - DNA, 566 bp, Arabidopsis thaliana; identical to SEQ ID NO: 867
  Intron number 3 from transcript AT1G21690.4 (locus AT1G216 90) derived from phytozome v7.0 (chr-ID Chr1; pos 7616073 to 7616638)

SEQ ID NO: 869 - DNA, 533 bp, Arabidopsis thaliana
  Intron number 2 from transcript AT1G26880.2 (locus AT1G268 80) derived from phytozome v7.0 (chr-ID Chr1; pos 9315895 to 9316427 reverse strand)
tcctgttactggcaagcgtattcaaggagtaagtcttctgatttcgatttggcttcgtgtgatttggtttacatggttcttgtatctagagtcttgatttgaggtctagatagagttaagagtttgaattttttaggaatttgatggctatgtataaccaaatcaatcagattgagtgttttagaatgttttgagtattgatcagtctcatttttaatgggcatgtcttcttatttcaagaaaccatgttacttagttaatagtattgtgcttattgacggtcttgtgctgattagataaatcccacatcagtacataacataaatcataagctaaattgtcggtgccactttgtctttcaagttgttccttgtattacataaggatttgctatccacctttggcataaattttcagtttattcccaactatatatgtttgattatgcaatggcatattccttttgcattatgtgaataactttgtttgtttattcagatccctcacttgaggccctctgagtacaagaggtc

SEQ ID NO: 870 - DNA, 380 bp, Arabidopsis thaliana
  Intron number 2 from transcript AT1G26976.1 (locus AT1G269 76) derived from phytozome v7.0 (chr-ID Chr1; pos 9365218 to 9365597)
gagttgtgatagaagttattctgttgcttccgtatgtgaaaaattaccgctagagctgctacttgatgcatacaatgaattttatttaatgtactattatactattattcagctgaagatgtttttttttgacaaattgttattgtaactttcattttcttgcaagtatatcacacgtggaaatatgtatacaagaggttgacatatataaggttaaaaaggtcgatttagtttctctatattgttaaaaggcatagagaataatcctcaaatcctttgagacagagatagagagcgatcaaagattatggtcaccaaggagagcactttgaagtttgaatatagacgcaaattggggttaaaggaaagagtaaactaga

SEQ ID NO: 871 - DNA, 162 bp, Arabidopsis thaliana
  Intron number 4 from transcript AT1G27470.1 (locus AT1G274 70) derived from phytozome v7.0 (chr-ID Chr1; pos 9543108 to 9543269 reverse strand)
ggtgaggataatttattttactttgtatgatatgcaatattattatttactttccttagagatgcatttttggtgtgcaagaagacccctggatgttctttgatttggctaaagttttaatttttttttttgtttttccaacaatatttgtaggctgataag

SEQ ID NO: 872 - DNA, 246 bp, Arabidopsis thaliana
  Intron number 3 from transcript AT1G29220.2 (locus AT1G292 20) derived from phytozome v7.0 (chr-ID Chr1; pos 10211366 to 10211611 reverse strand)
caataggtaactccacctttttgtagcttcttcgtttttttcttctcttttcttgtttactcttgtctcagtaagaagcatctttgatatcttttgcttataattttgatactctgttcagtatcatgcactcattattactttagtaaattattgatgctggtcactattattactatattctgcgttctccatatttcatgatttgtaatgatccttgtttatgtgttaattacagaaatcgac

SEQ ID NO: 873 - DNA, 490 bp, Arabidopsis thaliana
  Intron number 2 from transcript AT1G30440.1 (locus AT1G304 40) derived from phytozome v7.0 (chr-ID Chr1; pos 10759777 to 10760266)
tcttttcatctccacaaggtacaatttgttaaaacactctcttctcgaaacactgtgggatattattgcatttatctggactaattattggtcttctagaatgttatgtccttcggcattgtaaatatctgtactgctaatgtatcaaagttgtgtttggtttctattttccttttcatacattgtgttttatcagtcttgtggataaaaaaaatcgttactgctgttccttgaaaatttggttttgagctctttattttcttctaatgactaatcaccagtgtcttgcttttggttcctacaaaactcaattcagtatctgtagttttggcaatgccttgcttctaataatgagaactcttgactcttgttgtagaaatcagtctctactaagccttctctttgagaaagaatgttattacttgcaatctctcatacttatttttaaaatggctatctgcagtttcccttgctctctagaagtggagtc

SEQ ID NO: 874 - DNA, 473 bp, Arabidopsis thaliana
  Intron number 2 from transcript AT1G34460.1 (locus AT1G344 60) derived from phytozome v7.0 (chr-ID Chr1; pos 12595682 to 12596154)
aacacttgggacagcgattcaccggaaaatttccggtctgtaaacatcaaaaactttctctctctgaaagttatgtgagagagaacagagttttatttgaaattgcggtttacaaaaacaaatcggaaaccacactacacaacacggtattgagaaatcatatattagcccatgtgattcgaaatgtatttttgaattttgtggagtgttttaagtttaacggacacaaaatatccagatcagggggaaaattctcattttcaattttgaatccaaattgtttaacggaataaacaagggcatttcgtaattacatataccaagctttttccttttctctccgcaaactattcatttcatttctctccaagattttaattttgtttttgattcatcgatcatttcattcacttcaaaattctcttccgattattccagaacagaagcgtgtgattgaatctgggtctgttgct

SEQ ID NO: 875 - DNA, 519 bp, Arabidopsis thaliana
  Intron number 4 from transcript AT1G47830.1 (locus AT1G478 30) derived from phytozome v7.0 (chr-ID Chr1; pos 17613538 to 17614056 reverse strand)
tttgtgagctagatttggtgtttaatttccacaaggtacttaacctctttacttactcttatcctttgtaaatagcttctggaactgcttcgttggattcataactttaagttgtgatgctgtacaacaactggttttgaataaacactgggattttgctttgtcttttgagtattgaatgcttacaagttttgaactagttaagtgaattctcccagatgttttaaaatggttttctgagaattctcatatattaagcttacaagggtatatcaaactaagcttttgtttgcgaaaatcaaaagctagtttcgttttcttctcagtatacttgtcccaattctaagctgaccatcgtgacccattagataaatatctgtatgcagccttgaaaagcattccctatttgtgtttatatatgcagatgctacagtgtttctagatttgatctgtgtttgtactctaataattgctaactagttccctatgacttaaactgaaaggtgtacttgatactcg

SEQ ID NO: 876 - DNA, 915 bp, Arabidopsis thaliana
  Intron number 2 from transcript AT1G48260.1 (locus AT1G482 60) derived from phytozome v7.0 (chr-ID Chr1; pos 17815997 to 17816911 reverse strand)
aggtaataatactacttgtaatgcttcattttatgtagaaactcaattactgctcgaggcaatatgaattcgattcaaattttggtatcagatttttgagatatactttgattaaacgataataatgttttgatgaaagaccaaacattaaacctatgaaagtttttttgttagcttgcgtagaacggtagaagtatattaaaaagttaaccgtcattttggtaaattaatatattatttttcgttttgtttttttgtaactagttttattcgtgaccacgcaattgcctcttcacgttgcttattagccctacgtaacgtatacaataattattttcaaatactttgtcctcctgactaattcattggcagtcgacaatagatgtgatgaccatgacctattcaattatgaggtaggtcccaaaaaatcgacccatttggggtaatgaccatggcaatgcaatcatcatcacaatttccttatcgttgggattaaattccaatctttttcatgcttacctcataagcgataactgttaaatcttactcaaaactcgttttctacatttcaattacgtgaacacactttaatattttcaaatggtatttgctggaatgatagtggttgacttcaaaaaatttcaaaatcagaatgtctacattgacgattacttatcttgcaagcaaccaataaggtttggattttgaattaacggagacttggtcctcgtttttttttttgacaatggaattttattttttagtgtagatatatcacgtttgttcttcctaatttaggattctcctatctctttcaaaaacatccctaaaggcctaagcagattataatatccttgatatgcacaattctttattgttcacttgtaggtcttggctagcaaaaccaagatttac

SEQ ID NO: 877 - DNA, 274 bp, Arabidopsis thaliana
  Intron number 2 from transcript AT1G48660.1 (locus AT1G486 60) derived from phytozome v7.0 (chr-ID Chr1; pos 17997288 to 17997561 reverse strand)
taccttttggctgtatcctctctcattacttccaagtaagtcctttcttaaccgttgctacacaaattataagttataaatattggctcatagattttaatgatttagaaatccaaagaaaaatcgtgttattttaaaatcgtttgtggaatcatttattcattaattgattcaaaatttaattaatagatatttattttgttttttgttttcttagcttccacgactaagattgatctcattctactttatagacatttcagtgacaaggtag

SEQ ID NO: 878 - DNA, 253 bp, Arabidopsis thaliana
  Intron number 2 from transcript AT1G52440.1 (locus AT1G524 40) derived from phytozome v7.0 (chr-ID Chr1; pos 19539261 to 19539513)
agcgttcctctgagtaacatttataccacatgacttgtttgtattgtttcatatctttcatttgatctaatccaagttaattatgaaagaaaaaaattcgtctcatatgaacgaaatattttcttacattaattatagaaactttatcttcgcttcttaacttttaatttttattttatttcgttgtttctcttattatgtttatattctttttgcagttcacttcagtttgtggaacaattgaatcttaaaa

SEQ ID NO: 879 - DNA, 265 bp, Arabidopsis thaliana
  Intron number 3 from transcript AT1G56070.1 (locus AT1G560 70) derived from phytozome v7.0 (chr-ID Chr1; pos 20970651 to 20970915 reverse strand)
tcgaccacggtataatcttcatcactttttttgtactattcttgtcagttttgatctcttgtttgtttactgaatttgctggtcgaattgtaatctgaatctaatgcatctctttatatactaatgtttatagtctgttttgaaattaatagcgtctcttatctgttttctgagtttgctgaacgtttaaaaaagtttaaactaatgcatctttatttcatgatcaacagggaaatccactcttactgattctttggttgctgct

SEQ ID NO: 880 - DNA, 564 bp, Arabidopsis thaliana
  Intron number 2 from transcript AT1G58320.1 (locus AT1G583 20) derived from phytozome v7.0 (chr-ID Chr1; pos 21634499 to 21635062 reverse strand)
gaggatcgctgagatccttgataaaggagaaacaagtacgtttctgatttccattatacagtactactattaaaataaaaatttcacatattcgctaatgagatgaaatggaattaaaagaaaacatatatgtagatcggttattatcaatttattttgaattggaatttatccactttctacttatcttaatagatatatttttatgaagtaaaagagttagtacaacttttaaatgagatggtagataatttacgcgaaaatgacaataataatgttatatttacagggttgatagaatatcatactttcaaatagttcattgttacaaatactatataagaaatagaagaacaatcttccaaaacaatcttgcagatgtaggaaatattacttatgattaaaaatataatcaaaggtgaaaagtactttgaaatttaaatactagaaactcaagatggctttataaagaacacgtgtaatgttttttgtatattcaaatcgtgttacaaagttgatttattaataaaaatggattaaaaaggtcgaggacttgctggatta

SEQ ID NO: 881 - DNA, 251 bp, Arabidopsis thaliana
  Intron number 2 from transcript AT1G60430.2 (locus AT1G604 30) derived from phytozome v7.0 (chr-ID Chr1; pos 22265461 to 22265711 reverse strand)
gatatcgcttcattgttcaaattcggcacaaagtacggatcaccattttcttatctttcaattagcattaatcgcatttcattttgtaactaatgaaattagattagatcttcgatgagattttttttatttattgagcttgtttcactttgatttggttccatggagtatttaactctgcgatgctcattttgtttccttaatccttgtgattaaatgctctgatcaggtttatcactcgagttttgtgg

SEQ ID NO: 882 - DNA, 453 bp, Arabidopsis thaliana
  Intron number 5 from transcript AT1G63830.3 (locus AT1G638 30) derived from phytozome v7.0 (chr-ID Chr1; pos 23685971 to 23686423)
tcctcaactttgccttgccactgaggtgagacttcgattatttctgatttttttggtgaatgtaacattagttttaacatcagtgaatgacactcgttttgtttgtgtaaacttattgaaatggaaagtggaacatgaaacagtttatgatttggatattttctttttctcgtagttgtgtcactgtgtctttctgggacatctgttcaaatcttatataatgtgattccgtcatctttcctagtttcctctgctctatattagaattccgttgctcaacttatttgacttaggagatcacattatttaccgatgagtgtgatgttcttgatattttggcatttaaaacctgcttgcaataattcaatagatctcttcatgattcttatgaattagcatttgcaattgaaattttcaggtcttcctttgcttcggaaactctgtggcctctac

SEQ ID NO: 883 - DNA, 673 bp, Arabidopsis thaliana
  Intron number 2 from transcript AT1G63970.1 (locus AT1G639 70) derived from phytozome v7.0 (chr-ID Chr1; pos 23739148 to 23739820 reverse strand)
aaggagctgcttcttctgtattcatcaaagaagctgtaagatttcgacgcttaccttgatgttcaattttgtgtgtatgttccagtattagctacttcttctttaagccttattttgtgtgtggtactttatagaatggttcagaattcaagctagatccataagttgatgggatttactcagcttaataatactcttgagtaaattattttcatctataggaagtcgaagaaatatggaaatcagatcttatccctgaactgttgtcatcactcaacgatgctatctataagcttatcactcttgtatacatgatttttgtcttgaaaagccttggcataactcaattttctgttgaattttaggttcctgcatctttgtattgttagatttcaacacatatgattgatgataagtagaggtactcaaggttgaagctataaagtttctttcttgtcctgtcttttaagttatgggttcacatttggcgtaatgtgtttgttaagttcaccatgattgactgtgaatgttgattgcgtggaagctaatctgaatcacttgtaatgatgttatatagatataacagaagaaatgttagattctcgtcggtatgaagaatgattcaataaacttgagacgaggtttatttgactttgtgtttcaggtgagactc

SEQ ID NO: 884 - DNA, 757 bp, Arabidopsis thaliana
  Intron number 2 from transcript AT1G64230.3 (locus AT1G642 30) derived from phytozome v7.0 (chr-ID Chr1; pos 23833827 to 23834583)
tctccagaaggatcctccaacttcctgcagtgctggttagtctttacctctcctctcgtaaatcgtgtctgatctatttttgagctttgttgttagatcttataatcttatctttaagcaaacaaaaaaatgaaatcttttttagtcttcgtaattttataacgaagttatctagagatcttgaggtggtaattgccgctaagttatgatcttagtttagaagataccaattgaaagttgagatttttcttagaacagaacaaatttatggctgtactgatccttgattgaaaattacagctttctaataatcatagtctagaagatagctgttaaaaattgggatccatttacccatcctggatactattgatcataattaataagataacagttggaagttgagatttttcttagaacaaagttgagattggtcgttgcagttatcttatgatcatagtctaggaaatagctattgaaagttgtgaattttcttagaattaagcttttggtgttgtatgctgccttgtttatccaagtatccataacggatcttacagacttgatacctcgcactgatagtctttcttagttatctattgcattcaggtttatacatgtttgttttgtttattaaaatatatgataagtggataatgcgtcgaaattgttggtcttaatagagttagaggattgttgtcggagattctcaaactgttcatgcattcttctgctagagaagtctcaggacattgct

SEQ ID NO: 885 - DNA, 882 bp, Arabidopsis thaliana
  Intron number 2 from transcript AT1G64230.2 (locus AT1G642 30) derived from phytozome v7.0 (chr-ID Chr1; pos 23833827 to 23834708)
tctccagaaggatcctccaacttcctgcagtgctggttagtctttacctctcctctcgtaaatcgtgtctgatctatttttgagctttgttgttagatcttataatcttatctttaagcaaacaaaaaaatgaaatcttttttagtcttcgtaattttataacgaagttatctagagatcttgaggtggtaattgccgctaagttatgatcttagtttagaagataccaattgaaagttgagatttttcttagaacagaacaaatttatggctgtactgatccttgattgaaaattacagctttctaataatcatagtctagaagatagctgttaaaaattgggatccatttacccatcctggatactattgatcataattaataagataacagttggaagttgagatttttcttagaacaaagttgagattggtcgttgcagttatcttatgatcatagtctaggaaatagctattgaaagttgtgaattttcttagaattaagcttttggtgttgtatgctgccttgtttatccaagtatccataacggatcttacagacttgatacctcgcactgatagtctttcttagttatctattgcattcaggtttatacatgtttgttttgtttattaaaatatatgataagtggataatgcgtcgaaattgttggtcttaatagagttagaggattgttgtcggagattctcaaactgttcatgcattcttctgctagagaagtctcaggacattgctatggcacatgttttgttgtgtgtatttcagtaaatgccatagatcatcatgtttaaaagactaatctttctattttttccttctatgaacaattgtgaaatcttcaaggcccagttgctgaagac

SEQ ID NO: 886 - DNA, 656 bp, Arabidopsis thaliana
  Intron number 2 from transcript AT1G64230.5 (locus AT1G642 30) derived from phytozome v7.0 (chr-ID Chr1; pos 23833827 to 23834482)
tctccagaaggatcctccaacttcctgcagtgctggttagtctttacctctcctctcgtaaatcgtgtctgatctatttttgagctttgttgttagatcttataatcttatctttaagcaaacaaaaaaatgaaatcttttttagtcttcgtaattttataacgaagttatctagagatcttgaggtggtaattgccgctaagttatgatcttagtttagaagataccaattgaaagttgagatttttcttagaacagaacaaatttatggctgtactgatccttgattgaaaattacagctttctaataatcatagtctagaagatagctgttaaaaattgggatccatttacccatcctggatactattgatcataattaataagataacagttggaagttgagatttttcttagaacaaagttgagattggtcgttgcagttatcttatgatcatagtctaggaaatagctattgaaagttgtgaattttcttagaattaagcttttggtgttgtatgctgccttgtttatccaagtatccataacggatcttacagacttgatacctcgcactgatagtctttcttagttatctattgcattcaggtttatacatgtttgttttgtttattaaaatatatgataagtggata

SEQ ID NO: 887 - DNA, 602 bp, Arabidopsis thaliana
  Intron number 2 from transcript AT1G65020.1 (locus AT1G650 20) derived from phytozome v7.0 (chr-ID Chr1; pos 24155526 to 24156127 reverse strand)
gcaagcatcatactactgagactttccctgatcctgtaagttttgtttgattctttgtgattacacacaatgcttatagtttgaacatccaagttattagagtgtcgttttagtgcttgtgagtgattctctataattttctgttctagattgtaaaggatacatatattggaactctgctgctatctccttgttgcataattatgtcattgtgagaaaatagcactgatgatttacttctagaggcttatagggtttttctctttgcacgaccacagtgaattggatatgttcattttatgtaaggtctccatcgaattgtaaatgtgtatatgttttggcaaagtagagagtatgattgtcgcttgagtagattatgaaacagaatattcttgttatttatacgaatgtgcttggttatcctttcttttctcctggatcgttcttacacgtttcatttcaagtctcttgatcaaatctcctgtatttttatcgacttaggaaagttgacctgcatcttgcatctatgcaatcttgtttatgactaatggatgtgtgttttctcagctggcggaggtcaagaaacaagcttcagttcttga

SEQ ID NO: 888 - DNA, 958 bp, Arabidopsis thaliana
  Intron number 1 from transcript AT1G65290.1 (locus AT1G652 90) derived from phytozome v7.0 (chr-ID Chr1; pos 24249240 to 24250197 reverse strand)
tcgtcaaaaacttccaaaaagttgatccttctaaggtaaattcttcttcgatccgacccatttcttcattttcgattgtattacgatgaaattgtgtgatccgtggtgatttctggtgtttacttgttatctagaaatgaaagatgattaaaagctttgatttgtagctggatttagtattcattgaagtctatcactcagcaattattcgttattatttactaaccttgagtagagagaacttaggattctgcatcgttttatttttcacttgcaagaacaaaggagaaagttttatcgtcttgagaattgtatatgtacatttgagtatctacattacaacaatttggaaacttttgttcatacttgtgttgatgtcttcttttgtggcttaaggagatttgtccatttcttatttacgtctagtagcaatgcatattttcctcgaagggttggaaactattagtgagtcctatgtattattgttaagcgataataaacattcgctccttgttctcttatatttctgtgaattcttgttttctcgatgccatgttcgggtgtttctagctaatgaaaagtgcatttgactgatgtggttctactgatagcttatctttgattaggttgagattttcaagatcccttcagcatcatgtagaaaagaagttatcattcttgtatcttgaaagctttttgagaagtttagccgagtgattatttgtgcatttactgtaggctttgtgtttgagtgttcatgtagtgcttcttagccctcttgatcagcaacgaaacactaaataataacttggagacttcatctgactatctgaactaatcagttgttatctatattggaagtctcaggctccaatttcattgctttctactaggcttgaactctgtactaatacatttgtactctggtggcaggtaacaccaaaagccaatttccaaa

SEQ ID NO: 889 - DNA, 247 bp, Arabidopsis thaliana
  Intron number 2 from transcript AT1G67630.1 (locus AT1G676 30) derived from phytozome v7.0 (chr-ID Chr1; pos 25347832 to 25348078 reverse strand)
cttgtttcaagttgggaactttatcatctcaatcggtaaaaatcacatttttcttattttccattgcccaatagtaaaattcaaagcttttgttacctcttgagattgtattgatgtttaaatagtgaccaatttcatgattagagtggttgtgttagtgatggcgaagagaattgagtttgtttgttttttccattgtgtttggtttgatgcaacagacaacttcttgatcaaactgttaagaaag

SEQ ID NO: 890 - DNA, 461 bp, Arabidopsis thaliana
  Intron number 2 from transcript AT1G68160.1 (locus AT1G681 60) derived from phytozome v7.0 (chr-ID Chr1; pos 25547717 to 25548177 reverse strand)
ttcgagatattgctttgcggtgtaggtggctgagggtaagtatctctcttcacatatctgccttgttctgacggtttttgtagctttcttgtgaccatttttcagtcatgtagttctacgcttatgccatgaatgatatatgtatagcaaagaaaaatgatacacagggaacagtttctacatgttctgatttcatacatagcttcttaaactacagtacacagaatgaaatggttttgccttaggatggactttttggtcttattgatgcctgagttgtatcaatattgagttcttgagatgagaatagtgagcataacagtctttgagttttgaacaaaatcttctcttctcttatatactgaatcatttcttacttttaccttttgtcttcgtctgttgatgtactgactttgttttgcatagagaaagagaagaaaatcagaagaattaaactgtgg

SEQ ID NO: 891 - DNA, 870 bp, Arabidopsis thaliana
  Intron number 3 from transcript AT1G68862.1 (locus AT1G688 62) derived from phytozome v7.0 (chr-ID Chr1; pos 25886911 to 25887780 reverse strand)
tgggtctttgtactaccattcatcctacacgtgtgagtactgtttctctataataatatcttttgttttgattagtaattggattagcttacacttaggtgggtgagaatagttgagaagaaagagaacatggattcacttctctttcactcgaatattacttatgttgttagaaaatggggtcaaagaacttattagagcttaataagaagtgcttaggtggttttgttgaaaggttaaaaaaggtggggatgtttcttatagcaccaaacttttagctttactttgaatgagcctgattttgtcaggtatacttccccatgtattcatttgtctcttacttcataagtcacccatgtgatgtgaaattattatatagaatgtatctatatgtgtatattagtttggaaacttctctcatttaaattagacacaccactatacttgttaaagccttttttcatgatttggtttccatcttagataagatgacaaaaaatctctgctgtaacatcatacctttcgattagatttctcgtcccactttttttttggtttccaaaaagtttcaataattgaatacattttattggttgcagaattctctgctgttactgttttgtattttctagcatttattttacaattttgttcctaaccttctaacatagcaaattagcaatcataaacttttatgcatatatataagtgtaagacagtaaatcttgtatgtggaaagacattttccttcaaaatataagttcataaacgtcaagtcaattatggtcgactctctttagagtacatactacatagattagattcagtcggatttaatgtgtacttaactttttaacttgcaggtcttgc

SEQ ID NO: 892 - DNA, 230 bp, Arabidopsis thaliana
  Intron number 2 from transcript AT1G68862.1 (locus AT1G688 62) derived from phytozome v7.0 (chr-ID Chr1; pos 25887784 to 25888013 reverse strand)
aaaccatataacattaaaaacggtgaaggtgtaagaagagtttgacccctcttttgagcatttaagttaaatcagtttttggcctttatgaaatttgatcctcatagtacaaataataatactcattgtgggtctcatgaatggagatatattaggatttattagaattgtacacatcgttaatgcctccaagctttgttttcttttagggactctctttggattttctc

SEQ ID NO: 893 - DNA, 703 bp, Arabidopsis thaliana
  Intron number 2 from transcript AT1G69620.1 (locus AT1G696 20) derived from phytozome v7.0 (chr-ID Chr1; pos 26190129 to 26190831)
tcccgttaccggcaagcgtattcagggtgttagtattcttcagattcatattctctccgatttgagtctaaagttacatactttgtttgattttggattgacccatttgattgttttgaggttattctattgattgatgcaaatgtagtagtttaggtttggtttgtttgtgcttattgacggtcttgtgctggttagatgaattcaacatcagtagataactttatcataagctaaatgtagtgccgctttgtctttttcaagttttctctgtggagtaagctttaatcttggtggcagaaataggtaaatcatcttggaaacttttcactaggtttagatttgtttgttttgccatcttgatggtaaattgtattagttttagattctgtattgtattgatttcttcttgtgcttattgacggtcttgtgctggttaagattaatccacaccagtacataactttatcataagctaaatttagtgccgccttgtcttttcaagttttctccttttgtatgtaaggaatcacttttatacttggtggcataaatcttcaaacatcttgtaaattgttcatagtttggtttacagtaatcttaaagttgatggagttgtttcagccattttccttcagcatctaatttatatctctttggttgtttagattcctcacttgaggccaactgagtacaagaggtc

SEQ ID NO: 894 - DNA, 352 bp, Arabidopsis thaliana
  Intron number 3 from transcript AT1G70550.1 (locus AT1G705 50) derived from phytozome v7.0 (chr-ID Chr1; pos 26598411 to 26598762)
gcgtgaagagagattccacaaataacggacacgaagtaagtaccattttgataaccataattaagcaaaaagtcagaggtttcttaccttttttatcctctataaagaaaaagatagagaatgataccaaaattcagctttttcgtaattctttgcacgaccattactaagttgtatcatccaaaggagtgaagcgtgacataactaaagattattctctgttcacatcgtaaaaaagattattctctgttcctttttctctttttctgtgtttacgaaaatgatactccaattttagcgtttgagaatttatttgattgattatttttgtaaaaatgacttattttgtagc

SEQ ID NO: 895 - DNA, 552 bp, Arabidopsis thaliana
  Intron number 2 from transcript AT1G71200.1 (locus AT1G712 00) derived from phytozome v7.0 (chr-ID Chr1; pos 26836066 to 26836617 reverse strand)
tcaaggtactgtgtctcatcttatcttcttcatttctctttagtttatgttttgatagaatggagacaatgtgctagtcttcatggatatgaacaatgatgtaacttttcttctccaaacaatacatgtttagggtccaagtcatgggaggattgtgttttaactttagctaagcattgagattatgttaagattatataacgtttagaaaagatataggactaatggtttatcattaagttcataaaccaatggtttttgttcttaagatatattgattctattggtgggagagagactgtttcgacctcaatgaacctggatttgagtgtagcattatgtataaagagggatgatttacatatatttgcatgtattatcaatggctgatcctagatctatggaccaaaaacactaaactaaattcaaaattagtttttagcaattcgatagtatggcactaaaaagtcattggatagtatttacatatatacattggatgttcttttttgagagaactaacaattgcaaaatgtatatgggaaagtgtag

SEQ ID NO: 896 - DNA, 404 bp, Arabidopsis thaliana
  Intron number 4 from transcript AT1G73875.1 (locus AT1G738 75) derived from phytozome v7.0 (chr-ID Chr1; pos 27781943 to 27782346)
gttgtgctatattttggaaagagaatctgtaagttcagtttttttctatttaggatcatttttaatgtggtgggaagtctctatatgctggagtcaggatcaggaatctagccatttgaattgtctacagggaatatctctcttttggaacgagataaattagatcttctagttatctgttttgaatgtttcgaaattgttaatggtaggttcacgttgtgttatgttatcagctttgaccttggcttcacaatatattgttcaaggctgaaagctttgctttctattgttctcgatgttatttattttgtattagactcttactctactagtttcatcatttatgttatatttctgctgtgaatgcagatttgaacttctagaccatcaacatatagagtttg

SEQ ID NO: 897 - DNA, 342 bp, Arabidopsis thaliana
  Intron number 3 from transcript AT1G79150.1 (locus AT1G791 50) derived from phytozome v7.0 (chr-ID Chr1; pos 29776809 to 29777150 reverse strand)
aagaggaagaagaaactccccaagccgctgttctggtattgcctgttttgagtttctctttttttcttggttcattatataagttgctaaaaatttcattgttcgttctttgacatcatttttcattttgagcatcatatttgatagctttctgcatcttcatcgtttaacatctttccattaaaagaatttataagaacgtttaatcattggtatttgtaatttgtaatttggagcgttttagtgttttccatatccattcatcatgtttttttttaacgtgtgaatgattctcttccttcatcaggcagaagtgaaagaagaactatctgctgaagagtc

SEQ ID NO: 898 - DNA, 374 bp, Arabidopsis thaliana
  Intron number 2 from transcript AT1G80750.1 (locus AT1G807 50) derived from phytozome v7.0 (chr-ID Chr1; pos 30349224 to 30349597)
agttcagggctaaggtacacttctttttttccagattctctgaaaaacttttgctttgtctttttccattcgttttactgcctcaagttctgatttttgcttcttgacttttgtctacaccttagaagaacttgtttttgcttattctttgagttaaattaaagctatacatcaacctttatgattaggttttgtcacttatctcttagactgtaacttttctacagataattttgtgtttctcctttgagatttctccctagttttgcaaggttgtgcttaggacttgttgtttcttctgtcaatcctgcattgttctctgtaatttaactgttccctttttgctaattttatccctacttaaggaagtagat

SEQ ID NO: 899 - DNA, 382 bp, Arabidopsis thaliana
  Intron number 2 from transcript AT2G01720.1 (locus AT2G017 20) derived from phytozome v7.0 (chr-ID Chr2; pos 319541 t o 319922 reverse strand)
ccgagcgaagggtaagattctccgatctatcttcttcttacaattcataaacttccttaatggatcccgtttctccgatttatggaaattcaagttaatgaagttgccgttgggctttgctgtttctccgatctatactcggtttgtagaattactgtgtgattggtcacttcatggttgatcatcatcgataggcttcatatgtatgtacattgatagatagtgtgacttttcatcagttatacgtttgatttgagtaattagaaagtctaatgatagaacctgtttgcaaaattttcttgcccgaaactgaaatgcttctcctttgtgtttgtttttgtctacagattgatttaagctcacatatcgtgaaggccttctt

SEQ ID NO: 900 - DNA, 529 bp, Arabidopsis thaliana
  Intron number 2 from transcript AT2G13680.1 (locus AT2G136 80) derived from phytozome v7.0 (chr-ID Chr2; pos 5694595 to 5695123)
cagggaaggggatctgaaagctcttcgcatctaacgtgagttcttcctttcgtagaatttttacgttcgatactgtatattgaatcgattcagcttccgtgagattttgttttgaaaaatgtgacgagaaacaatgaatcgatgtttgttttcgtttcgttttcgatttcttctccatcgctcgagctcctgattttgatttttgtccatgtttatcgtctgcactgatttcgaggtccttttgttgttccgtacgatttcgattgagtttccgtgaaatctctgttcgattgcttcgctcgagctccattttgattgttcatgtttgtttgttgcggaatcgcaagagcttgtaacctagtgttgttctaatcaatctgttatatacctaaattcaaaagtagcatcttaatcgcttgacaaaaattagctgtttttggtgcatataatccttcgattttgttttgtgttttgttgtttattgagaagattggtaacattgtgattcaatgttttgtaacagggagag

SEQ ID NO: 901 - DNA, 979 bp, Arabidopsis thaliana
  Intron number 1 from transcript AT2G16210.2 (locus AT2G162 10) derived from phytozome v7.0 (chr-ID Chr2; pos 7027933 to 7028911 reverse strand)
tttcttcagaaaacaaggtaacaaccttctaaactcttctccttgttaaatttgttggcttagtttggaaagattgaaactttcggttctttgtaacaggggtttgtcttaaactttgacacttgttattttagtttggaaaggttgaaacttttcgtaaattgtctttatgggtatcaggaaaaaaaactcacagatcttctctatgtaacgaactttcttcattctacactcgtatttttctgtctgaatgtgaggattcatgctttattttgcatctttgtttcttctagatgagatctgtcctctgttatttttcattgtctttctcctgttttagttgcttcacttagttctctgtctgaatgtgagcattcatgcattattttgcatctttgtttcctttagatgagatctgccctctgttatttttcattgtcttgtttggtttgtcatttgcgtgtgatgggactaattaaactttgggctcacatatggaagaatggaaaagaatgttatgccaaaacattttgttgtgtttgtcacactatatttgttacatggtgagatttgaaactttgtacttaagacttgatgggatgtgtaagaacgttcacttcgttagtttagtttggaaatgttgaaacttttggtcctttgtaacgttgaatcttgttagctgtttgtttaaaggttgactcttttcgtcaattctctttatctgatatcaagaacattgttttgctgcttctctcattactcagtttagatgtgaggagtcgtcatgaattatttttcacctctgtttcttctgaatgagatttgtcctctgttaatttgaaactgtggaccaaatacttgttgattccctgtagttgaagaaacgttctttagatcaaccattcttgctttattgaaattttagtcttcttatatcgtctcttcattttatttgcataatgaaagagagcacttccac

SEQ ID NO: 902 - DNA, 255 bp, Arabidopsis thaliana
  Intron number 2 from transcript AT2G16740.1 (locus AT2G167 40) derived from phytozome v7.0 (chr-ID Chr2; pos 7268144 to 7268398)
atttccctcctgattatccttttaaacctcccaaggtaacaactttctcaacaatttttttgttttttaatctacttcttaaatccaataaccaaaaggcacaaaaccaacattaaatattggatcgtttatgatcttttggaaccttaagttttgatctttattttcaatctttttcttcttctttactcttgttgttatgtttgtttgataaaatcaggttgtattcagaaccaaagtgtttcacccaaacat

SEQ ID NO: 903 - DNA, 356 bp, Arabidopsis thaliana
  Intron number 2 from transcript AT2G23640.1 (locus AT2G236 40) derived from phytozome v7.0 (chr-ID Chr2; pos 10057885 to 10058240)
ttcctctgggggagtttacttcgccttctcagcaagtaattaattattttccatttcaaactatttgaagatctcatgcaagaaaataagtattttaaaataaatttgttgtgtcaaaagatcattaaaaacaccttaaaacccccataaatttaatacacatactcaaagaaattctgatattaaatataatttctgattcgtatatgtttggtttcatatgcactagctagttgttcatgttataaatatagtccatgtttgaacggaacactttattaaagatggtcttataaattaagatgattaattttcggacagggtcgaaccggaactatcaggattagaagtatcgg

SEQ ID NO: 904 - DNA, 486 bp, Arabidopsis thaliana
  Intron number 3 from transcript AT2G23640.1 (locus AT2G236 40) derived from phytozome v7.0 (chr-ID Chr2; pos 10058383 to 10058868)
gaaccttctcgatttccatacttgtctcttcatcggtaagtaactaattttgtagttactgattaatccattacttgtctcttcatcggtaagtaactaatttagtagttactgattaatccattattagttcattagattaatttaattattaatcatctgtttaccattaattgttaatggtcgtggtaatgttcttaatatggtcatgcgctttgtggtctagtggcaacacgttccaagtttgattcacctgctgggcaaaattgcaatacattttcctgaacatccacatgaattgcaataaagtcagaatgcttttaatgctataaattcatattttcatcagaagattatagtctttactgtacaatatattttaacatgaaaaaagaactacattaaaatacattagactatgtgtttttaagatggtttcaagtagatgtgattcatgtttcttgattctctgatacaggtttggtg

SEQ ID NO: 905 - DNA, 528 bp, Arabidopsis thaliana
  Intron number 3 from transcript AT2G26990.1 (locus AT2G269 90) derived from phytozome v7.0 (chr-ID Chr2; pos 11521499 to 11522026 reverse strand)
gaacctgagaaagctgactggtaagaccgttgaatagtttctgtgattattgttcaagtagaggagtactggatttgtggttttgaatgtaatgttgatggaagagataggaattgtagatctctaggttacctgcaagattttccttgtctatgtaaagttagttttattcctgtagtctgtttataaattatcatgtaatatagcttgtttagttgcagtcaaatatagttcttgaccatgttgattgttgaacgtgggctgtgtgtgcattcggatttgacccttctctttagttatgatctccggcttttttcctggtttatctcaagttaatttttgtacctttaggctgttttttctttgtatctcacacaaaacatcagtattcctaaagaagattcattgcctctactattctgtctatccgtagtatgtgtgaaagtctgtttgaagttttgttaaaccattcaatggcctattttcttgtcaggggtttcaaagctcttaagcagactgtgaagatct

SEQ ID NO: 906 - DNA, 437 bp, Arabidopsis thaliana
  Intron number 1 from transcript AT2G28660.1 (locus AT2G286 60) derived from phytozome v7.0 (chr-ID Chr2; pos 12295963 to 12296399)
accaggtttgattattcttctttaaccaaagtatttattgtgttttcttaacaacatgcattattccatagagtttgagactaaagatgatagaaagacaattcactagtagaaaccattatatcttattggttccaaggtaattatggtttaaattgcattttacgatttgatttgatcaagtaattttttttttctcacatgatatacatctttcgtatagtggatatgtggtacctatttaattgtatatatctgaaaataatacaaacatacataaatataacaaatggtttcttttttcgttgttattcaattataagttatttttgccgaataaaataaaattatctgttatttcattctacctatatttatttaattaattattgtttttggcaggttgttgttttgagggtatcaatccattgcaaggg

SEQ ID NO: 907 - DNA, 558 bp, Arabidopsis thaliana
  Intron number 3 from transcript AT2G29330.1 (locus AT2G293 30) derived from phytozome v7.0 (chr-ID Chr2; pos 12595281 to 12595838)
gtctaacgaaaggtaaccatagtgaaaagtttaatactagaggaagttcattgcaagaatgaccaaatagtattgtggatttatatatgtttcattatgtatattatatatttgattaggataattttcaatcccatttaataatttcaaatgatatttgagaagaattgttttttttttttttttgtgcgtgaaatcttattttagtgtgctatgctaacatttttggtttcagaaatatataattcagaaggtcaaatatagggcattcatattcaataacatacaaaaacaaaactaatttataactatgcatgttatttatggataataaatctttttatttttatttagatggttcataaatatcgcattatgtctccgaaagctgattctaacggctaattgattgccctagtatcattcgtttctatttctaaattggtctatctttctttgggaatcctaatagatgtctctcatagtcatagtattattttttcttgtttgtgtatatgttcaggagctttgaatcagctagcacgaaatttggcgtgt

SEQ ID NO: 908 - DNA, 362 bp, Arabidopsis thaliana
  Intron number 1 from transcript AT2G33160.1 (locus AT2G331 60) derived from phytozome v7.0 (chr-ID Chr2; pos 14054125 to 14054486)
tcaggtaaatataactcttgactcaatctcactagctgtgcaaaatgttactttgaaattaactaaagaaataatgatgaaggttttgaattgaaaataacaaatagaggaacatttagtttattcttttcctctttagtaggtgatttgtttccttaactttttctttcttaacaaactttgaatgagctgtaatatttttctttattttagataactggtaaaaattgagaataatacttatatttattcttcattttatttactggtttactatatgtaaactataagatataataatattctcgaatatttatgtctattattatatgatatgatgttttgatatctcccaacaacag

SEQ ID NO: 909 - DNA, 189 bp, Arabidopsis thaliana
  Intron number 3 from transcript AT2G33490.1 (locus AT2G334 90) derived from phytozome v7.0 (chr-ID Chr2; pos 14184491 to 14184679)
aagaaagtggtaagaattttttgagtctttgtcaaacagattcgttaaagatatcatattatatctcatcttaatgtttaaacatttgaaaccgacagtttgtgcgtttatcccttttccaagttttctacacatttctgataagaaacattttgcttctcttattcttatgcaggtagagtgttgatt

SEQ ID NO: 910 - DNA, 244 bp, Arabidopsis thaliana
  Intron number 3 from transcript AT2G35250.1 (locus AT2G352 50) derived from phytozome v7.0 (chr-ID Chr2; pos 14847730 to 14847973 reverse strand)
ttcatttgaataccgccgagtattctggtcaacatgtatgtcttctcctaatcttggtttttgaaaggagttacaaaatttcatctagttgttaagacattctaataatctattcgttttacgtaaaattaaaggagaacatcaaaacatccgattgttattcatgcaaaatatatattatagatgaaaattaaactaacatattgatgaaatttgcagtttgcaacaattgagaccattttag

SEQ ID NO: 911 - DNA, 385 bp, Arabidopsis thaliana
  Intron number 2 from transcript AT2G35250.1 (locus AT2G352 50) derived from phytozome v7.0 (chr-ID Chr2; pos 14848070 to 14848454 reverse strand)
tccaacatccattgttgaaagatcacaagatccaggtaacgtagcatatatcgttgggcaaaatatttgagtttcgaaatctaatccgacctagaaattatctagattttttcatattagaattagatctcgcatattctatttattttataaaagtagagttcaaagtttatgtatgataagtaacttttgttatagtcaaggatgggtattcctaagaaacttttggatgaatatgttaatgttagtttataaatttataaaatgtgaataaaatagttgtggttaatcaaatatgaaaataggacttcgggagacatcaaaactgacgaatcttattcttcctttgttacttgtggtataatgtaggaaacattcagcctag

SEQ ID NO: 912 - DNA, 384 bp, Arabidopsis thaliana
  Intron number 2 from transcript AT2G37790.1 (locus AT2G377 90) derived from phytozome v7.0 (chr-ID Chr2; pos 15839082 to 15839465)
aaaaagaggtaatccaaaaactcatcttttgagattgtggttctggtctttgtataagtttttgtacgttaagctgaattgattcaaggaaagtgttgttcttaagttcaattttgatacttctgtcatgctacttgatttttattgggacttaaagtaaaaagttatgttcttgcttatgcgttgtgttttgtatcacaatgtgattgcttaagactgttgttctattgatatgttctgtgttgttttgaattaagcaattagaggctaacctctctctatatattattgtggttacttgacaatgtgaattatttagtgactggaaaaaacttcatgtcttcttccttgtgtagattgggttagtcctgaagaaattgtttg

SEQ ID NO: 913 - DNA, 319 bp, Arabidopsis thaliana
  Intron number 4 from transcript AT2G37790.1 (locus AT2G377 90) derived from phytozome v7.0 (chr-ID Chr2; pos 15839667 to 15839985)
aggatctgcagcttgactacgtcgatctgtatctcgtaagtaatatatttgaaaacgttgttttgtttgtctatgtgcttttctcttcagcataatatcaatccattttggtacttcagacttattgatgtggttttaactaccaatattatcactgcaatttttaaaagtctcaaggctagtgtgatatattgttcaaacatctaaactccttttacttgatttcttataccgatttgtggaaccatttcgattgactaatagttgttttgattcttttgaagattcactggcctgttagcctcaagaaaggatctac

SEQ ID NO: 914 - DNA, 896 bp, Arabidopsis thaliana
  Intron number 1 from transcript AT2G38270.1 (locus AT2G382 70) derived from phytozome v7.0 (chr-ID Chr2; pos 16031813 to 16032708 reverse strand)
tcaaatctgtgccggagctttgtggctccgttaaggtacttatccatgatttcatatagaggagtagcatgtctgttactataacgaaggattctttgttttgttgtggttgacttttgtttattactgttcatagatttgggaagtgttttggtaaatgaatactacaaaagttcatcactttagttccagagatagtatttcatatcattaggatcactattgtttgcaaaactagagctaatgaagttcttggttctgttgttggtaagagttcttttaacaacacttaccacacattatgattaggagatgcatcaatagttcattttgtatatgttacttaggagttaggacttgtttttttagcattttcttttgattagttttttagggaaattctactctatagatacaggacagtgcgcattggcgagatttgtcgaggtttgagaggtatatcggttttgtaccaatggagagaactgattctctttggcattttgattaccattctgtgtcaggttcttttaattaataacaagagcttttgttttttttgtgtccatgatccttaactgtatcagcttacaacagtcaaatctaaagattgctcttgagaaatttacatttttatgggttgtattattatcttaagaatttacatttttcctctttctatcatttatttgtcacttattgcttatattttgcttatgatttacttatgttatgattattttagtgtttatttgctccattgactcaataggactttgtttatgctcatgtgatggatattgacaagttttggtattgttgatatatcttccataactgatttcatcattgttttgctaggttggaatagtagaagaaccagataaagcagtttt

SEQ ID NO: 915 - DNA, 275 bp, Arabidopsis thaliana
  Intron number 3 from transcript AT2G38770.1 (locus AT2G387 70) derived from phytozome v7.0 (chr-ID Chr2; pos 16209137 to 16209411 reverse strand)
ctttccaggtttgttccgtttcttgcatgtaacttttgaataggtcgtaagtatttagaatgctgttgcgcctgtttcagatcagaaaattaatacatgatatagtaagcagtaattgcagacaatatagctgtgtgctactcagtaaattgtttgtttcacgtggaaaaccttattattcatgtttgtacacaaattatatccttgtgctattttgtttttcttcaatattcttaactgtgtgatgttacagagtttggaagacgcagtggtta

SEQ ID NO: 916 - DNA, 240 bp, Arabidopsis thaliana
  Intron number 2 from transcript AT2G40640.1 (locus AT2G406 40) derived from phytozome v7.0 (chr-ID Chr2; pos 16962267 to 16962506 reverse strand)
gagtctctcaaggccatcctctctgatcctgtcacgtaagtttgttaagtctgcttgtcaatggtcagggaatttgataactaagatcagtttaatttttgaatctgagtcaatgtcaatgtaaccttgatgattattgttgtgtgatggaaagtgtatcgtctagaaggctaattcttgttaacattcatagagatgatttttcttttctgttactttggtttggatagcggagccttg

SEQ ID NO: 917 - DNA, 826 bp, Arabidopsis thaliana
  Intron number 2 from transcript AT2G41000.1 (locus AT2G410 00) derived from phytozome v7.0 (chr-ID Chr2; pos 17112377 to 17113202)
cgtaactcaggggtgagtatcatattttccatcaatgatcgtgttaagctattggctgtgttgataatcttgcattcttgcctttttttatcctgtgatatacatacattggtgtttttaactggggtttttttcctgttgatggatgcattttagtgtatgagttctcaaatttatcaaattgaacttcttgtgaactaaatgcgcttgatgattatatctctgcacctcttattcgtgtcgccataggtgtagctagaatgaattccaaaaattgtagcagctaatggtgtccacatatatgcacactagatagctttagaagtgtgacaaaggagaatatgttcaaacttcaaaacattgactaatgactagtgtataagattggtgttgcaggtcattgactactgagaatgatcagtaacctatatgctctttgtaaaatatagaaccgtctatgagaacatttttgactcatggtagggtttgcaagaagttatagatgcaaaatgtgtattttgaagcaatgatctttgtttccacatcagtaggatagagaaaaagtatcttgttagaaaacctcacatgtgtaggattctataaccgtagagtaaaatgagcatacttattgctgaggatattaaattattaatggttggtttccaatttccgttaataggaaaaacaaaagcatgtgcatctctgtttgtttacatgctacatggatattcgcctcttcctgattgggtttccttcatctgtatttacaccacagctaataactgatacgacttttgcatattatcagaaatcattcgaagaagca

SEQ ID NO: 918 - DNA, 506 bp, Arabidopsis thaliana
  Intron number 3 from transcript AT2G41300.1 (locus AT2G413 00) derived from phytozome v7.0 (chr-ID Chr2; pos 17214848 to 17215353 reverse strand)
tacttcaacgatagcagcgatacgtaccacttcgggtattataacatcacttctctaataatttttttaattaaaaaaaaaaaactgaaaccaaaaaaattggataatttttagtgttctatgttgagaattgagatggttagaaatgataatttgcatgtttgtattttataattttacaaattgcaaaccacaaatgaaaataaaatttctccttctaacgtttgaggtttacaattattagataaaatctttgttttaaattatacttaagattgtagcttcatcatctgagaagaaagatagtaattaaccttcaggtttttaatgttcgctcgtgtttacaactttttttttttttttaaacgtataaagtaaaagaaaaatgttcttaagacaacaaaatcttaatgtggggatattttgaaaatgattttttttttataaacgttacattattatttggagcagggacgtattctacgcttttctgtgcggtgaaaaga

SEQ ID NO: 919 - DNA, 547 bp, Arabidopsis thaliana
  Intron number 4 from transcript AT2G44850.1 (locus AT2G448 50) derived from phytozome v7.0 (chr-ID Chr2; pos 18499408 to 18499954)
aagatagtgtgagttgagataggctactattaaagaaggaatacgcttggcatattggaggagctcttcctcaccacgagcttgtagagtggaagctgttgtatcacagttccttacacggtcaaagcttcaacacatttctcggacacacatcgtgagtgtttctcaactgtaaggtaaatgatcacgttttctctctgtagtctcacttttcgccccctctaattttagcgcagcctttgtcgcttggcatgcacaccagtgttcgtcaaagttcccaaatgaatgttctcaaagtaacaactttaatcgattaacttgctttttgtttttgaagaattgatttcagagtttgtttgatcatggaacgatggtccggcgttttgaagattccgttggatgctactactagcaactactacagggttgcagcatctctttgcctttcttcttccaaaactctaactgtgagtgacactttctcttatatattctatattcttaactttcagtataaagatcctagcttttcgatcaaagattctga

SEQ ID NO: 920 - DNA, 726 bp, Arabidopsis thaliana
  Intron number 3 from transcript AT3G01435.1 (locus AT3G014 35) derived from phytozome v7.0 (chr-ID Chr3; pos 166995 t o 167720 reverse strand)
aaggtttcttactctatctcttcttcaaatattttctgatttcttttgcattagtgtattaataaactacctgatcaaagaacattggggatcacttgacacaagtctagctagattagtgttcttgctgactcaatctctctggggaattggtatcttttctcgagtgttgatcgtttgggctaatttgacacaagtctatattagggttcattacatttcctgatcaaagttaagggctttgtttagaattttgattttggttttagtcttcaagatggccgctgcttctcgttttgtgattcttctgtgactagttaacatatgggttcatgtatcacaatctctaggtttgtattcctttcctgtttcttaggatttgacattgatcctttattcttaggcttaaggtttatgagtgatggatgctgatattttcatattggatggaatctcactgtttaaagaacatttgggctctcatttgacacatgtctagattagggatcattacattctgtgaacaagtaaaaagcttttgattctgctttttttctagagataatcataaagtttgaagatatcagcttcattgtctggttcatgaacttgttgatctttgactgtacataaatgtgctataatgttatcgccaatccataataagatgaagttcttgtgaaacttgcaggatatacaagtgacactaagggaagagatcaaaag

SEQ ID NO: 921 - DNA, 491 bp, Arabidopsis thaliana
  Intron number 2 from transcript AT3G02570.1 (locus AT3G025 70) derived from phytozome v7.0 (chr-ID Chr3; pos 544392 t o 544882 reverse strand)
aattcgaggctctctgtggctttatacctcttcaggtatcacattgctatcttatcactatactttatcatatcttacttttttttgtttttttaacataagagatgaacctatgcaatggcccacctagcttcccaattttgacaagtagtccaaattccatgagtagtaaatgactgcagtgtctccttctctattgctataagtttgagcctaaggtttgagattggattcgctgaacaagtatttatgttggttcatggtgttgttgcacatgactcgctctttcctcgttttttctctggatatattaccaaaactttagaaacaatttggttttggagaatagctctatgaagtctcttatgtatgttattcagtttccaaacttttaggattgttagcttatatttcagaattgaaggatttatgtttcttcttgtaataatgttacaggagcttaagagtgtcattcgagctattccggagat

SEQ ID NO: 922 - DNA, 405 bp, Arabidopsis thaliana
  Intron number 2 from transcript AT3G07880.1 (locus AT3G078 80) derived from phytozome v7.0 (chr-ID Chr3; pos 2514565 to 2514969)
tcaccaacattggaggtgtgtttgtgtgtacctctttgtttcaatgattatttatgttttgataataaatgagaaatttttaatcttgggaaatgattttggccatatttgagacccttgttagatcatactagttgtttcgtttgatatatgattcatgtgagagtatttttgatctctggttgggctttgtttaccttcgaatgtatacaattttctttcccatgattccggaatttggtgtctatgtttatttctttgcttgattttccatttttctgagtgctactgtagagatatcaacttaagattggaacatgtgttttttgcatttatgcatttgtcaccttatatctcttttgatacgcagagactcttgatccggaagtgaggattgatagcctc

SEQ ID NO: 923 - DNA, 276 bp, Arabidopsis thaliana
  Intron number 2 from transcript AT3G10720.1 (locus AT3G107 20) derived from phytozome v7.0 (chr-ID Chr3; pos 3355124 to 3355399 reverse strand)
cgatatatgtaatataagttttgtttccgcttcattttccacactgatttattaactgttattggaatatgactttttaaactaggctcaatctcataactttgagaactattgctaagtagttaggactcaccaaaatagtcaaaactagtcaattatataatgtggtccttgctttaacatataactattcttctatttcactaatatgttttaacatatatccccttttttatcctctgtttgttataggtaccgtcgattttatattcggaa

SEQ ID NO: 924 - DNA, 812 bp, Arabidopsis thaliana
  Intron number 1 from transcript AT3G10720.2 (locus AT3G107 20) derived from phytozome v7.0 (chr-ID Chr3; pos 3356004 to 3356815 reverse strand)
caacctatcgcgaaccgctcgagactttgattaaggtaattaattaaaacttgtttctaattcttttcttttttcgtttttgtttgtttgtttatactagcttttatacattcctttacatattattataaagttgttaataatctagttgtaaagacattacatatttttgaaatggttggcatagagatataagaataggaatttggggaaataccaaaaacattatatatatatatatatatatatgccttcttatcataaatccttagaaaaaatcaaaacagagtttttaaatcgatgatttataataatttttgtatggtcaccactcaccacaattcaaacatgaataatgaaaggttatgcaaaagcctttttggacatacatgtatgaatagataagcatcgtaggaggacatatactaagttaaatatggtatgaatttactactttggacgcacggaatgatttaatattcgtgcatatctaaaattttctagatcgagtcataaatggatgtgctcttgttttgtgtgtgtgagccagaacacgcgtaagagagtaaatggcacatggcctacgcacattttagtacaactcaacaatgatcaaatgagtcctatctttgactttaacaaaagaaatcaatttggtccccattcggatccaactgtattcacgtgcataagagtgtcccggtcatttcatgtgtggctacaatgaacattgattttaaaaaggcatgagtctacaagctaatcatgtactaagcacattttctttttctggtatagggtttacgtaaaac

SEQ ID NO: 925 - DNA, 306 bp, Arabidopsis thaliana
  Intron number 1 from transcript AT3G20460.1 (locus AT3G204 60) derived from phytozome v7.0 (chr-ID Chr3; pos 7135252 to 7135557)
gcactgccgtaattttcttcatcttctcttctttttttcttttctctatgttttttctagggtaaacacagaatctaatcccataattaattagttaccataagatttaaccaaaattgtaagttatagctaattcgttatctatttgaaaaagggtccaaatcaaagagaatgatgtatcaacaaggattatgccgtcgcagaaaaagcaacatttttcaaatgattgataacgacatgaatattataggtttatgttatttttgtgtaggccggctttacatcaccagctcaaaccgggattat

SEQ ID NO: 926 - DNA, 350 bp, Arabidopsis thaliana
  Intron number 2 from transcript AT3G20720.2 (locus AT3G207 20) derived from phytozome v7.0 (chr-ID Chr3; pos 7240348 to 7240697)
ttaccactgccaaagttgggaaattggaaatcgtttgtgttactttactctggttttctgattttctgattttgttgcttaggaacttttatggaattgtttcaaatgggaatgtctaacaaaattctgaagaagtaagaacatagctttgatttgttaaagcatgtcaagagaatacggaattgtgacagtttaagtggatagtttggataagtagtacgagttcttttgaatatgatggaactgaaaagtctttctgtttcttataacgtgtgtgatctatcttgttctccacaagcaataatttcttttttgtttccttctcattttcctcctcatatagcttccgt

SEQ ID NO: 927 - DNA, 320 bp, Arabidopsis thaliana
  Intron number 4 from transcript AT3G20720.2 (locus AT3G207 20) derived from phytozome v7.0 (chr-ID Chr3; pos 7240936 to 7241255)
gattcgccgacaaggtgagatatctcagctacttcgtcaatatttcaaaaaattattccataaagcactgaggcatcagtaggtttctacttagtggttcaaatggtctagcctactctagttaggtaggttgttttgagcttggttcattattggtctttcttacacatgtggttgaagactagctaagtatataatccttttcttttgtcgaagcaatgatgtgaatttgccacctttcttttgattcatatagttatattcattctggtattgaggtacttgttgaattatattttatcacgttgatcagattgcag

SEQ ID NO: 928 - DNA, 635 bp, Arabidopsis thaliana
  Intron number 3 from transcript AT3G22950.2 (locus AT3G229 50) derived from phytozome v7.0 (chr-ID Chr3; pos 8136722 to 8137356 reverse strand)
ttgaagagcttgtctacaagaatattcgctttgaggtactggactctttctttattcatttgggtgaagttgtttcttagcttcttatctagggacgtgttttagaagtttgaaactttatggatgtttcttaaatttgccattgccatcttttgattgtgttattgtccctagctatgtttcttgcttgggtgtgtgcatttttctcgttgaaaaatggatgatgtttttgtctaagttcttgtcatgattggttgagaaggtgtcagaaactcataatgaacgttttcgtatgtgcgatttatggttttgtatagtaaatttttgtagatgttgtttatctagcttgtttgttataccggaggaactgtttgctatttcccattagcttagtttttttgccagaggactgtttggaacatctttatacagtggtcaaagtcatggcctgagatgaattcatctctgttttatgacaatctgcatgtgttcttatatgtcaaaactcaatgatgaatataaacgtaactaaacttactaaagtttgaattgtttcctgtcaaaaactaactgttggacactggcaatcgaatatttgaggcgatgtttacttttatgatatgttgtctttaggt

SEQ ID NO: 929 - DNA, 530 bp, Arabidopsis thaliana
  Intron number 2 from transcript AT3G23850.1 (locus AT3G238 50) derived from phytozome v7.0 (chr-ID Chr3; pos 8615761 to 8616290)
cttttggaaaggtaatacaccattagagaaatatatacaattatacatatcgtttttgagtttgggtattgtttgattttacggacacctctaatggttgcaggactattgaagccataaatcttctgcaaactccttaactacgtgtgtagttgctgcaatcacttggatcaactctctctttttttttttttttgtgttgacaaaacattgtgtgtttgtcattaacttcttaagtaaattttaagaatgaacaatataaaatactctgaattctctttgtttgaatataagaatttacaacaagatatggtgcacgtgattattattgttaattgtcctttcttctacgtactaaccctttttgaaagaatatgttagaggagaaggtgctaaaatctagaggtatatatttgtatagctttaattgatgattgtggattttggttgtgaaatgcagcatttgagtcttttctctttatactgccattgaaggataagaaactaaagactcaacttgcttcaagcgg

SEQ ID NO: 930 - DNA, 362 bp, Arabidopsis thaliana
  Intron number 2 from transcript AT3G24160.1 (locus AT3G241 60) derived from phytozome v7.0 (chr-ID Chr3; pos 8726421 to 8726782)
acaatcaatatcttcgtccacgatcatccagtgaggtaatgattttcgtcccaaatgtgtggatgaccgatttgaaataatctcaaatttgatcattttatatttcaatctaagatcgtttctggaaattatacgagtttggtccattgaagtagtaaaataagatctattgtttggtctaagtggcaccaatttgtagttttcttgtctgtttttttttgttattttgatattgatgagagatcaatggacagattgcaaatttatgtttgacaagtactaaagtttgtgatttaatagttctttttgatgaattttagttaaatctcttttctttgaattgaaatgcacaggcacttccc

SEQ ID NO: 931 - DNA, 736 bp, Arabidopsis thaliana
  Intron number 2 from transcript AT3G28070.2 (locus AT3G280 70) derived from phytozome v7.0 (chr-ID Chr3; pos 10448530 to 10449265)
cctgctcttaccttcatcctcgccattatcttcaggtttttgttttctttgactaattattaagtttttgctgatttcaattttagtttttcggattattctagtcaacaagtcgaaattgtaaccattccatttccggctaatttaattttaataattataatagttttttatgttaaccgaaattaattaaactcaaaagaactaatcccgaaagatattgtttacatatgtgatgaagccgttcgctatgaatttttcgtgcattataataaagttctttagaataattacttcaaagttcccctataattttttcaattcgactatttttttttccataaatcatgttagttttcacttcactatattcaacactatagtttgctaaccaattctttaccactagccgccttacccctatcccacaactgtctcatactcttatcagtaactaggtaaataatctatatttatggtaaatgcgtttaatatgttcttctttctttctttcaatgcatacattaattcaggttttcggcatctatatttatggcaattgatatgaagatttaagttactatcgcactattgctcaatcttgtggtccaaatcatacaaggctgtttgcatgaatgaaataaatgcgtattaattgtgtttgatcattgattatttcttagccttcttttggaataaacacttaacacactaaatttcattttgtgaataaaga

SEQ ID NO: 932 - DNA, 917 bp, Arabidopsis thaliana
  Intron number 2 from transcript AT3G28860.1 (locus AT3G288 60) derived from phytozome v7.0 (chr-ID Chr3; pos 10876014 to 10876930 reverse strand)
cttgggtttggtcgtttgcttctcttcttacgcaggtttgtttcttacaaatccaatcttctttttctttattcttcaatcaagaaacccagtaattaaatcacattataaacaagatcaagaaattttttgcacaaaaaaaaaagaaaacaagatcaagaaattaataaagtttagattaaacatttgcattattttcttttttttggttcaaccaattaacccattaacataaattaaatcagattattaggcaagaaatctaaaggtgtattttttgagttttatttgattcttcctcaaagtgaccatttactctgaaggtaaaacatttttttttactctacaacaaaaacccaacttctttttttgtttgcttcaaaattatattaaaaaaagaaagcttaaactttgtttaaaatcttgttttttttgtcattcgcttttgattagaactaaaaaaaccatttttatagaatgttgtttacataagtgatgtaatggggttcggaacgaactttccgtgccaaccgcttttatagacaagaaatctaaaggtgtaatttttgagtttttatttgattcttccacaaagtgatcatttactctggtaaacatttttttactctacaacaaaaacccaacttttttatgtttgcttcaataaataaaaacctagaaacagaaatcacaatctagagagaatcaaaattatatataaaaaaaaaacacttcaaatttttaaaaattttaatatgttaaaaggataagccaagtccacgtgattcatggactactactttgtctatatcgaaaaaaaaaaaaaaatgggcatctctctcacatttattacaacttcataaaaattcttgtaataataaccataattttttgttaaataattttacagagatagc

SEQ ID NO: 933 - DNA, 459 bp, Arabidopsis thaliana
  Intron number 2 from transcript AT3G30180.1 (locus AT3G301 80) derived from phytozome v7.0 (chr-ID Chr3; pos 11811441 to 11811899)
ttgagacagttgatatccaagaaaagaccaaacatgtacgttttttaagcttttctctctctttctctctttgttttttagacattgaatctgaatctcgggtctatatcctttattggggatgtaatgtttttaatatgtcagagcaatttattgtttttgttaaaaagaaaattaattactatcattctttttgacaaaagaaatttgttcgtcctcactttaattaattttgttggtctattagattcatattatagccaaactatttttttgttgattttaggtaaaaggtatatattattctaaattctctcagggagttagtttttattttgttttggaggggtagaatcgtaatttgacgataattgttaatgtctgaatcttggagaactaaaacagttttttagtataatttaataatcttctgttgactcatgttattttgttgtgcag

SEQ ID NO: 934 - DNA, 808 bp, Arabidopsis thaliana
  Intron number 2 from transcript AT3G44320.1 (locus AT3G443 20) derived from phytozome v7.0 (chr-ID Chr3; pos 15993803 to 15994610)
cttctgctattaaagtccctggtaaaatcatccgttgactctattttttttttgtatctcagtttgtagtttcattttattatcttgtttaagtaaattgatattttgatagatttgggactaatttatcagtaacattgaacaaaaatcttcaattattatgtgcttatccccgagtacgactatttcaaaatcaccacccgatcttatcgattttgtaagattggatatgaatgatataattaatattcaggatccgttagaatcggatccatatgtttaattgtatatagtattacacttcattgtctttttacttttggcaacatatgatactctgttattattattattatatatatttttctgtcaatacaacatataaagagtttcttacaaaaattacaaaagtgtttttaatttttttctctgtccacatcttgtttgttttctgcttgtcttgttttgtttgattttaacgtatccggattcgttgctacccataagggttcggaaatccggattatggtttttatttggttatgcatgttagctgctgttgttggagtcttaaggacagttaaattttatttggaacaaagtaaacttaactcttaggaaaaacatgtttctgcttcatgtagagttctctgtttttgtcactatgagtgttatagctctagtttaagtgagcactctcaaagcttggatcacaaaatgattatttcttgcatatgtttggtactcttgtaaatgatgtaatgaatctacaggccctgaagtggaaagattggctgagttggccggg

SEQ ID NO: 935 - DNA, 407 bp, Arabidopsis thaliana
  Intron number 2 from transcript AT3G48970.1 (locus AT3G489 70) derived from phytozome v7.0 (chr-ID Chr3; pos 18152720 to 18153126 reverse strand)
ttctaagcttaggaagactctactcaagcttaaaggtattgaaagcttttgagttttaaatatgtttcttcttcttcgttcaatctaagtattgagtgcttacacaaattttggtttggttttgacttttaagatgttaaccaaagttaaactatctgttatttttatcaaatatttcttaatttttcaagccaatatatgttttattaaagatttttcagtttggtatgcttttattttcatttttgtagatatctaaatttaacatctcaaccaaattcttaagaataatgaaccgattcaaatggaacatcaactttccggttctttcacatggtcagatggtttaactaatttatccggttgttattggtttacgtacaggagtggaagaagtggaagtagag

SEQ ID NO: 936 - DNA, 692 bp, Arabidopsis thaliana
  Intron number 3 from transcript AT3G49680.1 (locus AT3G496 80) derived from phytozome v7.0 (chr-ID Chr3; pos 18423306 to 18423997)
gacaggtttgttttcttagttttcttcaaagtcatgtcctttactgtattgagtatgatcaaaagtctagaccaagcttagattatggttaaaagaagctttttgtggggttaaggtttaggatttgaatgtcagattcttgacactgaaacgcaatctattatctgattttgtatcctagtttctcaaagtcatgtccttaacaagttcgataaaaggaaaagccttttgggggtttaggtaaggatctgaaagtgtggagaagttggttagattcttggcaccgaaaaacgtaatctgccgtcgattttgttttctagcttctcaaagtcctgtcctttactgtaatgaattctatgaaagaaacttaatttatgctaatcaagaatctttaagggagttaggagggtttgaaagtgtggagaaatttgtcaaattctggacaatgtatcacagcctgagtttgtcaataagtctagtctcctagttgttatgttagttgcatctagtgaggatttatttactgaatgtatattcatatattgcacggagaaatcttcttatattgtaagtgatgatgagaaatgccaagcaatgtgttgtggtaaagagtgcaatttaggatcacatgagtcttattagtgtatgttcttctagggattgtttgaagggctaaaagcttacagaaagaa

SEQ ID NO: 937 - DNA, 932 bp, Arabidopsis thaliana
  Intron number 1 from transcript AT3G50560.1 (locus AT3G505 60) derived from phytozome v7.0 (chr-ID Chr3; pos 18762797 to 18763728 reverse strand)
aggctacaccgtcgccatcctcgctcgtgatcttggtttgattccttttctttctctcttttcattttgttttttgcttttctttttatccatatctttatctattcatacactatacacacccacatgtttccatgtataaatatgattttttctatatatgttcccatgggaattttcttcttcatttttattccaatgaagaaaaggaattgcggcagttttcttcgcaaaatgagttatttttgaagccttgaacaaacaaaaaaggagagttatttttagaatgtttttcttcgctggatttctgcttttggcaaatattaatgtggctgactcacaccacacagtcacacacacacactgacacacatacatgcatattaatcaatatataatttatagtcaaaaggtgcattttaaatgtatatttggttataaaaaaaaaagattttgggtttatacatcagtattcactattcagtacttcactataggcttaactggttcgtaagacatagtactaatagtggaaatttttcagtgtaaataaatgtgtcgataaattcagctttttaagaaccagtacagtgaaaacttatttgattaaatttaaataattttgtttttgtttgacacaaaagatactttttcattctgttcggtgatgagaacattaaactggtttccatttgactataataataaatagttttcttcatccctccatgtatatgaaatagttactaagttacgcccatcagctaatattaatcacaaaacggtgcacttattgccgatccactacaaaaaatatatataacacttttttttagtaacacttaaggatatactcaggttggtcactctcttaatatagtcgggtaaattgtgcaggtaggttatctagagtagcagaagagatagcaaga

SEQ ID NO: 938 - DNA, 254 bp, Arabidopsis thaliana
  Intron number 2 from transcript AT3G52870.1 (locus AT3G528 70) derived from phytozome v7.0 (chr-ID Chr3; pos 19594986 to 19595239 reverse strand)
cttctaaggtatgcctttttttcacaaaaatatcaaaaacatattttcacaaaatttctagttgaactttgtgatttatttattttccctaatgagtcttcttttgattaaaattcagaaaaaagtatatgtaaatatctcaaaatatatattattgtaagaaaaagatctccacttggttattggttttgtaatcttgtggtttggttatgggtttaggtggggaagggtctgtctatagtcgacaaagctca

SEQ ID NO: 939 - DNA, 470 bp, Arabidopsis thaliana
  Intron number 3 from transcript AT3G52905.1 (locus AT3G529 05) derived from phytozome v7.0 (chr-ID Chr3; pos 19614692 to 19615161 reverse strand)
gctacagatttccagaacctggtaggtgctataagtttgatcgttcctttactttttagctctagatttaaaggagaccttaaacaaatacacagattttagttcttgttaagaaatggagaaactatcatttcttagtgttttttaaaacaaagaaaaaaggttgctagtgtagattagtgtttactaagataaggaatgaagaaactatcgtttgttttggtaatgaagaagaaagtttgttagtgtagtagattagtgtctactttcaccctcggctttttgtgattactgccttactggtgattaaaggatcaaggtttattcagttagtgtttactgttaagtccttgacgtagtagagatctatcaacaagtagacttatgaactctgtttgattacatcaatcatttgccttttgttgtcttatgcaggtcaaagcattttctgtgtcgggattagtcgttgg

SEQ ID NO: 940 - DNA, 895 bp, Arabidopsis thaliana
  Intron number 1 from transcript AT3G58040.1 (locus AT3G580 40) derived from phytozome v7.0 (chr-ID Chr3; pos 21488661 to 21489555)
ataatccataacaaagtctggaaaatttcttccgggtaagagaaaacttcttctctttcttttcaatttggggttttttattttgaaatcgggaacaaaagatccagaattacctaattccgaaatttattatcgggttggattatcgtgtgacgacgaatctagcttgctttttggggggggaaatataattctcggaaggtcaatttttttttttgcttcattttgttgtctttgaatcttttggtttatgaatggattgttttgaaattgtttcataggtcaaagagacaaagatattgttgagatttatgatattgggatttgtatttttgaacaccgtttctctatagatttctgctttaacctgatccttttaattgcaaaattgtgaaactttgcttgcacgatctttgtttagctttcacaggttagatgcgttggttcttgttctctagttagatctattttcatgtttatctctgtttagttagattgaaaagagaataggtttttgtttgttctcttggaatttttctcttttgatgtttgatagtcctgtgattgattactgtttaactgttgaagtcattggaatgtgcaaaggtctagctttgttcatagctttaggcctattgctttgtttacctatctgaaagtgcatttattgttttgcttcaaatgtttgattattttattttattctttgttgcttaagaagctataaaaagtaaaagacttgatcagctgaaccaagtatctgccccttaatctacttttttccttctcaatatatcaactatatgtattagccttctcaatataagcttgtattgctaatgattccttttttcctgcaggataataaagagatccattaggagtaaattatctg

SEQ ID NO: 941 - DNA, 260 bp, Arabidopsis thaliana
  Intron number 2 from transcript AT3G60500.1 (locus AT3G605 00) derived from phytozome v7.0 (chr-ID Chr3; pos 22354351 to 22354610)
attatcgcaagcttactattaagtttggcaagtaagtgctcatagaactgcttattgatgccgtttcttttctgcactttgtaggctttgtttgctttctttagctctaaagcttccctctttgtcgagttttgtgataaatttgaatgtagataactttgttcagtctattacctctgttagaacgaatactagcatgcttttcttttagtgtttgtaaccaaagacagcttttaatctcgtttgaattaacagagaat

SEQ ID NO: 942 - DNA, 139 bp, Arabidopsis thaliana
  Intron number 3 from transcript AT3G60660.1 (locus AT3G606 60) derived from phytozome v7.0 (chr-ID Chr3; pos 22422021 to 22422159)
ttgaattcagatttaaataggtatttacatttacttgcatcttcttttttcaatttctaggtatagcctttgatttttattactactccagaagtttgattaagattagtggtttctcattccagtctgctccaagaga

SEQ ID NO: 943 - DNA, 509 bp, Arabidopsis thaliana
  Intron number 2 from transcript AT3G61480.1 (locus AT3G614 80) derived from phytozome v7.0 (chr-ID Chr3; pos 22750278 to 22750786)
tgtggagtccagactccaaattgattgctgttcttgtaagttcttagtctcactcttttcctttgctaatttctgctaattgtttagtcactatcaatctttatccagctgagaatttattgaattgtttatacaaaatcttgttattggatcttctccagattgttctttatgtgtaaggatgagaaaaaacatgtttttaggtttgattggttgatgatttcagacattctaaagcctctaatttcagtagtatcttatttgaatcgtttgatcaagatgcatgaaaattcggaacttgtgaaaaaaccagttttttgtatgtcttctcaccaattattttttgattcgcagacatcatcgttcttccttcatatatataaaattaagtttaccgataaaagagtaaaacccggagagagacaaccctcggagttgtgttttgcaaccatatctcttttgctaagtgagcaggtcccttttgctggcaaggacttgtctgtgtaagt

SEQ ID NO: 944 - DNA, 679 bp, Arabidopsis thaliana
  Intron number 2 from transcript AT4G02620.1 (locus AT4G026 20) derived from phytozome v7.0 (chr-ID Chr4; pos 1150393 to 1151071 reverse strand)
aggtaaattcgttaccaaaaaactcatctttttatatgttgatgaaggatttgaggttccattagtttgattctttagataattttgatttttcatttggatcttctgtgttgagttttgaatctctgagatgtgatctgaactaaatcaatgcgttgtttgtatagatttatttatccgtaaactgcttgactttttggatttgtttgtggaatttttaatctttttggtagtgattcaagccttagaatagctttgtccgtagttctgtgtatttcttgatttgggatcagaccaaatctgcagatgatctgatctgctattactgaattttgatttcagcacgaatcaggaaactaaggagtagaaatcttcctagaaactgtattaacattgaataacaagaggtttaggttttttaatgttagtcttcacaactgttctggcttaacaattggatttactccattgtattctatcagaaaatcatgtctagtctcttattttagacttaacttgcattttcttccttgtacaacgacttgttactggcagacacttaattggccaatggtggcagaattgtttggaactatccgttgatataaccctttagcaatcttcaatgccacttacaagacttaaattttgtgtacaggacactgttgttggatttttg

SEQ ID NO: 945 - DNA, 456 bp, Arabidopsis thaliana
  Intron number 3 from transcript AT4G02740.1 (locus AT4G027 40) derived from phytozome v7.0 (chr-ID Chr4; pos 1219401 to 1219856 reverse strand)
gttttcttgggtattggattcgttacctgtttacttgtcttgtcctgtctaaacttagctaaaggagataaggttgataaacgaacatgtggaattaaggttatagtttttatagataggaaagatctagatcaggaaaaacatgccttacaattttatcaggctctcttatttctaaaactcattgtttatggctgatgccttaggtggaaaataaaatttgaaaccaagaatcaagcatgagaccaattaaaagaaaaaacctattatttatatcctgaaatattgtctattccctttgattatccatttgaaagtgattcaaaatctctatcactattaaggcttctctgagaaattgttgtctatttcatgtgcacttaatcttctaacttggtattttgtttcttcattgaactaggagtcgcttgagaagcctacggctttacaatctca

SEQ ID NO: 946 - DNA, 869 bp, Arabidopsis thaliana
  Intron number 1 from transcript AT4G02780.1 (locus AT4G027 80) derived from phytozome v7.0 (chr-ID Chr4; pos 1243836 to 1244704 reverse strand)
aacaacaatatcttcttctttccttaccatctcaggtgagtcatcctctctctctttgtcttgtcagagacatacgatcacacacttgtttatataaagtctcaaactttttttatctaatgagttttgtaatcgaaattctcttgtgggtttaatcatgatccattatttgactgaaatttttgtttggtctttttgattttccctagagaacaaaacaaaaattagagtgatgactctgtttttatgttctctcaacacccacgcgtgaaatatctctcatcatcatcttcctttcgatttttttttttttgttttctctttcttcaaagcattatagaatcattaaccactctccaaaattctctctgttttttttttctttcccaaaaattcgatttgtttatcttttttcgatatttggggttctttgactcaactacgaaatgggtttttctctgtttttaccaccaaaaagaaaaaatgtaaaatgtgttttggtgttattaggtctctgttgatttttggacaaaacaaacttcatcatttttggttgattttgttttcgaaagaatgtattcctctaattcgatatgcaaatgtgtatactctgttttatattatatgatataaaaagtttttcagtttgaattaattaattattacaaaaggtacgtttagagaatctagtactcattagagaatggattgacctcgtatcttagtattataattgccaacaaacataaactaatgttttgacgaccaaaaactagtttatattactatataacatagtaagcaaattattttattattactttcttactcctctagtctcattcttttttgaataggatctcctctca

SEQ ID NO: 947 - DNA, 625 bp, Arabidopsis thaliana
  Intron number 3 from transcript AT4G02830.1 (locus AT4G028 30) derived from phytozome v7.0 (chr-ID Chr4; pos 1263003 to 1263627)
agccacggcttctcatccacccaccaaaaaaacaggttatttattaattactctatactaagtatttatgaacacaaataaaggtgcataatgttttcaatttcataaaatcaattctaccaactgcatatactaaaattcttttagtttcaggttaaagttgatttgacatgatttttaacttacattttgtcgttaagtcgtttttttttttttgaaaataatgttcaaattatattcaaaagaaaaataacttttttacaaccactgcttcttgagattgaagatttagagctagacaaaatttagaagaatttgaaaatttttgatgattttttttgtcgttttttgttttaaacatatataaacacaaaaacctcaattcttcgattactacgaaatatatcatggattcatacatctattaccatttttttctatctatttcgtagcttttgtaggacaattgacataaagaaattgtgatttgttggtttttacgttagtcagcctttactatatagactcattaatatatgatttaatgttatacaattttgattgatgaaaacaaaattctcttgtcatagcttgctcaccggtgcttctcccgactcgtgtagtt

SEQ ID NO: 948 - DNA, 469 bp, Arabidopsis thaliana
  Intron number 2 from transcript AT4G04620.1 (locus AT4G046 20) derived from phytozome v7.0 (chr-ID Chr4; pos 2329456 to 2329924 reverse strand)
ggagaagaactccttcaagctttctaatcctctgggttagtttccttgtttcttcttttttactttttgcaatttctgtagggtttttgcttgattgatgtcactcgataagcgtttaaaggatagttgtttacttctttggttttcttcgatcttttgggctttggattgtgttacgattatgatctttgttaaaggaactcaagttttgattagcctgatcacgagtttgttggttctgattctcgatctctgatattggttactctgtttgtattctccattgatttacattaacacgattaagttattagacctagtttgttgttgaatctataaagatttagtacttgtgcctctggaattttcctggaagttacttgaattacatgtcactaagatgtgttcatgtgtttgtataatccgttagttgtgactgattttttatggttttgttttggtttcagag

SEQ ID NO: 949 - DNA, 673 bp, Arabidopsis thaliana
  Intron number 2 from transcript AT4G07940.1 (locus AT4G079 40) derived from phytozome v7.0 (chr-ID Chr4; pos 4792810 to 4793482)
ggaggtaggaaaataagtcagcggattgaattgtggtattattaaattgctagactttggagttggttttattattaaaccaaagtcgatttaattcaattgaaaatataccaaattatttaattgagattaaaatttggttattagattaaatcatggattattattggaatataataatcttgatcggttaatctaaaccattgcagattaagatcgtcgttgatccgcgttaagcttcattctctatacgatgtcttacctcctagagacttcacctaaattaatcggagcgtgttgtgatgttttaggtagtagaattgattccatttgtgatgaagttgtgtcacataatttcagtggggagttttttttatagtgaattttaaaccacaaaaatcttcacttgttgctattctctcattagggattaggtttagggaccaattcaaaaagtttgtgaaaagagcacgaacattgcttttgtcttcgaaactataacaacttcttgggttaacttgttgcattcaactagtgattggccaataatactactatttaataagagcttactgaaaaactcgcctatgaacttgtcttactgcagtaagtgaagtaagcatatcacttctgggactgtaggaacttgggtggtggtgatactctagtagca

SEQ ID NO: 950 - DNA, 513 bp, Arabidopsis thaliana
  Intron number 2 from transcript AT4G10220.1 (locus AT4G102 20) derived from phytozome v7.0 (chr-ID Chr4; pos 6362610 to 6363122)
aagaaccacacatttcaccataaggtattgcattggtaatatattttttcttgatatttagaagatttcaactctatttagaatagatggtaattaagtattggcaatattgtgacaattaagataggattattttcttgttttattaattattaatagaaaagtaatttttttttgtgtccactggattggagattagaatttaagtttaggatttaattagtttggtttcccataattgttaaaaataaagataaaatccaaatgtatatatatatatatatatatatatatatattggataaacatataatgaccaaattttctttttatatttaatatgaagtatagataatcatatacactattttgattagaaagagccatattttttaaaaaaatcacttttgagttttaatttacctttttatagtttaatttaagaagagtactttaataaaatttaattttggaatggctaattaataatttatattggattttgatgtggag

SEQ ID NO: 951 - DNA, 573 bp, Arabidopsis thaliana
  Intron number 2 from transcript AT4G10920.2 (locus AT4G109 20) derived from phytozome v7.0 (chr-ID Chr4; pos 6697971 to 6698543 reverse strand)
gcaaagaacttcctacttctaaaggtactttaaagctctctttgttctatcacaatttttcagaaattgtagagccaaattctgtgtttatgtgcaaatgtttctttcaagttccactttagagttgcatcaaagtgattttcgttcacaattcgaaatttggagtcaatgatgattcagagttgttattgttttgggtgtgttaagtttcagttttgtatattaagtaaaaagctttggtgattacaaaccattttggccgaaaagttgttgacttgaatgattctttcagtttatggtagtttagtttaacctagcacttaagcttgttctgtattacatctttgaatttgtgcaagtcctgatattttgtgtaaaagtcattaaatagtttctgttttatctactttgagaatagttatttgggtttgaatatagttcatcttttcttctctatagataaaaaaaaaagggacaaccattttactcaaaatggaccatattgagaatatttttgattcatgtctggtctctgatatgttataatgttatctccaggaataagcttaacag

SEQ ID NO: 952 - DNA, 516 bp, Arabidopsis thaliana
  Intron number 2 from transcript AT4G13500.1 (locus AT4G135 00) derived from phytozome v7.0 (chr-ID Chr4; pos 7857097 to 7857612 reverse strand)
aaaaagtttataaccaaagaggaagaacctgaacagtaagttaatcttaattctcaattttcatcatgagattgtagaaaataacagaaactcatagaatggtaatgtaattttgcaaaatcacagaaaaacaaacctaggaaattgatgaaaacatggaaaattacaaaacgatatgtaggttaccaatttaatacaaaaattttagtctccattgcagaatttaagtagtttttttttttgtatgtgtcaatgacatgtagactggtggtttgtgacattgtgttagtattgtatcaatatccagactcaaatccgtgttagcaaaagaataaaaatatttgggttgtagtttagtcaaaagaactaaactcttttaaaatagaaaaagaacttaaattcttgcatgttcatttttcataaacatgcaattgtgattgaagaaatggttatggatgaggattgcattggaattttgtaggtattggcaaagcgttggagaaagagaaggagaga

SEQ ID NO: 953 - DNA, 356 bp, Arabidopsis thaliana
  Intron number 3 from transcript AT4G14305.1 (locus AT4G143 05) derived from phytozome v7.0 (chr-ID Chr4; pos 8235850 to 8236205 reverse strand)
aagggaagaagggtaattcaactgttgccaaaaaggttttgtcttttgaaccaaactatcatcttcttgaatgctttttgaattcttggttatataacaagtcaaacacttgttttcccagtttgtttgtatccatccttggaattggattctagattacaacaacttgtttaacttatattctgttagtttccttgttgcaatttggaatttgaatgtgcttaaattagtataatcgtatgatcaatatatgtacagagatctcttactgtgtgcttaaggatggattttgtggacctaacaaaaactgtgttgaatcaggttttgttggagcaacttacatcatctccttggaa

SEQ ID NO: 954 - DNA, 537 bp, Arabidopsis thaliana
  Intron number 3 from transcript AT4G14720.1 (locus AT4G147 20) derived from phytozome v7.0 (chr-ID Chr4; pos 8433679 to 8434215 reverse strand)
aaagatagccacaagactgtttctgtttcccccaggtttacattttcttctatagcgttttgactttgtgtggtatctttcttctgctttcatgcctcaagaagagaactgatgcattgtgacattctgtttgtgatcttagaataagtacttggtttgatatcagtgtcttagacattgaaaagtttctatatgaatcatggttttgatggtggattggtcacacagaatttaggttaaaagagtcagatagatcttcttggttctgtgttactctttactcttctgttttgaggattggtatgatgtgatgtgattattgctagtgaacgataaatcagttacttagtccattagtctatatgatttgtgaattctgcaattactaacaagagttttaggggtagttcatgtacaaagtcttattgatattaggtgcatgttgttttataaacaaattactactccaatgttatttaattaagttgtttaaacacgcttttttgtaatgttgcatcagaagcccagctgaaacaa

SEQ ID NO: 955 - DNA, 196 bp, Arabidopsis thaliana
  Intron number 2 from transcript AT4G16710.1 (locus AT4G167 10) derived from phytozome v7.0 (chr-ID Chr4; pos 9398965 to 9399160)
ggtcgaggaatctttttcccaactaaggttcttcttaatcatcttctccactcacacttctttacttgattgagatttgattatgaaaattggtgtacacacacaagagatgttgttctactcttctcttggtgtacacacacaagagatgcttctcatttgtgttttttttttttccattactgatctcagtgtg

SEQ ID NO: 956 - DNA, 465 bp, Arabidopsis thaliana
  Intron number 2 from transcript AT4G17050.1 (locus AT4G170 50) derived from phytozome v7.0 (chr-ID Chr4; pos 9589877 to 9590341)
cacgaatccaacactctctccttcacacctccaaggcaagtgttttcttacagcttcgtgttattaaaagtttgatacttttgctggttaagtttgattgctgtttttatcaattgttcgaggtcttgttgtatatgattgattttgagattaagttattgaaaagttaagattactttaattagtgtttaatctgagagggtttctggctcatgtcttgcaaaaatctcttaacttttgatcaattagatttagacataaccatggaagcattcaacttcagttctgtatatacagtctctttctgagagttcgctctctctgtgtataattagattagttttctaatcaaatttggaattgggggttttgtatttgcatcttcatcaagtgtttaagcagaaatatttatgagtctgttgttttgtagacttgcctggtttcacacgaagtgtatacaaacga

SEQ ID NO: 957 - DNA, 208 bp, Arabidopsis thaliana
  Intron number 2 from transcript AT4G17240.1 (locus AT4G172 40) derived from phytozome v7.0 (chr-ID Chr4; pos 9667289 to 9667496 reverse strand)
cattgctcaagaccttgctgaggtaattttgtttcttttttttactttctttgatttgtaacctgtgggacttagaatctgaatataatggaaaccaagttgtaactcttgggaagttctatatagcttaatgtattatttaatagtaatctgaaattactttttcttatcaggtgaaagcgaacaagtacttgtcagaaagctgtta

SEQ ID NO: 958 - DNA, 157 bp, Arabidopsis thaliana
  Intron number 2 from transcript AT4G18870.1 (locus AT4G188 70) derived from phytozome v7.0 (chr-ID Chr4; pos 10346836 to 10346992)
atatacattttttcttctataaacttaaaatatttgtaagtttcttatatgttagttttgtaagatgtaatcatattcttttagctagtttttgttttgcttattaactttgaatcttcttttttctatagggtttcaaaaaaattaatccaaagaa

SEQ ID NO: 959 - DNA, 973 bp, Arabidopsis thaliana
  Intron number 2 from transcript AT4G19970.1 (locus AT4G199 70) derived from phytozome v7.0 (chr-ID Chr4; pos 10819152 to 10820124)
aagttattggtttagggtacaacttcatattcacggtacatatactatctcaatcttcttctcttattttaatcataattaattagtgtatgttttctttataggtaccttttttccttcaacattttgcaattactgacttctatgcgttgaattagaaaatattacgcgccatcccccaagaaattcaattactttttaaactatataatatcaacaataacaaaattgttgataaaattgtaagacaaaaattatagaaaaatcttaatatttgatataggtataccaaaaaactaaaattacagcgttttgacttctttggcatgtataaaaatttaagttttaagaataatatataaggattcgattgtacataaaagtgaaatgttaagtttatgaaatatctatatgtcaactattgagaacaccgtttaactatgcatatgctttgttttaaatattgtccttttgttagatcttacttttacttgagcatttagatttgactatcgtgtttctttgtttttagcaaacctctgacttccaattttacgcttaattttccttgattcatttatattaatttgtggctggctatagatgtttaattgtcaactttataccgatagagaggttgcctaatttaacaaaacatgttctaattgacaccaattttattttcttggggaaattaaccgtgattgtcaaaacattacattgtttttctttatgaccacaaatgttttgacgtcagcaccacaacttaaaaaagtttcaaatttgcaatggtttttttttttgaaacttcaaatttacagtaattttctaccaaaatgttaaagtcttaattttgtaatacatacatatcttgttcaatttggtgacttaatttgtattactctgattgtgcactttattctttctataaattatatgtaacaacaagaatgataagtttgtcgtatatagg

SEQ ID NO: 960 - DNA, 403 bp, Arabidopsis thaliana
  Intron number 2 from transcript AT4G20070.1 (locus AT4G200 70) derived from phytozome v7.0 (chr-ID Chr4; pos 10862002 to 10862404)
acgaagctgtagcaagattacacgagcttggacaggtattcatcaacccaacaaaaaataaattcaaattgcttagctttcacttatactctgtttttaagattgtactcttcaatctgtaatttaatgtcaaatctatacacttttataccttcttatgacatatgccttggaatgtttgttttctcgtttgaccaacatgattaataacctcgtttgatggtgtcgttatctctcagggttgctcttaatttaatcaatactttaaaaattcttttctagctgtttcaatctaatgtttcttccagctactgttatcttaaaagtgaatacttctttattgaacatctcttagactctcatatctgagtttgttttggtttgatttctttacaggtgagtg

SEQ ID NO: 961 - DNA, 621 bp, Arabidopsis thaliana
  Intron number 2 from transcript AT4G20150.1 (locus AT4G201 50) derived from phytozome v7.0 (chr-ID Chr4; pos 10888546 to 10889166 reverse strand)
agcgccgttactttggtatatattatcctcttcttgtttttggtttatcagcttctcaaattttgcttttttttagaaaaattggtgacgtttttggtgtatgaaatggttgcaatggtaattgaattctccgcaatgaaacttcgctcaaggtttaatcatttggaagtttttcaattgagcgaatctctatgcaggcttagcttgttgcaaatctgtttagtcaggcactcttataaaagttaagacagtttgagcaatacaattattcctttgaacatgatctcaatgagtctggaaagatagatactttcgactagttctttggttctagagttagataggttgcaaggtgccagtacatataaactagatgcgaatttgaagggaaccacatatgtaaacgtgtctcgttttaggtagtaagttgctaagctttcgcaaactcttctttgataaatcttgtgacttatgataagttcaagaatctctgtttgtttatcaccattggctattgcatatttgcgagggactggcagaatttggtgtattacatttcttgttttgttggattgaataacttggaatattcaaacttttccttctgtttttgtaatgcag

SEQ ID NO: 962 - DNA, 301 bp, Arabidopsis thaliana
  Intron number 2 from transcript AT4G21600.1 (locus AT4G216 00) derived from phytozome v7.0 (chr-ID Chr4; pos 11485392 to 11485692)
gtcactacactgtttgcaaattagctgaggtgacttttcttgattagtttctgagatgttacactctaagatgaactctgtgaaagtgttgtaagatacttgaagattgatttagctttagagaactgtgaaaacaaaaatgcatctaggagctttctttattagttaggatggagataaatgtggtttaatcggcgtttcatcgaatttctttgagattggatcatgctttagactgaaaaggtattagctttgttgataagatgatttcaatttccaaatcctcagggattctttgagg

SEQ ID NO: 963 - DNA, 384 bp, Arabidopsis thaliana
  Intron number 1 from transcript AT4G22300.1 (locus AT4G223 00) derived from phytozome v7.0 (chr-ID Chr4; pos 11788621 to 11789004 reverse strand)
cccttctgctccaccaaatccagtctcttgcaattgtatgattgccctttactttctgattttggtgttgttcgtttctttcttctctaggcgttgactttgatcatcgtttttgaattgattgagctgaacaaatttgcattctcctaaataattcgaacttttaggtctagtccttactataggaatgatactagtgtgtctttcttttggatttagtgctttgatgtgtgattcatttatcaaattatggcttagtcatctaaatcctccctcattggtaaatgcagtggacaaaattgagtaaagattcatactttttcatgagaaatcttatgtacttgctaaatattgtgcctttgcctcttaatttgtcttgtgcag

SEQ ID NO: 964 - DNA, 549 bp, Arabidopsis thaliana
  Intron number 2 from transcript AT4G22745.1 (locus AT4G227 45) derived from phytozome v7.0 (chr-ID Chr4; pos 11947881 to 11948429 reverse strand)
agactgagaaatcagctgaaccaacaaccattaaggtaaacctcactaaacctaaacccggtttcaattttgctttgtggtctctctttaccacacagatcttatcattgaattctatctcttaattagggttttagttgagaatcttaaggttttttttcaaccagtttcgaagacttagttactagtgttatttgacgaactgatgcagacataaaggttataactttatttctcgttgtgtctttggctgatcagttatgtataaaatttaatcaatatttatgctatttaaggtttcgcagtgacccttttcttcaaatttggtttttgattctgcatgttctcagtatcactcttttggtggtgtccctgttttgacttttgtgtttctctacgcatgttttctcatcttgctatatattaaacgatttgtagtatgattctgttgatccaagtagcttgtgagtgactgttcttcttttcaccgagattccatatttgtattgtgcaggtgcagaaaaaagccggtactccagggaggtcgat

SEQ ID NO: 965 - DNA, 494 bp, Arabidopsis thaliana
  Intron number 3 from transcript AT4G25180.1 (locus AT4G251 80) derived from phytozome v7.0 (chr-ID Chr4; pos 12913083 to 12913576 reverse strand)
aagcatctcgccaatttgacagacgtatcgtcggcgtatgtagagaagcttctcagttctcaaatcttgctctctagtttctttccttatttaattttgtcgaaaattcgttaacagtttaatcgtaacttccctaatttcacttaaaataatcaaaatcttatacattagattatgatatatgcgaaataccaaaacggtgtgctttcttcatcgtagctaacaaggaattttctttttggttctgacctttactagttttgaatctgcctcatctcctttgctagcttttgttgatcgcatcaatttaactgccttgttaagtgactatgaaatgagttggtccaggacccctaacatgttcattgtagcttatactggcttagttcttatctctattacttaatccaaatgctcaatgttgaaaactaaacttttttgtgttgttgttattgctgactggccagaggagacccaaaaccgaaacgaaaggt

SEQ ID NO: 966 - DNA, 433 bp, Arabidopsis thaliana
  Intron number 2 from transcript AT4G26555.1 (locus AT4G265 55) derived from phytozome v7.0 (chr-ID Chr4; pos 13405431 to 13405863 reverse strand)
aaggaacctgaagtgatcaggtaaaattggtacttctctgagctatctaaactcctttttcattttgattttgattcaggaaattgcgttagaacgtcgatgataattgtagatgctagcattgaggaaaatttgtagttgtgtccatgtttgaaatgattttgtgattatatttctggtctgcttttcaaataatcttttactagtttatgaattgcaatattttatggcttcctgtttaatgtgcttgtttattgcattgataagccatgtacacaaagaagtgaggaatatgtgaaagcttctttgagcttattggattgttctacttgttgcatggacttagttcctcatcctagtttttaattgtttttttggttggcgatcgaagaatgcaggacattgaaactcccgagtggcgtgaggtatcaag

SEQ ID NO: 967 - DNA, 740 bp, Arabidopsis thaliana
  Intron number 1 from transcript AT4G26630.2 (locus AT4G266 30) derived from phytozome v7.0 (chr-ID Chr4; pos 13434891 to 13435630 reverse strand)
ctttagaaccctgtggatactctgcttaaatctttgtgagcttttatgttttgagctttgtttgaattcgcatgttcttttggttcttctttgtgtttgtttaaagttgcgatgagaagttagggtttctcatgcgcttcttttatttgtgaatttcgatgttttgattatttattgtctttttgatatctgatgctattaagttgttgacaaaatgcatgaatttgacgttgattgacttgatttcgagagattcaagatgggtttgtgttttgtctgaatctgtgtggtgtaagctctggagatttgtctgaatgaaagggtgttttttggtttcatttgtccatctggatctttgttctactgaatgtataagaagcgaggataaatgatgaaccttcgagattttggtttcttagtgacttacgcgaaatttccatttagttcttcttctgcagatctaaagtgggattaagtgataattatggatcaataatgagatctaaattagatttgtcttattgttgactagccaagttttagatgttgttttcctggaattagttttttttcgcatatatgctaagtgtgaattcaatgcgttttacatgttctttatgtcaagttgttcaatttctttatagagagcattaatttctgctatcgtagcaatattaatcctctgaactgatttctcattcacagccacaagaagtgtttttggtggaaggatctactga

SEQ ID NO: 968 - DNA, 796 bp, Arabidopsis thaliana
  Intron number 1 from transcript AT4G26630.1 (locus AT4G266 30) derived from phytozome v7.0 (chr-ID Chr4; pos 13434891 to 13435686 reverse strand)
aaaaaactcagtgccgagtcttgtgatactctgaggtgagattccgaagtcttctgctttagaaccctgtggatactctgcttaaatctttgtgagcttttatgttttgagctttgtttgaattcgcatgttcttttggttcttctttgtgtttgtttaaagttgcgatgagaagttagggtttctcatgcgcttcttttatttgtgaatttcgatgttttgattatttattgtctttttgatatctgatgctattaagttgttgacaaaatgcatgaatttgacgttgattgacttgatttcgagagattcaagatgggtttgtgttttgtctgaatctgtgtggtgtaagctctggagatttgtctgaatgaaagggtgttttttggtttcatttgtccatctggatctttgttctactgaatgtataagaagcgaggataaatgatgaaccttcgagattttggtttcttagtgacttacgcgaaatttccatttagttcttcttctgcagatctaaagtgggattaagtgataattatggatcaataatgagatctaaattagatttgtcttattgttgactagccaagttttagatgttgttttcctggaattagttttttttcgcatatatgctaagtgtgaattcaatgcgttttacatgttctttatgtcaagttgttcaatttctttatagagagcattaatttctgctatcgtagcaatattaatcctctgaactgatttctcattcacagccacaagaagtgtttttggtggaaggatctactga

SEQ ID NO: 969 - DNA, 253 bp, Arabidopsis thaliana
  Intron number 2 from transcript AT4G27820.1 (locus AT4G278 20) derived from phytozome v7.0 (chr-ID Chr4; pos 13860074 to 13860326 reverse strand)
aactcctagtgtctgggatactttctccaactcttgtaaatatatttttgtttttgtttgagtttttgtttttgtgaacaatttacgaatagaacataagttctggctagggattattaaagattcatgtatctttgtgtagttcatatcataggttactactctgcggttcaaattatgagtcattattagagggtttatattggaaaatttctcatatattcttcttcaaaacttgcagacgatacaggta

SEQ ID NO: 970 - DNA, 525 bp, Arabidopsis thaliana
  Intron number 2 from transcript AT4G30110.1 (locus AT4G301 10) derived from phytozome v7.0 (chr-ID Chr4; pos 14723169 to 14723693 reverse strand)
tagaatcgacatcaacattcttgttgttgtaaccggtaatctttttcttcttttttaactcctttcaagctaaaattcgaataggctttagggagtcactctccaatttatatgatatggatcacatttctcacaatattaattaaggtcaatattaagatatatactaatggctacagtagatataagtatgtgtctataatattttgatgggtcaatttagacatattatggtcaacacaaagcaattgttctgtagttttttttttgtgtcttttgctctgcatttggcatttttatgctactttgagaccaaaagagaaatcaaaaaataaaaaaagatttgaaatatttttatgttagataatgtttacaactttttgttatagtatcttgttcaagagttcttgatcatgttgcagctaaaatatgttaaggaaaattgattaaataattactcaaatccgatttaatagctcacttgatgctcttcctttgtttcaatcagtgggagcaacaattggc

SEQ ID NO: 971 - DNA, 949 bp, Arabidopsis thaliana
  Intron number 1 from transcript AT4G30260.1 (locus AT4G302 60) derived from phytozome v7.0 (chr-ID Chr4; pos 14817302 to 14818250 reverse strand)
ggcttactctttcgtggtctgcttccgttaagaaggtaagaacttcctttcagctttgttcattggaagttggaacctttgtggatgcggaaccctgtacattggctatgcgactgtgtgatcgatttgtgaacttggaatcttagcttttagcattccttatctttggaatgtccatatacccggaaatgaggaatttagatatacactcaatgttgacatattggctaaattgagagttcgtatagaatgttggtttttgtagcattgctcttaattaagactcttagccgtaggcagccattgttacttccgcataagtcggatttttacttgtagagttgatttgatgagcaacaacctactcatttggtgctttcttactattcattttcaattgtcttacatgtagagaatttgatgtgtaagatcttatagacaatttatgatattagaaactttcaccttgaactgatgtagctacagcttttctaaccgtaatggatgatggcatgactggtcggtcttttggttcatatattacgatttcccaacatatttaataagaaactgtgggtatcaaagagtaaaatggaacctttcctgttttctatgttggaatgcacttgaagtatagatcatgtatctgaaaaggaacgaattgattctgtatgtaggctctgctttgaatttgtcgaaatgttattaccacatattgtaatggaataccccacatcctagttttcatttccaactaaaatatacctttcccagcatatatatcccgagttatctacgtttgaatccctgaattagaaaggcactagattcttcatatctgctagattaaagaactgttctttgtccggtaccaattatcctttggtctcattcgttttctctgtgatttacagtctgaagtatttgccgtggcatttgcactacttgc

SEQ ID NO: 972 - DNA, 667 bp, Arabidopsis thaliana
  Intron number 2 from transcript AT4G31130.1 (locus AT4G311 30) derived from phytozome v7.0 (chr-ID Chr4; pos 15137744 to 15138410 reverse strand)
cctttgttttgggagttatcgccgagaacaagaaggtacaaaaaaaagtcgtctccttttgattatttcgtgagaaaactttaaatttcctgtttgttttcgatgatgatttttgttcttcttctttgtgtttatctactactaccacataaacaattcctgttgctttttggcgcaagttagttttttttttgcacaggaaataatcactctggaattgtatgtatcaaacagtgatctaactatggatgaatcaattgttttgatttcctgtttctttaggatgctttggttgttatttgtgctattctctgtgaatggaggatgtcaaatttgttttagtcacaggactatgactctgatattgtgatattgttggattgtatgaaaaaatgtgatcttctcacagcttcataattgtatctaatgatgggaaaccaatgtgatcttaactgacccgtagctaaatcttactctttctacacaattgtttgacctcatcattgtcactgatctctctaggataccgtatgtcaagagcttttcataagtgggtaaaccacttcggctttcttattcttatgtgttactgattgtgtgatttgtttctgttctttgtgttttcatcttagcctgcgtctgggactccaataagtggaaaaggagt

SEQ ID NO: 973 - DNA, 263 bp, Arabidopsis thaliana
  Intron number 3 from transcript AT4G32010.1 (locus AT4G320 10) derived from phytozome v7.0 (chr-ID Chr4; pos 15480754 to 15481016)
gtggtttctcttttttggacaagtttcttcgaaaggtctgttgattttctttgtctcttgtgaactttaatttcgtttttttttccttaggatgcaatgatatcttatctttagatgtcaatatcaaatgtccttaactattcattcatttacggattttgattactttataacagttggtatcttcttctatatatcgtcatcttatatgtttttatttgtatatagtctttcacagaaggagcgtattgagtttctcgaca

SEQ ID NO: 974 - DNA, 890 bp, Arabidopsis thaliana
  Intron number 1 from transcript AT4G33580.1 (locus AT4G335 80) derived from phytozome v7.0 (chr-ID Chr4; pos 16138440 to 16139329)
tcttcaaggagaagtcttcctctttccagatttaggttagattcatgttataactttttctaagatttctgatttccgaatttgaattttgtttatgatttagtgtcggtgtagaactgaatgatactaatgcaaatgattgagatcgatttgatgtaaaattatcaccttctcgtgtaatttaaaggtcgaatcgtccggggtcacattgtcgcaggtttatgtttatcctctaaattagggtttcttttgtgaaattggggattttttttgtctgcttacaaatcatgctgttttatttctcttgaaattaacttcatgctgtttttgacatagaatacaacagacaaactagatttaacagaactgttaagatgaacggaacataagatgacttctaaaaatggataaattttaggtcaatttttctttccattttcagttttctgaccctaggtgagatttgttttggacttttcatgtattgtacatgtgagttaatcaaataaaatctaggttcatgcatttacaaacatagtttaggaagtaaaatcacatgttaagttttgatcttaaactcttgttgttattcttgttgttgtttgctacttgttagaattatgaatctttgacctatagcaaatttccataaaatcaatcatgttaacccttaatccaaatcctccatcaaagagtttttttgcattagttagcttctcatgaagcgaatttggttttgggaaaagaatttgtggggtggggtccaaaactgacacgacacaaaaactttggtttctccgtctttgttggagaaatgcattcacatccacttcttaccaaaattaaataaatcaatatttaatttttttaaggccttcttgttttttcag

SEQ ID NO: 975 - DNA, 370 bp, Arabidopsis thaliana
  Intron number 3 from transcript AT4G33580.1 (locus AT4G335 80) derived from phytozome v7.0 (chr-ID Chr4; pos 16139607 to 16139976)
aagacaacccagttgagaattccagcttctttcaggtaatttcttggctttactaacttttcagtttggaattgggataacgatccgtaattatgatatagttgtgagagaatctatgataagaatcttagagaaatcacttggtgatgcattgtactttgttgaagaccctttttgtttgtacagcttatgtttttgtttcttaggtttctataagtagtgtgtcttttataagatttgaaaagaagagtcttttttgtgatgcttcaaatggcaaaatctcagtgaagatgtttttataataatcaaatgttcagatttagtatgtttttgtggtgtttgcagaagaaaagctacaaacttgcaagtg

SEQ ID NO: 976 - DNA, 717 bp, Arabidopsis thaliana
  Intron number 1 from transcript AT4G33980.2 (locus AT4G339 80) derived from phytozome v7.0 (chr-ID Chr4; pos 16284088 to 16284804 reverse strand)
ctgattccaaactggtatcatatcaaatcttcctctcgcaatttgtttatttaccatgtctcgtttgatagttttttttggttcgatatgtaggagattcgtcgaatatgaacttgattcgtgtatgagagaataaaaatctcttttttttttttttggttccttgtcgaatcgtgattttagatattttcgtaatccaaaggcaaagttaaagagggaaaaaatatcttctggtttactttgtttgttcttatcgatttggaaactaatttatgttagctttagatctgtttctatatgagtataggagcatactcattaattttgttttgatttggtaattttaatcatctctgattctaccaaatgtcgaaaaattgtcttcttcaagcaaatctgaccgtccaactaaatgagattgtttgggtttctttttccttgcccttattagcagaagatttcgattgttcaacaagtcttggacgccgaggcaatttgatgcctgatgatcttgagatctattaactaacaatccttgacctgtatcaatcaaaaccattccaatggtcaaaatcgaaaaatcctagctttacactagttttcgagtgattagagttcgtgatcgtgttgtgatggtttattttcttgacaaaagtcccactctttatagtcttattgaattcttcctgcctaaagtttattgtttgtttctgcagg

SEQ ID NO: 977 - DNA, 640 bp, Arabidopsis thaliana
  Intron number 2 from transcript AT4G34620.1 (locus AT4G346 20) derived from phytozome v7.0 (chr-ID Chr4; pos 16535212 to 16535851 reverse strand)
gcggatagagtgagcctcaaattcgacagaatcaagtatgttttttttacttgttctatcatcttcatattcctgtttgcttgtataattgtgtcaagtattttaggacaccagttagatgtgaaactcatgattgtttgataagactgaaacactaaagagtctctttctcgacattatccatatgattgattattcctcatgaatgtgttttcttgtttgtcttttaatcatcttaattcattctctttagtattctgcaaggtcataaacttgttcttgccacaatgatgctgcctaattgcttagattgtgacaaattgagatgctttctgttgattctgtgtccaaaactctatttgcataaggctacaatccttaattcatttgcttctctcagtcatgtttggttgtttctacacctaatgcatttcatctggtgcaagttttctgtgaggcttggttttgcttgtatgattgatttgattagactggtttaaaagtctaaatccacacagttcttggtgtctaactaaacttcttttttattttgtgcaactgttgaaagaaattgattttcactctatggtactcgaataatgcaggtactggttatctgttggagctcaaccaacagaca

SEQ ID NO: 978 - DNA, 649 bp, Arabidopsis thaliana
  Intron number 3 from transcript AT4G37800.1 (locus AT4G378 00) derived from phytozome v7.0 (chr-ID Chr4; pos 17776080 to 17776728 reverse strand)
gaaccatctccgtattgtgtaagtcacattattatgtctaaacccaattaaggttgcatatattgtaaaacaggttttttttaattgtttgaataaatttaacattcattccaaacaaaacaaaaaagtcacattatataatgtgtacatataaatacacatatacagccaattatcattattcttcacaatctctgtctaattattaaaaggaatgtgacatatagttgaatcaactatagcaaattaaccaatacttttgtactatagattcgttttaactattcttgtcttttttgttttttggttttcatgtgaagaactattcttgtctttttcattattgtcacgagagacatgattggtttcatattttgtcgacccatgggccatgtaataagagaatgaaagagacagcatatttgttttagaggcgttcatgatttgaacttataaatgtcccacattttaataatccattttttttggtaatgacattttaataatccattaggcaatggccatcagtttataagaataaaaaaacaaatgatcaaagatatttctatttgcagtaacaatatatgtagaactgttattcactttctaatagtctaaatatgtgtggtgtgtagcttctacgtagaca

SEQ ID NO: 979 - DNA, 329 bp, Arabidopsis thaliana
  Intron number 3 from transcript AT4G38092.1 (locus AT4G380 92) derived from phytozome v7.0 (chr-ID Chr4; pos 17886015 to 17886343)
ataaaggcggcttgattaggtattttttcttcttttatgttatttgggtgatatatgcttaagcttccagttggtcaccctctgctctatcaggaagcaacccttggtgttaagtttgtaatttttgattggctttgcaaatcaactgagagcattcatgcttcacaatatagtagttttagaatactgctgctttcctggtcacatcattttccgagataatcatgactatataagaaaatataggtttttattatgaagttttggattatataaaaaaaaaaaaataagtaatatggcgaaatctttctgcagcttctgccttggct

SEQ ID NO: 980 - DNA, 468 bp, Arabidopsis thaliana
  Intron number 2 from transcript AT4G39860.1 (locus AT4G398 60) derived from phytozome v7.0 (chr-ID Chr4; pos 18500159 to 18500626)
aagaagcccagtcgcttaataagctgtaaaagattcatttaatctctatctctcattgcattaccagatctaataagtatacctggatttgttttttgtattacaactgaaacttaaagtttaaagctttgatcttgtgattcaccaaaatggtttctttgaatgatgaagtcacttctttttcttagtgataaatttttatgaaagggattggtcaaatgctttttggcttttctgagaagttttagtgttaatagtattttattacattctttgttcatcaaagccccacaccatttacatgtcaaactactactgttcattatctaatgaggagatctttgtcttctttgttatttttgattgtttcattaagtgacttcatcattacatgtaaaggtctttaccggtctctaatatggcgctttttggtacagaaagaattgttcagggtacaagttaaaagag

SEQ ID NO: 981 - DNA, 537 bp, Arabidopsis thaliana
  Intron number 2 from transcript AT5G02540.1 (locus AT5G025 40) derived from phytozome v7.0 (chr-ID Chr5; pos 569048 t o 569584)
ccctccatcttcctctcaatctcctcatgtacacattctctctttctctcattcagtttaaagcgtttgcaccgccttttttagcgtttggattattgattcttatgacaattacaggctttgaatggtttccacattaacaacgttaattaacactgttttggttaccattcctctgttattgtgtagtactactatttacgttagttaggtaataaacaacgacacccaataattatttatgcagctttttcttttttgatgtttaatgctgtgacaatgacattattttttcgctctaaacatttgacttctttcttcttgttttgacaacatcaatgttactttacattttccaatgtggtatcatttattactaccaaatctctacacacgtatcactagatttgtagatgtgtgtagcaagaaaaataaatgttatctgtttttattttatttttttgggtgaaaaaaaaaagtgcatacttttaattaataattataacaattgtacacaaaatggattttgcagaaaca

SEQ ID NO: 982 - DNA, 231 bp, Arabidopsis thaliana
  Intron number 2 from transcript AT5G03440.2 (locus AT5G034 40) derived from phytozome v7.0 (chr-ID Chr5; pos 857612 t o 857842 reverse strand)
agagaagtcgtctgaggagatctttgtcaaccgtaagctttaacactcttcacaattgttaaggaaaagggactgtctcatcaggttaattcgtgtcaagattaatgctttgttcttctggtcagcaccaatattgactcagtttctttgaaagaatgtgaaatataaacacatgatcttaaattttgattaccctttattgattgtgcagccgagattgcgtggcaagag

SEQ ID NO: 983 - DNA, 358 bp, Arabidopsis thaliana
  Intron number 3 from transcript AT5G03905.1 (locus AT5G039 05) derived from phytozome v7.0 (chr-ID Chr5; pos 1053653 to 1054010)
aggaggaattgatccgtgctgctttcgtggtaaagccctcttttttcctttttgcatcttttcaatgcttataatctcaatagtcaccatcttctacactttcttctcatcattttgcttagatagtctatataagcatttgtgtatgctttgcctgagctgattggagtccataagcctatgattcttaactatcatttgcaacgtgtcttccttatgccctgtgtttttgaaaaggagacaagacataatcttgaaactgcatgttggtttaagtaaccattttaagattttcatttgatttttaatgctttggtgttcaggtagctgtaaacccgtccgcagtgggtgggtgcag

SEQ ID NO: 984 - DNA, 883 bp, Arabidopsis thaliana
  Intron number 1 from transcript AT5G07240.1 (locus AT5G072 40) derived from phytozome v7.0 (chr-ID Chr5; pos 2272358 to 2273240)
aagattcaatccgcttttcgtggctacttggtgagttaattacttctctaagtttaatcttaatactcaacttcataatctataattttgtttgaaagaaattaagtttttgagccaaagtgtggaatagctgtctgatgttgatttttctacttaaacccaaattgaaatatttactaaacaaaaaaaagaaagaatgagaataatttgtatttatttgtattggtccccgaaaaagactaggaaaggagacaaatgaatgaataatgataccaagaaacttgtttagagccgatacgattctctaccgagtaccgacactatttaatggtactactctagaattgtatagataaaatttggtcccaaaaaatatgcaaatattatctcaaacaaaatcttacctaactagatttagctaagggcttattctttgtaataaattaatttttacattaaaccaagtcagcaataaagaataacaaggagagggccaagttctttattttatctactttctttttagtttccaaagttccaaagtgtattttactataaaggtgaaactacagattggtttttaagctttttgagctttaaagttgcatcaccactgttactatcaaagttgcaacctacctttttcataatttgacagataggttatgtagtttagacacataatttagagattctctaatcttattgcttcgtatataacaaataaggtgtgtatcatttagaagaaaatgatagtggttgggaaactatgagtaatttaataaggagtattagtgtattactttgtggtttgaattaagtgtgtaaccaagttttctttaattcaggcgaggagggcgttgagagcactgaaggcattagt

SEQ ID NO: 985 - DNA, 223 bp, Arabidopsis thaliana
  Intron number 2 from transcript AT5G07350.2 (locus AT5G073 50) derived from phytozome v7.0 (chr-ID Chr5; pos 2324526 to 2324748 reverse strand)
gcacctaaggtgagttttaatctcaagttttttttaccagatattagtgtttgaaacaaaagcttgtgatcatcacaaccaatcaaaaaatctttttgatattgatttttttcttttcatactgcttatgaagtcttaaaccgcagattatattattttttgttggaattaaatgtcatgttgtttgttttttcctctttttaggctcgcagaggaggtatag

SEQ ID NO: 986 - DNA, 328 bp, Arabidopsis thaliana
  Intron number 2 from transcript AT5G08185.1 (locus AT5G081 85) derived from phytozome v7.0 (chr-ID Chr5; pos 2634841 to 2635168 reverse strand)
taaggcaataaagatccagctatttactacttgtggtatagattttgactgttgaattttcagatctgatgtgtttcgtttgatccgattcggaaaatttatgtttcgttgacattttggagtttagttggaagaagagtgagagtcgctggaggcagcggttcatcgatctcttcctgtgaacacattaaaaatgtaaaagcatgaatagatcgataaacctctgcatccagcgtttgcctcttgtatctttcttattgacttgaatctttttgtttattggtttttgaaagaagaaaaaagtgagggaaaacagagtcaagtccga

SEQ ID NO: 987 - DNA, 428 bp, Arabidopsis thaliana
  Intron number 2 from transcript AT5G09240.2 (locus AT5G092 40) derived from phytozome v7.0 (chr-ID Chr5; pos 2874031 to 2874458 reverse strand)
ggacggtataactttaccttgtaatagcaagcaaggtaaatttttgtttttaactacatatcttcttttgactgtctctcttcttctcacaattccacatttgctaatactctgtatcctcctctcttttcttttttatggtcaacaatgtatcctcatccctttgttttcatgttttgtttcgttaaggttctgcatttagttagcagatcttagggacttttattatatatctagtacttctgcggtttgggactgagaggaggagatgcgcagagtgttttcttttcatcaacaacgtcttggtttttgtctcctagggccagctatattagtttgctttctttgcataatcatgttgacaagattttcgatgtctcctatatgttgcaggtatctctctaagcctggaacaggtattcacatct

SEQ ID NO: 988 - DNA, 263 bp, Arabidopsis thaliana
  Intron number 2 from transcript AT5G09280.1 (locus AT5G092 80) derived from phytozome v7.0 (chr-ID Chr5; pos 2880541 to 2880803 reverse strand)
actatttcgtggcaccaaaatccggaagcaaagaggtccgtatcaagtagtaatggaaaacgctaaaacacaaaacgcattttctttttttttatctcatctaacatttgaatttgaacttgttgtagataacttggaagaaacgtagcaatggagaccaaatgcaatggaaattctactcagtgaatgattacttcgagaacggagcttgttttggcctacacaaaggtgttggaaaagcacggcccaattacggcccagat

SEQ ID NO: 989 - DNA, 649 bp, Arabidopsis thaliana
  Intron number 2 from transcript AT5G10450.1 (locus AT5G104 50) derived from phytozome v7.0 (chr-ID Chr5; pos 3284748 to 3285396 reverse strand)
gccaaacaggttactcttcttctttctttttcgctgcttgcctcaattaggaacatctctttctctctctttccgttgcctctctggtaacaaacatataagtcgttgacctgagtttgtctcttgagagtttgcttctgtttcttgctttatgttattacaaaagagaattgaccacttgttgactagtcttgttgtacttttttcttttcttaagatgtattgttgggtaaagaaccaatctttggccctctgtgtatcatcatttcttatcactttgaatgagcttgcttgatgttttgactaagaggattgaccacttgttgactatttctgttgtacctttatctcctgagtatgttttgttagataaagaaccactctttgattcatggtgcttcatctagtatcactttgagtcagcttttttaacaaaattcctcttttttaataatcacagactaatatgatgatgaagatccatgttgtccaatactaggactgatgtctcattctgtttcaactagaacttacgtataagacatttagtaaaacggcagaaatttttcactgtgggggcattctcaattttgatactggatttttaattgtaggcttttgaggaggccatagctgagcttgacactct

SEQ ID NO: 990 - DNA, 405 bp, Arabidopsis thaliana
  Intron number 2 from transcript AT5G10460.1 (locus AT5G104 60) derived from phytozome v7.0 (chr-ID Chr5; pos 3288356 to 3288760)
tggcaaaaaaccttaccccggtgctatctcaacatgtacgttatcatttctatctgtgagcatatagctattcgggttgttgattctgattccattggggttcaacatttgtagctcgcataaaaccatttctttaaactgtttaatgtttaggtaggacttggcttcagtgttgactatatttgatgtaatcagatgtgatttggcaatgtatatttgtccatataagttgtgaaaccgaaaatgaaatatcatcatacttttgagaatttccatttcttgatagttttctttcagatttcttcggtttcgttgtaattctgacttctgcataatgactgatctttcttttgttctattggatttacagtgaaaaatcttgcaacagcgggtgccaaaattgtg

SEQ ID NO: 991 - DNA, 485 bp, Arabidopsis thaliana
  Intron number 1 from transcript AT5G14400.1 (locus AT5G144 00) derived from phytozome v7.0 (chr-ID Chr5; pos 4643575 to 4644059)
tccatcggtacattcttgcaacaacgtgtttcacggtaataattaacatgttctttttatttcttttgttgttgttgtcaattgtagtgcgaaatttaaattgtgtagttagcaacaacaaaaaaactgtgtagacaacaatatacacccttcatgggaactcagttttcaaaaaataattgaaccaaattggctttcagcaaaaaacgtattagccacttaatgcctaaacaccaaataacctattttctttaaaggatcattatatttttatatataattaattaaaagaaaaaaagtaatgttcacagtactacagaagattcatatctgatttttttgcatacatgacaatttgattgcctaccaatgtttttatgattttattttgtaaatccaatttatatactatacaacatataatatatctttttttgtttgtttaagcctaaattgacaataactgtgaatgttgttattcaggt

SEQ ID NO: 992 - DNA, 529 bp, Arabidopsis thaliana
  Intron number 3 from transcript AT5G14600.1 (locus AT5G146 00) derived from phytozome v7.0 (chr-ID Chr5; pos 4708266 to 4708794)
acggacttgtgaagtcctcagatcagatttcattggtaagtttattctgatttacaacatctctttctactttcttctccaactcaaactaaaagagctctagatctacacattatccgaatgctcttgccttggaaggatcctaaaaatcaaagtactaaagtagtgaatttgggactgaacctctcctcgattttcaaatcctagtggctagtactaaaatcatgttgtatagactgaagttctgttctttagtctacaattttttccaatatgtatcatcgactttctatggtcacacatctttggattaataagtcgaaaggattgctttaagtagataagtatctttagagaaatagtttgacattctttggccttggaaagtcaggggaatcaaaaccaactgtcataggcatataagtccttatttccttgagagtttcattctttcttataccggtttttgctcatgatgagtttgttttttgcagagataagaacgtttgaggtgcttctcagaacatat

SEQ ID NO: 993 - DNA, 391 bp, Arabidopsis thaliana
  Intron number 2 from transcript AT5G14720.1 (locus AT5G147 20) derived from phytozome v7.0 (chr-ID Chr5; pos 4752119 to 4752509 reverse strand)
aggttcttgatctggaaaagtgcaacaacgatctggtaggaacttttattctgaattatgaaagaacaacttccttattcctagtctctagctatttcctggagttacatcaaagatagaagtttagttttctcttacttttgttttcctgcttcatgctttactaatagcgagtccaattgtagtttaattgcctttgaaagtagagaactccagatcagtctgtcaaattgtagttgcatgtttctatcttatcttctctttttatttttattttcatgttaaagttttacgagcttaagctagatgtaaagattcagatgcagttttgaacaccatggaattcttgtctctgttaatctgaatgaataggaactgaattgcttgtagg

SEQ ID NO: 994 - DNA, 422 bp, Arabidopsis thaliana
  Intron number 2 from transcript AT5G15200.1 (locus AT5G152 00) derived from phytozome v7.0 (chr-ID Chr5; pos 4935276 to 4935697 reverse strand)
cactctcgtgtcctcatcaggcagaggcatatcaggtattgcatctcttcgatttatttgtgcttgtgtatgaattatctttgttatatcaattgataggatctgaaatgaaattaacattttctctgtttccatttcatgattatctttgaatgattcggctttgtgttacacttctttaaacactgtctctttggtctaacagattgtagtctttcatgagtttgtactgtcttttggtttgatctttcttcaaacgttttattggttgctcttaagttcacgcaagtcttgataacttgtgcctcttgagtggcttaatatgaagtgtgttttgatatgatcttaaaaattgggtactcatatttgtttcgggtgttgttgtagggttggaaagcaattggtgaacattccatcattca

SEQ ID NO: 995 - DNA, 339 bp, Arabidopsis thaliana
  Intron number 3 from transcript AT5G15680.1 (locus AT5G156 80) derived from phytozome v7.0 (chr-ID Chr5; pos 5109968 to 5110306 reverse strand)
gagggaaaggtgggtatattgttatttctctctcttaacaattagatggtatctgactcttgtctgtatgaaatacgtctagaagaccttgtctcccacgaggctattatttctacatcttgcattatttttaggtttgagtcattgatcttctatgtttcagtgtttcttttggactctttggtgcattatcataattcttatgtggattatcactttttcttcgtataggtgaatttattgactagatgttatctatgattgggtgaagccacttctctagaccattactaatattgtgtttgtttgtggcttgcagtgaatcacctaaaggtgcaa

SEQ ID NO: 996 - DNA, 312 bp, Arabidopsis thaliana
  Intron number 1 from transcript AT5G17440.1 (locus AT5G174 40) derived from phytozome v7.0 (chr-ID Chr5; pos 5749961 to 5750272)
ctggtctctgccctcacgagcttttccaattgacggttcgtatttatattcatcttcttcgatacccaattcctttcttcttcttttgctcaatggctttctcattagtatcttggaaaaaaacttaatttcctcatcctttgtgagctttgattcataaagttttagtattggtatgtgttaattgatgtagttgttttggataatgttaaaaatcctagcttgatttgggggaggttgttgatttaggtaacaatgtggctaatttggtttatgagtagtctttgacatgtttgttattattatcagaaa

SEQ ID NO: 997 - DNA, 323 bp, Arabidopsis thaliana
  Intron number 2 from transcript AT5G19930.2 (locus AT5G199 30) derived from phytozome v7.0 (chr-ID Chr5; pos 6738622 to 6738944 reverse strand)
ttgagttcaaagaaggtggacaaaggaactggtacatttcctttctttctttcttcgtttttttgtaggctccgatttttgaaattgtgaattgtctttgagagtctttgatcaaggagggggaatgaactctagatctttgagagtctatagtgaatagcatttagtcttactttcaacatcgtgttggtcggtaacatgaaattaattttccattgacatattagcaaatgatttcactttcagaagttgttatttatgaccaacaaaaggttgttttgacagaagattcctcaaatatcttgtttcagggtacaagtgct

SEQ ID NO: 998 - DNA, 728 bp, Arabidopsis thaliana
  Intron number 3 from transcript AT5G20570.3 (locus AT5G205 70) derived from phytozome v7.0 (chr-ID Chr5; pos 6957061 to 6957788 reverse strand)
cagtgccacaagtgaagagtgcactgtagcttggggtaagcatttttcttcttctatgatcatgatctcaatcgttgctttttgtttggaaacttgatttggtttataattgtagctatcgtaattgtgaatctagaaacacaaaactgtatgcgaaagtgttgtgtgaaacaattttagtatctctgagtgcgtgttttaaaacttgacattgaattttacttatgtggtagtatcactctgatagatgtctttgctttatttgagagcagaccctgttccttgttttgcagcaatctagattggtcgatgagtagtacagttgattagatttatggagttttaaagattttctgagagagagagagaccaaattgtagttattgtgtttacatgctttcatagtcttgcagttgattgtacgattgatgatgaattaaaaactcagaggacgaccaaaataactgcaataagtatttctgtattcttgattgctcaatgaaagatgaccacttggagggtgaatcttgttagctaggaagtattagagaaagtaggaagtattcctttaagatgtatgtgattgtgtgatgaccttttcgaatcttttttctataatgtgacaactcaagtggatatacataaattatttagtgccttccctaacgaaagatactcaatatgtacttgcaggggtttgcaatcacgccttccactttcactgcatc

SEQ ID NO: 999 - DNA, 357 bp, Arabidopsis thaliana
  Intron number 3 from transcript AT5G22360.1 (locus AT5G223 60) derived from phytozome v7.0 (chr-ID Chr5; pos 7404458 to 7404814 reverse strand)
ctaagctcctgtaaggatctctctcacttctagattctcttcattccttttctttgctaactaagagatacgctcttctacattctaggtgtttcaactcgcctttgcagcatagtttattgatatgtttcttaaactagagatacagtagttctaagattcaacattattttcgattttgggaaattctcctcgacaaaatatctaatttttggctgataggaactacactgccttgattccacctctgcttaaagaaatttcattattgttttgttttgatgcttgagttccagatcacttttattaatcaacaaaactgcttttcttgtttgtgttcggcagggtcttgttgac

SEQ ID NO: 1000 - DNA, 732 bp, Arabidopsis thaliana
  Intron number 2 from transcript AT5G23870.3 (locus AT5G238 70) derived from phytozome v7.0 (chr-ID Chr5; pos 8048759 to 8049490 reverse strand)
gtgctggatcaaacaattggattttgcagtttgaggtaattaaattttacatttactctaactctctaattaacttttttttatatacgtcatagaattaaatctgtaattaattcgaaaatgattaaaacacaaaacgattgttattcttaaaaatggttgggattaatcatttgctaccaagaaaatcaatcagccaaccatttgcttagtgagttagttttttttctttttcttattggtcactgcctagttaaagtatttggtgttgtaaccaactccatgagtacgcaaataattgaatccagctatcctagggaagatataaatattttatgtgtattagtcatctacaaattattagtcaaattcttaaaataaatcttgataacgatttgaaatcaagtgattaaaattttaaaatgtgacagctggtagattggtaatacttgttttctagttatgtacacacttaaatacccgaaaactactaattacggcgccgttttaagaactttagagcattatcatgtctcgactctcgagctagttggatcgtgtctcacgcctctcactttatgacacgcatttataacattctctctatagttcttttctacgaaacagaaacacatttatgtttattcaatcgaccactcatttgtctatatagagaactatcaagattatttgaatctttactacaagtaaaaaatggttatagggaggagg

SEQ ID NO: 1001 - DNA, 316 bp, Arabidopsis thaliana
  Intron number 2 from transcript AT5G24090.1 (locus AT5G240 90) derived from phytozome v7.0 (chr-ID Chr5; pos 8144176 to 8144491 reverse strand)
atctcgccaggtagtagtataaatgtataattaagaaaacattttgaataaatgacaaatgttgtcgtgactgaaaaagactagttatcaaaagaagatgttgaacaccaccaaacgatttgggtgactaatttatctattttagttccggtccaaaaagataacgaaattcgaactttatatagaaaagttttgtttaggtgtttaaattccttctttgtgttgactttttttttttgtgaaaataacaaactaaacttcaaaaaaaaaaatgtgtacaggactctctcaaagtttagccacagaggaagaaaaa

SEQ ID NO: 1002 - DNA, 457 bp, Arabidopsis thaliana
  Intron number 2 from transcript AT5G24410.1 (locus AT5G244 10) derived from phytozome v7.0 (chr-ID Chr5; pos 8333135 to 8333591 reverse strand)
gttttctctccaaggtatttttcttgctcctcatttatcaaactatttttgtttttttgttggtaaaacgaactatatatttgaagataccttgatacaaatttttgtatcaaacaaatatttatgatataaacatatattgttttaaaattaagaaggaatcgtacgtacatatatattcaatttcatatatataaaagaactagaattacaaaatcatctcggcatatattgcaaaaaaaaaaaactttgtgaagttaatgagttgctaactcaaaatcatgctttgacattaattaaactgacgatgtcattcatattcgtgtaggtttatatgcatattttcccaatatgattttattttagttataaaccgtcttgttagatgattttgatatatacatatatttcacactatttaggttccaataccaattgcaaacatatatccaatcga

SEQ ID NO: 1003 - DNA, 387 bp, Arabidopsis thaliana
  Intron number 3 from transcript AT5G25470.1 (locus AT5G254 70) derived from phytozome v7.0 (chr-ID Chr5; pos 8866778 to 8867164 reverse strand)
tgtctccaggacaaaactggaaatctaaatccgtaaaacaaaattagtctctcttcttttctaatctttcgaaaatgtagctcctttgattttgtactcactgttatttccattgaacttctttgtttgctctaaagatctattgttcgtttgttgttcttgttcgaaaaagcttttgatctttcaagaaacatttgaggagattttaatggcacaatgattcctgcttcttgttctgcttgacaagctcgtgttctgctgattgtattttagcttttagtctcatgtttccttcttctaatgtcagtatcgtttgttgttgtcaactgttatgatttctgtctttatgaagaggagttttccggaagagtttgtgaaaagcacgcc

SEQ ID NO: 1004 - DNA, 534 bp, Arabidopsis thaliana
  Intron number 2 from transcript AT5G26920.2 (locus AT5G269 20) derived from phytozome v7.0 (chr-ID Chr5; pos 9476110 to 9476643)
ataagaagaattgtgagtttcttttctttctaattttccaatcgtctttacttaacaacttactctgcttaatcttaattaatcacggattgtttttaattaacatgttcctaatattgagccaccaagtttgaccgactacttctcttcttgttttaaactttgtgggctcctcgatctacaatggtccctaagtctagtaactatatagtatataacaaaatagtcacaagtctagtaattatagtatatatcaaattatgaaagtataacgaaatcattaatatgtttcggtggacttgtgactaatacaatttgtaccgttttaacggttaccaatcatgaaaaaattatgaaaactttgatttgcccatgtcttatgattacttaccgctaaatatttgtgagctgtttatgttacgtaaccataccatatgtttaataatattcgttgttacatgcaaattagttaatgatattctcaactcttttggtttaggtccgagaggagatacagcgtagtcttcaaccttt

SEQ ID NO: 1005 - DNA, 627 bp, Arabidopsis thaliana
  Intron number 2 from transcript AT5G27430.1 (locus AT5G274 30) derived from phytozome v7.0 (chr-ID Chr5; pos 9687871 to 9688497)
aggtaaggtttcatactcttgcctcttcttacggctttctgtgtcttcactgtaagtttctatgatttgagccaccaatatatatgctctggtgtgctgagttatgtttatctggtcacgcttagtgggtaaaattatgcttattttagcataaactttaatgagattaggttttgtatcacaccgatctttagttgtttagtaagatgacagaaattcttggtaaaacactctaaatcgtcttctttagtgaagttttccttagagtagcataaattttggcttttttcttgatggttgaataaggtggcacttgttggtatgagactttattgagagtcatattaagcttagcgttcattgaatttgatggccataggggtttagatgcaactgtttctttgaacattgtagaaatatataaagattttacattagcctactcttgaaagtcaaattgtcgaatttgattatattatactctagaggtgatattagttaatgagtttatactcggttatttacagcttattcatataccagttaacgtgtctcatatattctaacttcttagcatttaacgtgtttgcaggtcagcttgacactgaacataacagctgacttgca

SEQ ID NO: 1006 - DNA, 501 bp, Arabidopsis thaliana
  Intron number 2 from transcript AT5G28350.2 (locus AT5G283 50) derived from phytozome v7.0 (chr-ID Chr5; pos 10320613 to 10321113)
tgtggagtccagacgccaaattgattgctgttcttgtaagttcttagtctcactcttttcctttgctaatttctgctaattgtttagtcactttctccagctgagaatttattgatttgtttatacaaaatcttgttattggatcttctccagattgttctttatgtgtaaggatgagaaaaaacatgtttttaggtttgattggttgatgatttcagacattctaaagcctctaatttcagtagtatcttatttgaatcgtttgatcaagatgcatgaaaactcggaacttgtgaaaaaaccagttttttgtatgtcttctcaccaattattttttgattcgcagacatcatcgttctttcttcatatatataaaattaagtttaccgataaaagagtaaaacccggagagagacaaccctcggagttgtgttttgcaaccatatctcttttgctaagtgagcaggtcccttttgctggcaaggacttgtctgtgtaagt

SEQ ID NO: 1007 - DNA, 381 bp, Arabidopsis thaliana
  Intron number 2 from transcript AT5G28350.1 (locus AT5G283 50) derived from phytozome v7.0 (chr-ID Chr5; pos 10320613 to 10320993)
tgtggagtccagacgccaaattgattgctgttcttgtaagttcttagtctcactcttttcctttgctaatttctgctaattgtttagtcactttctccagctgagaatttattgatttgtttatacaaaatcttgttattggatcttctccagattgttctttatgtgtaaggatgagaaaaaacatgtttttaggtttgattggttgatgatttcagacattctaaagcctctaatttcagtagtatcttatttgaatcgtttgatcaagatgcatgaaaactcggaacttgtgaaaaaaccagttttttgtatgtcttctcaccaattattttttgattcgcagacatcatcgttctttcttcatatatataaaattaa

SEQ ID NO: 1008 - DNA, 627 bp, Arabidopsis thaliana
  Intron number 1 from transcript AT5G37180.1 (locus AT5G371 80) derived from phytozome v7.0 (chr-ID Chr5; pos 14718422 to 14719048)
aaggcgatcttggcaagatcttgtgcttcactcaggtcataccatactcttttgatttttcaatcttctttttggtaggaagtcatatgatcgactcaatcatttcaagaagttttcttcatttataaaaggtcttaaatggaaattatagtattggaaaatgtttattttatattatttatattattttacaaataattatttacttaaaaaaacaaattaaattttaaacaaaatttatcaaaattatagtattggaaaaaacgatatctcatgaataacagtaccattttcatttctttggtacggtaaataacatttttttcttgatcaataaaaagaaaaccagtaactcatgatgaataataattatactaaaatgtacaaggttagaaattattgaaaaccataaaattaaagtattatagacaattgtataccaaaactcaaactaattttgtttaatggttattctagagggaaaactatttcgttctcttcatttgtgtattcactatatagagatatgcataagaaaaagaaaatggtgagctaaattttagcattataaatgtgaattaatctgtaggaggcagtggtaattcctccgaacgtagcgttcgcagt

SEQ ID NO: 1009 - DNA, 148 bp, Arabidopsis thaliana
  Intron number 2 from transcript AT5G37530.2 (locus AT5G375 30) derived from phytozome v7.0 (chr-ID Chr5; pos 14906734 to 14906881)
aaaacccagaaactaatttcttaggtacttgtcattttgcaatgcaagttttgtttttttcccctttgatgaaaaaattagtgttctttgtttcttcataaaaatctgttttttttttttgttttaatacctatgttaacagcaggaa

SEQ ID NO: 1010 - DNA, 148 bp, Arabidopsis thaliana; identical to SEQ ID NO: 1009
  Intron number 2 from transcript AT5G37530.1 (locus AT5G375 30) derived from phytozome v7.0 (chr-ID Chr5; pos 14906734 to 14906881)

SEQ ID NO: 1011 - DNA, 545 bp, Arabidopsis thaliana
  Intron number 2 from transcript AT5G39520.1 (locus AT5G395 20) derived from phytozome v7.0 (chr-ID Chr5; pos 15824541 to 15825085 reverse strand)
aggtaccattcttcaagactcctttacttacttttactccaaggcatgtgattaaaagtgtttattctatttgattatttaatttttagtgattcgaaaaattgataaatctttttgagtttttcgaccatcgactttcaaattttggtgatagtgaaaataacaaaataattaaggatttataatcctcaatagtatcaattgtattcaattaaggattaaaaataaatttatagaaatttctattgtttcgtagttacaaaagaatacacaaatcttagttgtgtcctagtaagttcttagaaacctatatataaaattacatatatccataagagaaatgaaacaagatacacaaagtcacaaaccagtaaaatctctttaagattttgatattattcttgttgtcaagaggtccccattgaattattggaatgtaacatcattgctagtagcatgttttgattttccttacctcatgttttttaactatgtttattttttgaggctttgttacttacggatgaaattattgtgcaggaaga

SEQ ID NO: 1012 - DNA, 1035 bp, Arabidopsis thaliana
  Intron number 1 from transcript AT5G43760.1 (locus AT5G437 60) derived from phytozome v7.0 (chr-ID Chr5; pos 17586683 to 17587717)
cttcaggtaaaatatcttattattcggtttggtttaatccggtttggtcttttagactgttatgagtcgtcgtgattcgtggaagaataaaatctaggactttttcttattcgactttaaaaatttgaaagggctaatgacagctcatgattttagaaattatttaggggaattcaatagaactaccagctagaatttgcctttcaaaatttaattatttgcgtcttggtgtcacttaataaagcatttagtacacttaccagctagattttttgattaattgacttagctttcatgtcattaatacgtgctataatatttctatgacttatttgatcaaaatgtagtcactggattggtttttagttgccgacttaatatggatgcaactttattctatatgagttgtatgaaagcataaaggccaaatttacgtgtaaaagtcacgtgtctatgaaaattctgacagtgacaggctttgtagtctttaggttggtggtagttgtgaaaatggaaaaaccataatgttgttttaaatgatcaatgttttattttataaaggttgattacatattttttcctttctcgaaagtattcatttattacgaaaatagttcatgcattaggaatttaggattgatgcataattacaaatttacattcacttttacaaacataattaaattgtagatctaagaagcgaacgtggaaacacgtgcttgcaagtttctcgaatctctaatgtggttggcaaattgaaccaaaggtcataaatgtgctacaacataatgttgggctacttgaatagaatttacttacacttgagacatatgcacacacatacctctgcatttatatatttgtgtttaatgtccaccgtataacggttgtctagtcacaaccattgttcgaattttctaagattcgaaaatgtttttatttttatttattgtatacatattttactgagagtaataataaatttgtgacaataatgcaggtgcaaccaaactcatacgcactagtggtgagcac

SEQ ID NO: 1013 - DNA, 353 bp, Arabidopsis thaliana
  Intron number 2 from transcript AT5G45090.1 (locus AT5G450 90) derived from phytozome v7.0 (chr-ID Chr5; pos 18203924 to 18204276 reverse strand)
cgactggagacttggccgatctccaaaacaggtattgtttcttttcctctgttcttggtgaaggacacgttttacttcttatttggtctttttgaatatttggtctgacccaaatgtttaagtaaagtaaaaaaagtcagtctctcagtaaaaaatgattataatttcaaattttattttatattctagtaaaattgtaactaaaagattaactttttttttttactgataaatactgtatatccaattatcaaacatgctttggttctaactggcaccctatcgattgaattttttattatccgtatcgaatgacagcgtaaagtgcaagaaagatctcataaattctgccg

SEQ ID NO: 1014 - DNA, 417 bp, Arabidopsis thaliana
  Intron number 2 from transcript AT5G45280.1 (locus AT5G452 80) derived from phytozome v7.0 (chr-ID Chr5; pos 18346939 to 18347355)
cacgtatcttgaatctgcagtggctaaaggagctggtagacaataattttattttcaattgcttattaggaatcaggttcgagaatggatagtatgaatagatagaaaaatcgaattaatgatgaggctttatagtaagaaaaatagagccaacattggaaatggtcttgagtcaagtttctaaaaatccaaaaaaataaattgtgtcttccaaatttcaaaatggtattcaatataaatgttcattatcttggatacttcagattaataaaacctttatcggtgtttactcatgagactaacttggattttaaatttggtagataaaaccattgttataactaattatctactatgtttgacaaacaaaaaaaactaattactgtatatatattatattttctgtagtgtgtttgg

SEQ ID NO: 1015 - DNA, 865 bp, Arabidopsis thaliana
  Intron number 1 from transcript AT5G45550.1 (locus AT5G455 50) derived from phytozome v7.0 (chr-ID Chr5; pos 18462287 to 18463151)
agtctctttgggttaggaaggtgagaattttcttcttttctctgcgtaattttatgttcgatctaagatcatcccatagagaatttttgacgattgtttgcaatctcagatctgtttgaaaaatcatcaaactagtgatcttgtttcttctgtgatattgtaattgtgtaggatcatggattcgtgtggctttcttctgatttttctcggattaaatttggttttctatgtgattgctaatcagaacttgtgatctgtagtatcaatcttactttattggattcaggttcatggttgatttttttttttgctgtgaattgatgattatgtgagtgtgttttatacatctcttgattagtttatgatttttatgaattgggaatctggatcagtatcctgatctttagtgttttgaagctgtttaaggtcgtttaacacagattagagttttattgattggatttaaaattattggagctttggatttgtcctcagtacttgaaatactttagttggatcccagttaatattgttatgatggttcataacttcatatttatgttccccagatttggaacatgttatactaggcacattcaatggtggtcgatcagatttgttttgtttctctgaactcatgattgtaggcaataaaaatggaatcaaaatacgagtttttagtgattcatccctgtcatacgcaatgatttctgggatacatagggtttacttattgataaagactgaaatttttatgttgaacttatagccgttttgacccgatcacgtttactaacatctgctcctccttttttatgctttcttaatagaaatcagaagactttccgacctaagaagagtgcac

SEQ ID NO: 1016 - DNA, 759 bp, Arabidopsis thaliana
  Intron number 2 from transcript AT5G45920.1 (locus AT5G459 20) derived from phytozome v7.0 (chr-ID Chr5; pos 18623316 to 18624074)
agcagaatcttcgctctattgtttcgtttctcaaggtgatcattttttttattatctcattcaaatcttgcacatgcatatttattatagtactagtataatataaatatggaaatttgttgtatacatattaaatgcgtgagtcagtgttgaagaatacgcatacatattgtaatttttgtttttgagaacaaaccagagtattcgcttcatagttctgtttttcgaggtgaccaaattttttttcattatctaattaaaatcttgcacatattgacatgcatatgcatatatatactcctttgaccaaaaatgattacaatctctttatttgttttaaatttgtaaagtggtgaattgtgatcctgctatatacacagaatttatttttgaataaaatagaggagaataaacatatttgcgtgtataaatacattaaaaaatttatcattagcgttttttcaaatggtattttcattaatctataaagttatttaatatattgtcttttttactaaaaggccagagctttgatcacatattcacatctatagtacacacatatctctttttgggaaagtaaaactttagaagcaccatgacgtatatactttgtcgaaccactaagtgaaagtatttttatacatccttctttctacattaataatggattcttataatttcttgattttattaaatgaaattttgttgttatgtttcgtagaatcgttggccacaaacggccattattcttataac

SEQ ID NO: 1017 - DNA, 907 bp, Arabidopsis thaliana
  Intron number 2 from transcript AT5G45960.1 (locus AT5G459 60) derived from phytozome v7.0 (chr-ID Chr5; pos 18638924 to 18639830 reverse strand)
atcctctcactccaaccataactgttagtgtccgatctcaatctcttttctctgtttttaaatttttgcataaacaagaacgtagaaaaaactatatctatgcatctggatcgttattttattattactataactatattactgctaatgggacttccaaatatttatgctcaaatattatgattgtttcataattggtttgattgaaactttttgaaatgattattactaaattcatttgccaactggtctaagttacgttcttaaggacaacaaattgaggataattggtgtacgcgaattatcaacattttaaaacaaattatggagtacatacttctttcttttaccggcaagattacatttttcaatattccaggataatatatagacgtatgaagttatgaataaaccaatcatttaattttctggctcataatatttcaaaaaataattgaaatattatatttttaaatccaaaaggcataataaaacctcatgtttatttatggttaggttctagaatgtgatgtctaaatcaactaataattgaagaaattaaatataatgacaaaagacaaaaacttaattaatcactactacttgaatgtcgttcagtcgttgacgagtgaaaacagataaagtattttatttgttgcagttgatagattagtcgctactaggtaattaactctagtctcttaaaaaaagcgcacatgttcaaattatccaattattaagaaagaaaaaatatgctaattttagaacatttattgcaaataactaaacacaatttattcgtatactttgtggaataaatttaattaattatgttgttgggtgtgttgtcgctttcactggggatggtacagaacgtgatagacattccgactcagctagagtattt

SEQ ID NO: 1018 - DNA, 412 bp, Arabidopsis thaliana
  Intron number 3 from transcript AT5G46200.1 (locus AT5G462 00) derived from phytozome v7.0 (chr-ID Chr5; pos 18729375 to 18729786 reverse strand)
tagtcttattcatccccaacaaattcatagagcaggtaagtactcttgtcttaatcaactttgacatagggctgattttgtttttacgcttatattgatttcttcgtctagtgtacatcttcaataaacatatactttgtaattacttttatttttataatttgtaacgatgtttgataaaaagatcaatgttaacaatatataaaactaaatatttgaactagtaattacgaacacaaatataactatttacacttttttctattctgaaatggttagaaacttagaatttctgtatttgtttttaaatctttaagatatatatatatatatttttttttaacttttactacaatttgttttctcgtttatttcaggccgtatcctgaaacaaagtcgcagggataaaaag

SEQ ID NO: 1019 - DNA, 551 bp, Arabidopsis thaliana
  Intron number 2 from transcript AT5G46430.1 (locus AT5G464 30) derived from phytozome v7.0 (chr-ID Chr5; pos 18833484 to 18834034)
tcagaccccagagtgatcgcagaatcaccgtcaaggtactcactttttctccttttcaggtttagagattcaacttttttcatgggtataagtttgttattctctggagtttaggctttgatagtgaggaaaaatgattgcttcctctgtattatcattaggtctaagtctatcatcattaggtctaagtctatcatcattaggtctaagtctagattgtttcagtatgatgcattagggctatgagattgtgcatctagataatgccctgtggtatctggtagccagaattctaattctgtttctggttacttcgtttttacacgggcagaaagtgaatctcctacaggtcttgcgacacagtttgcttttgatttgataagcttactgttactttaaccctgttgacatttctcatctatctcattcgtcaaaaagcttgttttgattctctgatgattatgcttaatcttcattctctgattgttcttttgtttttcaattgttattgttcaggaaagctggaggaggcctaagggtattgactcccg

SEQ ID NO: 1020 - DNA, 1020 bp, Arabidopsis thaliana
  Intron number 1 from transcript AT5G48850.1 (locus AT5G488 50) derived from phytozome v7.0 (chr-ID Chr5; pos 19806544 to 19807563 reverse strand)
ctcaggtccagattctttatccattcttgatatgagtttttctttctttgttgttgtttatgagtcaacaaaattttgaaaggttactcattctttcatatgatactaatgaaattactgatggtagaagatattattgttcaagatagaaatatctttgttgtgggtgaatattggtgtaatttggatagaatgttattgcatttcttgcctgaaaaggttagatagtttacctaaaaaaacaagctataataattttaggtgatctggtaaaaaagggtatatatatgcactcaggtttatttgcatatgttttaaacatatatcatgattaatacgggatctaaaataaatgtcatgccacttttaatttacatgatttaaaagaaaaaaacatgcgcggaattaatatccacttatttactaattttccacttcgttaattttaaaaatatcctttcaaaacttagttacctagcaaattaaccaagaaaattatataaccaaatagttttgtatataattttttgaaagaaataaaaatgtgtattttaactattttccggttaaaaaaggtaacacttgcaaaaaattgaccgattggaaaacgaaagtaattttcttaaattttatctccaataacgtgtcacactttattctatatcttaagttatgtttatttgattaagccaaaaaaaaagaagaagtatattgttccaatttgttgaacaaaaaaaagttgttccaatttatggtctagatgttgccgtgtgcgtatgagagtcagtcgttgcaccgaacggtgtgggatctcgtttactttttccgaataatagtgcaaaaagtcttttacgtttgaaagaatataattcttcacattttttattggccggcccatcgaatcatatcctaattggtcaaatacatgaatatatttctatatgagaagagtaaagtaattggttattaataattagtatgtcttaatgttggttgcagttgatagagaagaacccggag

SEQ ID NO: 1021 - DNA, 600 bp, Arabidopsis thaliana
  Intron number 1 from transcript AT5G49360.1 (locus AT5G493 60) derived from phytozome v7.0 (chr-ID Chr5; pos 20015656 to 20016255 reverse strand)
ggaagagatcggacgggtgagaataatttaagaatattatgctttaaaatacatttttaaaaaaaggaagagaatataaaatttatgatttttctacgtgaaaaaacgacattgaaatggacattgtagaagactagaagtcatacagtagagtttgtagtgggacgctctatattttttttttttataaaattataaatcttgaatattatgattttcatttgaattatatctgactacgacatgagtctatcaaataagtccgaaacgtaagttagaaaaaatccaaaaaccgataatattttcctttagacatcaaatgcaaaaccaatatataaatttatatgggtactaccaaacttttattttgtaatgtttttgataaattacttagtgtgtatatatgctgtactgatatccacgatacttccatagttaatatgatgatgggcaagctagctataaccagtgaatataagagaatactttttaacatatggtttatatatcaagtatatttatttctttcaacaaaagcaaaggtgtgtggagaatatcttaatattgacatgatttaaaatgaataaaaggtggtgtctg

SEQ ID NO: 1022 - DNA, 501 bp, Arabidopsis thaliana
  Intron number 3 from transcript AT5G49680.2 (locus AT5G496 80) derived from phytozome v7.0 (chr-ID Chr5; pos 20177240 to 20177740)
gtagtgcaggtaattgtagcctgctctgatatccatgaaagctctttttatttggtttagcttcatgataaattccctttcattctgtcttgttgagctagttttgatgaaagcagcatgaatggtagtgatgctactagcttctattgttagtaccataaactaaattataatgaatgattcacttgcaatgatcttcattaattttgatgaaatattatctcactggctatttagatatagagtagtaaaatattgaccacaagcctagatatatttcccatgatgaggcgctttatgctcaaatgactgttagctttctgtgcttctgttaacttattctttatagaagatatacttgtttaactcaaacactgttttgactaggtagaacaaaattaggctttgtagaactatactaaccatcatgtctactggttgttcttattttctcttgcaactgcagacacctaaagctacagcagaaatcaaggagttgga

SEQ ID NO: 1023 - DNA, 607 bp, Arabidopsis thaliana
  Intron number 3 from transcript AT5G50850.1 (locus AT5G508 50) derived from phytozome v7.0 (chr-ID Chr5; pos 20689880 to 20690486)
cagctggtgcaaaagaggtaaaatgtcttttattgaattttcggatggtttagaagcgttattatacaggtttggttttaatgagctattggaagataattgtggtcaatttaggatgattagagctgttaatgtctgccaaaccacttttctactctaaactttttctttggatgatagcttaatgttgtcttctgcaaactatgtcgattacttttttttttgtgttcaccgaaatgtcgagtttagctatattggatgttttttgattttgtaaactgtgagcatccaagaagcgcaagggtcgataatcattgcatagatgtttaagcctattagctttctctcattagttctgacattgaaaatggtggattgatagctgactcacataaatagtgtagtgacatttagaatcccaacaagtgtagcttaagttagattttaatttacgtttcgagaacccaatttttttttcatatagttgataaagctgatacggccgtcagtctttgttaatatttgtcaaacatatttctccttgtatgtggaatttcccaaaatattgtaatattgcttacaattttttgtgcaaatcattgtttag

SEQ ID NO: 1024 - DNA, 417 bp, Arabidopsis thaliana
  Intron number 1 from transcript AT5G51630.2 (locus AT5G516 30) derived from phytozome v7.0 (chr-ID Chr5; pos 20969686 to 20970102)
caatttcgcttgtttggtatgtctgaagttcccgaactctctttcagtctctctaagcatttagcttctggatatctctatgttgatgatgtttgttgcaatatggagattttcgaaatgttaatgtattcgtagagagatggagatttggttagaaaaacttaaatttcaaagaagcttctagtgatgaactttctttagccatctaatttaatatacatcaataaataaacaatgtatgagtggaaaccacctggaaattttgtaagggcatgtaaagtttttggtcaaattttggagtcaatgatctctatttaattccctgcagtgatcaagagtttgatacaaatgattttattggtttcttcttttgatccacttccatggcttcttcttcttctcgcagctggacatacg

SEQ ID NO: 1025 - DNA, 376 bp, Arabidopsis thaliana
  Intron number 2 from transcript AT5G51640.1 (locus AT5G516 40) derived from phytozome v7.0 (chr-ID Chr5; pos 20976603 to 20976978 reverse strand)
tagaaacaggtactgttaagtgattgcttaagtttctctaattgttgtagattagtgtgcaaatttatgtggagtaagttaagtagctatttaatgatgatttgacttaattactcttgaaggatcactgagacaaaaaaccaatgctactaattaatgatgcatttaactcttaagtccttaatctggaatcttaatgacctttggactatatagttaggtacctcctttatactaatagttatctgatttggtaaaatataactaccttttgacaattatgtctccttcatgtcttctctcaggatttttttgaaattgtgtttatcacttttcttactgaagcttttctgatttgctttgaccattttgcaga

SEQ ID NO: 1026 - DNA, 423 bp, Arabidopsis thaliana
  Intron number 2 from transcript AT5G56740.1 (locus AT5G567 40) derived from phytozome v7.0 (chr-ID Chr5; pos 22954964 to 22955386 reverse strand)
tgtcgaggctaacgagtgcatcaaaatttatctcggtgcgtatttgatttaaatcatttgaagttgattttggggatatagtttcgtacgaaaattagggttacgtttcctgctttcgacctttttggtgaaattagttggccttacttcaatttttctagtttttggcttttccggcgaactttattgctttcaaaaggtagttttcagttattgaacatgtagagcagatctgtatactgagtttctgttgatttatgtgttttatctttcttccaattgatatttgttcaatgagttgtaaaagtattttctgtgtgaagtgtcttaggttgctgtgacataattttgttttctgttttggtaatcgtgatgggtgatgttctagtttcaagcaaagaggaagttgattcctctgatatt

SEQ ID NO: 1027 - DNA, 384 bp, Arabidopsis thaliana
  Intron number 2 from transcript AT5G56840.1 (locus AT5G568 40) derived from phytozome v7.0 (chr-ID Chr5; pos 22981548 to 22981931)
atcacaagagacgccgcaccagcctctttgatgcaagtaattccaatcttttctctatacatgcatgacaaaagaatttaaactctttgtatcaaacttttatgtattaaatcaaaatgtttctgtatccaacaaaagtcacatcttcaaaagttcaaacagaatttttatgttgttttaaaagttttctttccaagtttttttttcccacttaaaatatcggaattttctaaaccaaaaattagtcaagattttaagtttaatctaagctttattttaataccaagtatatatgaacatataatttcttgtagaatccgaagaaaaaaatagaaaataatcttgaattgacaaatttttatattcaacaggtttcggccggca

SEQ ID NO: 1028 - DNA, 264 bp, Arabidopsis thaliana
  Intron number 2 from transcript AT5G58784.1 (locus AT5G587 84) derived from phytozome v7.0 (chr-ID Chr5; pos 23740544 to 23740807 reverse strand)
ttgctttctccaccgaaaattgggaaagaccagaggtgattacacaaaacgttccaagagttttaatctgcttttgagtaaccaagaagttatggactaaaaccaaaaaaaataaaaattgtggaccttacgaatataacttgcatgcatgttaattactaattagtattttcttctcaccgcaggttaaaatttgtgaccttgaaaacttttgtgttttatataattcattttgattcagttttttctttttctttgatcagg

SEQ ID NO: 1029 - DNA, 471 bp, Arabidopsis thaliana
  Intron number 2 from transcript AT5G60360.2 (locus AT5G603 60) derived from phytozome v7.0 (chr-ID Chr5; pos 24280407 to 24280877)
caagaaaggcttatcttacaaactcggtgttaatcgtaagtttttttttttatctttcttctcctgagtttgtacttaaggaagtaaacgtatgtataaaagacactgtgggaaaacgtggaaactaacttttgttctgtcttggaatcttccaagttaatatttttaaattttgatttttttctttcgttcacgtgattcaagattgttattgggactctagactttacagagtttatgagtctatgaactctgtgtgagagactagtttgtgtcaaaaacagtgttctgcttctttaagatttagctgtcctgagttgaagattggttctcgttcctacttccttgtagagttgtagggatctaatctttatttgtcctagaactgacactgcaatggtttgatgaataatgatttacctaaatattgctaattgtgtcttgaatctatacagaatttgctgatttgac

SEQ ID NO: 1030 - DNA, 469 bp, Arabidopsis thaliana
  Intron number 3 from transcript AT5G62730.1 (locus AT5G627 30) derived from phytozome v7.0 (chr-ID Chr5; pos 25198221 to 25198689)
atatctatttagtcagcgccgccatagaattcttggtaagcaatttagttaatgactatatatttttaaaaatcagtatataaggtgaggttaatttaaacctttttaagaagaagaaaaataccctgcctaaaaccaggtcattggaaatagacttcagacgcacgaggattttctcaaaaatttctcaaaaaatattgaatgttgatagaaaaaacacaaaaattccttccatttttagcattatatttgtttcaatatgtatataaataaatgaaaactctatcttttcctcttttttttttcttcttcaaactgtgtaacagactaacaggtgtattcacacaaaacagtcgtatttttttttaatatacatcaaatactgatataaaaatttacatagaagctctagtatgaatatctaaccttttaattaaaccgcactattttgttgaacacacagggcttg

SEQ ID NO: 1031 - DNA, 453 bp, Arabidopsis thaliana
  Intron number 2 from transcript AT5G64080.2 (locus AT5G640 80) derived from phytozome v7.0 (chr-ID Chr5; pos 25645583 to 25646035 reverse strand)
tcttacagtgtctgttgctccaagtactgctccaggtattttgtctttcttcttggttgatttttaattttactcttaagttttgtctcatgcaatgctttattgtgtttttaaattcccacttgaaaattttgaaaagataaaaattgtcgattgtttgactttgatcatctgggttctcacttaaagtgaaaatgatttatctaagattctacaatacaaaaaattataattaatacgaaccatgacaaaaatttgtgtgaattccttatttgtgattttctttgtaaaaatttgctcgagtgattggaaatctctgctctttttctccatgttagttatgtgatttctcgttgagatgttttacgcttttgagatttcttaatgtggaacctaattttatcaggtcttgctccaggagtagctgctgctggacctgagacagccggattt

SEQ ID NO: 1032 - DNA, 441 bp, Arabidopsis thaliana
  Intron number 2 from transcript AT5G64080.1 (locus AT5G640 80) derived from phytozome v7.0 (chr-ID Chr5; pos 25645595 to 25646035 reverse strand)
tcttacagtgtctgttgctccaagtactgctccaggtattttgtctttcttcttggttgatttttaattttactcttaagttttgtctcatgcaatgctttattgtgtttttaaattcccacttgaaaattttgaaaagataaaaattgtcgattgtttgactttgatcatctgggttctcacttaaagtgaaaatgatttatctaagattctacaatacaaaaaattataattaatacgaaccatgacaaaaatttgtgtgaattccttatttgtgattttctttgtaaaaatttgctcgagtgattggaaatctctgctctttttctccatgttagttatgtgatttctcgttgagatgttttacgcttttgagatttcttaatgtggaacctaattttatcaggtcttgctccaggagtagctgctgctggacctgag

SEQ ID NO: 1033 - DNA, 501 bp, Arabidopsis thaliana
  Intron number 2 from transcript AT5G66860.1 (locus AT5G668 60) derived from phytozome v7.0 (chr-ID Chr5; pos 26701428 to 26701928 reverse strand)
caaagggttggatcattgtcctggtctccagaaaggtaactgtttcttcttttgttcgcatcacttgccttttttgcagctagtttcacaggttatgcttactgagaaatcatgtagaactgataggagtagtattctgtgtattggccttgatactgatgagaacttcgcagatcggttttgtctttgtttttgcatggctagtgctcatgtgcttctgttttactgctatccagccattattttgatcgagctaagctttgtaaagagaaatctatcacttgtatctgatagtaaagtttgcattccaatggtaaaaggaactaagaaaccagatatttgatgtgtttgtgttttttctcatcggtgtagagcaaaattttcacctttttcctcattgggtaacatagactagtttcatgaatgttcctagtttaaatctgatcgtctctgttactgtgagcagggggaaacctgcggacaatccgaagcactctgaaa

SEQ ID NO: 1034 - DNA, 937 bp, Arabidopsis thaliana
  Intron number 1 from transcript ATCG00670.1 (locus ATCG006 70) derived from phytozome v7.0 (chr-ID ChrC; pos 70910 to 71846 reverse strand)
cctggagaaggagatacatcttgggttgacatatagtgcgacttgtcagatatatcgggctatatgggatttccccattttctccctcgatcgagatatcctctgtttcgctcaaaaagattgattgaattatcaaaaatttgtaacgcgaagcgcaaaaaataaagtggaattaaatgcagggagtatttagattgatattagattatcaaaatttttttatggtttacgtgatcggactaataaaatgaagtatccaggctccgtttagcaaaaacccaattgataattaatatataatatttttataattactacttctattatatgcaaaattatgataaaaactctataaaaaaaattgaaacagggcgatctaaaactgttgctcaaatcaaatacaaataatatataatataattcaaaatttgttgactatttgacagaagacaagtgaaagaactgaattgaaaaaaaagaaggagtagtaaaaaaagacgcggtatttggttcatttgtcctatatgtgcaaatcaaaatcgggcaaatttttccttttactcggggtagagcataaacctaaaaaatggaataaaaaaaggaagaagcccgttcaggaacaagaaaaaaccatcgccatttcaactgaatctcgatgaaaaaaaaaaatatcaatgaatcaatcatttttttagaggattttaatatctaataaaaggcgccaaaactcaaaatttcttttacttttggggcaagcccttccgttataagttagaaagaaaaaccctctatgaaaaaagggtaggttggaatcaacacattgattttttcacaatttttattgaaccgtatgcaccaaaaggtgcctgtacggctcctaaggaataaaaaattatcctaatcaaccgactttatcgagaaagattattttttttag

SEQ ID NO: 1035 - DNA, 814 bp, Arabidopsis thaliana
  Intron number 1 from transcript ATCG00720.1 (locus ATCG007 20) derived from phytozome v7.0 (chr-ID ChrC; pos 74844 to 75657)
agtgtgtgacttgttagaattgaccctatggatagtacagagaatggggtctgtcatctttatcaagatggttttacttcgtcggatattcattcgagtatctggagcacgaaatagatcaaatagatcacaaagtattcgaactatgattcatacttaaatactcaaacctcgtagccggacttctttccgttctatcttataaactttaataaatcaaaaaaattttctgcttttaaactcttatttggatcaaaggacaaacgcttctttgtattttatgtttttagtcattatagctttttttttattgaataagtgatgatccaatggttctcactcagtgaactttggactttgaaggtttcattaaattatcgtggttctcgtatgaatctgaggtttcaattgattagttaagtagggtcttaacaagagaattcctatcaataataaagaaaacaagaagaaatccctgtccccgttccatacaaataccaaataaaaaaagacaataaagataggtaatctagaagattcaagaggcctgtaacgatcaacacaacataaagacgaatgagcttacttgattttttggcatttaaccacaaagacgagctttcgcattttgactctttcatatctttaaataataaaaaataatattgaatgagagacaagtttaaaactttatattccatatctgtttcaatcagtatttgggtctttttttgtttgagctgtacgagatgaaattctcatatacagttcttggagggggagtaaccttggtttacctatctcaataaagttt

SEQ ID NO: 1036 - DNA, 701 bp, Arabidopsis thaliana
  Intron number 2 from transcript AT1G48440.1 (locus AT1G484 40) derived from phytozome v7.0 (chr-ID Chr1; pos 17907434 to 17908134)
gcactgctacagaacgtgatcgctacgagaaatctgtaagtaccattccttgatcacctttgtctttgattcttctatagctgaattctatgtgtatgaatctttttttgaatagtaaattgttagatttgtgagtttcatccttgtcattttctcccatctttagtctaaagatcaatatttgttagtaaaacttctgagaattggctttctttgtctgaggaagttgcatagattagagctacaaaacactgtctaacttgttagtgtcaatgcatttttttaggtcttacccttcattgatgtactcatatatcttttaatcgtagttctagctactgtcaaatagcaacatgtgactttctttataccatcggcacgattgtcattcatagttcagtttatactttgctcttgtgaattgttggcaattgattcttggtgaagcttcatcaccactcttggatgtttagttcatccctcagttttctggtcatgcactgtattcaaacctttttgggtatgcagttgcgagtcgccaggatcaattatacatagtgaaaaactgaaaatcaaacacttggatatttaattcaccccttagttccttctctttccctgaaatgtctcagcttgcttgctaacgagttgtgcgtttgcattgtaccacagatctacaaggctcagaggaacgtggttct

SEQ ID NO: 1037 - DNA, 451 bp, Arabidopsis thaliana
  Intron number 2 from transcript AT2G32530.1 (locus AT2G325 30) derived from phytozome v7.0 (chr-ID Chr2; pos 13810057 to 13810507)
gttctgaattcagtaaagactgggaaataaccaaggtaaattaaagggtttaattgttttttcggcgtatgagtttaattttgcaattgtgtttacaaattaaatgatttcgtttactttcaagaagaacacataatttattttcaatcaaacattatttgtaaattgtagaaggtaaagtagaagaaatcgttgatgtttcgaatttgtgttctttaaaacattatgacaatgctgtgatttatagaaagataaagaaaaacaaaatcaattaattagcacaatcagatttttgcgtttaaaacaattgggacgaagatcaaaatttgttcttagcttttgatattaattgttccaaattttcgtattaattattaggaattttcttgaaattatgtttttgtatcaacattaagagggagtacgagaaattaagcaggagggtggaaga

SEQ ID NO: 1038 - DNA, 439 bp, Arabidopsis thaliana
  Intron number 1 from transcript AT3G13990.1 (locus AT3G139 90) derived from phytozome v7.0 (chr-ID Chr3; pos 4629802 to 4630240 reverse strand)
tgctaacgaggctgtggagaagctgattcatcaaggtttcttctctcttcatctctttttctgctttcctagtttgacggaagttagggttttactgtttgttctctggtccgcattatcttgatcacgatgaatgctacaacatcttgtttgaggcgtatgtagaatgctgtagataggttatgcaaatttcgtttgatggagttctgttgataattcgatagatggataactcttgttttcatttcgataatttgtcaattctcttcagaatacttcaattactatatacttgaaatattattggtcttcttttcttggctctcgtttcgttgggtgactaatatgtgtgttattgttgccatcatagttttggttcgctaaaaagcttttgttttgttcagatccatttcacgaggtgaagagaaaaagagacagg

SEQ ID NO: 1039 - DNA, 582 bp, Arabidopsis thaliana
  Intron number 3 from transcript AT3G19420.1 (locus AT3G194 20) derived from phytozome v7.0 (chr-ID Chr3; pos 6732478 to 6733059)
aagaagttattaactttcttgaaactcaacacaaggtactactacttatttgttagtgaaacaaattaatcccttatctttggccatgtgacgcacttatgctttattgttgttgatctagctatttctcccttttgtatcacttggaatatatttttaacataaagactgggtcaccttatgttataagttcttgatgatatatctgtattcataagctgctctgcataatgacatattgccgaatagaagattctactcaaattaaagatattagtctgtggatacttatattgtgtttctagaattttgtcatattagttggatttcaatgatataagaaatttttcattggcattttgatattcatatctcaataatagctaatgtgtctaattattttcaaacgtgttcaatctcgtcttaccatctttctttttgagattaacttatatatgatgtagtttgcagtttgttacagccttatatttttaggttctgctcttctcttgtactgtttttataattgctttgttcttttttgtagggaaaatacaaggtttacaatctttgttcagagag

SEQ ID NO: 1040 - DNA, 770 bp, Arabidopsis thaliana
  Intron number 1 from transcript AT5G41890.1 (locus AT5G418 90) derived from phytozome v7.0 (chr-ID Chr5; pos 16765682 to 16766451 reverse strand)
gtcgaaccatttccgatattgtgggtatgtaatatgtttattttagaggcgacatagaacatagatcttattttttttttttttttgtttatattcactttagagcttgttagatattcgaccatatatatatctgatacaatattcaaaaaaaacaatcacaagtaatagatttaaaacattgcatatgtttttacaaaaaataataacaataattagtatttgttatatatatattgccctgccttagtttattcattcagaaatagtgaaagcgagtactacgtaattagaaataaatgtgcttgatttaacggttagttacaataatatgaatttaattctctaaagtatctaacagaacaaaacccttgtacacacttgaagtcaactaattgataagctgactcttcttaaagcatgtaaagtcataactgaattggattggaccaataaattagttaagagtaattaaaattttgtaatgtgagagaagtcaaaggcaaattccataaatgcaacattcatggagtttggtaaggagttctatttaattttcataatttagtaaaccgtttctgaattggtcctagctctcttcaatcactcgatgtttttcttagtttaagatgatgccactctgtgtttatttgttttacacatactacataatcattactcataaatataagatagactaatatatagttttattggaataaattaaaacattaggtgaagccttaggagcaaaatcaccaccaccacca

SEQ ID NO: 1041 - DNA, 724 bp, Arabidopsis thaliana
  Intron number 3 from transcript AT5G42210.1 (locus AT5G422 10) derived from phytozome v7.0 (chr-ID Chr5; pos 16867086 to 16867809)
aaggaagtgttctttgtcttgcccttgcgtacgtggtatgccattatcctcctttcgttttttattttaattgccgtcagtaatgtttattaagcgaaaaaagatattccaagaaattaaaggatacatacaattaaagtagagcaaacattctttaacgagaagaacaaacccgaacgggataactaagacaatatacaatagttcttcaacaagccataaataaatgataataatagtgttagttgcttaattagtcttattttagttaggatatagttattctactttcccttgactttttgtaagccaattagaccggtcctttttttgttccttttgtttttaatttggccggtctttacttttgggtagcataaagaacattcaaatatatgtcatcttcacatatagtaattaaaagaataataatactataacaatgtaataattatttttaaaatattgttatgtgaagtttagagcatctccttggtgctaattgtttttaggattttaatgtaaatgttgacctcttctgaactaaaactattgaggaaggtaaatataaaataatcaagaagaaatatgttttagtaaacttatttctaattaaatctcttgaaaagtttaaaagtatttattttgaataactggtgaaatctttagtgaagttcaataattttatatatgaaagtattttcggcggactttcaggctgata

SEQ ID NO: 1042 - DNA, 906 bp, Arabidopsis thaliana
  Intron number 1 from transcript ATCG00050.1 (locus ATCG000 50) derived from phytozome v7.0 (chr-ID ChrC; pos 5257 to 6162 reverse strand)
tggtagaaagcaacgtacgacttgaattgaaggacattatctgctgtggattttttcatccgccacttttatttttatattaggaatataggtgctcttggctcgacattttgtattctattttacaagagtcctacacttttttgtaatataaaaaagagtacaggatggagctcgaggagaatagaaagtttttagtcctttcgcaggagtaaggatttagggttagtgcgaattaataagttggaacaacttcgtaagtctttttatattgaaaaaagtcctttcaagcaattttacaatggaaaaggaaattttcttaaaattgtaaaattctttgaatcaaaagtctatcatgcgtgaatcaagcgtttgtatgattctttgtatagaaagaacagaaatcataaacaaaataaggggcttgttgctgcccttttttaataaaacgattcaatatcaccgaagtcatgtctaaacctaaagattcaaagtaaggataaagaatcttgaaaaaaggaaatcctgttttcaattgtttgaaaaactagatcaaactgaagaatcaaaattgattctaaaatttgcaatgagacaaacaaaaaaagggctagagactactcaataaaaaaagtacttaaggattctccggtgagatatttgagagttgtttaacttgagttacgagagtacgaatgttatgaatgctttttatggaaaaaatatttagggttttaatactggctaattgatttaatgtttttatttctctatttaatatttgaatttactatttgaattttttttctcgagccgtacgaggccaaaacctcttatacgtttctagggggggtattattcatatacatctatcccaacgagccgtttatcgaatccttgcaattg

SEQ ID NO: 1043 - DNA, 540 bp, Arabidopsis thaliana
  Intron number 1 from transcript AT5G60390.3 (locus AT5G603 90) derived from phytozome v7.0 (chr-ID Chr5; pos 24288686 to 24289225)
ttcgtagccgcaagactcctttcagattcttacttgcaggttagatattttctctctttagtgtctccgatcttcatcttcttatgattattgtagctgtttagggtttagattcttagttttagctctatattgactgtgattatcgcttattctttgctgttgttatactgcttttgattctctagctttagatccgtttactcgtcgatcaatattgttcctattgagtctgatgtataatcctctgattaattgatagcgtttagttttgatatcgtcttcgcatgttttttatcatgtcgatctgtatctgctctggttatagttgattctgatgtatttggttggtgatgttccttagatttgatatacctgttgtctcgtggtttgatatgatagctcaactggtgatatgtggttttgtttcagtggatctgtgtttgattatattgttgacgttttggttgttgtatagttgatggttgatgtatttttgttgattctgatgtttcgatttttgtttttgttttgacagct

SEQ ID NO: 1044 - DNA, 536 bp, Arabidopsis thaliana
  Intron number 1 from transcript AT5G60390.1 (locus AT5G603 90) derived from phytozome v7.0 (chr-ID Chr5; pos 24288690 to 24289225)
tagccgcaagactcctttcagattcttacttgcaggttagatattttctctctttagtgtctccgatcttcatcttcttatgattattgtagctgtttagggtttagattcttagttttagctctatattgactgtgattatcgcttattctttgctgttgttatactgcttttgattctctagctttagatccgtttactcgtcgatcaatattgttcctattgagtctgatgtataatcctctgattaattgatagcgtttagttttgatatcgtcttcgcatgttttttatcatgtcgatctgtatctgctctggttatagttgattctgatgtatttggttggtgatgttccttagatttgatatacctgttgtctcgtggtttgatatgatagctcaactggtgatatgtggttttgtttcagtggatctgtgtttgattatattgttgacgttttggttgttgtatagttgatggttgatgtatttttgttgattctgatgtttcgatttttgtttttgttttgacagct

SEQ ID NO: 1045 - DNA, 405 bp, Arabidopsis thaliana
  Intron number 1 from transcript AT4G37050.1 (locus AT4G370 50) derived from phytozome v7.0 (chr-ID Chr4; pos 17459087 to 17459491 reverse strand)
gcacaatcttagcttaccttgaatcacaacttcaggtatatgtaactgattctaaattgaagattgtgtgcaaatcttatatccattttttattattaaatttattgaaaaagctagcggtgtaaattaatgtcacaaaatcagtatattgttagtttttgttttttttgaagttttatgcaaatcttcaaaaagtatattcagtgttgtaattgacaaatagagactctagttctttttttttttttcttttttttaacatctgactcttatagagactctagttcatgtacactttttttaatggaaaaacaaatttgaaactgaatatcttatttccacgtagattgtatattagtttaatttgattgttatatttgtaaatgtctactaaacaggaattgg

SEQ ID NO: 1046 - DNA, 665 bp, Arabidopsis thaliana
  Intron number 1 from transcript AT4G04460.2 (locus AT4G044 60) derived from phytozome v7.0 (chr-ID Chr4; pos 2224567 to 2225231)
ttaagcttttaagaatctctactcacattttctctgtgagtgttcttttatacttctttgttatttccaatttttctttctttcctctaaaaattttaggaactattgaatcatttaatttctgtttgttgataaaatttcgatcaactgttctcggcttaccgatgcattttttgtaaaaccgtctttttttggtgaataaaattttaaattcatacaaaaaaaaaacatatttgatactattttagctccattgtatctgaatcttcatttgttaatttttttgtttcctctgttctcacttgaattttggaatattttctctaggttttaccttatattcttcactttaagaactatatgaagatttgattggaagtaataatattcggtgatagaatctgagtttgtttgattctggtgtggggcttatatctaacttttttctttgtaccaatacattttcaattttacatttttgattagcttaaaatgtgaaggataccttgtaaataactattacactattgcttgtcttagtctaatagtcttcactaatattttgtgcagtagaagtaaatattataaagagttgttgtttgattatagagagttgttgtctattctttaacttgatgtgatgttgtttttgatgacaggtaaaa

SEQ ID NO: 1047 - DNA, 920 bp, Arabidopsis thaliana
  Intron number 1 from transcript AT2G34770.1 (locus AT2G347 70) derived from phytozome v7.0 (chr-ID Chr2; pos 14665856 to 14666775)
tctctcttccgtctcgagtcgctgagatccatcaggttcgtttctattcgaatctattctcttgaatccgtatttgtttcctttcctctctagatagatttcatttttctggaaacattgagatttccattgatttgatgtttagtggtttagatcggataatttttgttattgactctcaaaaaacgaatcataactatcttaaaactttgtttacgcattgttattgaaggctaaataaaaaatgctcaattgttgctagaaaggaaggtgtctcgaaaacatgtgaatttattttttgagcctcattgtttctcactgcaacaatagtgaatgattcaattgaaaagaacttttggttaagccatttttctctttaatagattatgtgtctcaactcaattaggaactgtgtgtttttttgtttccttgatgttaacttgtgagttgatttatttgggtagtttacttgtatatatatttggtggtgggtcctggagggaaatgagtgagagggagctctgttcatacattctatgtttttaaatgattagtatttttctttcatctaatacttgctttttgtgctaggaatttcgatttttgggactaatttatcgagtatatataattggataagtgagtttggtattaatattaagagcaattaggttggttatcttgccaaacagtagacccctgtcgttttcttagtcatttaagaagtaatgcttaagattcaggcctctaatctggttatgatagtgaagaggatctgtaaatttacctatacgacctgttgaaaaggacctctggtgtttgttactatgcgtttctgatcaatatagacatagttggatcatattcttctcttgatcgtctgtttcattttttttcaaaatcagtaaaaggtctgcaaa

SEQ ID NO: 1048 - DNA, 666 bp, Arabidopsis thaliana
  Intron number 1 from transcript AT1G17110.1 (locus AT1G171 10) derived from phytozome v7.0 (chr-ID Chr1; pos 5850011 to 5850676 reverse strand)
tttttcttccttttgtattcagctcgttaattaaggtatgttcccaaattcttattcttaaagttcggctctttcctttttcttccgacttgtgtcttagttttttttttcaatcgtggtcaaaatttgttcttgagctactctgttataagggtttgtgggtactggaatctttgattcgagagcaatggagactttcaagcacctcagattttatggttagagaagtttttttttttgagctgctctgtagaataatgtgcttaggtctgtacggatttggggtaactagttggatcgcgagtgtttctcaccaggtccttggaaaaggatttgttttatacctgaaatttgggatttttcagactcatcttcaagtactttgctttgaatcggggatttagcagacttgggttcttcagtgagatgctttattcagttttgggggtttgttagatttgagagcttaagagataatttcttgttgcttttgttgaaaaactatgaatggagactagatttaattgggcttcccttggaaaccatcttgagctttattgaatctgtgtataatatgatggaataatgagagtataaactgaactcattctattggtatttgtaaatgcagggctatccatcttccgagttcttcagtagcttcac

SEQ ID NO: 1049 - DNA, 851 bp, Arabidopsis thaliana
  Intron number 1 from transcript AT1G17280.1 (locus AT1G172 80) derived from phytozome v7.0 (chr-ID Chr1; pos 5919163 to 5920013 reverse strand)
agagagaaaatcttcatcgacaaaattcgattcaggtgatcaatttctttcatattttcgcaattatttcttggatctgatgttatctactttggaatttcttcgctgcattatcttttgatttgttgttcttgttcctttgcgtttctgggtaagagcgaagcttgaaattgcaattggaatctctaacaagtttaagactttgctttgatacggtttatgtggaagtatctgtgattttcttatatatttatggaagatattgcagctgattcgagtttggtttgcctatcattgttgcaattttctcggttcaatcaaaggattttctaggttgatatataattccagggatttccagataatttcctttaatttggttggaattcgattgaattttcgttgctttcaattggtttgcagtgatttgggtgaaaagatttttccaagctcatggaaattggggatttttattcaaagggtgtttctggtgatcatagagttgtttgactcaagtttcatttgatcttgtgtgtatttggttggtttttcttttcaatcaggtcatgaaagtattgcataatagctagaagtattgttatctctgtatatgtgttgtgagatagtacaattggtaaagtttccatatcaatggcacgaaaatcaactgcaatttactcgtttcgatatatgtttttatgtagttcatatatgtaattcagacataagggttttatgtagtccatctcatcagtaggtggactttcactcatatttgtatttcgttttgttgataatgttaaatgggtgtaacagctgctgcagctattcacttcgtccatagcacgtag

SEQ ID NO: 1050 - DNA, 851 bp, Arabidopsis thaliana; identical to SEQ ID NO: 1049
  Intron number 1 from transcript AT1G17280.2 (locus AT1G172 80) derived from phytozome v7.0 (chr-ID Chr1; pos 5919163 to 5920013 reverse strand)

SEQ ID NO: 1051 - DNA, 736 bp, Arabidopsis thaliana
  Intron number 2 from transcript AT1G32750.1 (locus AT1G327 50) derived from phytozome v7.0 (chr-ID Chr1; pos 11855510 to 11856245 reverse strand)
gcaagggttcccacaacgagacttcctcaggtatatatatgttgctttctttatcaaagtttgttgcttttcttttttccggtccagtccattgtcgacatgatttctgaaactggagatgcccctgtctagcttatgattgttctacggttttgaatatttcggattaagtctctttaagtagaaaaggaacagccttgagtgattctgagtattggtttgtaggatcttaattgacaaagagattggaaatattaggttgtggaattttggattactacagtttgtgaaactagagatgtccctgtctagctagtgtttggtgcatttaggctagctcatgaccgatttacggttttgaatattttggatttctttaagtagaaaaggagcagtcttgagtgatcctggacatgttctagggtatagttaagattattttttctaaatttctagagggaattgagtttgtaggatcttagatgacgaagagaatgggaatagtagtttcactagatggaggctactgtagcctgataagatgatggagaggaatccaatgattatgtgaccttggatttagcagtttaacaagagtgttaacatgcaatctttgtgatttctgaatactcgtgatgataatcagttatcacatgcattcccattttacaccaatattttacatgtctgccaagatttgtttggtgaacaccaatattttacatgtctgctgcag

SEQ ID NO: 1052 - DNA, 429 bp, Arabidopsis thaliana
  Intron number 1 from transcript AT5G04560.2 (locus AT5G045 60) derived from phytozome v7.0 (chr-ID Chr5; pos 1309202 to 1309630)
cattgactcgcctgagaatcagaaagcttagatcggtgagcttttagctccattttctgtttatttacatattatttcctttttttctctctcccttttttatctggaatttgttctgctaaattttccagctgttacattttccgatcacgagaagaatcactgggtttttatgttaatcaatacatgttcctgttttctgatcataaatctcagctattaacacctgattttgattctgcgtaataaaaacctctgatttgcttttatcttcactttccccataaacattgcttactttattcgctcttcttttaccgtttccagctaaaaaattcttcgctattcaatgtgtttctcgttttgttgatgagaaaaatatctgacaaaaaatcatttattgcattttatggtgcagattcttagtta

SEQ ID NO: 1053 - DNA, 547 bp, Arabidopsis thaliana
  Intron number 1 from transcript AT5G56150.1 (locus AT5G561 50) derived from phytozome v7.0 (chr-ID Chr5; pos 22729209 to 22729755)
tcatcaaatccaaaaccctagaaaccgaacaaaaggtaggtcaaaattagctccgataaatctcgatttcgatttgaatcatcgttactcttagggtttattcgtttcccagttcttgatcttcgtcgtttgattctctcgcggttttgtttccttgcgtcgatccatgtgttttttctgttatcttggttctagaatattctcgtacctacttctgatgatttacctttaactgatgcgtaattgcttgatctgtttctgaattgttcgttgattttctctctgtttgatcgaattctgatcggattgtctcttgggcttgagtgtttgatttcgagatttttctggttgatttcttcaggaggtgtatcttaggctaattatcaaagctgatttgcataaagtctttccttttaggatagctatgttcttgctccatatgttaactggtttttgctgtgtactgcttttgcatctgtacttgtagcagtatagtaatttttttgatttgattttgttcctagctagcagaagctaggactattca

SEQ ID NO: 1054 - DNA, 547 bp, Arabidopsis thaliana; identical to SEQ ID NO: 1053
  Intron number 1 from transcript AT5G56150.2 (locus AT5G561 50) derived from phytozome v7.0 (chr-ID Chr5; pos 22729209 to 22729755)

SEQ ID NO: 1055 - DNA, 530 bp, Arabidopsis thaliana
  Intron number 1 from transcript AT5G62540.1 (locus AT5G625 40) derived from phytozome v7.0 (chr-ID Chr5; pos 25104149 to 25104678)
tgcgaatcacttttcattgcagctttgaacttcaggtaattttaggttaatcgagctttttcatttgatgcatgacatcggaagatcaaatctttcataggtgattgtataatctaatcctaaggctcgttgaaatcgataattgtactcttgatctacttaaattcagaatttaaattcagaatttatacacagctactatcgttgagtcgaacttaatttgctagttgaaataatccaagcttcaagctttcttgtctagaagtttggtgattcttgttctctgaccttttgggctatatggttgttgaagcttaagtctttgttaaactatgatgataggttatagaaatgtagatcttggtctctgcttctactttttttgggtctgaaaaaaaattgaaactttaatcagaaatttaaagcctagttcatgcaattgctcttactttgtgacttatgaaatgagtttgtaagagtaaagttgaaatctttcatatttggatgcagtctgtgaatttccaacagca

SEQ ID NO: 1056 - DNA, 466 bp, Arabidopsis thaliana
  Intron number 1 from transcript AT1G01225.1 (locus AT1G012 25) derived from phytozome v7.0 (chr-ID Chr1; pos 96123 to 96588)
tacttacagagcaatcttcgcttattctcaccacggtaactttagattcattcttcccaagtttgctcctttctttctcgttcattcaatcataacatcaaaaagtgaaattatcctcaatgcaagtcttttcttttagtttctactggtcggtttaatcttcttattgaaactgtaaattcacaaagttgacgactttatctagatagatcttgaagacaatggtctatattccaatctttgcatgacctaatttcaccctggctctgtattttgatgttattccatcatatcttctgatctctgatggactttatagatgatttttgtttatttgacatatttttatcccaatttcctctggtgatgaagaattgatactgttgtagacattccttcatgggctttgatttgattgtggatttttgcaggaatctttgtcggtgggtccaaagttgttcatttc

SEQ ID NO: 1057 - DNA, 489 bp, Arabidopsis thaliana
  Intron number 1 from transcript AT1G01240.2 (locus AT1G012 40) derived from phytozome v7.0 (chr-ID Chr1; pos 100186 t o 100674)
gtcaacttctgattttggaatttctgaaaattttggtaaatttactcgatcccattgcgaaatcttacgcatgatctttgtagtttgctctgctcaagactttctttttttttggttctgcagtatgtcttaattgctctgaaacttatgtcttgttgtgtttaatttggtggtgaaatatattgtcttctttattcctggatctgttaagattgtttaagatttcatatacgttgaattggttttgattgaatatattttggttcccagacgttgcgtgtattatttaatgtaaattccttaaatcattggcttatctatgaatcaatcatttgcttagaagcaatctcatgagtagcaagaaaaacgaattaatccttcccatgtcttttatgtttatattacaggatctgggtgaaaaaagaacagtcttttgatttggtgtgtttctcttttctcttaattttttaggatttttgttgtgtctta

SEQ ID NO: 1058 - DNA, 663 bp, Arabidopsis thaliana
  Intron number 1 from transcript AT1G01240.1 (locus AT1G012 40) derived from phytozome v7.0 (chr-ID Chr1; pos 100012 t o 100674)
gattctttaaactactaatagtatctttagttgttacttcgttttctgatctattttacaaatcttactcttttgctctgttttcgtggttttgtttagataaaagtctctgttcttctagtttcttccatcagactgttttctcatggatcagtgatgatttttgtttcctgggtcaacttctgattttggaatttctgaaaattttggtaaatttactcgatcccattgcgaaatcttacgcatgatctttgtagtttgctctgctcaagactttctttttttttggttctgcagtatgtcttaattgctctgaaacttatgtcttgttgtgtttaatttggtggtgaaatatattgtcttctttattcctggatctgttaagattgtttaagatttcatatacgttgaattggttttgattgaatatattttggttcccagacgttgcgtgtattatttaatgtaaattccttaaatcattggcttatctatgaatcaatcatttgcttagaagcaatctcatgagtagcaagaaaaacgaattaatccttcccatgtcttttatgtttatattacaggatctgggtgaaaaaagaacagtcttttgatttggtgtgtttctcttttctcttaattttttaggatttttgttgtgtctta

SEQ ID NO: 1059 - DNA, 837 bp, Arabidopsis thaliana
  Intron number 3 from transcript AT1G01320.1 (locus AT1G013 20) derived from phytozome v7.0 (chr-ID Chr1; pos 129036 t o 129872 reverse strand)
aaacggaggctattttgaaggtctgtgtgtgatttattttctagcatcattttcgaatttatgtaaaattttcatatttcttgcgtgtttacaactgttttttttttggtaccgatattttctctgaattttgttatatcccttttatgcaattaactaatttatataacattagtttcagtattgaacttatagcatattgatgaaagtttatctttatatttttaaaattcaaagattttatttagtttaatcagaactagtgcttttaaattcatttctgatatatataaataaactcccaatgtgcactcgatttatttttatgatgtcgtttttccgggataaggcaagacacgttacctacaaaatgataggtttacacttatacttgttgtattaattttttgaaaaaaaataaaaaatcatttccttgacttagaattatcttcttaaattttatcattatttgaacgtgtagaaaaatacaaaactgtgtgtaacacacaaattttcgattgttaaataattcattagtttctcataattctggtcaataatattacgtagacgttacatagacagtgaaatgtttatatggaaaacatgtgtatcatcttttgtcgtcagaaaacatgtttatctatattcgtattttgttactcgaatatttgttacaaatgttttcttgtttgaaattaataatattaatgatttttttttgccgtatgttaggtataggtttcatatgtttattattccaaaaataaaattatcaaaagtggattttatagagaaaatgtctgaaacagggcatatcaacggacaggatcatag

SEQ ID NO: 1060 - DNA, 666 bp, Arabidopsis thaliana
  Intron number 1 from transcript AT1G01490.1 (locus AT1G014 90) derived from phytozome v7.0 (chr-ID Chr1; pos 181398 t o 182063 reverse strand)
aaggtcgatctctctctctctctctctttctttacacgtatgcaagatttgattcctcggattagagaatttctataagaaaaaatagattttgattcttgaatccgaaagtaaaaagcctttttctgtgtttattcgttattaatgaacctctctgaatttattcctttttgcattacttcatgtgcgagtgtttattacatgtgatttgcttcttttggagttttttcttcttaaagaatctcactttttaacttattctgatcctaattgcaacgaaactcttctttttatttttaatgatttttttgtgtgtggctgaaataccgttttaaggttaccagtgaattattaacaaaatcaaatcaagaatcataaattgaatgatgagtatgcctctgcttttgcaaaactctgtttctctactatatatgttcacacaaatacacatgcacgtcactctgtgtgtggtatgtacacatatcattaactttttggtatcttctttaaaatctgcaaatctctgtttttcttgctcctcttccggatagaaaaaaactcaaaaatcaaagattatgtcatcttggtgttcacatctcttgatgattctaacttgttgatcttttgtaataattttgcagaaaattgtgttaaagctggatttgc

SEQ ID NO: 1061 - DNA, 812 bp, Arabidopsis thaliana
  Intron number 1 from transcript AT1G01570.1 (locus AT1G015 70) derived from phytozome v7.0 (chr-ID Chr1; pos 205915 t o 206726)
gtgttcctttgactaaggaagttggcttccatcaggttagtcctctgtttttattttattttccttcaattaaatttaatttccatttgaagatttttcctacattgtcctttttttgggtgaaaacttaagttttatttcagttttcatagagtgtttttattttaatgtttgaagggtcaagatcttagctaggttttgtttaggaaacagaataacttaaaaatgcatttattattattttaggcaaagtctttaatcaaacttccatatttttcattaactcactcatatcttctagtagataccaaatgcaaaagccattacaaatcatttattttattagtgcattctgattttttgtttttttttgttttattaagacttatgtatataacacatcataataaaactgaaaacatttatgtaattttagtaaaatgtatattttgtatggcgataatctcggcactcacatagatcttaggttcacataagtcattgggattgtacactcaagtcaaatatgtcgttagtagttttcgtacgtgttactcttacattcctccgtgcattcacattattcagtttgttattcctatgatagatctaggaacacatcctaaccgaaatctaaacataaatcaaactattaagtatccaatatacatcgatttttgaaatctgtgtcccccactattttctcgatctatacctatcgcttattagaaaatcatcctcgacaattattgttttgattttgtgttgttgtatcagattgatttatacgggaaacttctgggcctattatc

SEQ ID NO: 1062 - DNA, 731 bp, Arabidopsis thaliana
  Intron number 2 from transcript AT1G01830.3 (locus AT1G018 30) derived from phytozome v7.0 (chr-ID Chr1; pos 300792 t o 301522 reverse strand)
ccattttcacactcaagtcaactactagattgaaggtataaactgtacacaaaatctatctttagatcatccactaaagattactactaaattttgggctaatttcaatatttattagatcactcagtatctaacttcctcacattggtgcttacaagttacaacttgtgtttgtggtctaatgaatagagagacagagacttcctattgacttctcttcaaagaaaagtctgcaagttaacttttatccgcagccagatttttcctttctgttactatcaacacattgaatcattctgatcagaaaattacagcttgtgtttcccctttttaagaaaactttcaccaatcacgaaactaacctttacgagttttgaaaagttttttgcattgacaatgattgttcatggagggtgagtataatacgtggctgttaatgagtttgatgtgttattcatatgatatattagggagaagcatttaatggatatgcatctagaaaccactcgaaatgatatgtcgtgtggaaacttccttcttttcttaagcaatggcttgtgtgtattattagttagatgttgttttcatctatacttatttttttttgtcttctactcactagtgtcttccataaagttttgatctttattaatctccaagtacagttaatcagcatttgtgatctgaatttgtcagtgaggaacataaagaactggggaacattttggata

SEQ ID NO: 1063 - DNA, 560 bp, Arabidopsis thaliana
  Intron number 1 from transcript AT1G01830.3 (locus AT1G018 30) derived from phytozome v7.0 (chr-ID Chr1; pos 301529 t o 302088 reverse strand)
ttctcttctcattacacaacaaacttggtttctgggtaagtgtgagtattccatccaaattatcttctcttgtatcactgtaatttttctacttccttttgattcagaataaaaagttcaaatttccgatccctcagttttttttttttttttttttttgtctttttgattttcgtaaacaaaagatgaaaattattttaagattctgaatcttaaaaggttggttctttacggttgatgtttgtattcactagaaaaataaagctaaagttgtcatctctaacttataattgctttttagtcgacagagacaattgagtgatttttcttctgtgattcttttgtttaattatgaagatcaatactttcccctatatctcctttccgatcttccgtttttgaattagattcatagtcacaagtttatttttgttttgagtgtgtttctctcagtgactcgcctaaagatcatactgcataattctgtaaaatcttgcttaacctctacgtgtgtatacttactgaatctctcgtaatttcacagatcaaattttggctgg

SEQ ID NO: 1064 - DNA, 693 bp, Arabidopsis thaliana
  Intron number 1 from transcript AT1G02500.2 (locus AT1G025 00) derived from phytozome v7.0 (chr-ID Chr1; pos 518344 t o 519036)
tgatcgccgaatctcataatctcccatcgaagcaggtattgttcttcgtattcgcttctcgtttctctctcgatgtattgttcatttttgttttccagttgattttcaagtctgacgtgcgtattttttccgatttgacgatggaagtagatttaagggactattgactgtatctatggtttttaattagatttcagctactctttaaccattttgttattggatcagcagcgatttcgttatagattctcaaaaatattctcagatgtgtgggatttgagtagagtttatgttgcgttggcatgatttgaatagtatgcaagatttttgagattttgaattcgttcatgtgtgtatgtgtgattgtagcttgatatgatttaacctgttagttaaatgtgcatagacaataagtaacatacgaagcgagtcactaagcataagagtcaacttgttttgctgaaaagatatcacttatgattttcgaatcattttagcttttttgtcacttgagcttaatgattcttctgaaattcgattctttgtttggtttatgtcacattctttagaattgagaatctaagaaaagcttacaggatatggtgaaactattcttttaagatagcatgatgcttcttttatgattctacagtggctaagtcattttttttttgttctattctttgtagcaga

SEQ ID NO: 1065 - DNA, 693 bp, Arabidopsis thaliana; identical to SEQ ID NO: 1064
  Intron number 1 from transcript AT1G02500.1 (locus AT1G025 00) derived from phytozome v7.0 (chr-ID Chr1; pos 518344 t o 519036)

SEQ ID NO: 1066 - DNA, 639 bp, Arabidopsis thaliana
  Intron number 2 from transcript AT1G02580.1 (locus AT1G025 80) derived from phytozome v7.0 (chr-ID Chr1; pos 545028 t o 545666)
agcaaatcgaaaaggagagatttctgcatatcaaggtaagagacatttggttgctttaatattttattctcttctgtatgtttttctgaaaattaaggagaggagaggacttaatctcataactatacgattccaaagagatgttaagatacatctaataaacagttatacattagtcataatctttaaaactaaaaagagaaatttccaaacttttaaattaaaaacagaatttagaaaatgccagcgaatcgataacgacatccagatctgtcgggtatccaaaacttagaataaaaaaataattaatatatttataatataaagctggaacttaggttataaaataaaattgaaaataatagtagatttttttgtttttgtcaaacaaaatagtaatacaatttgttttttttagtacaaagaaactaaataggtccaaattgttttttttttaacattcagccaaaaaagccaagattgatgcatatatcaagaaatcgaaatcaaaacttttgtattcaagtattctagtttcactatatatagagtccagtttctgaaatttaaaaaatcatttacctatatattacttgattaacagagaaaattcgagctgagatacattccaagtgtggc

SEQ ID NO: 1067 - DNA, 706 bp, Arabidopsis thaliana
  Intron number 2 from transcript AT1G03330.1 (locus AT1G033 30) derived from phytozome v7.0 (chr-ID Chr1; pos 818246 t o 818951 reverse strand)
ctagggttgttgaccaggacaagtaccctcacgtaaattttctttcttttaagcgatttctctaagaattgggaatttagggtttattggagcagcctattgttttttttttgttcacataggcaatattttctttgttgtgtgtgcttgaagtgctcttaagtgtttgacattatactggaattgatctcactcgctagtttcttgctatacttctttgtctcgtattgtaaaatatcacttatgaactgattgaaagcttaatccttggctcttgcaaatgtgtttaagccttcactcttttctttttccttgctttcatttactgtgaccaagcttgagaagctctaacgtgatattgattagatttacagacgcaaagggatgatttgaagtgattagtggttctggttcacatatttgattgagattgctgcttttgtactgcaatttgtcaagtctactcaggattacaaaagatttgcaatatgtttgcatgaccaatttcaatgcatttaggttttatggcgtttatattgttatatctttggcactgtatttctttatcttgtcagtgtcacactttagaaaccttgtcaaatagtacaatttcgctagaatcctcccgaagatgtttttagctgacggatttgtgtgtttgttctgtgtagctttcagtgagaaactgtttcatcagaggatctgt

SEQ ID NO: 1068 - DNA, 283 bp, Arabidopsis thaliana
  Intron number 1 from transcript AT1G03330.1 (locus AT1G033 30) derived from phytozome v7.0 (chr-ID Chr1; pos 819044 t o 819326 reverse strand)
cgagcagaggtagaaatcagcaggaaacaaaagtaaatttgaatgctttcttcatcttcatgaacttgattgttggcagttgttttgtttgacctagaaaaggtttcttctttcttcgtaattattcatgggtttactcttttttagccaatggttctagggttcttggagatttcgagtttatggttttcgatgatgatttagggtttctcgtgatgggttttgattgtgtttgttctctggtgcagttgttcttttcttacttcaaggatttggttggaca

SEQ ID NO: 1069 - DNA, 420 bp, Arabidopsis thaliana
  Intron number 1 from transcript AT1G04210.1 (locus AT1G042 10) derived from phytozome v7.0 (chr-ID Chr1; pos 1115158 to 1115577)
ttgacgaggctctctgtttgtcacttctcaattaggtaaaaagcttactcctttatgctctgttgctttagttgctgcttcttaatactacgtagcattgataactcaagcatgtggtggattttgacagtttctgttggtggtccgtgtagaatttccaggaaacgtaagttagaaaattattgattgtgatacgtttggtggctgcttaatgatgtgttttttagcatgctctaggtgattgttgtactttattacttttgatgtttaattggatatctagattgttgttatgaagaaaatttgtgaaatcgattggactttagaattgagtttagggtattcattgcttcaaattacattggattgcatttaaccctgtctcccacttgtttgtagatatcttcccccggagattgg

SEQ ID NO: 1070 - DNA, 461 bp, Arabidopsis thaliana
  Intron number 1 from transcript AT1G04600.1 (locus AT1G046 00) derived from phytozome v7.0 (chr-ID Chr1; pos 1262126 to 1262586)
gtacgagctttctcttctttaatcgcattgtggtttcttctaacaaaatctgattcgttttgatttctctctgttgtgtgatttcaattttaatttttctgtgaacaaacgttttttggttaatttatgtaaatttatcatactgtgatacatgaattttcgtatggtgtatcaaattgttattgagtttctaaatgtgtaaaaatggaaccatatgtcgttgaattaaaaaacaaaaaaattccttttttgattggtttgtatatgattgaacaaagctgtgaacaactttactctctctattgattttgttttggatgagaaagaaagaaaaaaaagatttttttgagaaaattcatctctctttgttgttgtcttcgattttcagttacctgtttgattgtgtagttatgatgtggtttatgtgcaggctgcttcagccaaagtaacggtagggtctc

SEQ ID NO: 1071 - DNA, 1016 bp, Arabidopsis thaliana
  Intron number 2 from transcript AT1G05230.4 (locus AT1G052 30) derived from phytozome v7.0 (chr-ID Chr1; pos 1517200 to 1518215 reverse strand)
accttcaagaaaacaataaagaggaaagattaaaggttagtattcccttgcctaccaaaaaaaacagaaaggtttgtattctcttcgtatatccttattttcattatacgtttggttttatatataaacacgtgtatatactttatagtagtagtatacatttacatattaatgtgtgtaataaaaacgtttaaatacgatgatgatgataagaaatagctggaaaaaattaatacatcacccaggccttatgtcacgttggttgtaagttgtataataactatatgttggtccgtcgcacaggtgcacagatataatactatttttttcatttcaatttttttttctttcttaatcgccaaatagtagtttacactttttcctgaagagtttttattttttgaaaatctactaatgattatatttaattaaattttgttttgttctcacgaaaatattgtttttttaataaacaggatagagttgggaatttatttgtacctactttttcccattttatttgctttgaacaaatgagtccaacatttctcttttcgtcttctctttcctatcccatctaaatcaaaactgatcaaaatacctcgaaattttaaattaaatcaccatccatcaaagctattatagtgtagaaattttaaagttttttctttggacaacaattgatttccatctacactacatatgatatgactcttgaatcaatcatagtttttatttcagtctgctgattagtttttttcttttcttttaaaagggtaaaaaatcggtagtttcgaataattttgagtatgtgaaaattcattatttttgggttggttattcaataacaaattaatttgtgattgtgatgtcttttttatgcaaggctcttttttcttgctttcaattagtgggtcctttgtttcctacaatcatctccaattcttctgtttgcttatatcattttgtatgatcttcaagaagaaagataaacgactccgaagaaagatttaagt

SEQ ID NO: 1072 - DNA, 227 bp, Arabidopsis thaliana
  Intron number 1 from transcript AT1G05385.1 (locus AT1G053 85) derived from phytozome v7.0 (chr-ID Chr1; pos 1583348 to 1583574 reverse strand)
tcaaagtatcactcttcttcttctttatctcttttctgtgtttttttttttttttttttgaaaactcttttctgttttaatgtcaatgttgtttatatcatccaatgttgaaatcaaacatgtttcttcaatgatttagttttttataagagatggattgatttcacgatttctaaacttatctacaagttttatttaactgctttaaactttgcaaattaaaatag

SEQ ID NO: 1073 - DNA, 516 bp, Arabidopsis thaliana
  Intron number 1 from transcript AT1G05860.1 (locus AT1G058 60) derived from phytozome v7.0 (chr-ID Chr1; pos 1769604 to 1770119)
aagctttatacgtcttgtacttacgtcaataaaaggttcgttcacaatttcgagtttcatagttttttccttttgattcgcatcatattctctcgcattaggaaataataggtgcttcaataaatgctaatctgtttttatgattctgtgaaatttcagttccttgatactggttttggttttgtttcgtggtgaggaattgaaagtactttgcattgtttgtatcgtaatgggcgaagatgataggagttaggattgtctgcatgattatatcattatgaagttcttactgtgatggtggtctagctattatggtaaattggtgataaaaatggagcagatgtgagatgtctgtgtcatctgtgctttgatatccctgattggaaagaacttaaatttttgcattgcggagtgcaatgagcatgtgataattatataatcagctttattctaactctatgtggtcacattgttcatgcagagctcagtcgaaagcaataacttgtccaaaaccaa

SEQ ID NO: 1074 - DNA, 284 bp, Arabidopsis thaliana
  Intron number 1 from transcript AT1G07280.2 (locus AT1G072 80) derived from phytozome v7.0 (chr-ID Chr1; pos 2238146 to 2238429)
gggacaaaaaccatcgttcatttcttatagagtgagtctcttcagcttctcttctctttcactgaagtttttgtatttatgatatcggtgtttcattgtttctcgtgcttattcagtttttctccgatccgttttttatgggattgttaatgattcattcccgtgagtgagtgtgtgtgtgcatggatttaataactttctccgattcatttttgactcacttgattcatcttttgatttgcaggaaagcttgagtgagggaaaagctttctacacgaaactag

SEQ ID NO: 1075 - DNA, 283 bp, Arabidopsis thaliana
  Intron number 1 from transcript AT1G07280.1 (locus AT1G072 80) derived from phytozome v7.0 (chr-ID Chr1; pos 2238142 to 2238424)
atctgggacaaaaaccatcgttcatttcttatagagtgagtctcttcagcttctcttctctttcactgaagtttttgtatttatgatatcggtgtttcattgtttctcgtgcttattcagtttttctccgatccgttttttatgggattgttaatgattcattcccgtgagtgagtgtgtgtgtgcatggatttaataactttctccgattcatttttgactcacttgattcatcttttgatttgcaggaaagcttgagtgagggaaaagctttctacacgaa

SEQ ID NO: 1076 - DNA, 703 bp, Arabidopsis thaliana
  Intron number 1 from transcript AT1G07930.2 (locus AT1G079 30) derived from phytozome v7.0 (chr-ID Chr1; pos 2458311 to 2459013)
catccttctcccttgtgcgatatcgtttgcgtgaggttagcttttcatacgattcttcgatttgaattcttattcttccgatcgatttggtagattcaatttcgtcccgttgtcgtttgcttcttcttaatcacttctatgcttctttacatgtaactctctgatttgttgataggatcgtttagattctttgattccatggctttgaacttatcgattgaggaaattaacgttctgtagtgcaatcgaactggctttccttttattatttcaaattcagatcatgtaatctgtcgatctagttctttgaattttctgttgtgcgattgattgtttgttagatccatatgtgtaaggttaaattgatctattggtataatacatacgtttctagttatcaaattgatttgtgattgggtaattctggagcagcataaaaaatccattgtttctttccttcttgaatctaagtcgtggaaactctaggattgtttgctgtatatctcttgaaattgcttgtttgattgaatttagctcgcttagctcagatgatagagcaccacaattttgtggtagaaatcggtttgaatccgatagcggcttttaacaatgattgttttttgtgttcatatgtctactgtttttattgattcaatatttgattgttcttttttttgcagatttgtctgaaaagtagctaacc

SEQ ID NO: 1077 - DNA, 652 bp, Arabidopsis thaliana
  Intron number 1 from transcript AT1G07940.1 (locus AT1G079 40) derived from phytozome v7.0 (chr-ID Chr1; pos 2464793 to 2465444 reverse strand)
ccctagccgctttactctcttgcgatatctctgaggtaagctttttcgtcaccatcttcgatctgcttctttctcttctgttgatctgtgttgaatctgtttcgatccttctcgtttgtttgttgtaatctcttggattcgattctctttgtttatagatcgtttggaatttctgatctgtggtgtaaagttttatcgatttaggagaacaaagttttacagtgccatcgtattgttttttttcttcatgccagctgatgataaactatatgatcgatctggttctgaaatttttgtattgttcaatggattgttgattggatcttttgatgtatgtgatattaattgtcgatttgaattgtgattaggtaattctggagcagcataaacaatcaattgattcattcttcttgataccaagttgtggaaactctaggattgtttgctgtatatctccagaattgctgttttgattgaatttaggtcgcttagctcagttgatagagcaccacattttttgtggtagaaatcggtttgaatccgatagcggcttttaacaatgattgttttttgtgttcataagtctactgtttttcttgattcaatatttgattgttctttttattgcagatttgtttgacagtctctaacc

SEQ ID NO: 1078 - DNA, 403 bp, Arabidopsis thaliana
  Intron number 1 from transcript AT1G07940.2 (locus AT1G079 40) derived from phytozome v7.0 (chr-ID Chr1; pos 2465042 to 2465444 reverse strand)
ccctagccgctttactctcttgcgatatctctgaggtaagctttttcgtcaccatcttcgatctgcttctttctcttctgttgatctgtgttgaatctgtttcgatccttctcgtttgtttgttgtaatctcttggattcgattctctttgtttatagatcgtttggaatttctgatctgtggtgtaaagttttatcgatttaggagaacaaagttttacagtgccatcgtattgttttttttcttcatgccagctgatgataaactatatgatcgatctggttctgaaatttttgtattgttcaatggattgttgattggatcttttgatgtatgtgatattaattgtcgatttgaattgtgattaggtaattctggagcagcataaacaatcaattgattc

SEQ ID NO: 1079 - DNA, 543 bp, Arabidopsis thaliana
  Intron number 1 from transcript AT1G08830.1 (locus AT1G088 30) derived from phytozome v7.0 (chr-ID Chr1; pos 2827157 to 2827699)
caagcacttgattctttccaaaggggtttcctgaggtatgtttgctttcctttttggttttaatttgtttcaaatcttagatcgattcttcactttggattcttaaatcgattcttgtcctcgtctgtgctgatttcgaacttttccgattccaactccgccgaatctacgtatagatctttgaggaaatgtttttttcgatttatgatcggcggatctaccgattcctttgcttgttttctttggatgtatcacactcttctgaagatgccttgacctttttatgtgaactagtaagagttattatggcttagatcgttgaatatctggtatatgtgttcttataatgggattaggatctatgttttggtgcgtattaaagcttagttgagattgatgtttttgggttttcaaattctgtttcttgtctgttgagctaatttaatgttgtgtagaaccatttgtttttttctggatctttacttatttgtatatgtattggtttatgtttatgtttttacagatcacaaaggccaagtaaca

SEQ ID NO: 1080 - DNA, 543 bp, Arabidopsis thaliana; identical to SEQ ID NO: 1079
  Intron number 1 from transcript AT1G08830.2 (locus AT1G088 30) derived from phytozome v7.0 (chr-ID Chr1; pos 2827157 to 2827699)

SEQ ID NO: 1081 - DNA, 492 bp, Arabidopsis thaliana
  Intron number 1 from transcript AT1G08970.2 (locus AT1G089 70) derived from phytozome v7.0 (chr-ID Chr1; pos 2882652 to 2883143)
ccagtctcttccccttcagattctcctttccacaggtcactctcgtttgcagattctttttttcaatttgacttgttcttacttatatattgtggaattcacatgataaaataatatgcttggtgttgtaggaacaattctagttgttctgtgttagcagattctttgttctgtctattttgaaggaaattaaaggcaatccctttcgatattttcctgttttccttatcaaatttatgggttggaataagtaggttgatgtattgtcttttaattcgaagctcaattttcatacttattgctgtttagatcttcaaggttaatctagaattacagattagaccatatataaagtaaattcagcagattcttatttatgtaaattgtttgttagcaaccttatctccttcacatttctttaaaattctggtcagatgtttcttaagagcttagaatgaatcccaaagttctgtttttttattctggtagtga

SEQ ID NO: 1082 - DNA, 384 bp, Arabidopsis thaliana
  Intron number 1 from transcript AT1G09280.1 (locus AT1G092 80) derived from phytozome v7.0 (chr-ID Chr1; pos 3000683 to 3001066 reverse strand)
ttactgtatgcttctaatctccttttctacatatccaatgttttatatttgatttgaccattttctgagttctctgtttcgtctgtggttcgcgtctgattgagtattaaagccatgaatcgaaaattctaaccctttatgtggtgagagaactgaaaagaaaaacttaacccttttgaactgtgttctgttggttgtttgattgaggattaaagttctccatgtatagttacgacttacgagtgtaatccatcttaaccattaaagaagtagacaccaaaagtttgaagcttttgctagagttctgtttatacggttgggataatagaaaactttgcttattggttaggttggtgggaaattaactgcattggaggaacatat

SEQ ID NO: 1083 - DNA, 667 bp, Arabidopsis thaliana
  Intron number 1 from transcript AT1G09390.1 (locus AT1G093 90) derived from phytozome v7.0 (chr-ID Chr1; pos 3031485 to 3032151)
attatccgacggacgcctcgtcatcgatttcctttgtaagtcaactttctcttgactttttttaactctagttaattatttagacggtggagattagaggtaagtgcaatgaagtcgtgacaaccgtccgatggaatagatgtaaaccttaatcaacggctaataattgatgacggtgatcgcgttgcgtgatgccacaaaacgacacaattcactcgttgaaatgatgaaaatctaatccaaagaaaagtgggtcccacttaccaacatgggaagatatcacaatcaaaagtgggtgccaccatgtagattcggcgcgtgaacccactcgttacattagattgcgtgactaaagagtcaaacaacgccgtatagtaaaagatgcgttctgttttttttttttttttttggtatcaatgttaagtatgcgttctgttttgtccaaatcacatgttataaggtttcatattttagtcatttatatactataatgcatgaaaatattttgttactaacgatatgcagattcaagttaaattttggtggttggtaaagttgaaatgcaacttctatatctaacttcaaaagtaaatatgaatctaatattccattcttttctgacatattggcaggccagagtttgaatacaagtctattgaacccatac

SEQ ID NO: 1084 - DNA, 468 bp, Arabidopsis thaliana
  Intron number 1 from transcript AT1G09490.1 (locus AT1G094 90) derived from phytozome v7.0 (chr-ID Chr1; pos 3064272 to 3064739)
ccactgttcgagatccaagtttgttcccaactctctctctcttctttattttaaaaaacaaacgactgcaattattagggacgattatgagtagcacaaatagaatcaaaatcggaatctggctgaaaaatctgacggaatcaaaccaattatgtctttacttaaattacatacataacatccaaatcgttcttttttttttttttgagacaaccaaattgaaatttgggactttgattagctgttgtgttttgaatgatgacttattaattagacaatatttttccgacctttataattaaattaccaaatacggaaagttcagagaactcattcaggttcgtaccaagttttgacttttgagggtacaagtaaaatcattcttttgaactttgaactttgaagtgcatgttgacgttatactcttcttcagaggacaagaagaaaacagaacatcttcttgcacta

SEQ ID NO: 1085 - DNA, 965 bp, Arabidopsis thaliana
  Intron number 1 from transcript AT1G09570.2 (locus AT1G095 70) derived from phytozome v7.0 (chr-ID Chr1; pos 3099217 to 3100181 reverse strand)
ttgaaacttcttcttcttctttcttctctttaaaggtacctactttccttttcccaaagtttcctccttttttttctttttttaactatatatattgaagcttgcttcgattgatttctgctgggagcttaccagctagctactggtctcactcttcttactgaaattgattctaactttgaagttaatttcttaaagctatcctctgttgtcatcaataccctcttgttttctgcgatataaaggttttgtaggtctctttcgatctggcttgatgtgtgtttgttttactcaactttttatagtgtgtgatcatttatgagaagaagcatccaattaattaatctcatccttttatcgcttttaactcctacgattgctttccctgtggggactttattgttccttttgaaaggtatagctagctataaagactcttaagagtttattattgagtctactttatgtatgtagctgtgtttgaatcttgagaggctgatattagctcagatcctcgttttgttagtatttgtgtagtggatttaccctgttaactatcaactattatttgtgcgacttgttcatagtcaagatgttgttgattttggattgtaggatgacttagaaaggaagtgttcatggaatctgactggttcagttactttgaaaatgataaatcattgaaccttggaatatgacacgatgattcctgcatctgttgcgtcctgtttctgggtttagctatgtattctcgatggagttagtcaagttcataactctttttactgtgtgtttgaaattctgaattggttcttagtgtttcaagtttatgcttatgcattcgcttgtatgactggtgatgaatgtttttgtgttcatatgattatggcatgaatgttttattccctcttttatcagagttttgcacttattttttgttgtcttgtctctgtgtcaggaaaaaa

SEQ ID NO: 1086 - DNA, 640 bp, Arabidopsis thaliana
  Intron number 1 from transcript AT1G09580.1 (locus AT1G095 80) derived from phytozome v7.0 (chr-ID Chr1; pos 3104858 to 3105497)
cccactatatccgtcaaggtaagtgtcttcgattttctgttcctatcatcttgcttgttcagtgatttgaatctgcattttgtgttactcgatccataatttcaactgattcatgagtcacgtttaggaattagaaaggcatgtattaattctcgatccaagtttccttatttggaaaattatgatcatgcatgtctttctttgattgtttgttatgatgattttcggatttgtataaatgctcagatgcttgtgtatagcttaatccctgtgaatacccttttttttttgccgtaatatcagtaattagctgtgagattgagataagaaaaattgaaactttatgtggtcttttaatgaagtctgtgtttttgatgtgtatgtttgggaacaatgataattattacgaacaagggagtttcttttattgagcaagtatcatttggtatttagtaatcattgctatgtgctagttccagatagtttgatggattgtttaagatagtgtcctttggattgagagcagtctttgaagtcgacttgaaaaaaggaatacaatgtttctgaatggtaacctctgttcctttttattcttggctctgagttttgagaatcattatggtgcaggtgacatccccat

SEQ ID NO: 1087 - DNA, 357 bp, Arabidopsis thaliana
  Intron number 1 from transcript AT1G09940.1 (locus AT1G099 40) derived from phytozome v7.0 (chr-ID Chr1; pos 3238703 to 3239059 reverse strand)
agctctcgagcagctcaagacttctgctattgaccgtacgaatttctctgcttttcaaatgtttgaattctagatttgaatttgatgatgggtttttgttcgtcctgccaattttgaattttgaagctattcaacatgttgcattatccatcttacccaaagatgtatcttttaactttaaagcaatcttctctagtcttgactttgtttagttgcgtatgaaatgattactctggatttagatttgtggaggagattgattgtatacttcttgaagcccaaagctctgttttactgaactcgattcttttttggtaactaggatacactaaggaaagaagcagcattgtggtgatt

SEQ ID NO: 1088 - DNA, 637 bp, Arabidopsis thaliana
  Intron number 1 from transcript AT1G10090.1 (locus AT1G100 90) derived from phytozome v7.0 (chr-ID Chr1; pos 3295346 to 3295982 reverse strand)
caagtcaaagcaaagcattaccttttctcgtccatgtaagtcagaattgttcaaattattgttttgtcttttcttttgtgggtaaattttttgttcgaattatctacgatctcgttgtttgttgattctcctcaatctcctcttcgattttgatcgaatttcataatctgggctttggtttcgctcgctttcttgtttccattgtcgtagtgagttctcttcgcgaatcaaatcctttgattcctctgtttttggtgttctggttttcttaggttctatggaatcgtgggtcgttttagttcaatcataaatgacgattgagttacattatcttatcatcagccacaacttttaagagttgattatattttgatcccgtatctttggttgttccgaacatggaaagttttaggtttttagttttttcatcccttgtctaagtaatcgctgttttacaactgatcaagtggcaagtacgttacttatgcaacttttgagatcagtccttacttgttagagtaaccacaattcatgtttcaatgttaccacatgcttcatggccatatctcttatcctagattatttcttgcttttccttacagatcttttgacgacctaagtttctgctgtgaattgt

SEQ ID NO: 1089 - DNA, 117 bp, Arabidopsis thaliana
  Intron number 1 from transcript AT1G10220.2 (locus AT1G102 20) derived from phytozome v7.0 (chr-ID Chr1; pos 3354247 to 3354363)
ggttcattgcagacttccctcaccgccgttatcttgtctcttcttctctctcaaatcacatatcttcctttttgttttgttttttttgattaacttattgtttgttttccccagttg

SEQ ID NO: 1090 - DNA, 455 bp, Arabidopsis thaliana
  Intron number 1 from transcript AT1G10360.1 (locus AT1G103 60) derived from phytozome v7.0 (chr-ID Chr1; pos 3396066 to 3396520 reverse strand)
ttgctcggttttgggctgcctacatagacgatcaggttcatagattgttcttcacttgctcttttcactttgattgcatgtaataaagtataccgggaattaatgagggattgatttggttttgattgctttaattttgatacatccccaaaactttagcggttcttttatgattgttattggtttaatccggttaataatctagaataacacgatatgaccgatttaaaccggatagggtttgactatagtccagcttcaactaactttaatttctagtttatacggatagttaggtaattagtcaacttttatgttgaaagaaattagacattttgtttatcttccttactatatatgacataatcaagtaaatcttaaatcttatatgttctgacttaaatttgatatgaatggaagtggtttatctctgtgagaagtatcctaacagctca

SEQ ID NO: 1091 - DNA, 459 bp, Arabidopsis thaliana
  Intron number 2 from transcript AT1G10390.2 (locus AT1G103 90) derived from phytozome v7.0 (chr-ID Chr1; pos 3412069 to 3412527 reverse strand)
tccttgttcttctctttttgacatcggattcataggtatttcttcgagtttcatttcgattagttccagctttgattttattgctggatttgctcaagttttatattcattttgcatattcaatttctgagttcccgatgatttctagttgtgatgttgcttagttcaatggttttagaggttcgttaggttcctcatctctctttctctcagtcatacctgcttacaatacactttctaggtcctttgtctactactctctgtagcgcaggaaccaacttcttaagttgatgttgaattcatagtataatttacggatgtttattgtgtttgaatttttaaaaccagcttttaccggtatggtgctgcttatgtgcatttggttctgttgttatcttctcctaatcattgttcttttttccagctacaggataatataatttcttttggcttggccat

SEQ ID NO: 1092 - DNA, 396 bp, Arabidopsis thaliana
  Intron number 1 from transcript AT1G10410.1 (locus AT1G104 10) derived from phytozome v7.0 (chr-ID Chr1; pos 3418717 to 3419112 reverse strand)
tcatcatcgcaacttctctaatcccagttctcgaggtctctcttttcttcgcctctctgtttcctctgcattcgattgaaaaatttgatcttgatttgtttttgttttttaatcaatctgaatctttcggattagattctgattttgttttccgattattaaatctttgtttattaatcacactgtgtgttaaagctttgatcttttatctctttaaggaacttttttatatttggtagcttatctcttgtgattctgattcatgtatctcctgtggttttatatatatgaatagttgagtgatgttggagagagtttatatgatgtgttcactattcacccaagttttagttcaaatctgatccgtttttcatcaacagcaactggcgaagacgc

SEQ ID NO: 1093 - DNA, 561 bp, Arabidopsis thaliana
  Intron number 3 from transcript AT1G10550.1 (locus AT1G105 50) derived from phytozome v7.0 (chr-ID Chr1; pos 3479631 to 3480191 reverse strand)
gactataccctcatttggaactcccaccatactgtgtaagtcacactcttgactattatcatcttcttcttatttttcttacgaattagtatcatttattatccattcaatttaaggaaaaggaaaagttatgggccaagaaaagtcaaaacaaacaaaaacattagatataagttcatgaatcctaaaggcaatgcttcatatagataactagaatgactttttctgtataattttttgaatttgaaatataacaatagattaatcatcataatgagcatttgtcatctactaaagttacaaactaataaagtccacctaatgcatgttgacaaacaaaaacaaagatacaagttgatattcttagattaatacaatatatttagggattggttttagactttcagtacttaataaatattttagttaaacaattggacataaagaaactcaatatttcttttaaatactaactgtgatcgttattcaggattttaaaatgctttttcaattattggatttacagatttttggtagacaacattccggttaggcagtttc

SEQ ID NO: 1094 - DNA, 575 bp, Arabidopsis thaliana
  Intron number 2 from transcript AT1G10650.1 (locus AT1G106 50) derived from phytozome v7.0 (chr-ID Chr1; pos 3525369 to 3525943 reverse strand)
atcagattaaatcttgtgagaaatctctgaaaaaggtataatttttattttcctcttcttcttcttgttatcatttttttcctttttggggaagattgcaatatttttagggttttctgtttctgggttatgacttgttctttgaacttttgttatctttccatgttcctatagatttgccttatatcagtatctgttaagttgcatatttatatggaactttgacttttgaaccaatcaatcaatctcttttgtatcccctgtttatcagacaaacaattcataagaatcttattgcttaggtaaaaatgattataattctccacaagtctctctttagcatatagatttggcatcaaatctgtttctgtgatccagcattgtctcgttttactattctctgttttttaactctgtttggtatttggtgttccaaatgtaaatagacaatgattcatgttttttatttgagtatatgtgttagattagttgcttaagacatgtcagaatcttgatttttctattcttcttcttccttagctgcaggtttctatacttctgttagtactctaatt

SEQ ID NO: 1095 - DNA, 815 bp, Arabidopsis thaliana
  Intron number 1 from transcript AT1G10865.1 (locus AT1G108 65) derived from phytozome v7.0 (chr-ID Chr1; pos 3615309 to 3616123 reverse strand)
gtcgacattgatccgttttttactcaccgtcgccggtaagtcggtaaccgtcaatcttctttctttagatcatctttgttgtattgctctgtaattttggctcttgatcatattcttttgagacaagaatgagtctttagcgaaaaatagaacagaggaatcagatggtttatctgtgattgaaagagaaatattttcctgtggagaaatcgggattttttccaaggatttatcataagtttgagattcttagaaaggggagttctttagattcttcgtgatcatcaaatgaagaaaggaagtattttatgtttattgaaacgggacttttggattgttcccaataggcaaaagcaaagctttcttcttttgtgaagctcaactgcaatttgttgttttgagttcgatgcttgatacttgtgatttctactaagtgaaaccattcatagttacttacacacgtgggcagttgttcgtgtgtttggagggattttcagatgatgtgtacttgttgagtattatactagagctcatttttcttcacaacactcccttttgaggctctgcggtgaagctttgtagtacctcgaaaactaatttgttaagaacatgctctgattcattggttgccttttggcgagattcctggactatgcatttgttgattgtttactgtagatcccatatcttcttgtatcttcataataaatccttgacacactgcagtttagcatcacaatatcctgaaagctcatttcatttgttagaaacatgctctcatgtattggttgcctttttgcatatgaacagttgaa

SEQ ID NO: 1096 - DNA, 974 bp, Arabidopsis thaliana
  Intron number 1 from transcript AT1G10950.1 (locus AT1G109 50) derived from phytozome v7.0 (chr-ID Chr1; pos 3659377 to 3660350)
tcactcctacgttcgcatccgattcagatcacaaggtaagactcggatctccagtcgttttttcttttcttttaatgcagctcgaaatcgagcactgtgtccgtagatccgtgatttgcatggtgtttgcgattgaattttttttcatggatctgttcgtttacggattgctaggatcctcgagcttctattcattgtgatttaggcgtatcttttcgttgcaagtctaggcgtattttgtctattcattgtgatttaggcttttcacaatctcgattttaataagaaattttgatgttggtttgagattctcgttgatttctgcacgtggtagcctgtttgatgttcaaatacttggatcaacactgagttgtgttgtaattgagtggcatttaatgtattagcatcttcgagatgtagatcttatagttccgaggtcgggttgatgatttttttcaattggtatctaaaatgtgatactgaaagtgtcacacatggcttcttttgctgatggtcagtttcagctcaaaattgttattgccttttgtgatattggagatcatgagatctagctttaatgcttttgctcctctgccttcttacgctcgcaagtagtgtgacatttaaagtcgattccaactatatattttctgcgtgaaagatgatagataaaggcgggttatgcattattcaagagcaatctggtagcattattcaagagccattatttctatggaaccatcatttgtgtgaagactttaactcctgatttttgaaatgatattgaacgtagcctttatcagtatctgtctgtctacgtttgacattttgttctgttctctctaatggaattttggttcttactctctcttactagttaatcccataaacttttacatttctgtgcttttctgtcaagtcaattttttttgccttcacctttttcagtatcaagccgaggagcaggtcaccct

SEQ ID NO: 1097 - DNA, 1028 bp, Arabidopsis thaliana
  Intron number 1 from transcript AT1G11120.1 (locus AT1G111 20) derived from phytozome v7.0 (chr-ID Chr1; pos 3715513 to 3716540)
tgctactaaactcggttatcaatctcccaaggcaagtactttttcactttattcttctctaaaaataattcatagaataaagttcgtaacacacaaattccttaattgtcgcattattgtctacttactgttaattaaatgttgacacatttttggctaatctgattttgacacttagatgttaaactttggttttagatgttaaaattattgtttttccttaatagcttcgaaatttgtatttagtgaagcaaatgttggttaaagaagaaaaaagctcgagtctttttgattaattatggctaaaggttgcaattttaattatggagtaatttttgatttgatgtgaacacttcataccaaaagcagaaggagaaaacatcaaaaagtgttgattctgtgtactatttgagtattgaaagagacccaacattgcacatgcttatacatcatcaaaattaaagatgtctcataagcttccttactcacacatgcagacactgttgattgtgtatatatatgtatgtatgtataaatggtgatgcattcattgatctctttcgtcattttagaatttctctgtttttcttttgtccttcctattaatgaatgacgtaggagacaacaaagaggtgtaataaagtttcgtttgttgaggattgattcgtttgtaagtattgatgtcgacgcgtataatactaactatgcgtgttgtagatggaatatgaggtctaaacgtcaatgtctgaaaccatgtgtgcctgatatttcctaggaacacaaatggccccacaagttttcttgaaacctaacattgctcctattttagagtctttattcttgtttttcatcttcttgagtaaaggttacatagtttcatgttagttgtagtgtttgcttgactctaacctcatagaagactagaagtaggacagagttgatagccttatttgttgagactgatgatatttcaatctatatgtgaacttgaaggtaataacagaattgtgttttctttttcgtttaac

SEQ ID NO: 1098 - DNA, 179 bp, Arabidopsis thaliana
  Intron number 1 from transcript AT1G11270.2 (locus AT1G112 70) derived from phytozome v7.0 (chr-ID Chr1; pos 3786654 to 3786832 reverse strand)
ggactcctgagtatttgatttcatcatttcgtgaggtacttcaccctgtaaattatttatttataattattttctgtgattgtgttttttgatttccttaagctcaactcgtgtttgtgtatatatatatataaattgtctgttgatcaatcaattagagagatagagacaagaagaca

SEQ ID NO: 1099 - DNA, 281 bp, Arabidopsis thaliana
  Intron number 1 from transcript AT1G11670.1 (locus AT1G116 70) derived from phytozome v7.0 (chr-ID Chr1; pos 3930902 to 3931182 reverse strand)
ttcactcttggtctcgtactttacattttcatttctcttaaaaaaactaatttcagctatacaaaacttcaaatcacatcaaaaatatccataaaacacaaatactactaaacggatccgatgaaatgatcaaatacaagttgatgtttatgttcttcagaatctagtctaatctttaaaatgaataaagtcttctatttcataccaaaaaaaataaagtcttctctttggtcttcagaatctaatctttgtttttttaatggccggtgacatagcttgga

SEQ ID NO: 1100 - DNA, 383 bp, Arabidopsis thaliana
  Intron number 1 from transcript AT1G11860.1 (locus AT1G118 60) derived from phytozome v7.0 (chr-ID Chr1; pos 4001418 to 4001800)
tgggaagaagctccagtggcaaagactcaacatttgtaagatttctacacaacccatttcagtttttatgttttctattcacagattatttcgattgcagacaacatttgttttcttcttctttctgataatacgattttcgattcgatctcattgcgattattaagttttctgattgtttcagatgctatattatgaatcttaatctgatggttgaagattcatagatttaaaaatgctatctttttgcctatagagcctttatatgaatctcctttcttcattccatagcttaagagtttatcgaatccagttgaatttgaaaagatgcatttttggttattgattttgagtgttcttgtatcaaacttgttgtgtagaag

SEQ ID NO: 1101 - DNA, 383 bp, Arabidopsis thaliana; identical to SEQ ID NO: 1100
  Intron number 1 from transcript AT1G11860.2 (locus AT1G118 60) derived from phytozome v7.0 (chr-ID Chr1; pos 4001418 to 4001800)

SEQ ID NO: 1102 - DNA, 623 bp, Arabidopsis thaliana
  Intron number 1 from transcript AT1G11905.1 (locus AT1G119 05) derived from phytozome v7.0 (chr-ID Chr1; pos 4015240 to 4015862)
ggtaagctccttggatccgatttcgttcttctctctctctctctctctctctctctctctctctctctctctctctctctctcagtttttaccaatttgttttagtaatactggttctagtgacatattttgagatctatgattgttttagaaacttgtggatgttgcaatctcttgaatgtttgtgatcatcactgtgctggatcttaacttgtgtctaatataggtggataagttgtatttggtgttgttagtgtgatggtttagctcttgaattttcgatttgtcactgcttttgattctttgattcaacctacttcagtcaatttggctgtggaaggttccatatagtcccataagggatttgttatttgaagtcggctttttaagtttcagttcgagtgttggaactttgtcttttgctttggtaaaccttatttgctagtgtgattgtttagctctggagttatccctatagtgaattaagggttttgttagttggaaactggaatcagctttccaagttttagtttggtttctttgttcattggaagtttctcttctgctttggtaaaccttatttgtgtgtgtttcttccaggtggttttctattccttgggcta

SEQ ID NO: 1103 - DNA, 431 bp, Arabidopsis thaliana
  Intron number 1 from transcript AT1G11905.2 (locus AT1G119 05) derived from phytozome v7.0 (chr-ID Chr1; pos 4015240 to 4015670)
ggtaagctccttggatccgatttcgttcttctctctctctctctctctctctctctctctctctctctctctctctctctctcagtttttaccaatttgttttagtaatactggttctagtgacatattttgagatctatgattgttttagaaacttgtggatgttgcaatctcttgaatgtttgtgatcatcactgtgctggatcttaacttgtgtctaatataggtggataagttgtatttggtgttgttagtgtgatggtttagctcttgaattttcgatttgtcactgcttttgattctttgattcaacctacttcagtcaatttggctgtggaaggttccatatagtcccataagggatttgttatttgaagtcggctttttaagtttcagttcgagtgttggaactttgtcttttgctttggtaa

SEQ ID NO: 1104 - DNA, 623 bp, Arabidopsis thaliana
  Intron number 1 from transcript AT1G11960.1 (locus AT1G119 60) derived from phytozome v7.0 (chr-ID Chr1; pos 4043185 to 4043807 reverse strand)
ctgtttaagcttctctataagagtgtcattccaaggtatctcttacttctctaatttggtgtttttagctttgtcttcaatttcttcttcaattttaatttctatgtatttgagtaatctataagttagattgcttatacagaaattctaggaaaatggtatttctttgtcaaaaagagacgttactgcaaaaaaacacttctttttctgggttttgggtctctttgagattttgatctaggagttgaattgaattgaaatcttttcttaaaggttctagtcactgctatactagtgcataaattctgttctttttattgattactagtaatatgaaaatgagaggaacaagagacgtattaaggtatgatattaaaatgtagagatatatcttcactctttttggaatactctgaaaatcttatcttaccaattcctctttaccaatttccttttcggtaaaatgtagaattttttatatctaagaaatataaatttccataatctgtacatatatcacacgctttttgaatgaatatttttgtaggtgaagtttttgatttcaaagggttcgaattgattttgcaggtgaagaagaagcgtttgattcccaaaggagattc

SEQ ID NO: 1105 - DNA, 530 bp, Arabidopsis thaliana
  Intron number 1 from transcript AT1G12130.1 (locus AT1G121 30) derived from phytozome v7.0 (chr-ID Chr1; pos 4119112 to 4119641)
tcacttcactgagcctcgtcttgctcatattcctggtaagtaatttaaagtgtaattagtttgcagttaaaatgtaattagtttcttaattgtgtagaggtgtccaaatgagttttaaatagaaaaaaataaatccaaaaataaaatcattgttaaatgcataatcatgtaagtggtaactatattatcaaaaaaaaaaacttatatatattctgttgatcaacttcttgagataattcaagaataacatgttctttttcttcatttctaagttgtaaaaacaaatgtttttcgaagatagtgtaaacgattatttatatttctgttttaattaaattaggtaaagaatttaatatgctttggttgacatattttacatgttattttaactataagaaaaagtcttattccactagctaattcactattaatcagaggtaatcggagttaataactcattttgaaatcccaatgtgtgaatgttaagggcgagaatgttttgtaatttcttttgtttcaggaatagagtc

SEQ ID NO: 1106 - DNA, 447 bp, Arabidopsis thaliana
  Intron number 2 from transcript AT1G12230.2 (locus AT1G122 30) derived from phytozome v7.0 (chr-ID Chr1; pos 4148301 to 4148747)
ctcctcctctcctgcgtcttcgtctctcgaagctggtatttgtttatatctttgatgatcgtgtttctcattaattaataaatacgatttctggaaagacaaaacaaaagtatgggtttttgaaagattgactacgattcaagctttctttttatgtgggtttgtttttatactgtcttgagtcacttgttaggaaactatgcttgacaaagttgctatttttggtttacctttcttagttcaggaccttctggttgctttagttcttagctgaacagtgttgatttatggttgaatttgaagaaacaaattgtgtatttggtgtttaacattgttcttggatgatatcggttttcctaaagttctcaactttatttcttctggaatgcttttagatgatcattgagttgtttgatgaaattgtgttttttttttcaggtgagaaca

SEQ ID NO: 1107 - DNA, 705 bp, Arabidopsis thaliana
  Intron number 2 from transcript AT1G12240.1 (locus AT1G122 40) derived from phytozome v7.0 (chr-ID Chr1; pos 4154404 to 4155108)
gtaaatttgggattttctatcatcagatcctaacggtaagttttactttcctttcttttctgaatttttctcttagatcctgtgaatttttgatatatagcatttttttagaatttgaaaaaataataacaaataactggagcgacaataagtagtagatcacagaacaacacaacacacaatccacgttgtatccaatgtttacaactaaaaagtaaaaaggtaaaaagttcaccgacaaaatcagaacagagttacctcacaaccaattgcaaaattacttagttgtacctttttggggaaatatactatttatttacagctgaaaaggtaaaaagttcagagacaaaatcagaacagagttacctcacaaccaattgcaaaatttggattatttagaaatttttattttgccagtttgtattccacgtgagattttccacatgctaaaaagtttgtataaatcattggttgccatagaaaagtaatcttgattgtataaaatccttttatgaatgcaaagtttggatcttgtctcaaattggataaagccagtggggtatacgaactaagctatatttctctttggtacctaaaactttcttatgtataaatagaatccaattatttctgagttattctcattttgaccccaataaactaaagttttttgcatttctgtacaggtccattgttctacaaggg

SEQ ID NO: 1108 - DNA, 400 bp, Arabidopsis thaliana
  Intron number 1 from transcript AT1G12330.1 (locus AT1G123 30) derived from phytozome v7.0 (chr-ID Chr1; pos 4194713 to 4195112)
ttccatctcttcaccaatcccttcacttcactcctgtaagtcaaaactctaatccctcttctttgttccccgtggaagaagacagcacatacctcaatttagtttttgttttgtctttgctctgtcacaaaatcaaaaacttttctttctgtctttcaaaaatagtggaattgataggttatagctcgaaatcttcttgtttttgcttaaaaatgaaggaacagtggcaaaaggagcatgttctgttaccttttcctctaaagttttctcctttgatctcaatgattccattagaatctcatattcatgtcacttgaagattcttccaaatccaaaggttttgtttttctctcaatttagcataattttcatttctctctctgttttttcagattctaga

SEQ ID NO: 1109 - DNA, 751 bp, Arabidopsis thaliana
  Intron number 1 from transcript AT1G12360.1 (locus AT1G123 60) derived from phytozome v7.0 (chr-ID Chr1; pos 4201210 to 4201960)
cgagtacaagaatttccgacagattacgcgtgaacgtgagtgttctctatctgtatcgattctcatctgttttgactctcgttgatttggattgacttgtcgattttctggattctcgtgatcgatttctgattccggtttttgcggagcagccattttagttttgttgtttctgtttgattctgggtactacgttcgtgagaacgataatgtgtatttctctgcggtttattcgaaattgaatttgtgaggagttcaatggctaagacttgtcgcggaattgcattgggacagttgtttgatgtaatattggggaaatccgttgcttgttacactggtttggtttctaaggttggaataaagttttaagatgaggtttatgaataggtagtagagctaaaatgttgatacgttttaccaaatgttgccaggcacttaggaacagaaactgatacatgtttgaaatgctcacaatgaaagcatgtactgtgtatacatgtaaatgcagacatggttgtttaatgtttgagaagaggtttgtggattatgatcgtagtcagattgtagagagttatatgcagtttagctcttgtcatgcatctttgggtctaaaattaaacgaggctttcgctgctataattgcttattttctcttaagtctcattagttacatttcggtagtctatctgatctattggtatttggtagtctatctgatctgttacatttctttaattcccaggactcttgt

SEQ ID NO: 1110 - DNA, 542 bp, Arabidopsis thaliana
  Intron number 1 from transcript AT1G12580.1 (locus AT1G125 80) derived from phytozome v7.0 (chr-ID Chr1; pos 4282957 to 4283498)
cgggattctcactactcttttgccaaaaaaaagaggtatactttccagaattgttcaaactcttgatgaatttctctttagaaaaaactcatctttttaggttggaattgattttgttttttacatttcaagttgaagcagttggagagaactttatgctcttgttcttatctagattcctgcaagtttgttgctttttctttctgtagctaaatttaagtctctctagtgattaattcgatgcaatttaatgacccaattcgagagttttgtgtattccgtagaattttgagctcaaaattcttcatttgagtctcaatcgagttttggtgatgtgagttagttcttcgacctctgtagggaatttgagttatgggttttgttttcgattcactttcaagctaaattcgctttcattagtggaatgttttcatcaaagctggaatcttttccaatttcagttgctgtttactttgtggattactgcttaaatctgaggttttaagtgttgaaactttacagatcggaggttccgaaggtga

SEQ ID NO: 1111 - DNA, 596 bp, Arabidopsis thaliana
  Intron number 1 from transcript AT1G13390.2 (locus AT1G133 90) derived from phytozome v7.0 (chr-ID Chr1; pos 4593550 to 4594145 reverse strand)
ccaagaaccatctctgctctttctttcaccttcaggtatctctctcaattcttttgaatctcggatctagatctcaacaatctctcaagatccttcttggtttgtgtttttgatttttattagtattttgatctgaaacaatttttctacgaattcttgatccttttgtgttattcttaatcatcttgtcactgttttaattaagactttttctcataatctttttttggttagagtttacttattcttgaaaaagaagaaaaaaatctgtctccactatgatcttgacatcattcactataatgggaaacattacgtattaaaaaaatatttaaaagtaatttttgtcaagtgggctaattccttaccattgttatttttctgtcttaattaataaataatcaaccttaaaataatataatattctcttatgaccagatctccataagaaacacgttaccatttgaccacctcttctctcttctcttatctttttttttatatatttatatatcattttttgccatcttcttcttcaatctcgtaattcactttttctttgtggtttgattgattctttgaagcagcaaccaaag

SEQ ID NO: 1112 - DNA, 591 bp, Arabidopsis thaliana
  Intron number 1 from transcript AT1G13880.1 (locus AT1G138 80) derived from phytozome v7.0 (chr-ID Chr1; pos 4749012 to 4749602)
cccttccttcttccagatcgatcttcagatctattgtaattttcttcttcctcttgatttgatcttccaattgatacctgttttgttatcatccctttgttttggtcaaatctagggtttgagtcagatctggatctgataacaacagatctgatcaattgtttgtttttgatgttgatttccttcaaaagtatgaacggatccgttcttaatttcagtttcccccaattttattatccgatctgggctcgtaggttgggatgttctagggttcgtcagatctgtcaattaatcgagggcttttgtctgtattcatgataattaaccgattcattgattttcgattcttgatttcgcgatttaatccgtgaattgaaatctagggttagggttttcaaatttggggatttttttttttaatttacttaaattaattggggttaaatattttttctttatactctaatttaattactgaactggttaaatagacttatagttgtcacttgtcagtgtgagtgtggttcacacagataaccttcacgccaagtaactaatggctttggttctccttttacaggttttttaaga

SEQ ID NO: 1113 - DNA, 806 bp, Arabidopsis thaliana
  Intron number 1 from transcript AT1G13960.2 (locus AT1G139 60) derived from phytozome v7.0 (chr-ID Chr1; pos 4776921 to 4777726)
tgttgacccgagattcaagcaaaacagaccaaccggtttgatgatttctcaatctcaatcgccgtcgatgttcaccgtaccgcctggtttaagtccagctatgttgctcgattcaccaagctttttgggtcttttctctcccgttcaggtttttagattcatcaacacaaatttctatcttttttttttttggttaaaaatttgaaaatctatttatggaaactgtatgtttgtgtcttttctttgttgagctgtttcttgtttttgttttgttggctgcttagggaaaaaataacacgttgttgttaggtgttagcaaatctaggtttattccaacaaattgtagattttgtaaccattttgctggtatcatcttaggtcaaaattggagattaggattgagttagggcttattagagatttgagaatttctcctcaaggaaggaactttgcaactcaactgtgttggaaaggtaggaactttcagacagaacaaaaggagattgtggatcaaatactcgtagagatttgggtttgttcaaggtttttatagaaatcctcaggaagatttcttggtgccacatccgaaaaatcctgttcttatgaccttatatgttttgattatggaactctgttttctttagtagaaattgttcctttagacaggcctttgctatattctcttttgatagggttgtcttgtttaaggtctctggctctgctttatcttgactctgaatctgttgaatctgtctttacctattttgatgtgtgctttgatttgttttagcggttcttgacctgat

SEQ ID NO: 1114 - DNA, 843 bp, Arabidopsis thaliana
  Intron number 1 from transcript AT1G13980.1 (locus AT1G139 80) derived from phytozome v7.0 (chr-ID Chr1; pos 4788620 to 4789462)
gcccgacgacagatctctgaatcgctggagaaacagtaagtaaatctacagatctcgtttcttcgaacttcttcttcgtatactatttgtttgtatcgttccttcgttgtgcattgatgttcttaatgattactagaatctaagtcagaagttacctctatttgttcttcttctatatttgaactagatttcgttctagcgtcgaacaaactcctcgttttctttgattcgcattgctggtgattttcctgaatttcgagatttagcgagacgtgtctcgagttctcttgtgttgacgggatttttcttatctggagaactgataatagtttcatgacactgtcactggtctgttgaattgtagtttaaacttattccatcggatatagtgactcttaactctataagttgctgattttgtagatgggtttagtgttatcaggtttattgatgtaacaacgagtttacaaactttgctatttagggatctgtaggaattcgtttttttgggggctcaaattgttggaaatagttgcttagctattcacaatctaaatgtgatttgggaaatctgcaacatatgttattactatggaagaggttactctatatagttactaaattatcagcatggtttctgaccattatagaattctttgcttgtggtttatttgtttgaatcaaagtggtttcattcagagacagcgttgtagattttgattatctctgtaatgtatgatgtgaaaagttacgccactttctatcttattagctcttgaaatgcatctattatctgttttaaaataagattttttaaatttaatttgtttttttttgccagta

SEQ ID NO: 1115 - DNA, 877 bp, Arabidopsis thaliana
  Intron number 1 from transcript AT1G13980.2 (locus AT1G139 80) derived from phytozome v7.0 (chr-ID Chr1; pos 4788620 to 4789496)
gcccgacgacagatctctgaatcgctggagaaacagtaagtaaatctacagatctcgtttcttcgaacttcttcttcgtatactatttgtttgtatcgttccttcgttgtgcattgatgttcttaatgattactagaatctaagtcagaagttacctctatttgttcttcttctatatttgaactagatttcgttctagcgtcgaacaaactcctcgttttctttgattcgcattgctggtgattttcctgaatttcgagatttagcgagacgtgtctcgagttctcttgtgttgacgggatttttcttatctggagaactgataatagtttcatgacactgtcactggtctgttgaattgtagtttaaacttattccatcggatatagtgactcttaactctataagttgctgattttgtagatgggtttagtgttatcaggtttattgatgtaacaacgagtttacaaactttgctatttagggatctgtaggaattcgtttttttgggggctcaaattgttggaaatagttgcttagctattcacaatctaaatgtgatttgggaaatctgcaacatatgttattactatggaagaggttactctatatagttactaaattatcagcatggtttctgaccattatagaattctttgcttgtggtttatttgtttgaatcaaagtggtttcattcagagacagcgttgtagattttgattatctctgtaatgtatgatgtgaaaagttacgccactttctatcttattagctcttgaaatgcatctattatctgttttaaaataagattttttaaatttaatttgtttttttttgccagtaatgattgagtttggcctctatctgtgaagggtat

SEQ ID NO: 1116 - DNA, 624 bp, Arabidopsis thaliana
  Intron number 1 from transcript AT1G14140.1 (locus AT1G141 40) derived from phytozome v7.0 (chr-ID Chr1; pos 4838627 to 4839250 reverse strand)
ctctcgtcggaggattttctggtgttatagctcaggtaacggtgtttcttcaccggtaaatctttagagtcatgttttgactgtaaattggatctggattaacagttgcttagagtagaattaacatttcgaattgaacaatcgatctctatgtatagtttcctttgaatatgtttcgtagaagaaggtattaattagaaggagattttgtttcaagttttataggctttcaatgttcgtttcattccaaagttagctgctactttaggttggttcagagataagaaccaatgcagatcctagtcatagacgtctcaatgtatttcacagatccttaatccaaaatttgtgcttgcttgttgtctcctatgtgttacaattaagttctctcagatcactgattacctatggaaactcgtagatttccggcgaagttaattattaaggattttcaattgtttttacgctactgaagtgagaaatgtagctatcttttaggttgttgatatctttagaattgacatttgagtgttgtttatacctacaccacactaaaatgcttcttattgtgtccatactagaaatgcaggtagtggctagtccagctgatttggtcaaagtgag

SEQ ID NO: 1117 - DNA, 409 bp, Arabidopsis thaliana
  Intron number 1 from transcript AT1G14180.1 (locus AT1G141 80) derived from phytozome v7.0 (chr-ID Chr1; pos 4847285 to 4847693)
cttcttcctcatttgtctctccgagtttcgaagcagtaagctctttactttactcatttttgttgtcactggaaatttcataatgcattgcaacgaaaatctctggtacagaatttcgacaatgtgggttgttctttttccttgataatcttcttcgtgaagaaaaaaagtattttggaaactaaagttcagatctttgcttgtcgtttgatgagtgagagattgctgggtaggtagattaattctatgagtttccagatttgattttgtgaattggttctgtgtggtgtttatctagtaagctttttgtacaatgtgtaatgtttgtttgatgattgaaagtttgaaactttggtgctattttgattactcaggtgagctaagctaaagaacaaggaacaaaaccaaa

SEQ ID NO: 1118 - DNA, 293 bp, Arabidopsis thaliana
  Intron number 1 from transcript AT1G14340.1 (locus AT1G143 40) derived from phytozome v7.0 (chr-ID Chr1; pos 4897416 to 4897708)
gtgtgatctccgttggtcaacaacaactacaacaggtaacttctattcttcgattccttaaatttcttctctagagcttagtgaatcaacgatttaggtctgaacatatttggcaatctgtccttgctcaaatttcgcttgaaaatttcaatcccaaatcatgtaaagctaaatcggaaagttctatgtagttcccaaagttgaatcacgaactggaagtaatttaatttattgacttaggatatgttgaaatttttaggttttttgttttgtttttagcttattgagcagag

SEQ ID NO: 1119 - DNA, 313 bp, Arabidopsis thaliana
  Intron number 1 from transcript AT1G14370.1 (locus AT1G143 70) derived from phytozome v7.0 (chr-ID Chr1; pos 4915917 to 4916229)
ctaattctggtaactatttcctctcaagtctttattgcttaattgggttctatgttacagtttcttggatatttcttcttattctcaaaatgggtttttcgaataagtaatttgtccatctctggatcatcaaaagtcaaactcttttgaattgctctgtttagtacatgtgtttgatccatgtttgtatctgtattgatgttcttagcatcatgagtttgattgaaaacacaccaaactaaagagattttactatgtttgaatgatcattttaatagcttcttcgggctctaaagtttcaagcaagacaagc

SEQ ID NO: 1120 - DNA, 486 bp, Arabidopsis thaliana
  Intron number 1 from transcript AT1G14580.2 (locus AT1G145 80) derived from phytozome v7.0 (chr-ID Chr1; pos 4989584 to 4990069)
agagagagagagagagagagatagggttttttgaggtgtgtgtatttgtatatttatataaatattttagtgtggcttcttgttcttcatcctctaatattatcatcatcatctatctacttgggttctttctttgtctctgagttttagcttttttattgacctttttcttcttggtttcttctctgcatctcaaagactaaaagggtacaataaaaaaacaacttatactatgtcttctttctaaaacttacaaattaaatccaactctttggatttatatttgttctctttgttctcgtaaatgtcttctagtgaattttttttttcatgtcgtcaatctctatggcttcttcctgttcttctaattccccgctttcgttttcttctgaatcatatttgatttttatcttctctctcattttttaaaattattttttctttatggatctttgtagctttagcaaaaaccgaccagctgagaag

SEQ ID NO: 1121 - DNA, 314 bp, Arabidopsis thaliana
  Intron number 1 from transcript AT1G14580.1 (locus AT1G145 80) derived from phytozome v7.0 (chr-ID Chr1; pos 4989756 to 4990069)
cttggtttcttctctgcatctcaaagactaaaagggtacaataaaaaaacaacttatactatgtcttctttctaaaacttacaaattaaatccaactctttggatttatatttgttctctttgttctcgtaaatgtcttctagtgaattttttttttcatgtcgtcaatctctatggcttcttcctgttcttctaattccccgctttcgttttcttctgaatcatatttgatttttatcttctctctcattttttaaaattattttttctttatggatctttgtagctttagcaaaaaccgaccagctgagaag

SEQ ID NO: 1122 - DNA, 535 bp, Arabidopsis thaliana
  Intron number 2 from transcript AT1G14780.1 (locus AT1G147 80) derived from phytozome v7.0 (chr-ID Chr1; pos 5091597 to 5092131)
gttccttcatcttgggacccacaattattggctaggtcagtagtacccatttttttttttagtatatactttcattgactaagtgatagatatatagttaacattatgagcacaacaaacatattatcaaaaaattctgaacttggacaatttgttttagttgaattgtgacagaacagctgtggcatttttgactaattctatgttagtatcaattaatgtagaatatctggtttttctcctatcttttgaatatttaaattcaattgtcaacgtttccaactacgatcgtaccgaagaatggggaagtttcttgattttttctcattgaactgaagctagaaaaactaataaaaaggttgaaaaacttgaacattatttgaaaagactctgaaacaataatctaacatataacttaccagccaacttgttatcaaaaacattagctaattcgtaataatttgtcaccactatagtatctatagtaataataatagaaaacctaaattggaaaaggacaggtttatagagaggt

SEQ ID NO: 1123 - DNA, 406 bp, Arabidopsis thaliana
  Intron number 1 from transcript AT1G15320.2 (locus AT1G153 20) derived from phytozome v7.0 (chr-ID Chr1; pos 5273612 to 5274017 reverse strand)
gaagttgcgcgactgtgagtatctttctttcgtctttcattttcttcgctgcattactctgcctcaatgagcttgatcgttcgagatttggtcgacttctgtttggagattctgtgtgttctatgattcgatatcttggatttagagttttcttttccatttattataaggagaacttcggattaatccttcctcagttacgcttgattagtagttcggtttctttctgagattgcggatgtgaattgatgcaaaacattacctctttttgatgattttcataatggatagggatgcattttaggatttgagtgtgcaatgagattacaagagttggttcttgtgaaaatcagcttagttttcttatggttaattgggtttgtcttcctgcaacgtagtgaagaga

SEQ ID NO: 1124 - DNA, 329 bp, Arabidopsis thaliana
  Intron number 2 from transcript AT1G15350.1 (locus AT1G153 50) derived from phytozome v7.0 (chr-ID Chr1; pos 5279155 to 5279483 reverse strand)
gggtgcgtttcttcttccgatttctgtttttgactttatgcagaatgttttggtatttgattgatttggatttgagattctgtttgatgggctttgttcctgcgttatgtgctgcttgggattcatgttcatgatagataaaccctaattttattgctggggaatggtgtttataaggttgttttatgcagatgagatagctatctctgaaagttttatagaaaaatgttttgctaaggaaataaggatgttttttgggcaatgatcaaaagttatggttttgtaacagagcagtggctgcgtgggttgctacagagaacacagatcaa

SEQ ID NO: 1125 - DNA, 324 bp, Arabidopsis thaliana
  Intron number 2 from transcript AT1G15350.3 (locus AT1G153 50) derived from phytozome v7.0 (chr-ID Chr1; pos 5279160 to 5279483 reverse strand)
gggtgcgtttcttcttccgatttctgtttttgactttatgcagaatgttttggtatttgattgatttggatttgagattctgtttgatgggctttgttcctgcgttatgtgctgcttgggattcatgttcatgatagataaaccctaattttattgctggggaatggtgtttataaggttgttttatgcagatgagatagctatctctgaaagttttatagaaaaatgttttgctaaggaaataaggatgttttttgggcaatgatcaaaagttatggttttgtaacagagcagtggctgcgtgggttgctacagagaacacag

SEQ ID NO: 1126 - DNA, 747 bp, Arabidopsis thaliana
  Intron number 2 from transcript AT1G15380.1 (locus AT1G153 80) derived from phytozome v7.0 (chr-ID Chr1; pos 5291286 to 5292032)
cgattaatcccaaggataatcacatctctttccaggtaatttttcgtgtgtgttaattctcagttttgccctgttttttgtttttttcaataaaacttttgtgctttttaaagccataaaccataatctacgttcatacaagctctgtatttagatgttgtcttaggatatttttctatatttatgaaccttttgtgcaaaacacaatctcagaattatttattattaaggaagaaaatccaaaatttgttagtttcctaagtaaatgacccttaggatagaatttgttagtatagtttgaattggcttatgataactattgaatgaaagaaactgaatttatgagagaacaaaaatatcctagagaaaatgacaagagataagttaagaagggagagaaaaaaaggacaatagaaggtggggttttcagaggtcaagttttgtgagtcagaagtattcattgttccattattgacaacaaacaattttgttttatgaatcaaaacatcctcaacttttatagttgtgtaatagaaatgttagttaggattatacaacaaaccacttggttttaagcatcaaaacatcttgtgtttggtatgtgtgtgaagaatttgtgagacaattaacaagaggagatcccaagtatatagttgttactctgttttttgagcatacataagattatagtagaaattttggtctgaataataagagttgtgaattatggaaatgcagtgtgagagt

SEQ ID NO: 1127 - DNA, 496 bp, Arabidopsis thaliana
  Intron number 1 from transcript AT1G15550.1 (locus AT1G155 50) derived from phytozome v7.0 (chr-ID Chr1; pos 5345127 to 5345622 reverse strand)
cgtaaactttggccccaacatcacctcaactactggtatatcttttatacactcgatcctatatacttgtacttgtgtttattagacctttttctacattaacaaaaaacatatacataaggacacaatgtttacatttaaggtagaacatccacaaacgttggacgccctataggtagtaacaaggggcatagataacagaagcaaccgaaatttgccttgtcctcggagtttagtggatttaagagttaagtgcataatgaaatctagtgtagtagtggacccaactcaaagattttgaagatatgtattcttttaatcttatcggagaaaacaaaacaaaaaaacaacaacttgcttttctattttatttaaaggtcgtacaaatatttaatgtatgtatatgcaaattgtgtctaaatctcatctgtactaattagatgaatacaattcgtttttaattaacagcgatatcgttgaagagtacgaggaacat

SEQ ID NO: 1128 - DNA, 569 bp, Arabidopsis thaliana
  Intron number 2 from transcript AT1G15950.2 (locus AT1G159 50) derived from phytozome v7.0 (chr-ID Chr1; pos 5479229 to 5479797)
tctttcacacggcttctcctgtcaccgacgatccggtgagtctttttcttgggttttctatttgttttatcgcatttttagtggcttacagagagaatcgaataaagttaaggacctacatgaaataaaataatacttatatagtagtggagctgatgatttcatttagatttttctgtcgtttgttaattagaccatgtcgtgacgttatctaatccctttttttaatcatgaacataatattttttttatctatttttaaaatatcgcctcattaaaagggtgaaatctctagcaatattattcttcattgaatatttggtttttgccagtttcgtcaagtattttaattttaggacgttgaaagttccatcttgttgtgatgtttttattacatttgactttaaaatgaagcaaagatggttagaaattattttgttggaaggcaaatcaatgagtattattatgtgaaatcacatcagagtgtgaaatgaggtatttaattggtgaaaaaaaaacgaggtatttaattaattatttttaaatgtataatcaattttcaggaacaa

SEQ ID NO: 1129 - DNA, 270 bp, Arabidopsis thaliana
  Intron number 2 from transcript AT1G16040.1 (locus AT1G160 40) derived from phytozome v7.0 (chr-ID Chr1; pos 5505077 to 5505346)
ctcggtgagtatagttcatctctgaggttctctgtgagaattaaagaaactgaatttctcgttttaactcgattgctttgtgcttgtctcatttcccttttatgaaattgacaaaacaagctagtatcctcactttacactcttaatgctcaaaaaaatcgtttcttttcatatagtattattttggtcttgtgtgttttgactctgtattcatgattttctcattgatttccagtactttagagctgttggccgaagcttagtcggact

SEQ ID NO: 1130 - DNA, 586 bp, Arabidopsis thaliana
  Intron number 1 from transcript AT1G17520.1 (locus AT1G175 20) derived from phytozome v7.0 (chr-ID Chr1; pos 6026524 to 6027109 reverse strand)
agcagctctctagtcgctctaacatcgacctcaaggtttttatttatcttctttttaattacctctttttattgctgttgttgaaacattggaaaccctaattatcaagttcaaggcacaacgggaatggaaaatttgttaattgagtacgtcggatttagttcaagaatctttgggttcgattttttgtatttgagttgcagacatttgaaatttttatgattgggataatcttctttccatgctttggtttgagaacatttttaagagtatgctacggatacgaattgagtaagtcgttttgttcgttttttccccccaatggtgattttaattagctgggtttggagttgaagtatatgatgtgttacttctacttttcgaaaattgactacttctgtgttctatgatctttctcatagactttaactttagtggctgtattgataggtattagttccctgaagaaatattagtatcgtcgtttatttcaccttttgggtttgaaaattagcactgtctccattattggttacctacaaaacaagattcttaatcatccgatgtatcatattgtctaggataa

SEQ ID NO: 1131 - DNA, 614 bp, Arabidopsis thaliana
  Intron number 1 from transcript AT1G17940.1 (locus AT1G179 40) derived from phytozome v7.0 (chr-ID Chr1; pos 6172465 to 6173078 reverse strand)
gctatataaaggagcggtttttaaaaatatcttaggtaagaatctctccttcttgtatactttttgtttttcagattcagaattcgttttcctttttgaatcctattcaaattttgagcgattcaatgctgatttagaggtttaagctatctagttggtggttcaattcgaattccaaaatcagaaatcctggctagtccagctttggtagtatatagtgttttcttcattcctctctggggaaaatgttgcttaaggtttttccttttctgtcaaggattttgaattattattatttttggggttgagctcgatgaagcatcactttccattactcttttcttacatttgagcataattattggtgagcctttactcaaaatcttccctttttaagtcaagttgctttgcagcctttgaaattcctcgttttttctttcctattttcgttataacgtttcatagtggagaaatgtgattacaaactgcaaaaagtttcatgctttctctgtgaactcacatgcctttctttttttgttggctgatcaagtttgtatctttttctctaatttcttgcagaactcgattggttttgatagcttatagccaatcaa

SEQ ID NO: 1132 - DNA, 610 bp, Arabidopsis thaliana
  Intron number 2 from transcript AT1G18200.1 (locus AT1G182 00) derived from phytozome v7.0 (chr-ID Chr1; pos 6265850 to 6266459 reverse strand)
ggacaccgccggccaagaaaggtatgatactactataacggacttgatgatgaagacatgatcaaaatttctgtatttaacgttggactaatatttttgcacagaaaaagaaaacgtaaataaatgaactcacttccattaattgatttttcattgaccatgaacaaaaatgcttgttttgtaagagtttttttatttgtataatttctaacgtaacaaaccaagacgtcaaacttgttaaattttcgatagttatttttgtgtctaaatgttaaggtaaatatgctagataaataacaaaaaaataatgaatgaaatttgggattggaatgatgattaggaaaatagatcacgcgcagaagaaaatctttataagcaatcgatgtcacacggacctaatctttgttaaatgtcacgaccatttcttctttttgtttttcttactaaaattatatttatttcgacaaattttatctttcatttagaattgtgaatttctttaataatttatgtgtttttacttatcttaaatataatactgttttattttttatttttgcatgggaggaaaaaagatttagagcaataacgagttcgtattaccgtggag

SEQ ID NO: 1133 - DNA, 440 bp, Arabidopsis thaliana
  Intron number 1 from transcript AT1G18410.1 (locus AT1G184 10) derived from phytozome v7.0 (chr-ID Chr1; pos 6341696 to 6342135 reverse strand)
agaagaagaccaaagaaaatccattcgattttgatgtactaccataatgagaaatccatttgattttcatatattacttattaaccaaaaaaaaaagaaagtataaattcgaaacaaagttaggtactacatctgcaataaacaaaaaacactacgaacaatacataatacacaaaaattacaggggctaaaagtgaaaactccaaaattaaaacccggcctggtcgtacccgacccgacccgtataaacgactggagaagcagagatactcgcgcttcttcctacattcgcgctacagagacgaagaaaaaaaagaaggaaaatttggtatcaattaaaaaaaaaaagtctgaaaaagtctgattgacgtgacaaatccacgtctctgtgttttcttctggcaggttaggacttggtcttctccttgcgattttcccag

SEQ ID NO: 1134 - DNA, 534 bp, Arabidopsis thaliana
  Intron number 1 from transcript AT1G18690.1 (locus AT1G186 90) derived from phytozome v7.0 (chr-ID Chr1; pos 6433663 to 6434196)
acctccgtgtatatactcttctgcgggtttgtcattttcggttgaatttctttctgttttcatttgagtcttgtttcaatcgcatgattccaccttcgagtaacttatactccatagatagtcctgaaattagtatctactgttgggtgagtgtgtgcgtctgtgtgtggtgtttcgtgaagagtcttggataaactcagcgtactctatttctgttagtataagtaggctaattgaattttagaactatactttaggtggtcttagttcaagtacattgcagacaaacttgaagaacgtttttcaaaatcgaccatgacatgaattcgttccatgatgcttcttcttcaccatcattcttcatactgtttctctcaatttctatctgtttcaggatatacttgctcatcagattttatagaggtctgtcagtttgttgtgtgctaaatctgttagctttatgttgttaatatcatcagtgctactaaatgttttgcagatagactacgcctttaagctgttaagaaatctcgt

SEQ ID NO: 1135 - DNA, 560 bp, Arabidopsis thaliana
  Intron number 3 from transcript AT1G18690.1 (locus AT1G186 90) derived from phytozome v7.0 (chr-ID Chr1; pos 6434385 to 6434944)
atataacttcgcctgctgggaagtcgtttcttgtcagttgactaaacgagctctttaccatctccaattccatttcctgaatttgggtatatgatttcttttggatccaacttgttattacatataatatttcgtagaggtttcaacgtgaagtttgatgccattttacgttgtaagactatgcatttcatttccaaaccaaggctgatataggtataataagcctctgagtagattgtttacagttgcgtatacatggttggctcttctttgatatgtaagcatagagtcacttaagtttgtagagatatcaagcatcatgcttttgatacctctctggcaaaatatccaagcaatctggcatgaatattcatatgttgaagatgcgaaaggtttttatttttcatttaataagatgcttaatgttggcatgcatataaaacatattgctccgcatcaaatatatttaattacaaccaggtttctccattatccaatttaatattctttaatgatttttaaaagaggctcttcagattgtccaagtccatcatctacta

SEQ ID NO: 1136 - DNA, 663 bp, Arabidopsis thaliana
  Intron number 2 from transcript AT1G18870.1 (locus AT1G188 70) derived from phytozome v7.0 (chr-ID Chr1; pos 6515876 to 6516538)
cgcctccattctcctccggcattgtccgattacaggtacgtaaattcgtaataatttcttcattagtttgtggctttgtgccattccaaaaattcgtaaggcaaacaatgattaaaaaacaaatgagcttaagccacgtggagctcttacattggtatgtgtgatattgttccatttcttgctgtcggactgtcggttgcataaacatagattgactcaactttattgttagatttaaaatctatctacccaaatagtatgggggtcaggtttgaactattttgcatcattggttcaatatttttgtatttctgcaaataaataaattattgttagatttttagaaaaatatcaagcaagtagtctctttttatgaatgttatcaatactattataatggatttatctgtttatgaaaataattaaggtaaatagttatttcatgatgtaagaaagtaagattttaatttcatgggtttatctggaagaaaaatatttgacttttaagataaaagaaaataaatagtggtaaaaaatcaaaaatcgaaacattagcgacttatattctctcccgcgcaaaaataaaaataaagccctattttcatagacgttaatcttgtgattgaaggtaccaattgagcagaaaattggagcaatcgattg

SEQ ID NO: 1137 - DNA, 285 bp, Arabidopsis thaliana
  Intron number 1 from transcript AT1G19010.1 (locus AT1G190 10) derived from phytozome v7.0 (chr-ID Chr1; pos 6565619 to 6565903)
actgacccagaggtaaaaatctcattttcaatccctaaatttccgccgtgttcgacttcacattcccaattaaaaaaaaaacaagttttttttgtttcttctctgtttcttttaggtttcatttctctttatataaaggattgttgtctctgatttcgtttattgatctggattggtatttcggatatgggttttgattattccgttctgggattgcgatgaattgttttgtgtttttaatggttagcagaaattaaccgccttgaagaaggcttacgctgagac

SEQ ID NO: 1138 - DNA, 390 bp, Arabidopsis thaliana
  Intron number 2 from transcript AT1G19010.1 (locus AT1G190 10) derived from phytozome v7.0 (chr-ID Chr1; pos 6566038 to 6566427)
attccaaggtaaattttcaatttttagatttgtttctgtggattctgtaaacttgaagaaacttttcatcatctaaattgtttcttgagctaatattttgagtcttgacattgatttgaggataaagttttgacatttctgagctttgtgtgatgacaatgagcttatatagggtatcgaggacctaggtagtatgagaaactgttctttggtttacacttatttcagtaactcttgttttgattatagctttgggaattgagattgtggtacattttcttgaggatggacttcaatgtcacttgtgctgtatttttcctttctgttgcaaattcttcttctactctatttcattaaaagaatttgtggttataggtcaaggaggcagaa

SEQ ID NO: 1139 - DNA, 535 bp, Arabidopsis thaliana
  Intron number 2 from transcript AT1G19640.1 (locus AT1G196 40) derived from phytozome v7.0 (chr-ID Chr1; pos 6790568 to 6791102 reverse strand)
tgcattcttcttctagtttacattggttatctcaggtgtgtattgtttctctatgcaaaaaatttcaccgtaccccttattagtgttaaacaattacgaactttaagaaaaaagtgccatctatcattctgaaaaatgaaatttcaaatctaatattatgagttatgaccggaatatcaaagttatgacaatttttaaaaaaactaaaatttatatattcagaaaattaagagaagaaaattctctattcttaattacttgttgtgattacacaaaagaaaaaaaaaaacagaaaaagttaatgaatatcgcaatattttttcaaaataaacgtagtaattcacgaaacagcacctaaaaatattacgcaagtgatataccttttagtgcgtgggaatctttctcatttgagaaaccaacataaaaacagaaacctagtggtccacataagcttgtcagtttatcaaaactatcacaaatagacatgctaagttgctaacaagttgaattatcatccatatatttttaaggttcc

SEQ ID NO: 1140 - DNA, 682 bp, Arabidopsis thaliana
  Intron number 1 from transcript AT1G19700.1 (locus AT1G197 00) derived from phytozome v7.0 (chr-ID Chr1; pos 6811893 to 6812574 reverse strand)
tcagccacatccacactcacaaacacaatctctaggttttttttcttccttttaactttgattctctccctcaggtagtttttaaaaattcaagttcttgattcttgattcttgatatgattaatcttgtactgtgtttcttgattattattttttgtatactttctgtgttttttttctcccttgctttttggaaattctcctacaagagatgaaatcatcaagacactttacttctttatgtaataattgaatcttctctgcttttgactcactacgttgagctacacaatttctttttactctgcatttttttttccaacctcaaattagggtttttttctcctctcaatttcacctccatagatcgggtattcctctacgattacacaattcctgtattgggtttttctgggtttcttcagttcttcacgaaaaacatttgctttttatcaagaatttgactttaatcctccgaataatttggtccgattctgtttgttgctttcgaaactgtttatgtatgatatataaaaaaaatggtttggtgtgaaatgattacgatgttttaacctctcttagattccatcagaaatttttaaaattccacaccttacacgactcttcttcctcttatttttttgcaggatctcatttcccgaccaaactcatcgaactaaga

SEQ ID NO: 1141 - DNA, 643 bp, Arabidopsis thaliana
  Intron number 1 from transcript AT1G19700.3 (locus AT1G197 00) derived from phytozome v7.0 (chr-ID Chr1; pos 6811893 to 6812535 reverse strand)
tttttcttccttttaactttgattctctccctcaggtagtttttaaaaattcaagttcttgattcttgattcttgatatgattaatcttgtactgtgtttcttgattattattttttgtatactttctgtgttttttttctcccttgctttttggaaattctcctacaagagatgaaatcatcaagacactttacttctttatgtaataattgaatcttctctgcttttgactcactacgttgagctacacaatttctttttactctgcatttttttttccaacctcaaattagggtttttttctcctctcaatttcacctccatagatcgggtattcctctacgattacacaattcctgtattgggtttttctgggtttcttcagttcttcacgaaaaacatttgctttttatcaagaatttgactttaatcctccgaataatttggtccgattctgtttgttgctttcgaaactgtttatgtatgatatataaaaaaaatggtttggtgtgaaatgattacgatgttttaacctctcttagattccatcagaaatttttaaaattccacaccttacacgactcttcttcctcttatttttttgcaggatctcatttcccgaccaaactcatcgaactaaga

SEQ ID NO: 1142 - DNA, 346 bp, Arabidopsis thaliana
  Intron number 1 from transcript AT1G19700.2 (locus AT1G197 00) derived from phytozome v7.0 (chr-ID Chr1; pos 6811893 to 6812238 reverse strand)
ttttttctcctctcaatttcacctccatagatcgggtattcctctacgattacacaattcctgtattgggtttttctgggtttcttcagttcttcacgaaaaacatttgctttttatcaagaatttgactttaatcctccgaataatttggtccgattctgtttgttgctttcgaaactgtttatgtatgatatataaaaaaaatggtttggtgtgaaatgattacgatgttttaacctctcttagattccatcagaaatttttaaaattccacaccttacacgactcttcttcctcttatttttttgcaggatctcatttcccgaccaaactcatcgaactaaga

SEQ ID NO: 1143 - DNA, 696 bp, Arabidopsis thaliana
  Intron number 1 from transcript AT1G21320.1 (locus AT1G213 20) derived from phytozome v7.0 (chr-ID Chr1; pos 7463939 to 7464634 reverse strand)
cttcttttccactattggaccaaccgatccacaaggtttttcgtcgttctttaatgactttaactctatccttcagagtagtccatcgaagattcagtctccttcttctatggaccttttcaacaatttctttgattcttgattcagttattatatctaggtgaaccaatttacgagtgttaggaaaaaagagaggatatgttttacgttttttcatcatttttttggagacactccgatgcagttagagggtttctacttatgcatttcgtgatgattgcgtcatttgtttacatcaatttggcaatttgatgatatgtgtattcttgtttggtgggcttcccacatatactttaaagtttatgttcaatgaatcttgtccctccttaactgctatgtgctcatcacatgaatctaaagttgtgtgtgtgagtttgaattgtcttatttgtccctccttcatttcgtctcttactaaatatgatgctacgttaaagaggtttgagtgtttgaccatcaatgctggaacagattatcactgatttatagttgcagattatgtatcttgtgtacttctttttcgtgtgtcatgaggtccactggtttatatattgccatacctatcaatgtgtgattttgaattgtcttatttttctctttgtagaaggtacaccatatttgattccttcaggtgat

SEQ ID NO: 1144 - DNA, 580 bp, Arabidopsis thaliana
  Intron number 1 from transcript AT1G21450.1 (locus AT1G214 50) derived from phytozome v7.0 (chr-ID Chr1; pos 7509141 to 7509720)
atccaagaccgacccttttcctctaatctctcctggtaattgacttcatcaaccaatttttgtttcctggtcctttagtcttttctctaagctttagatacttgtttgattatgttgttttgctttactctggactttaatccttatgtaagctgtttaaaccagtcaatttgctattaagaaatagatcttagtgctctgattgttctgaattgggactatggaagagatttattggttaactggttatggtattgagaattgcatagatttggtaggtatcagaggaagagtttttttcaattgatttggtgagagttacataattttttttttcaattctcaatggatttttgatgatagtctttgctttggagaatcagctctgagatttggatcataaagtttcaaacttgctttatctatgatgaattagtaacaaaaggcttaaactttaggaatgatctcttgaagctttgcatgatttaataagcttttgttagaatcacagtgcttgaggtttttctgtgtgtgacattgataagattttgacatttgggaacgttgtagttgcagctga

SEQ ID NO: 1145 - DNA, 526 bp, Arabidopsis thaliana
  Intron number 1 from transcript AT1G21930.1 (locus AT1G219 30) derived from phytozome v7.0 (chr-ID Chr1; pos 7712940 to 7713465)
aaaggaactttgctcaatcttcgtttcttcgttaggtaatcttcgtttctaagaattggaatgttctttttcataggattcatgatagtttttggctgcaattttgaatctttattctgactatgtgaggaatttgattttgttatcgttgtcgttgtttcgtcttaggatttgtgagaatcattgaacaatttttcaactttgacaattaataacacgagaggagcttcagatttatgtgtttgagtattcaaagatatagcttttatatttgcctttctgggtttcatggagatgaatctgtatacttatagctcattaattagtcaactctgttgttgcttctggtttgacattgtattgagtagtcaaagatttgagctttctaactccacatgaagatatagcgtgtttacatttcatttgtgaaaagtacttcagtccatttgggtttctatctggtttagaagatatttctggtgaaaactttatttgggcattgcttcttttcagtgactgatcaaag

SEQ ID NO: 1146 - DNA, 560 bp, Arabidopsis thaliana
  Intron number 2 from transcript AT1G21930.1 (locus AT1G219 30) derived from phytozome v7.0 (chr-ID Chr1; pos 7713504 to 7714063)
cactgtttccaagttagtttcttactgcatcaataatgtttgattgtttgctaatcattagaaagagtaaggaacacatattcagtctttgtttcttcactgtgatatcgaaatttatcagtaagtcattagttatgtagccacttttagttgttttcacttgttcacaccatcatgcttttcatttggaaaaaataagtaaccttggaatataaccacggttgttgtttgatacgtcttgcttgttaaaacacttgagtgttgaaaggttcagttcctctggtgtataaagtgttttcttcttgatatcgattttttgtgatctaggatcatagttttgtcattgagtcatgaggtatgtagcccactcttagtaaatttcacttgttcataccatcatgctagccactacattgcttggcataaagaagtagccgcagtatccaacatttgtatctagtatcttctaatataaaacacagtatgattgttgttctcgaaatcaaaacatcctaaagtgaaattttcgatcttttttgtgggtgcagtgcattagggac

SEQ ID NO: 1147 - DNA, 529 bp, Arabidopsis thaliana
  Intron number 1 from transcript AT1G22450.1 (locus AT1G224 50) derived from phytozome v7.0 (chr-ID Chr1; pos 7925457 to 7925985)
ctgtgaacgctcaaactccatcgctctccgaggttattcttcatcttacctcatttctcatttgctctctggaaagatccgatctttgttcgatctactgaaaactgagctgattctctatgattttctgtataatcctacgattttgaatttgattttgagactttcttttgcttttaccacttttgttagatctgcttcaattcgattttgagaacgagctaaattagattccttcatctcttcaattcatatgagggttttcaatttctcaatcggttgatttgaataagtcaacaaagattggatctttccagctattgctgatactttgcgttgaaaaatccaaactttgtttttgtcattgtaagtaacattaatagcttatagaaggattgtgttaccactatttgcatccataggtaacaaatctatgttggtatcatttggtctaacgtttgaaaatacttttggttggtgattgattttggcagcaatatcatttggagaaagaagtgaagcaagacac

SEQ ID NO: 1148 - DNA, 712 bp, Arabidopsis thaliana
  Intron number 3 from transcript AT1G23820.2 (locus AT1G238 20) derived from phytozome v7.0 (chr-ID Chr1; pos 8420928 to 8421639)
atcttcctttgtgttctatccctaaccctaagaaggtatacaatcaatccttttgctagattctgtgaccttgattgtgttgtgttgtgggtaatcaaaagtttatagctttggaatgtaatgaaaggtctttcttgaagtttgcatttttcttctccggtaaagtaggatgatgaaatcattagttatggagaaatagagaaaccagagttccttttattagatgtgtatatagaaactacttgagttggcattaatgattacattccagggtggtgataggaatgtccactagagaaaaggttcatgatcaccattttttgctttttatatgtacaaactttgatggcctcctgagaaaaaaaggtacatagtcccatgttcccttctggcaaagttagagaactcaagtaactttattgggttataataatgattcggaagaaacttatttcaatgggcttaaatgattagtctttagcttgttattgggggacttggttcagaaaaggttagataatcaagcttcttacattcagaattgcttttgctcccaagtatcagaattgggtagtctaactattttgggttatggtaaagtgggtcagctaaaaatgctgtttttgcttttagctagtaaagctataagccagagtgtatctgatcaatgcctttctagttcttccataggttttggtcattggaggaggag

SEQ ID NO: 1149 - DNA, 423 bp, Arabidopsis thaliana
  Intron number 4 from transcript AT1G24200.1 (locus AT1G242 00) derived from phytozome v7.0 (chr-ID Chr1; pos 8571243 to 8571665 reverse strand)
ttgtggagtttactcactttctgcctgctactccagctactccagcaacagccttgttgcattcacagttttgcatagatcatcctgatttgcttgaagagttggattgctttctgccaactatttctcagagttttttgtgacgaaaggattgctatgttacttcaatcgcttcacatataagtagttttttttttttaaagttacaagtcagagataatagtagaggttttttctttttaatatgcatgattaatagctttcttttccctataaattatagccactatcaaaattcaaaattaccatcatctatagttattcaatgcttttttttttacctagttatttcaatgcttacctatgagtttactatgtgtaacatgaggataagggttatcggaattattctacgaacaaggt

SEQ ID NO: 1150 - DNA, 526 bp, Arabidopsis thaliana
  Intron number 1 from transcript AT1G24267.2 (locus AT1G242 67) derived from phytozome v7.0 (chr-ID Chr1; pos 8606708 to 8607233 reverse strand)
tcctctcgggaagctcaccatcctcatcggtgcaggtcagtactcttgtgggggttttcttttttagtgattaattgatcggtgctcgtactcctctctcgggttctcatttgtttcgtagatggggaattgcatttagaggatgagaaattagggtttttgataaacccttttataatgatcactgttgcttcactgtctttcaatcatcgaatcttcttcagctcaaatttcaagtcttttgatatttttttagtgtgcttcacttttggttttcatctgtttcttcgaccaatcagaaattgaacaaaggaacagtttttactctcttgtatgtgttaggggagattattcagcgttattggagactagtttatgtttaatttcgttgtgaatgcaccaaagatgatgaatttaccctttaatgtcttactgtttcgattaattttagtacatatgcttaatgttcaattcacttgcttttacgttaggtcttgttgggtcagtacttgctaaagaagggagt

SEQ ID NO: 1151 - DNA, 677 bp, Arabidopsis thaliana
  Intron number 1 from transcript AT1G25280.2 (locus AT1G252 80) derived from phytozome v7.0 (chr-ID Chr1; pos 8864229 to 8864905)
ttaagcttctgggttttcatcagtttgtctaaaaggttcatccttttctccttctctctttgatgtttattgcagtgagattctatgttctaacctcaaatctcaggtttttggtatcgaatctttgtaataaaacagttttgtctgaaattaactaagattttgactttgtaggtagtaaatcagatgagtaaaatttcattttgggaaatacctgattgttgttgaatcttttaatgcttttgattctgtgttgttacatacgtctctgttatctccagtttaagtaaagattatttgagattctctgttaatatatcaaattgagtcctgatttagcctcctatgatctcaattttggggcatttttggtgagttatcatcaagattctctttggttgattattgtctttaagaaagaaaaaaagctatattggggacatgacctagtttctttattgggcatgcgatgccttgcatatctcttctttcctaagctttagcgaaacactctttctcttttaggctccactttacttttatggctctttttctttttatttcttacttattaagaaggtgactcagaattgccttagctgaatgactttttttcttgtgggtgcttatgttaatggacagtgagtggagtctctcatcttagtctgaagctcttt

SEQ ID NO: 1152 - DNA, 521 bp, Arabidopsis thaliana
  Intron number 1 from transcript AT1G25682.1 (locus AT1G256 82) derived from phytozome v7.0 (chr-ID Chr1; pos 9004059 to 9004579 reverse strand)
ggagactaggaagatcgatttgattaatctcggttagttttattgtcctccttgtattcaattaatttccttctatttgtcaatcgcttgatttatcttctgctccttgaggtggtagcaaattggggataaaaccatgtttgtttgttgtaatgaatcttcgaagccctaaatttttttttcattatggttttcgatactaggatttggttctagggtttgttttttcagagttattcgtgattgtctcaatcgatttttcatatggttcgttggtactttgaaaattttctgtattcgttttgacaatttgataattgcaaggttttagcttgttatcgaaaattttctctatgattcggctaatctaatcaattgcttgccttgtgtatttgattattgaggatcctatctggtaattgtgttcattgattttagtttcatcattgttttaactcttttcgatttgtaccttttgttttgcagtcgactctatcagctgccagggcagataactttta

SEQ ID NO: 1153 - DNA, 480 bp, Arabidopsis thaliana
  Intron number 1 from transcript AT1G26190.1 (locus AT1G261 90) derived from phytozome v7.0 (chr-ID Chr1; pos 9060434 to 9060913 reverse strand)
ccccgattcacactaattccgagagatttttctgtgtgagtgccatactaaactccgagaaatcggctcaagtttcgatttttgtttctgggttttaccttttcaaccaatctgtttgcgttttttcttttgttctgggtgttgttgttatagaacagtttgatcgtttcttctttgatggtttttgtttggattcgtttcgagctttcgcttgttttgtttcattgtatggctgcattttgatgataatttcatatccgctacttttggattagagtgctgcgttatctttagtctgcttgactcattcctccatgggtttaagagtaaatgtcactgttcctttaaaatgttccgtacaattcagtcttcactatgtgtgtttttggctctcttagcttttggtctctccatgtttcccagcttaagattatgtcttattaatgaaaatgtgttcttttttgcagattattgttcata

SEQ ID NO: 1154 - DNA, 780 bp, Arabidopsis thaliana
  Intron number 1 from transcript AT1G26560.1 (locus AT1G265 60) derived from phytozome v7.0 (chr-ID Chr1; pos 9178631 to 9179410)
gctttgtctttggaactgcttcttcggcttttcaggtctcctctcctctccagtctcccactctctttgtttttgtctatttttattttaatttttgagttatttatcgttttccttttaagttttaaaggaatctgaaaacaaaattattaaccacttaaaaataggtcacatcagaacaaataggttcacatgtgatatgtttttattctcccaatactatatagccaaaataataaataatttaaaaagcaaacagaatagccaaaactaatactattcagtatctgaaaattcattgtaattttttttttttggctcaaatgatactgaagcgtgtgtgttaaatatgtttttgttttcttatatgttcttaaaattctggtccataaattgaaatacaattgagttgcatgacgcgtaaacaaggccatgtatattcatcaatcacgggtagccaatagttgctcctcttcttgtggtttcggtttttccaaaatttagttttttctaaagaaattactaaatgttttcaaacaatgacccattcttttgaacattttcataatcttcttcacctttatccttttttttcaactccataataaccaaagtcaagctcaagtaaaaccaaattctttctcaaaatgtttctcacctaaccatgcacacccaattaatgtttccgggctggaatagatcccctaaaacgaaaatgcaaatatagatggatggaccaacgttataataaaatttaatgatatcaataattggtgcagc

SEQ ID NO: 1155 - DNA, 599 bp, Arabidopsis thaliana
  Intron number 1 from transcript AT1G26620.1 (locus AT1G266 20) derived from phytozome v7.0 (chr-ID Chr1; pos 9198758 to 9199356 reverse strand)
tgggtctgaggtaatatctctatcaccagatttctatatatttttattttttggatatttaattattcatttggttcgtctctcttttttatatatatagttgatttgatttgccatttctgaatttttcatggattattgtttgatgaaattaggttagtcgtttaagtcaattgatccagaatctaagctttggtttttgattttgattatgattataatttataaatgtgaatttgtgacagtgaatttattcgattcttttttttttttgtttgttaaattctcgtaaatggttttggtttttattgggattagtttgcgtgtaatctggtttatatcattgatgattcgattaagatgcagtttctctatttgcagaatcttcttcttcgcttttagatacgacaaaaatatatttatactagcagagatgatcatctcatagtttgcttttatgtgttaatgttgtttcacgttgtgtttgtggttctgtgattgtacttgtatgttatgagtttgcatatgtatcagttagtggagtgtttattcaatgagggatctcagtgaagtgtttttttggtcagtgaatcgtggag

SEQ ID NO: 1156 - DNA, 571 bp, Arabidopsis thaliana
  Intron number 2 from transcript AT1G26690.1 (locus AT1G266 90) derived from phytozome v7.0 (chr-ID Chr1; pos 9224644 to 9225214 reverse strand)
gctggagtagtgttgctaagaagagccaagtcgaagtgagtttttaaatgctgttaattttttgatcaattagattaagaaaattgctctgtaaattggatgttagttctttaggatttgttgcagaaaagttactttgtagagcctaaaaatccaaatgaatagggaaaggtttgtttttgttatagataactccggttttaagactagtttttgtgttgagcaatgataaagcttgagtttttatgcttctgtatttgtaccaaggttatggagtcgtgagttgttgaatcatcatattgttggtttaaaatcatagtcttgtgtgagtttggtagttgatcaattagataaagaaaggttaaaggtgatttgttgtacaaagagtctcagaatccaaatgaacatagaaagatttgaggattgaactagattcttatgcttctgtgttgaacaagattttgttgagattttgactagcgttgtgtttgatgttattcttatctccatgcttttttgaggattgaaatacattcttatgctttgtgttgtgtttgtttgtataaaggtt

SEQ ID NO: 1157 - DNA, 456 bp, Arabidopsis thaliana
  Intron number 1 from transcript AT1G26740.1 (locus AT1G267 40) derived from phytozome v7.0 (chr-ID Chr1; pos 9245857 to 9246312 reverse strand)
gctgtgcctaagaagaaggtcaaagaactctcagtcccttaattagttttctcctttcgttttccacttctgaaatgataaaatttcttagggttttgatttattgtggtatctagggttagcttttttgacggagtcagggtttatctagggttttaggaaggtgcactataggacttattagttgattatgcaattgagatactaagtgctagattgcttcttctatagaatctatctaagaaatgttgtctctttgtgtgtttttgagtgtccattgtttttccatttgcttgtgtatctttgggtttaagttgatttggttccttacttcctttaggttcacatgtgaatgaaaatgtgtaatttttaatggctccttggagaatgatagtgttaattgaagctgttcttgatgaaacatgcagatttctaaacacaagagagggataagaa

SEQ ID NO: 1158 - DNA, 689 bp, Arabidopsis thaliana
  Intron number 1 from transcript AT1G26945.1 (locus AT1G269 45) derived from phytozome v7.0 (chr-ID Chr1; pos 9351665 to 9352353)
tcatccctgaacttcgccgccgccgttctgacaaggtatacacttcaaaataacaaattttaatctatctttcttgcatatacatacttattttgtatacttgtataacttagcctgcacatggacttagaaagttcaaatgaataggaaccatatagtatataataactaattaatatgcatggtgaaatccaacggcgtgtagacatgtggcctacaattaactatacgtagataaagtaacattaattcacagcctcatttatgcatatatcttgtttgttctttgaatgtttttttgcaattaaattttacaagttggtggtgtgggactcagtttgttcccttcctacttccacgtaccttaactacatgtctccccattactcttctctacctatatactcaccataattctatatatagctgaggaatatgataaataaattgtggccgtttataccgttgtgcacattgaagtggcaatcatgagaaaaaactaaagttctgttaaaagtttgaagatatatatgaaattgttacaaagaaagaaaaaaggcagtagcacatgttgtcacgtactctttgtaagggatataatgatcgttttttgtactttaaaactaattgtaaaatgtttaaactattggacaggtgtcagcatctaaggtactacaagagacttgcaa

SEQ ID NO: 1159 - DNA, 1004 bp, Arabidopsis thaliana
  Intron number 1 from transcript AT1G27360.2 (locus AT1G273 60) derived from phytozome v7.0 (chr-ID Chr1; pos 9501108 to 9502111)
cgtccggagatttcttcggccctctcatacttgaggttttgtactctttactccctcaaatttttccaaaacttgcgcttcttagatttgggcgtcttcgttatttattgtaaaattcagctttatgcctcttagactagttatagatcgacgaatcagtaaaattaccttcaaggtgaatggtctctaggtatagagaatttgtcaaaatgacgaatttgattgaaacattggtaactttttttaatctcttcgttagttagttgaacttattggtttggggggaccatttgctttcatcgaaaaccctagcttgcgagggagggaccttgattgggatcgtaacctaacttactgtcactttttttatcgttcaatctttattgctgcagataggtccactaatggctgagcttgctgccgttttctttgacatatagttaattcaatgtgtaaagttgtaagctttttagtctttggttttgaggaagttagttaggaaccttctccaagtacaaaggaggaatgggtagggaagggtttgcaattacaatgtgtacatcgtgtttcttgacaagttactgatagatactttggggaaatttttgatttgaggagtgtaggaccaattcaataaatgccacttagtttttgtgtgatggagatgagaagatgaaaagtaatacccttcctctcttgccctttttgctggtctgggtgaaacatagaaaagtttctcttgctcaagttaatgataaaagggtgagagcaataaacgctgataagccttgtctggtccttggaattttgaattttctttttctatcttacttatagtattggtagttgagggtgtcgtcgataaggtatctatttgcctagccagagttatatataggattgattgtctagtcttttcttatatgatttttgttctcatttactaatcaaagttctgcaaacttgtagttgttgtaggatttgttgctctggctctggtggta

SEQ ID NO: 1160 - DNA, 222 bp, Arabidopsis thaliana
  Intron number 1 from transcript AT1G27760.1 (locus AT1G277 60) derived from phytozome v7.0 (chr-ID Chr1; pos 9668898 to 9669119)
gggaggagtaagatttctcttcttcaatttttattctttaattgattcaatttgcaactggatttgtttgttttagggttttaattgattactaatttactatgaaatctcttatataaccaatttctgttttcgttaacgcttttataaatttggatgctttgattaacttttgctggaattgtttttttttgtgcagaatctcagcgtaagaacgcgaca

SEQ ID NO: 1161 - DNA, 448 bp, Arabidopsis thaliana
  Intron number 2 from transcript AT1G27980.1 (locus AT1G279 80) derived from phytozome v7.0 (chr-ID Chr1; pos 9749160 to 9749607)
ctgagaaacaaaaggtgagtttttgtttgaatctgcagattgttcctgtaatggccatttttttgcttcttcttgttgtgatgtatataaagagtaaacatttcaaatatagaaatgctagacaagcctatttaatgctctcttcttccatgtgtactatttttaattgttgttaatgtctgcatcactagtaaggttttagatattatctggcattacttgatttgaagaattttttcactagaagtcctcaagaatagaaaattacttgggattagagattggaactttaatgtttgtttcttggttagagagactttaatgtttattacatttcactgtgtcttgttttttggggtatgggagcagcatctctgtgtatctaattgatgttagtttcttctaattcacaggttgttgaccaattacaatctggtagcagctctaa

SEQ ID NO: 1162 - DNA, 575 bp, Arabidopsis thaliana
  Intron number 2 from transcript AT1G28330.4 (locus AT1G283 30) derived from phytozome v7.0 (chr-ID Chr1; pos 9934254 to 9934828 reverse strand)
cccacccatccaaattctccctccgtctacgactggtaactacaatttttctgttattttatttcatatagtacatgattataacatagtcttagactcttagatgttgtagtatagagagaaacaagttatttgatcgacttaacctttaagatttatgacttatgaaacaaagaaccggattattctacgaacggataggttggtttagtccggttattgatttttgttaacaattatcgaatattttggtatgtgtcagcgttgataatgaagctcaaaggaaggaacatgtggcactgtgtttagtgggcgcgtggattaagtgaatagttttattctgatttgaccaaatcaaccttcctttttgtgcatatggtataatatcattaactctttaaccttcatggccaaagttttagagtgctaatcacagccgttgtttttttcttctgagtattgagatttgagattgttgatcggatggttcagatcacgagttgttggttcactaattgaccgcacgtggggtgtttgcaggttgtacagcggtgactcaaggagtcagcaccgtt

SEQ ID NO: 1163 - DNA, 476 bp, Arabidopsis thaliana
  Intron number 1 from transcript AT1G28520.2 (locus AT1G285 20) derived from phytozome v7.0 (chr-ID Chr1; pos 10029233 to 10029708)
cctttgttatttgctgcttttgctgcagctacagtgtaagtttgattttctgggttccttcaaactccaaaatctcgcgtcgctttttgcttcagaatcgatttgttcttgttacttcgatctgttgttctttttaactctgtgcatgattcaatttcgtgttcgtaacctgttttttgctgcttgtttagttcgacaattaggtaaaaaaatgacgatccctaaaacttatgatccttttaatcttcgtttagctacttcgttcgagatcatctagggcttttgttgcttcatcgattttgggttttgatttactgtaaatgttttggttttgtttatgtaatctaagcatgtaccaatgattcatgagtgatcatgtttgttataggagcagaactgatgtgaagtgtgtattttgaatgtgtttttggttttgtacagagaatcttgtgtttttgtggtggggaggtgagatt

SEQ ID NO: 1164 - DNA, 677 bp, Arabidopsis thaliana
  Intron number 1 from transcript AT1G29150.1 (locus AT1G291 50) derived from phytozome v7.0 (chr-ID Chr1; pos 10180563 to 10181239)
ctttaccaaaatctcacgcccccgacgattcatcggtaagtcttgttcttgcgaaatttcattaattcttcttctgggtttgcttatcagatctgcttaattctgggttttggtatgcgtattgttttcgatgttttaaaaaaccacatctggttccttgtctcgatagttctagggtttagctttcttcgatttagttgatctcagtgaagatgggcccgaggatgttctaattctgattgaaagaagctgaatacaaaattaaatagatcttaaaagtatttgagtcgaagaattcgaactgaataagttagtaattactgaactatgtctctgtgattcatcttattacttaaaaattaggttatagtttcataggctttgtaattcagttcctgtattacttattgtagcctcgttgtatctttgtctttgatagatctctaggcttgtcttgatcattaggtacagaagagttgataaattacagtgataaattaccatcgtggcttgtctttatctgattatcttggtaatgtatcgaagatggatttgtttttgtagtgatgtgaaacctaaagagtatcaataagcttgaaaggagaaatatttgaacattgcattaacaggtctatggctttattgttgcagggatttgagtttgcactaaacccaca

SEQ ID NO: 1165 - DNA, 452 bp, Arabidopsis thaliana
  Intron number 1 from transcript AT1G29370.1 (locus AT1G293 70) derived from phytozome v7.0 (chr-ID Chr1; pos 10282427 to 10282878 reverse strand)
tcctaacgaaaccgttagtcgcctcctctctcaaggttcctcctttttcctcctcctctatttgtttgagctgctgtgtctttggattgttaatttgggcctggggttttcatgtatcccgaggaggatttctcgaaatcgacttaattactaagggtttctattagggtttgattggggtttttattctgaacagaccaatactttcgtttttgttagtttctagaatttagtcattgtgcaattctaaagctgtcgcctttaatatggttccccttgtaattgtccaactttctagctggttcggttttatagagaagaaagatgttgttaatggtttgctttcttagttcttgattcaaggcttgtctttgttctattattaatgatattgatacttgttttttccttattcagatccatttcacgaggtaaagagcaagaaagaaaag

SEQ ID NO: 1166 - DNA, 770 bp, Arabidopsis thaliana
  Intron number 1 from transcript AT1G29465.1 (locus AT1G294 65) derived from phytozome v7.0 (chr-ID Chr1; pos 10308808 to 10309577)
gttgtaacgtgattgactatctctgtctgattcttcgaatcttttcttagattgttttataatgtttgtgaatggatatgacgaaatggcaataatgttttgtgacacccagtctgatcttcgtgattgatctgccatattttctgatcctaattcttcttcagttttgtggattttgattcaaagttttgatttttgaaagggagggatgaggatataattccatacgtctgcaaatctgaaacacagtgttgatacaattgacatgcactaccatctgacctctgttttattgttgttttcaatacccttttgttagttgtctgcaatcagtgatgaaattatgtcaaattcaatgattatacaatgattattataatcactagatcaccatctttcggctgagattgcagtttttcttttttggaattattgtttgtgttattgttgacgatttgcctatggtatctgatgtccaaagtttgataattgtgtttggacatttcgtttttcttaggcagaaagtgatttcaggctttgcgacactgttagcttatcacataagctacctgttacttttaatacctggttacatcctatttttcaatatcaatgttgttttcgttttgtttatattccatcttgtttggtggttacattccaaatctttttgtaatagcatcctctgtgtttgactttagtttgatcttatgaagactctttgactcaatcccaatctactgatgcttctgtgttttattgtcaagttc

SEQ ID NO: 1167 - DNA, 380 bp, Arabidopsis thaliana
  Intron number 1 from transcript AT1G29800.2 (locus AT1G298 00) derived from phytozome v7.0 (chr-ID Chr1; pos 10432707 to 10433086)
ttcgcaatcgagacaaggaacaactctagaacgtgagttttacgcttaccgattttgattccactcacaatttttcttctctttaaaatcaatttctacgcgatcataccaatttctagggttatcacttttattcaaaattctttcgtgattgtggagaaatgtttttaatttaataataaaattactgatttttatggaaaaaaagaatttagtctcaaagttatttgtatcagtatgatccttagcttaatagacatctcacatgtgtttggtgtttttaatttttgtatatcattgtcttgataacaagttaaaggtctaaactttaagcttgaaatggtttgtttaactttttctccttgaatggtgatcatagg

SEQ ID NO: 1168 - DNA, 561 bp, Arabidopsis thaliana
  Intron number 1 from transcript AT1G30000.1 (locus AT1G300 00) derived from phytozome v7.0 (chr-ID Chr1; pos 10511711 to 10512271 reverse strand)
ccaagttcagacatcgatctcctttaaaggttatatcttgatctctgatatgggttatgcccaagttttctcctttattatggatttgatgtcactggttcttgtatctggttcatcttctttggttttagatgaattgctttgtgtccaaattgaccttggattcacgaaattacgtttttgtgaggtaatgctgagttatagaaagctagattgataaactgccgctaaagcttcagtttttagatagaagttgtatgctttcaggttaagatatagaattcccatcttatatagtctctagcttcagattaaagttttaggcttcttactgtgagactcctaaaatgaagttataatctgagcaatagaaatgtttgcttagaaggagtaagaattggacatgtagaaggtgctatgaatctagtaatggatgacttgaagcttttggtcgtacgtgtatgaaagttgatttagtttgctcttcttttttgacatcattcttttgcaatgtcttgtgttataggttttttctcaaagcttgcttactcttagtacaaa

SEQ ID NO: 1169 - DNA, 468 bp, Arabidopsis thaliana
  Intron number 1 from transcript AT1G30690.2 (locus AT1G306 90) derived from phytozome v7.0 (chr-ID Chr1; pos 10887816 to 10888283)
tccagaaacagtgtaagtcttatcttcttctttaggttggtttctctctttttctctctttagaagctgttaaattcgaatcctttttgggttttagttctattgtctctcttgatttctcgatttttatatagataaacttagaaagcttcgaatttgagctaggtttctctcgccttcaggaaaaaaaaaaagaaagtttcaatcttttcctcctgagatttagttctgcagagttgaaattggattctgtgttatgttgtttgagttcgtttaatcgttagggtttatacaagaattacgtttttgattttagatctctactaatcaggaagaagaattaagcttgtttcttttagatctcaactaattcaacaaggttaattagttctagggttactactttggtgaattgtataattggtgactaaatattgtttgaatcgattctgaatgacaggctttaag

SEQ ID NO: 1170 - DNA, 491 bp, Arabidopsis thaliana
  Intron number 1 from transcript AT1G30690.1 (locus AT1G306 90) derived from phytozome v7.0 (chr-ID Chr1; pos 10887793 to 10888283)
agagattccgaagaagaatcttttccagaaacagtgtaagtcttatcttcttctttaggttggtttctctctttttctctctttagaagctgttaaattcgaatcctttttgggttttagttctattgtctctcttgatttctcgatttttatatagataaacttagaaagcttcgaatttgagctaggtttctctcgccttcaggaaaaaaaaaaagaaagtttcaatcttttcctcctgagatttagttctgcagagttgaaattggattctgtgttatgttgtttgagttcgtttaatcgttagggtttatacaagaattacgtttttgattttagatctctactaatcaggaagaagaattaagcttgtttcttttagatctcaactaattcaacaaggttaattagttctagggttactactttggtgaattgtataattggtgactaaatattgtttgaatcgattctgaatgacaggctttaag

SEQ ID NO: 1171 - DNA, 863 bp, Arabidopsis thaliana
  Intron number 1 from transcript AT1G31050.1 (locus AT1G310 50) derived from phytozome v7.0 (chr-ID Chr1; pos 11077976 to 11078838 reverse strand)
gagtcttgccttcttgtaagcatctatcaaaacacttaaattttatttatcttttcgaaccattaacaaatcttctttagtatcgtgttcttacttacaattcacataacggttattgtggattcaaagtttagtttaaggttttaggttctacgctccactccataaagaaatcatctagttctcactattaatactttcgtttgtttaaaaagaatgaatgctccaggcctaaaaataaaacaaataaaaacattagaaacaaaagagaggtctaaaagttggtttacaaaaagtatattagtagctcttttgaattattgttccccagtaaatgatttaacgtttgattggttagggtatgcctataattttgcacttatgattattcatctttattattggccactcgaagatgtatttttattcttattttataattaaaagaagttttaatagtttataaaatactatttgtttttgtttttgcgtctactggttccaatatcatgtcttacaattttaaaaacaaagtataaacgacaacgtaattacttgaacaatatacgaaaacgttatcataccaaaaaaatatataaacgaaaggtcaaatgcaaaccaaattaaagtaccacgttgtaactttttacaatttcccaaaattattttagtggaagttttaatttgtagagtttcctaagtaaaattaataatctagcataacactaaattcattaaaaccaaaaaaaaaatcgagcccatatttaacttaagttttgtaatactaaataccatattcttacacacacattgacattaatttttaaaaaatggacaggcctggtagaagcttaggagatcaa

SEQ ID NO: 1172 - DNA, 478 bp, Arabidopsis thaliana
  Intron number 1 from transcript AT1G31420.1 (locus AT1G314 20) derived from phytozome v7.0 (chr-ID Chr1; pos 11249800 to 11250277)
ctcaattcttcctcctctcggatccatttttagaggttcttataattcttactaattctgtttgcttttaaagctataacctttgatattgttggaaagagtggggttttgggtcttttgctgaatcgttttttggatttgttatattgttcgaatcttcagttgttattgtgttataggattggatggtatctgggaatttcgtaatctatgttaagctagagctgtttttgagctcttttgttgatgatgattttgagattgttggccgaatttagctctcgttttctgattttagcaattggaaagtgtgtattggttcttgtgaggcaatttcactgttttgagtactcaaaatgtagatgagagcatgcataagttgtgtggagactgagcttaatgtgtagtgtaattgacaattagttttgtgggctttcctttgtttttcaggagtctagtttcttacttgaacatagac

SEQ ID NO: 1173 - DNA, 641 bp, Arabidopsis thaliana
  Intron number 2 from transcript AT1G31600.2 (locus AT1G316 00) derived from phytozome v7.0 (chr-ID Chr1; pos 11314960 to 11315600 reverse strand)
aacgtcttgttcagtctcccaattcctttttcgtaatgtaaatttgaaacctttctccttcttttgaaccctttaggaacaaagtctctgtggttagaatctatgtaactactcgactttgtgaattgtatgtaagttttgagtctgtgggagacgtgggaggtcatcttcttactctagttcaccaagtcatctttttttttgtgtgggtttctctgttaaatcattctccctgtagccattgtagtctcttttctttacttgtaggtgcatatagagagtcttagatgcatgtttgagttgtcactgttgattacttcatttcatgttgatgttatggtgttataaatagagcttttaacgagattgtgtgaaaatgcattgtatataaacatcattgtatgggctggccatgggctgaccattggacaatggtccttaatggtcttggacaaattttcagaccattgtccattaaggaccaaccattagaacccatgaaaaaaatgttccaagtggacatgaccattggactttggacagcccaattgacacttctaactcaagtaaacgtcatcgtttttttcattgaacatatcggcgaagatacctcgccgttatacgatcggagaaagttacag

SEQ ID NO: 1174 - DNA, 525 bp, Arabidopsis thaliana
  Intron number 1 from transcript AT1G31760.1 (locus AT1G317 60) derived from phytozome v7.0 (chr-ID Chr1; pos 11372697 to 11373221 reverse strand)
tgaagcttcacaatctccaggtttgtttgattttggagctttctaaggtttttactttgcgtagatctgtttatgaacttagggatttggttgctttagagaaggaattgttgcatgtaaactaaatcgattaagcattttagtggcggatgatttgattgttatgtagaacatggatcttgagtaaaatgcatgttatcttgtggttgagaatggattgtttggttttgactatatacatgaagcatcttgtgggtttggttgtgaagattacttggattgttgtgttggtcattatcttagagaacttggaattgtagtgttctttgagttttggaattagtctatttaatgtaatacacacagatgatgtctatatgttgaattggttgttcaatgtaaacaacaagcagctaatgtagaccataaacttctctgttttctggattattcatagtttctgtttgagtgattcatttcttgcctcattgtagaatccggcgaacaagaaggagattcactgcg

SEQ ID NO: 1175 - DNA, 497 bp, Arabidopsis thaliana
  Intron number 1 from transcript AT1G31812.1 (locus AT1G318 12) derived from phytozome v7.0 (chr-ID Chr1; pos 11411600 to 11412096 reverse strand)
ggtttgaaggtacgttcagatccaaaatgaaccaaaccgatctcggtttcggtttattactactcggatcttagttttgtttgtgttcaccattcctgaattctatattttctgtgttggtagccttgtttgatccagatttgcagatatataggttccttatagttacgaaattgaagcttgtatagtcaagaatgatcactttatggaattgaattattactgatcacgctttttctctgtatgattttgtccatttactgttcttataactgatttgttaaacactgtttgctgatgggtaatatagttttgaatctgagctaggtttggttttattgagttttgtttgattattgtatcccgattgagaattttaagtagtaatatgtttgatggtgtattaggctattaagaatcttttcttcgaatttgttgtttcactgatttatatatctgcaggaggaatttgaggagcacgctgagaaagtgaatac

SEQ ID NO: 1176 - DNA, 479 bp, Arabidopsis thaliana
  Intron number 2 from transcript AT1G32170.1 (locus AT1G321 70) derived from phytozome v7.0 (chr-ID Chr1; pos 11575783 to 11576261)
ctgattatactgccggcgtcgtcgtcgccttttatgtaagtctccggccatttgttttttttttttttttttctgtttcattaccactaaaatgttttttttttcgtttctttcatccatctgcatgaatgttttttgttttcttttagttatttaattatttgcagatagttttcattatttgttttcaaaagatcatgaactaactaatttgatctaatttaaaatctcttttttttttgtggccgagaaaatcgtcaataccacactttttgtcgaagaacccatgtcacattttttcctgtttggctgcctagaaaatagtcattaattttcccaagaaaatagttctatgtttcccaagaaaaagagcaccaatctttaaattctaattttatgttaaatggttactaaagctgaatttatattttgattttgttgtagacatcaaacggagacgtgttcgagaaaacacacga

SEQ ID NO: 1177 - DNA, 742 bp, Arabidopsis thaliana
  Intron number 1 from transcript AT1G32190.2 (locus AT1G321 90) derived from phytozome v7.0 (chr-ID Chr1; pos 11594663 to 11595404 reverse strand)
gggtctctctctttctcgctcagatgttcataactcctaatacgtcgtcgtttcgtatttagtatttatcttactttataaattgcttattgagatttcttgaaaatgattgtttttaatgcttattaggattgtatacacagatttatcaagaactataattaaattaagcagattttgttaagctaatcataattaagcatatttttcctagcttttgttgtttttttcctaagattttattcgttacaaaaattgttcttttttggttaaaggttcacattttttaactccttaaagtatttttcaacttcttgagaaagctcacgcttttgggaaatgggttcttgtctcgttgcccaaaaagctcagatttggtgatatttccgacaaattttctttttcctttatttgtgtgtaaaatttgcatggttttagtaaaatgtttggtgttttctttttttttgttttgtttagtgtcgttttagtttcttgaatttgacctttttgtttaccccagaatttcaattcgaaatttctcacctaccaccgttcaatttgtatttactcttttataacgttagatttaaatctgaacataggtaggtgatgtaatataagttgtaacctttcattgttataatcaatactataggtcagtcaatttatgagggttcatttatacttttgtcgcttcgagttttgatttaattttttgttatctttgttttatttttcaggt

SEQ ID NO: 1178 - DNA, 507 bp, Arabidopsis thaliana
  Intron number 1 from transcript AT1G32410.3 (locus AT1G324 10) derived from phytozome v7.0 (chr-ID Chr1; pos 11693891 to 11694397)
tgaaaaaaaaagatttgatcggctaaacttggtcggtatgattctcatctatctggttgaaattcttcaaattgttgctattgttgtgtgattttcccctttttctttgaactttggatccgtgtgaaatcaattctggcgattgggattggtatcactgtatcagtaatatcagattttcttcgaatttcttggaagtagttgagctttgtcgaattcaaaccttcttcaaaaaagaaaagaatagaagaatgagaagttttctcaaatttttggaaaataattatttttgtcacagttagttagcgaatggagaagtagaaaaatcagatatttagtgatactttcttggggattcttttgatgtttaattgaagattggctcactgattttatctttgaaggtcttagtaaacgttaatagcttgacgttatcattagaaactcaaaaaacttaagtctctctctaattattagctttcaggtttatcgtggaaggacttgtca

SEQ ID NO: 1179 - DNA, 511 bp, Arabidopsis thaliana
  Intron number 1 from transcript AT1G32410.4 (locus AT1G324 10) derived from phytozome v7.0 (chr-ID Chr1; pos 11693887 to 11694397)
ttcgtgaaaaaaaaagatttgatcggctaaacttggtcggtatgattctcatctatctggttgaaattcttcaaattgttgctattgttgtgtgattttcccctttttctttgaactttggatccgtgtgaaatcaattctggcgattgggattggtatcactgtatcagtaatatcagattttcttcgaatttcttggaagtagttgagctttgtcgaattcaaaccttcttcaaaaaagaaaagaatagaagaatgagaagttttctcaaatttttggaaaataattatttttgtcacagttagttagcgaatggagaagtagaaaaatcagatatttagtgatactttcttggggattcttttgatgtttaattgaagattggctcactgattttatctttgaaggtcttagtaaacgttaatagcttgacgttatcattagaaactcaaaaaacttaagtctctctctaattattagctttcaggtttatcgtggaaggacttgtca

SEQ ID NO: 1180 - DNA, 507 bp, Arabidopsis thaliana; identical to SEQ ID NO: 1178
  Intron number 1 from transcript AT1G32410.2 (locus AT1G324 10) derived from phytozome v7.0 (chr-ID Chr1; pos 11693891 to 11694397)

SEQ ID NO: 1181 - DNA, 511 bp, Arabidopsis thaliana; identical to SEQ ID NO: 1179
  Intron number 1 from transcript AT1G32410.5 (locus AT1G324 10) derived from phytozome v7.0 (chr-ID Chr1; pos 11693887 to 11694397)

SEQ ID NO: 1182 - DNA, 507 bp, Arabidopsis thaliana; identical to SEQ ID NO: 1178
  Intron number 1 from transcript AT1G32410.1 (locus AT1G324 10) derived from phytozome v7.0 (chr-ID Chr1; pos 11693891 to 11694397)

SEQ ID NO: 1183 - DNA, 735 bp, Arabidopsis thaliana
  Intron number 1 from transcript AT1G32450.1 (locus AT1G324 50) derived from phytozome v7.0 (chr-ID Chr1; pos 11719070 to 11719804 reverse strand)
tcttgcctagagatttataacaaagacgtaagtaatatttaagcttgtcccttcaattgtttctttattttctttgatatattaatcagagtttgaagtaatggacctttgcttttcttccttataagattttgattatctgattaaggctcttgtttcttgaatttcatatgtgactacaaaaggaaatattttctttttaagttactcattgttatagtaaaaactttctaagcttttggtggctcaagaagagcatgatcaaaaggacatgcttagtgcaatggaaagtcacgatctttatgtgcaaaaacttagctcaacatcttttctttttcttcaaatttctttttaatacaccatactttttaattaattagctctattatatctaatcttcttaatttaaatatatagatgtaagtatttttccgtttagtgctgtcattgaaagttgagaatgattccaaatgatcttgaaaattgtgtatacgaaacgagaattacgtgccaatacaaaaagtaagagttaaaaaaaaaaaacgtttttagtttttggttaagttccggaaaatacaaaactatcgaactcatgaatcttctccatatcaagagcacaaaaggttgtagagactagtagataattaggcatataaagcatctttctatatatttatagataaattgatgtgtgtgtatcagttaattaaatttaactaaatgaaaatgcagacg

SEQ ID NO: 1184 - DNA, 601 bp, Arabidopsis thaliana
  Intron number 1 from transcript AT1G32460.1 (locus AT1G324 60) derived from phytozome v7.0 (chr-ID Chr1; pos 11738258 to 11738858)
tttccattaccgtacgccgaagaatctgccccaaggtaccgatttctcttcttcctctgattttccgatttcttctctgtttataatcgaatccgaaattttaggttttttttccgtgggaaaatctcgagagaatatgttcggagagaaagaaaaaacacttcgatttggttttaaatcaattggataaggataattaatttaggtttatggctctgattcccgataaaatcgcatgatgaattttttttacaaaaagatcgagaaactgcgttgactttgggtgctaattttgagaatttagggtttgggtttgtttaaaaattagtgtttgattcgtttaattatttgtatgaattgtaaagttttaattttttttactgggttccatggattggtctagattttgcttttttttatttattgtagtgttggttggagaattttgattttttttaatgatgaattggttttgtttgcaatgtgaatatgattaagatttggattagaatggatatggtattgaaaacgtagtgaaatgtaattgtgttttgggtttgttccttgtggtctaaaaatatgcagaagtttaaaggtattg

SEQ ID NO: 1185 - DNA, 282 bp, Arabidopsis thaliana
  Intron number 2 from transcript AT1G32990.1 (locus AT1G329 90) derived from phytozome v7.0 (chr-ID Chr1; pos 11956276 to 11956557)
gttatatcattcctgttgaaatcactgtcttcgatgtgagttttgtactctctctactacaaatcttgagtttttgtttgattaagctaaagaagagtaacatttgtggtggtaattggttatcaaaaatgtgttttgcaatgtttatgtgtatttggtattgattcataacttgttatagattggtgatgtgtttcgagttttaggtttatgagattgtttatggagtttgtatgtgtgtttgcaggataagagcttcacgtttattctcaagaccccgcc

SEQ ID NO: 1186 - DNA, 381 bp, Arabidopsis thaliana
  Intron number 2 from transcript AT1G33470.1 (locus AT1G334 70) derived from phytozome v7.0 (chr-ID Chr1; pos 12144975 to 12145355)
tgttcagagatccaaaccttcttctcctattcgtacttttaggtttctgtcttttgatactttacttttgaaaaccctacatcaagagtatatgtaaatccatggatcttgctggaattgtatgtcttgaatcacatgtctcacatattagtagcaaagttagatactttatgaattgtcttactttattgtttgaggtatagcttcatcttgattccttagttgattcagtaaagccattttcttgctcactagtctttataattcttctgcagactacactagttagttaaatcttctggttaaatatgttgtgttttgttcttgtctgaaagcaaatgtttgagaggagattctcatgttgttgtgttatggcaggac

SEQ ID NO: 1187 - DNA, 445 bp, Arabidopsis thaliana
  Intron number 1 from transcript AT1G35516.1 (locus AT1G355 16) derived from phytozome v7.0 (chr-ID Chr1; pos 13078895 to 13079339)
ccattggcttctttagcggcggtaggctagctaaggtctagagtttcaccgcctatcttcggtgtttcgtctaccttttggccggattgattccggtttagatttatgttttcttctctcgatttctttatattcagtttgattgagctcttttgcgtttcattgttagatctggcatataattccttgaacctcctttgtttaaagggattaatttgttttccacgcttatcgatttcattttttgagaacaaattaagatgcggattaaggttttttatgcttatgggttgaaactattgcaattgtggctgtttctctaactgatctatggagacgagtgcttttttgttcttttttaaggtgttgctgaaagctccatcggcttactctacgtcgatgttctttagatttcaggaatcaattgcctttgggagatctttcc

SEQ ID NO: 1188 - DNA, 624 bp, Arabidopsis thaliana
  Intron number 1 from transcript AT1G35720.1 (locus AT1G357 20) derived from phytozome v7.0 (chr-ID Chr1; pos 13225353 to 13225976)
ctgagcaattgagaaccgcttttgaaggtataatagtttcatgattcttcttgttacgttctctgtttttgttaccttcttgtttacatgatcagtatccactttttgtaaaagtgatgtgaatctgttggttttcgtttggtgggttattgtatgatcatttgttttgattgtttttcatgtggatcgatctttgttttggtccgatgatatgaatgttgtgtcggtagcgttttatgatcatttgtacgatgatgtagatcgagattgttccttcatggatcggatcagtgacaatgatctcctttctttgtgtgatctataacaatcttttgtgttagtgatgaagttttgattgtctgatcatgttgataatgacaatgattacattcacacgagatcttgattgagttgtgttttgattctcactgtcacagatctgtcttcttagtctagatctataatgtagttacgtgtaatacaacactaagatcttaagatttatattttgtgaatctgtttgaccggttctgttattatggatctgaagtgtgtgtgacttggatctgaagtatgtgactttgatggttatgtaaagtgaatctgattcgtgtttttcgcagg

SEQ ID NO: 1189 - DNA, 729 bp, Arabidopsis thaliana
  Intron number 1 from transcript AT1G43170.4 (locus AT1G431 70) derived from phytozome v7.0 (chr-ID Chr1; pos 16266756 to 16267484)
cctcatcgttggagcttagaagccgtcggcacaaggttcgtctttctctcatccctttcctcttcctttgcgtgaattcaccagaaaatgtatatctaccttagcgagtctgtctagtttagcgaatctaggataatctccggaagacacttttgaatcatcactgtttttgatctctgtttctttctctaattgtgttgttgtattactgttgatgtagaagaagaagaagaagaatgtctcacaggaagtttgagcacccaagacatggttctcttggtttccttccaaggaagagagctaaccgtcacagaggaaagggtgagtctttttatcaaatgtagattccttgttagtgaaatgattactagggttttcataaagcttctctctttttgctcactcacaaatattgaattcttaagtagtgaatgaaatggttgatttgattcaaaaggttgttcttttattgtttgttttgcttatacgttgttgttggtttatcagtgaaggcgttccctaaggatgaccaaaccaagccttgcaagttcacagctttcatgggttacaaagctggtatgactcacattgtcagagaagtggagaaacctggatccagtaagtgaacttgtgtttttttcattctgatttgttttgtggaggtttttgcgatttaaagtcgtcaactttgtgtttttattgttgtgtagagcttcacaagaaggagac

SEQ ID NO: 1190 - DNA, 778 bp, Arabidopsis thaliana
  Intron number 1 from transcript AT1G43560.1 (locus AT1G435 60) derived from phytozome v7.0 (chr-ID Chr1; pos 16398918 to 16399695 reverse strand)
cgccgtcttcgtctactcgcttcgctccactcactgtgagttctccgttcaccaattacttgtttcgatttgatgctattgattttgagacaaaattcaattttgttcttgttttagttacttcgagtagcttcatggtgtttgtgtattttcatattattcattgtttatacataaagatagaatcagtaatgttgtaaatttacatagttttacactgagattgattcgaattgaaacaagaaggagaatgtaacacattgattttagtatattcaacatcgaaggactggatagtccgaatttctcatgtgtattagtgaagctaatcgtcttgccgatggattagcgaactatgcattttcattacccctaggtttgcattggttggagtctaggcccgatgttgttagttctattttgttagctgatgttgcgggggttgcacaccccagacatgttcgaatgtatttttttctttttcttttaataaaaaaaaaaacattagagagtgtgattctaacatagtgtttgacgttgttctgtgtaatctaaatcagtatgtgtaatcagaaaatgagaattgagatgtaatgaaagaatgaaagaacatatatgttagtgaattgttcttctacttctaatgtaatgttgtttacgtctagtagaagtagggaaaatttgttcatttgtttttatagtagaagcgttttcataatttgtggcgcgatgatttgatgcaggtaagagcagcaaagaagcaaactttcaactcttt

SEQ ID NO: 1191 - DNA, 901 bp, Arabidopsis thaliana
  Intron number 1 from transcript AT1G44750.2 (locus AT1G447 50) derived from phytozome v7.0 (chr-ID Chr1; pos 16892696 to 16893596)
ggaaccagttcgtgttcttgttaccggagctgcaggtaatttcagattttaccgatcttgtttcttctatctctcgttatcgattcgtatcgccagatctttatatagcaccaatttttcataatcagaaaatttaatcgatccttgaaccatattttggattcctatactgtgatctgaagagacaaatgtattcgatcaaaatttcgctttagaaaagtagagttttggtttttcttttacttttgagtgaatcatgctataatgtgagatctaattgtttaattttttttttaaatcattgtttcataatagaatcattgttttatttttaaaaggaattttggttaaatatatttaatatattaattaattagattttaaaatgttaacttatgagtggttactctgtattagttgtgtaaaattctataaattttggtttaatattacataattataattacttatcttccttttttataagtttaatattacataattataattatttagtttcttatttttataagtttaaatttaatatttgttatttttcttttaacaagaaaatagaaaataattactctttatgttcctttttgtttgattttctaggaaaaaaattgttttaaaaagattgattttttttaagtttttaatacaatatttattaggtttttaataaaaaataattgaatattatacttttaaaattatagaaaattataaaatacagaaaataatacacttaaaattaactttaatatatttactttaaaatttatgttttttctaaacaataaaggaacaaaaagtactattttcaaaaatattaattaaataaatattaattatcgatgtggcaggataataaatcggattggataaccggccaaac

SEQ ID NO: 1192 - DNA, 840 bp, Arabidopsis thaliana
  Intron number 1 from transcript AT1G44760.1 (locus AT1G447 60) derived from phytozome v7.0 (chr-ID Chr1; pos 16897254 to 16898093 reverse strand)
ctcttggttctctttgcaaagcttgtaaacccgaggtacttattaaaattactaatactccaacaaaaaaataaaaattaagcttactattactattattttatctaaaaggttctaattaagctttaatgcatatcttatggattatgaaaactattagttagagaagtaataatctcatatttatgttttaattttgttgttgtttttggttaatgtaaagttgtgttgaactacttgagtattggagtagtgcatgcgtgagagaatctcatgtctatgtgatggccatagcccatagtgactgatagctccttactttgttttttttttctcaaaagaaattatttttgattgtgagaaaatactttcatcattattcattctgtaaagtaagctttttccaattaaaatgcagcttttctcttagtttagatctaatgttttaaaactcgctattagttagatctagagtatatttagtttggtaacatacatgttttgttacttgaaaactgttcttacccatttaagatttactttacttagcattttaaaattgaaagttgttcaaaaacaactaacatagtaacatgtaatcaggtagagttatttgtaggttttctattttctaagtaaactgccgagatatttttttttaatgtaacaactcaccactttttagttataattaattacttgcaaaattccatgtgattttttatattactttgaagaattttataatatattttttgcatcaagatatgtgacatcttcaaaaagataacttgtgagaagacaattataatatgtcaatttctatttctaaaaaggtgg

SEQ ID NO: 1193 - DNA, 630 bp, Arabidopsis thaliana
  Intron number 2 from transcript AT1G44980.1 (locus AT1G449 80) derived from phytozome v7.0 (chr-ID Chr1; pos 17004877 to 17005506 reverse strand)
aggtgataaaacaaaaacctaatatttttcagttataatttgataatcgtatagttagatttctatctataaactggtaacctttaaaatacaccaatctttcaggaaaaaacgtaaatatatatacactttgtgtaatagattcactaaactaatttgattatggaaaaaattaaattatgttcattttatttttggatgtttgttcttctaaagcttgattaatattttttggagctattagaggtaatttctctaaaaacattacattaaattttcttattaaaaacgttgttacttgcgcatcataatcacaaaaagctcatcatatctttatataaaaacttaaccaaaaagatatcaaaactcaagatggaccaagaaaataataacccaaaaatctaaagcccaatgtttctgataaaaacaatcatagttgggcatcatgatcacaaaaggctcactataatttatgaataaccataaaccccaaaaaccaatatggtcccagaaattaagcaacaatggagaaacaattccccctttttttttctttctaatgcgcatagaatttcttatgtttcttataaatcagactctaaagaaaattaccgatattctggtcgcgaa

SEQ ID NO: 1194 - DNA, 673 bp, Arabidopsis thaliana
  Intron number 1 from transcript AT1G45145.1 (locus AT1G451 45) derived from phytozome v7.0 (chr-ID Chr1; pos 17075511 to 17076183 reverse strand)
aatccaagaaactggtacttttctcttcttctcctctctagggtttcttcttctatttgatttgattactttacttagggttttcagttttcttgatctagtggtaaactggtaattcatgttagatacaaaaccttggtttttatcatgttcatgtaccatgtcttgatttggtctgaaatttgatagaaactggtattttctcgtcctgtctagggttttttttgttttttaatttgagttggttacgttacttagggtttagggctttcttggttagttagcttaatggtgaatgatgttcgagaaacggttgcttttgatcccgttcttgtcccatatcttgctctggtggtcccaaattgatagaagctagaactttctcttgtcctgtctagggttttgttcaatttgatttgattactttacttagggattacggttcgtcttgattagctaccttagtggtgaatgataattgtatcctgatatggtctgaaattatagaaactttactttctcttgttatgtccagggctttttttcaatttgatttgattacgttatggtttagggttttcttgattagttagtttagtggtgaatgatgtttgtgttctgatttgttctgaaattttgattgaaaccagattgtgatagacttcacagcatc

SEQ ID NO: 1195 - DNA, 543 bp, Arabidopsis thaliana
  Intron number 1 from transcript AT1G45201.1 (locus AT1G452 01) derived from phytozome v7.0 (chr-ID Chr1; pos 17124204 to 17124746)
tcaggtgagaaaatttaacaatatagcatactttagttcgttatatttacttatccctattaccaaatacttgaactcgaagaagattacatgtatttctttcttacatatgatataagtatcccaaagttttttaaaagaatcaatattgaaagatctcaaggaccaaatatcatacagttccacatattagtattccccatggacctttggacaaggaccaatgacacttacacaaatcaaacggatttgagacagaccgaaaattactctccatgcaagacgttatatagcacacatataaaaaaacaaacgaattatccatatattgcatcaagagctcaatttggttaaacaacctaaagagtttttattgcaacctaaactcttataggtcttaagaacattactggaattctaagacaactaatccaacttttttgatttttatatatggtgtttcacaagtatttttacaggactaacctaaaggccgaatttgttacaggaaagctggtcaagcctgacaaatcttcggcgacg

SEQ ID NO: 1196 - DNA, 884 bp, Arabidopsis thaliana
  Intron number 1 from transcript AT1G47250.1 (locus AT1G472 50) derived from phytozome v7.0 (chr-ID Chr1; pos 17319536 to 17320419)
gtcgtcttgttgttcatcttgctgataaagctcaggtaaattgagatttttgggttaacttttgaattttgacctagaatttgctaaagggtttagttttatgatgtgtgagtatctgaaagtttgaagctttatgtaattggagtaaagtttaggtttttattagcaatgtggccaattttatttgtagaatgtgtgtgttgttatgcaagtagtgatattggtttgtgatcaagtcttagtgattgggaattagagattcttgtgttgttaatcatatccagttctgttgctagttgcttaatccgattagaaagagttaacctgtatacccactttgacgatagaagtgtataagaatgtgatgattttggtcgtttggttgtttctgtgttgtcatcgtctgttctctttgcttgatagagttgtttttgcttgcaattctagaataaatatacgtctttgttgatctctttttggttttgtggttttgacttgtattactttgcatttgtttacttacttgtagttgtagtatgtcctggccactttatttacttgcctaatgaagtatattttcagtaagatgttggtttacagttgtgatagaaatttgtgctacatgttcactacttttggtgttaaacgtagtgttctcaagttagatgatgtgttcacaatttttaaaaggtttgattgctacgtcccacttactttcatgtctgtcaaaaattaagttagctgctgtatctacattttcaattgatttctgagaacgtattgatatcagtcttgtagtttgaacaacactctgatttcattcaaatgttaagtcatttgtttgtcttgtattaaacatcttcataaattatctttgagcaggt

SEQ ID NO: 1197 - DNA, 1047 bp, Arabidopsis thaliana
  Intron number 1 from transcript AT1G47340.1 (locus AT1G473 40) derived from phytozome v7.0 (chr-ID Chr1; pos 17355410 to 17356456 reverse strand)
ccgttgttcatccttcgccgccgttgatctcgtcggtgagttttaaaaattctctacatttctctcatttggtgaagaaaaacaaaaaaaaaactcttcttttggattctctcttttaccttttgcggttttttctaaggtttatgtttccgaattgaattttcagttcaaatttatgtctctgttacattcttcacaaaaaaatctcttcttttggattcttctctctatttacttttgctattttcttctaggatttatgtttgagagttcaggttttgtctctgttacattcacgttataggttcacttgtatcgttttcagcttcacaaacaaaactttagtaaggtgtttgatttacggagaaatccaaaatgttctcaaacacggtcattgtctctagctttggttgtggattttggttattatagctacctaaagttttgatttttggttattgtagctctctaaagtttttatttttggctattgtagcttcctgaagttatgattttttgttaaagttttgatttttaattactttagctagctaaagttttgatttttggctaaagttttgatttttggttattgtagcttcctgaagttatgatttttggttaaagttttgatttttagctaaagttttgatttttagctaaagttttgatttttggttattgtagcttcctgaagatatgatttttggttaaagttttgatttttggttatgatagctagctaaagttttgattgtagatattaaagttacgatatttggttattgtagctacctagagtaaatggtcttctgcttcttaaagttttgatttttgtttattgtagctatctaaagttttgattattgtttaaagtcatgatttttggttattgtagctagctaaagttttgatttttcgtttgaaatgctctcgttttgctatagctctcttaagggttgtttttcagttacaatttctctagttcttaatataagttttaacatctctctctctctctgtgtaggatcagcaaacagaacgttc

SEQ ID NO: 1198 - DNA, 385 bp, Arabidopsis thaliana
  Intron number 2 from transcript AT1G47570.2 (locus AT1G475 70) derived from phytozome v7.0 (chr-ID Chr1; pos 17479247 to 17479631)
ttgggtcaaagttctgccactatacataataagaggtatgccaataactattgaccttcactagcaaatgtcttgttataggtagacaaagttcttgttaagtttattaagactattcaaaaggattggtctttctaacttgaatatgaaagatcgttttatcgaaccagcagagggtagttgtaactagcttttagtatcactcgtttggtagctgcccattttgattaaatgaactcttaatttctggcttcacaattatctgttttcggtttctttgtaatcttctacgtgttggtgttttgttttgttagttcaccatcacatctttctttatttgtatttgtttgcgctttctgaattgtggtgtgcttgcttagttcgg

SEQ ID NO: 1199 - DNA, 765 bp, Arabidopsis thaliana
  Intron number 1 from transcript AT1G47670.1 (locus AT1G476 70) derived from phytozome v7.0 (chr-ID Chr1; pos 17538380 to 17539144 reverse strand)
cttgttcttcccgtcgcgtttgcgtttcttggctggtgcgtttgcgtttttcttgatttttccaataatcttttttcttgtttttgagttttttcttgaactttgtgtttagtgtttcaagattatttttgtttagtgaacggcgagggtttattcgactctctgtggtgctcagatccagtttcagggttcactttacttgtttgggcaaaaatcaaaaatgtttttcttgtcggaaataataataggatattgactaatttactttttaactttgaaaacatttcaattttagcagtagatattttctttttaatttgtcatgcttccatcattacacatgtggatactcacagacatacttttttgctttaatttggattaagacagagccttctttatcgtctactttgtttcttgttaatttccggcaaaaaacacttttctgaaaagtatttattgtgtatatataagtagggcatgtagttgacgtcataatagatgactatttcttcttataaacttatatttagataaatattttttattgcaagttctaatatttgaaactatacataacttgttaaggtggagcatttggctagttcaatacttaaatagcttagtgatgaataatgatattgcaatgatcatgtatttgagattcttatgtaagaaaatgcacatatattatttccaaacttcaagaagtgaattattgttgttacaggagttggggaatactgtctttaacaatagcatatt

SEQ ID NO: 1200 - DNA, 679 bp, Arabidopsis thaliana
  Intron number 1 from transcript AT1G47710.1 (locus AT1G477 10) derived from phytozome v7.0 (chr-ID Chr1; pos 17558626 to 17559304)
aagctgcttcgaatcaagctgattttcaatcgaaggtgagttttctgatttgattacttggttctgtgatctagacttagttcttcaggtacagaggaactttgtgtggattgtaatagaatcactcttaggccaaaatgtggaatttttgtttctgaattttacacttgaggatctgtatatgatcgtattagggtggcttgtgatttgattctacagaaatcttgctctcgaattcgttttattgattgcaatatgattactacattttgattctgcttcctagggtgttgtaaatactaactttgtgtggattttagtagacacaatcaaaggccaaaatgtggatttgttgttttcattatgttaccctgaggatctgtataggttcattgtttcttatggatcttttggttttgtgtgaaatttgagtggcttgtgatgtgattactacgttttgattctgtggctgtgtctagggtttcttatgcatcttggtttgtgtggaattttgagtggcttgtgattcgatgtactgatagggttaaggtcgattattctgttttgaaggctgtggaaatgaggtttttaaaaggtttgtgatttgatgtactgattgggtttatgtttgataatttttgtttttgaaggctgtggaggtgattgctgaagtgaattc

SEQ ID NO: 1201 - DNA, 896 bp, Arabidopsis thaliana
  Intron number 1 from transcript AT1G48000.1 (locus AT1G480 00) derived from phytozome v7.0 (chr-ID Chr1; pos 17705312 to 17706207 reverse strand)
gaactccctctctcgttctgctggtaacttcttaagccttttgcatatatatatacagaatatgtgatcatgcatgatatataatatgtaatgcgtaaatcgatcgattcagatcaattgaagtcatcataacaaatccttatatgcccatatcatatctctagagtgattgttaaactatcattgatttgaatggttaaagtttggtattgaaggattctttatatgtcaaacaagtagtccgtttttgttttttaaacatttagactgaaacttttttttttcttattagaaattcgttttggattttgtggattttaatatgatcatgtgaagtttagtttagagtttatttataactaactgaaattaaatggagtagatataaaaactcgtccacatcttatcaatatgttattcaatttctatcacatcatatgtgagtgatatacatatatgaatgtgatttttcgtaactatgagaatacttttcttatggctgtgacttctccatgtcggcataatttaaattcctctgtagaattggtaaagtaagaaagaacaagttgacatattcatagttcattattatcattaaaagtgtactttcgtatgaaacagtttggtcggtccaaatttatttattttttcctttggagttcttttcatattagccttttgagtgtggaactcaaacacctttcccaaccatccaattccatacagcctcatggaattgttatctttattgatttgggaaattgtactagtgtccatatactattgactagtgtacattccagttaattcatgtttttatactaattgtatttatattgaaatcatttactattgagacaggactgaatagaacggggaaaagttgcagattgcgg

SEQ ID NO: 1202 - DNA, 521 bp, Arabidopsis thaliana
  Intron number 1 from transcript AT1G48040.1 (locus AT1G480 40) derived from phytozome v7.0 (chr-ID Chr1; pos 17721042 to 17721562 reverse strand)
tttcgggttccgctgaaacgcctcgattcggatcggtatgtgtttttggtttcttgttctaaaaatcgctcatttttattaattgggtttcttagaaatttcccttagaaattagatcatgtggattcttctttctcgtaattgagtttgttggtttagattaggagttataatttgattttgagattagaccgttgcttgaaattctgataatgatccgattctgcatcagggcttatattagttttgggtttctttttgttctctattgcataataatgttgaatcctacataccctcttcgattaggttcgtgtagacaatggaaaatgataagattagtgttgtgctttggaaagtttatacctttgcatgaagaattagtttaggtgttcatgaatcaattttacattgttagcggaacgactctgatgctctgttctggctgttctgtttctttaattgtgccaagttcaggaatcttaaacaaaccttcttatgtacatttgttgtaacagggc

SEQ ID NO: 1203 - DNA, 409 bp, Arabidopsis thaliana
  Intron number 1 from transcript AT1G48050.1 (locus AT1G480 50) derived from phytozome v7.0 (chr-ID Chr1; pos 17723501 to 17723909)
gcacgaaatcgggtataatttcttctaatcttacttcgttacatattaaccttcgtttttttttcttataggtttcttcagaaatcaattcaatgaaattaataccttcttcagcttctgtttgttttccatcgatgtttctttttctacttagtttcgtgcatgttattctacattgctgcataccatttcttctttgataattctgtttatgctgattttgacttcgttttatgctcaattatgttctggatatctcattgattcatttttggaactgttcttggagtaatttagggttttaatttgtcatttcatttgagagaaattagtcctgctcgattttacttttaattcgatgtgtgtgtgtgtgttcatcggaagcaggagggtttggttttggtgctcg

SEQ ID NO: 1204 - DNA, 1023 bp, Arabidopsis thaliana
  Intron number 4 from transcript AT1G48160.1 (locus AT1G481 60) derived from phytozome v7.0 (chr-ID Chr1; pos 17786929 to 17787951 reverse strand)
gtactttactcaatccagccattacttcaagtaagacctctcatctgtactcctgattatatctccgatcgctgtagaacatttttgtcttttgtgttttcttttaatgttatcctagtgtgatcaatcagattaagctagaaaatggaatctgctttatttactttacttactcttgttgtgttgttaagatctctccttgttacccatgtttggacttcttcaatcttccgacaaatgttgcctgatactagcctgcttgttatcaaatctctggtcgctaatcttaactttctgctttgttttatcacatacaaccctgaatcaaactttttcattgataatttagtcatcatcaccaatttcaatctttgatctggaggctttatgagctgttccagggatccatacatttttcatttatggtcagtatcattattctcatgtggggaaacaagctgttatacattatgtatatttcaatcctatgcacatggaacttaccgcagcaattatctgagtctttagatatttatgtttgttatgatagtgttaccgaaatatcaccttatgctaagtttatctgattttcttcttcacaaattctttttcaattcattgtgctatatcttgaatttttttggttgttattgtcgcatatggtcacagcagactcagatacagaaataacctatatagaacttgtttatttcaagcattttttgacaaattgcaagacttcagatgcgtttgtgtttgtgtttgtgtttgtgtatgcgtacgcatttgatactgttgataaaaccattttccacattgctggttttttagacgtttgtgcttactttgaccttatatccttatcatgcccaggaaagtgtaattatatgaatatacttttggcttgctgctttgcatgctttgaacgaaaagagtccacctgtgagaacactgcaagttgtttcctacagacatatgatgatgtgctcttgtgttgatatatattttgcagggaagcatctg

SEQ ID NO: 1205 - DNA, 706 bp, Arabidopsis thaliana
  Intron number 2 from transcript AT1G49140.1 (locus AT1G491 40) derived from phytozome v7.0 (chr-ID Chr1; pos 18176988 to 18177693 reverse strand)
ttgtgtgcgtgattgatctttggtaagtaactggtgttgattagttatatagtgtgtattgcttagaagaggagaaaggttagactttctagcatgctttgtgtagacactatcttataactggacatgttatgtgaatctgtttgtggtaggagaaaattggaatatggatgtttggatagttatatgtatgaactgatcaggtcttagagtgacttagttttgcggaagttgtggatacactggttaattattgatatcaatctgactgcaatcacaaaggttaaagcttagtcatggactttcttcggtggttttagaaacaggacatgttttggaatgtatagaaatgaaattgatagatcttggagtgactcaattttggagacatatgggccgatattatagataccaatccgcttgcaattgcgtccatctttaatctgcaacagagctaaacctagtcacagaatttcattgatgaattaattatttgagatatgagatgttgtggactgtatgaagaaggatagagctccaacatttaggttttgattggtttaaacaatagttccaatagggttaaggcatatagtcaaaatctcaagttcaaattggattgatgatttttgtatttggttcaaagattttaaaggttttttcttgctccaatgacacaggtgagtgagagctttgattaccatac

SEQ ID NO: 1206 - DNA, 505 bp, Arabidopsis thaliana
  Intron number 1 from transcript AT1G49240.1 (locus AT1G492 40) derived from phytozome v7.0 (chr-ID Chr1; pos 18216034 to 18216538)
tctctcgatcttctgcttttgcttttccgattaaggtaattaaaacctccgatctacttgttcttgtgttggatctcgattacgatttctaagttacttcaaaagttgtttccgatttgattttgattggaatttagatcggtcaaactattggaaatttttgatcctggctccgattagctcaacgattcatgtttgacttgatcttgcgttgtatttgaaatcgatccggatcctttcgcttcttctgtcaataggaatctgaaatttgaaatgttagttgaagtttgacttcagattctgttgatttattgactgtaacattttgtcttccgatgagtatggattcgttgaaatctgctttcattatgattctattgatagatacatcatacattgaattgaatctactcatgaatgaaaagcctggtttgattaagcaagtgttttcggttttctcgatcaagattcagatctttatgtttttgattgcagatcgtagacc

SEQ ID NO: 1207 - DNA, 696 bp, Arabidopsis thaliana
  Intron number 1 from transcript AT1G49300.1 (locus AT1G493 00) derived from phytozome v7.0 (chr-ID Chr1; pos 18234860 to 18235555)
actctcctcaaagtcatcatcctcggtgatagcgggtaaggaactctttctctctttacatgttgatttagtgttttttcgatcagtaagtaaatactttttctggtttcgaatttttgaagattgaagtcgaattttgtgtattaccttttgattggattcgatctgaattggtgtgatctcttaggttgttgatttctgtgtcttctggatttaattgttctgtagttacttggaattgaattgtgaagtgatgattagagattggattagttctcgtgggaaggtttgtaatcacatgaaagattagtagaattagtctcaagtaatgatgctgctatcttaaggtcatgtctgatttttctctcagtatgattcagatttggtgttcttgttgtctactggaaagattgaatagtgaatcttgtatcatattcaacatttgtattatccttctgttggaatttgcaatcttttataagaaatcattcggtctagtgttcgcaatcaagtaagaatttgttgttaacctgtttttttcttggtgagtgagagtgaatatgttgtgaatcagatattgtatgttgtgatacctagtgaagctgttgaactatgactctaaaagtcttattgttgtgtttatcgaagttaagaattttgaatttgtgattttgcagggttgggaagacttcttta

SEQ ID NO: 1208 - DNA, 314 bp, Arabidopsis thaliana
  Intron number 1 from transcript AT1G49980.1 (locus AT1G499 80) derived from phytozome v7.0 (chr-ID Chr1; pos 18508076 to 18508389)
atcctacaataccgtcttcactaacgcgaaagccggtttgttcccgattattccccaatagtgtttttcttctttagcaaattttcaggattctttcgtgaattgtttcttccagagttcaaaatttcttgaaaattgatcaattcgttgatcatgggttatagttgactggtctttgaacatatttcttatgtgttgttttgaagatttaattgcggaatatcaaaatcttaaatttgcatctttagttattgattgatgtttgagttaaatttctaaactcgtcgatgtttctgtgtgtatgttccttaggt

SEQ ID NO: 1209 - DNA, 474 bp, Arabidopsis thaliana
  Intron number 1 from transcript AT1G50010.1 (locus AT1G500 10) derived from phytozome v7.0 (chr-ID Chr1; pos 18517822 to 18518295)
gcattcaggttcgtctcttcctcttctatcttgatctgtgtttttcttcatatttttcgtattttaaaagatcaaatctgagatatttttgcgcagcattgacctcgtagatctattttacgtaatcgtttagatctgtgtttgatttcgacgtcttatgaaatttctgtggttgatgcgaaatccgtttctcatttctaaattattcgatgaacctggatagatctgtgtttgaattggatttcatgtcagattgcttttgctgatgccatatccgtatttgttttataatattgggtgaaggaaaactttgctttatttgcttaaagagatggcgattgatatttgcgatatagttgaagcatctcgttgtgattttctcttttcatcgttgcttctatatgtgtagatcttttcgttttatatgtctctttgtattgatgtgttgtcttggatgtggaatgttacagcctg

SEQ ID NO: 1210 - DNA, 965 bp, Arabidopsis thaliana
  Intron number 2 from transcript AT1G50220.1 (locus AT1G502 20) derived from phytozome v7.0 (chr-ID Chr1; pos 18603339 to 18604303 reverse strand)
tcggctaggtttaaggaactatacattactgagaggtaagaaattctcagcttattatattctcgattcgctagaacaattcaggatttaacttagcctcgagtgaatattaggcaatccgtttgattaccatctgatttcaggatttaacttagtctcgagtgaatagcagagaagacttcttcaatcgaacattaggcaatccgtttgacgaacattagattatatgatttttgactttttcgcttgtaatttgatttactagttccttataattaagaaaacacttatggtggcttctaaggaattagtgttatgtgttttagccaattagaactaaaaaccataatttacataaacttttaatgaaactaagagattttgcatggccagtagtacaacttccaaggatctggtggtagttacctcttaaaagaaacttctactctttctgccatatgactgcgagatgtatcaatgtactcaatgttcttctccgaagttaagaagttaatgattcgatggatccgatagatttacccaaatcttttccaaaattattgtaatcttgtttttaccttttttttgtcaagattacatttgttttaggtactccaatatgtaagtccgaactttcatttatatgaatattaacattttagcaaaaaatgttaagaaaatctgagcttcattttgatgccttgaatcaataactttctttccaagttacaatgccctcttgccattttccgtttcgggagtattaaggaaattattaaacaatctccttttttccgataagaaaaatttctattttgttaacggaagaattggagtccttttctcttgtattttcctttcttcttgggttaagcctcctataaatatgtttacatctaagaacacgaaatataaacaaattttctttctacttgcaaaagatctagggttaaaattttagcaag

SEQ ID NO: 1211 - DNA, 513 bp, Arabidopsis thaliana
  Intron number 1 from transcript AT1G50370.1 (locus AT1G503 70) derived from phytozome v7.0 (chr-ID Chr1; pos 18658940 to 18659452)
tctctgaggacgagcttcaacttctctgcgaatacgtacgccttcttcttctttcttctttcttctcttgcttgctttctcttccccgaatattcatgcatctacaaaaacccaattcttcgcttactcttttgagactttagagcttgctttgtggcactttactttgaatctggtctctctcccttactgtttcctttgccattttggtctacggattttagggtttttctctcatttttccaatagaggatttattgactttgctatttcaattctaaattctaaggaattagggataagtttagctcttctttagccaatttatggatgcaccaagtccacgcttgcaaactgttatttgaggatttattatagtaattttagtgttgaaacttgtagtagcagccgtcttcttcttttttcatgacaatgatttgctaagatactctggtaattcacaagatattttgactattatataggtgaaagaaattcttattgaggaatcaa

SEQ ID NO: 1212 - DNA, 413 bp, Arabidopsis thaliana
  Intron number 1 from transcript AT1G51160.2 (locus AT1G511 60) derived from phytozome v7.0 (chr-ID Chr1; pos 18949629 to 18950041)
ccatcgccaaaaacttgtcttttgcttcttatttggtaagcttgcatttttctctcacccaatttctaatttcatgcttattagatcgttaattgaatctgcatcccgcagtgatcattctttgatttacgaatttgtttttttgttgtgattgataatcttgttgtcgatttttgtcaattttatggtttaatttacaaagtgtatattgtgattgaatcgactgggagggtattgagagttgtttgtttgaatctaacaaattcaagtgcaaatctattttatagccacttatcttctgctagtagatctacttgagttttaagagatgtgacttctttaataccattgtgaatttcatggctaactgataaaaaggtctcagctctgatcttttgattcaacggctcccg

SEQ ID NO: 1213 - DNA, 420 bp, Arabidopsis thaliana
  Intron number 1 from transcript AT1G51160.1 (locus AT1G511 60) derived from phytozome v7.0 (chr-ID Chr1; pos 18949629 to 18950048)
ccatcgccaaaaacttgtcttttgcttcttatttggtaagcttgcatttttctctcacccaatttctaatttcatgcttattagatcgttaattgaatctgcatcccgcagtgatcattctttgatttacgaatttgtttttttgttgtgattgataatcttgttgtcgatttttgtcaattttatggtttaatttacaaagtgtatattgtgattgaatcgactgggagggtattgagagttgtttgtttgaatctaacaaattcaagtgcaaatctattttatagccacttatcttctgctagtagatctacttgagttttaagagatgtgacttctttaataccattgtgaatttcatggctaactgataaaaaggtctcagctctgatcttttgattcaacggctcccggagacga

SEQ ID NO: 1214 - DNA, 802 bp, Arabidopsis thaliana
  Intron number 1 from transcript AT1G51650.1 (locus AT1G516 50) derived from phytozome v7.0 (chr-ID Chr1; pos 19152846 to 19153647)
gaaagccccagaaacctggtaagccttttcgatcctttaatcgtcgatgttggatcttagatctggattcttcacgttcttgtgttctcgattcctgatttgtttttgagtaatttgttggaataatctgatttcctaaaagttatcggaattaagtggaaagtgaatcatctgcttctggatttgatcttcgattttgcatttaacctttcctctgcttctggatttgatcagttcaatactatcttcatacaatgttgttatgtccaaattgttgaatttttcatttagagttagcttcagagaaaacaacaaaactagtagtatgtgtgaaacaagaacatgaagaagatggaaagctgattgggaacattgcatttagatgtcttttctcgtttatgtttggatctgaattcttcatgttcttgttgtgtgtcattgaaattgttggaatacgtagatatcagagtaggtcattttgggaaagctattgaatttaagaggaagatgaatcattttaacaagctccatcgattttgcgcttaatctgtctctcttctgcttctggatttgattaatttcattctattttgttttctcataagttgttgttatgttcaaattgttgaatttggaatgatttcatttctcaaatagggtttactgagacaatgattccagatttagtctatctgaaaatggttcagctttcttcttgttgatccatttgtctaacattctctcatgtttttgtttttccttgacagttttgcggtcagacacacctgaagtttgaagtcaa

SEQ ID NO: 1215 - DNA, 716 bp, Arabidopsis thaliana
  Intron number 1 from transcript AT1G51790.1 (locus AT1G517 90) derived from phytozome v7.0 (chr-ID Chr1; pos 19210637 to 19211352 reverse strand)
ttattccgacagacttcaggagaaggaaaaaaaaagtaagcgtgtagctaggtcaacttacgtgaagatcttaattaggttttctcttttgtactagtcgtaggcataacaacttttttctatcaaaaaaaggaaatttgcaagaatttacaaaaaataaactaatcacttcaaaataacccttaatttactacaattttaactattttcggtatcagaatatcgatttgatacaaattctcagcaacaatctccctttatattgattcttccgacacaagtttctgatttacacaccatttaccaagtggttttgttcaaacaaatcatggtgcaagacactttttacccaattgtcttgttaggttacaaagttatagattttctgacccattttttacagaacaattacagagtagagaacccatgtgaacataagcattttgttttggtcaaaccaaagaaattaagaaagtctctggtttttgtctacacatatcgttgacttgttcattaacatatacacaagttatctaaagaaatcaactaaagaaaaaacaagttggctttcttgttgattagtgttctacttgctgttagataatgatttatacgttgtgacttgtgagcacacaaaattgatatctaccaaagagttgacattgtcttcaagttgttgactttgaacccaaaaaaaactctggtgtttctcagaa

SEQ ID NO: 1216 - DNA, 485 bp, Arabidopsis thaliana
  Intron number 1 from transcript AT1G52070.1 (locus AT1G520 70) derived from phytozome v7.0 (chr-ID Chr1; pos 19366405 to 19366889 reverse strand)
ctatatatttctttttctctcctcagccattataggtaactaagctctccttatccacacttttttatttacaccactgatgtttaatactaaggagatcagcttccttatgatccactatttacacacgccaatagtcttattccctcttcttcactaaaatatatataacactatcacataatgttataatgagataataattacatatgaacataacactatatatatagtaagttttgaatatggtatgaatttattttgtttgttttttggcaacatcaaatataggtttgttataaattttgcataaaatttccaggcaagccattccttctcttttaaaaacaattggtggtgtcttggtatataatatttattttcgagacagaaagtatattgaatataattagaaaacacaataccctaatttaaattttatgttgaaagattcaactgggttggcaaaggcccaaaagttggat

SEQ ID NO: 1217 - DNA, 902 bp, Arabidopsis thaliana
  Intron number 1 from transcript AT1G52380.1 (locus AT1G523 80) derived from phytozome v7.0 (chr-ID Chr1; pos 19509071 to 19509972)
tctctgctactgctgcggctccggctcctgctacggtaagtccttgccattttctcgtcaccggtcactttcttcgaatcttaggtttcttcattatcgggtttatcggaaatggtttgtctcagggttagctactttgattctagggttttgtcatgctcttgtttgttctggaaatagtttccggtcatttcttttattttggttcttgatagttgctttgatgattagggtttttggtatttaactcgtgttgagatcgagtttcagattttttcttcactcatcgaataatttctgaagatgctttggggtttactcgattgttgcagctaacaggagtttctcttaaatttgataggttcctaaaatcgaatttgggtttttgtttcctccgatttaaaatctcttttcatctaggtttatagatttgaggataataacaaagtcactgatgttgaatttttcattggttttagatttataagtcactgtatttgcatttcttatatctaagtttagccctacttcttctgttccttaccttggagtgttaacatataattagctgtcttctttgaatacattttaaggctttctggatatttgcataaggtaacgagcagcctctgtagttttcactttccattgcattgtcatgttaaagcttttgtcttcttagatttggcattactcatcatcatctgtggctgcaaactgatccggtgtgtgtgttttacctttggaacggtgttttgcattgtaatgttttatctctgttttcaaaaattggatttttatctgttattatctttgaagggtattgtttcattggactttctttgtttgtctgtgtttttttattaggtatttgacaagtgtgttgacattctctcataaca

SEQ ID NO: 1218 - DNA, 457 bp, Arabidopsis thaliana
  Intron number 1 from transcript AT1G52500.2 (locus AT1G525 00) derived from phytozome v7.0 (chr-ID Chr1; pos 19560237 to 19560693)
attagattccccgccatttccttcttttcaattcggtaagttctctctgaaacagaattagggttttacatcttaaaaatcagaactttagatggaatcaaatcaattacgtcaaaattggaaatttgacgaaatgcaggactgttcatagttcaatgctagaccttttttgctgtgattcattatcaaaggagtgaaagtgtttggctttattgtttcgttgaacttataaatggttttggttttgctttaatgtgtgttcttgaggaatctaatttcagggttttacttttccattttatccaaattcaggacttgattgaataatttcatcaaaatcgaacatctgttaaaatgcaggactgtttttgctttgatttatgaaaaaaagagtgaaagtgtttggctttattgtttcttcgaaattttgattttggtttatgtgttttcttcaggt

SEQ ID NO: 1219 - DNA, 761 bp, Arabidopsis thaliana
  Intron number 1 from transcript AT1G52600.1 (locus AT1G526 00) derived from phytozome v7.0 (chr-ID Chr1; pos 19590656 to 19591416)
gattcgtcagcttttcactcaggccatcagtctaggttcgttctccgttcttcatctaatcgaactcagtccgatttggatttctgtgtccttatatcgatgaattggctttaaggtttcactaatgtatgaacttcgctgctccaaagttgaaaatttgcagtaaattagagacctttttggttaattagaattgatgaagtcgatggtgttccatttgtgattgttttcctgaaaaattaggtctaattccgagtatattactagtcttacttgcgaaatgttaaagtttgagactttttgtttttgttctgagctaacatgattagacacctgatgatttattggtggttggattattggttttcaatatgattctgcttctgtgttttcgtctcatcgaattcagtccaatttggatttccgtgaccgattttacagttcgagtggcgttttgttatttgaataaagttgagatctttccagaaaattagagacccctttggttattagaattaatgaagttgatggtgtttcattagatcgtttactagtcttacatgcgattttgaagtatatagtcttttgaggggaaatgttattgttaaagtttgtgacctttttttttgttcttagctaacaagattagacacctgattgtttattggtggttgaattatttgttttcaatatgagttatatgacagaagttgtgtcttaagtgaatgataaattgctctctgtgttgaattctggtaggg

SEQ ID NO: 1220 - DNA, 966 bp, Arabidopsis thaliana
  Intron number 1 from transcript AT1G53030.1 (locus AT1G530 30) derived from phytozome v7.0 (chr-ID Chr1; pos 19760443 to 19761408 reverse strand)
tttcttgactcttcctcattcaagccgatcaaagggtcagtttttttcgttaatctcttaagttcccttatctcgcctatcggaagaacatatgattgtgcgaatgaatttatcaaaaaaaattcctgaattttgtgttgattatctgtttgcttgatttgaggttcaataggattagagtgttacaaaataagcttctaatatttcattgatgagatggttaatttcactaaggaatgagaatttgtgatttggggttcggggtttaaagtttattttagggttttacctgattgctggtgaaaacaaatcaacatgaatttatcaatcactcaaaaaagatttagaatccgttcgttgtgtttggtaattaagtgttccaaaatttatctctttagtagctgattcatgtaaagcttgtttttttaagtggaaccaagtaagttcattaagaaggattgtcttcaaggattatccctcttttgcattgtggatgaaaaagcagttttgtaaatttcacttagaagagcattcaggttgattgttttatctgtgtctggtaaatgattgagtgtgaggttttaaacttcttggtgtaaccagtaacaaaaagaagctcttattaaagattatcactctttcgcttaatttctgaaacacctgtgtatcgattaatcttagaagattcatatgattagtgtttaatgtttatgtttgtggataccaatgttcttgtttcttctaattgatcattggttttggttattgtctatagcaattcttagaagagcatttattcatctcctgatctaccctttgaagcatcaaatgttttaaccgaaattactttttttttttttttttttttcacatccgaaattactttgataatgctctttggttattgttgaatgtggtttcgatatttggcctaacattctgagattatgatgataggtcggaggg

SEQ ID NO: 1221 - DNA, 816 bp, Arabidopsis thaliana
  Intron number 1 from transcript AT1G53430.1 (locus AT1G534 30) derived from phytozome v7.0 (chr-ID Chr1; pos 19935401 to 19936216)
aaggttcgtttcactattttaaatccacatctcaactaaatttcttcaattttattttcaactcctcaattctacttagtttcgaagcaaaataatttagatgctgctttactaaaaaagaaacttttagagaaagaaagttatcctttagcaaattatcgaattaactgtattttttgttgtccttgttcaaaaaatatatgtatattaaattccacgggagatttatgaagttgtcaaaaggttttccattattaccttttggtataagcgtgatttttctctaaaaagtcgcatttcaaacctaagatgggaattttatttgtgtggtcatatttgacaaataaaaagctggaaaatattggatttattcaagttcgaggacctacctcaataattgaatggtattggtcgtcgtagctgcacgatgcaagagttaaaaaaattaggtacacataaatattacttgactaaacgaatatacgcgttttccgttttttcatgtataagcaagatgttaatttcatttgtatctcaaattctgaatgatttatgctatactaggttaatatgtaaatgtgtgatttactttagaattttgtttttctaacatttggataatgtatattttttcttaaggatgtgttaataaacaaataattatatctcaatatggcaagttaggtcaatgagagagacgttgggatttgagatatttatattggactttcctcatttatgccaaagttttgacttcaaatgtttgaccaattttgcacagttcaaacattgcgaacgatctttagaaagcttcaa

SEQ ID NO: 1222 - DNA, 414 bp, Arabidopsis thaliana
  Intron number 1 from transcript AT1G53720.1 (locus AT1G537 20) derived from phytozome v7.0 (chr-ID Chr1; pos 20056598 to 20057011)
gcacctctcttcttctctcgctctctgtttctgaggtttgttcgtatttctcatcgatcgtatctttttattttcctctattcattgacgatgtacgaagacattgctcacgaatcgcgattgttgattctttgtgcataggtttaggtatttttgttcgtcttgatgtttagatgagtaagatgatagcgattaagtaaaaatttgctaaggaaatcatcattagggaaagtatttaggggttttgatttagtagtgagtgagtgattaattgattgattgtttgtttgagagatatttagggcttctttcatgttgaatgactctgttctctaatatctgttcttagttattgtttataaagatgaatactcactctgattgattttctttaggttctgcaagaagtaaaac

SEQ ID NO: 1223 - DNA, 282 bp, Arabidopsis thaliana
  Intron number 5 from transcript AT1G54210.1 (locus AT1G542 10) derived from phytozome v7.0 (chr-ID Chr1; pos 20242016 to 20242297)
gctaaaactgaagactacagaattctcaaagctgtgtaagcacattattttctttttctgttactctctttcttctctggtaaagataatctacaaaactttgatgtgatgtgttctcctattgaacttcaactgaactttctagtttcttcagttctggaagtttaaccaaaatctaagttacatcttttcataactgatgatgagtgaaaggacatggtatatgagtatcaccattaagtcgattataacttgagctttattgtttcaggctcgcgctag

SEQ ID NO: 1224 - DNA, 777 bp, Arabidopsis thaliana
  Intron number 1 from transcript AT1G55000.3 (locus AT1G550 00) derived from phytozome v7.0 (chr-ID Chr1; pos 20515009 to 20515785)
gtgtgactagcctcgccgtcaaatacgccgttcaggtaactattgattacttcatgcaattcttattaatttgaaatgtaatctcagtttttgtgttcttcgtcataatcctttggaattttttgtgatgcatttttttctggattttagtaatacttatgaatattcatgtgatacttagtaatttgttgtttagttcagctataaatttggattgtttagaattaaagagtaacttaagaatctatgtagatcctgaagcagagtttttgactgaggtttgcttcgggatactgtggaagctaaatgctttcgtttatcgtgtgtaaatgtttgcatctttaaagtttgcttatagatactcttgaagctaaactttttttaacttcgtgtaacgatttcgaggcataagtgataagtttttcttggtgattggttgctctttcttttctctactccgaaatagctattggaactgtgaaagataacaccacactaccaacttttgggctctgttttttggtatctgatctcgttgcttttgattcgctgacgagtatgctaggaacagattgtttgtttagtaactcgaactccgcgtattagtaagttttttggttgcacctagatagagactactatcagacgaaagatagagttttaccgaaaatggacttttagtctaaacaacatgatgatcgaccatggtatttaccgaaaatggacttttagtaactggattttaatattacaccttgtttttgaacaatgtaggtt

SEQ ID NO: 1225 - DNA, 751 bp, Arabidopsis thaliana
  Intron number 1 from transcript AT1G55260.1 (locus AT1G552 60) derived from phytozome v7.0 (chr-ID Chr1; pos 20615094 to 20615844)
tcatatcacggctcctaacatcactgactgtatttgtaagtctttatgtctctctcttctatattctctactattatatgtataataagacatatatgcttgaagtttatttgattttttaaaagttttctgaagcttttttttttttttacaagaatctataaatgataagcatattgattttttttcttcttagttttgaccttttaaagtcgatttttggagatcgcatactagatataatccatagtacaatgtacagtttaatatgatgaagaattcttcatttaactgatatactatatggaaatgacagaagtttataatatattatacacaacatatgaagtattcatttttttatttttatgatcatgaagtattcttatttatgaattgctttagcatgtacaatatattttcttcttttatgttttcattattttagttttgatataattttggatatgccatattaggtaaatcatagtacaatgtacagttttatgatttagattatgaaatattcttcattttagttgttatacgtaccatatggaaataatttttaaattccattgatttgataaactaatgataagtaccttttttactacctagtacaattttttattaattactgtgaagttttaaattaagttagttaacatattttatttttgtttgtttgcatatttgatttatgcatggtaaagcgattctgcatctacctcgtaactcaacattggct

SEQ ID NO: 1226 - DNA, 575 bp, Arabidopsis thaliana
  Intron number 1 from transcript AT1G55310.2 (locus AT1G553 10) derived from phytozome v7.0 (chr-ID Chr1; pos 20630101 to 20630675)
ctccgtcgttcctcaccaccgagattcgttcaccggtaagtcttatccctgatattttgctcttcttcccaaccgtatatacccgtatcttcttctttctctgtcgaataaacttggcttttccgacttcgattccttcaattgtaaacaacttcgttgcccgtacaactttttgagtccggtgaaagatcccgtgacggaaaaaactgtagatcaggcaattattatgtctatacatcgatataaaggattgaatcgttcatcttaagtaagtttgacgaaagttgtgatcttttgtgcctattcacatataacgtttcttagctcctatcttttgaaattgagctgattcgatctctacctgaattgcatgtgatcttattttgatataatttactattcaattagaaaatatgatctttctagattgattgcttctttaaagttctcttagacgctggtgttatagctcttgtgtttgtggtctcttctctcttaaatatccaacctcttttggtgtattttctaatctagtttgtgttgactgactgatagagagattgaagcttgactca

SEQ ID NO: 1227 - DNA, 831 bp, Arabidopsis thaliana
  Intron number 3 from transcript AT1G55310.2 (locus AT1G553 10) derived from phytozome v7.0 (chr-ID Chr1; pos 20631085 to 20631915)
aaggacatttacctgccaagggattattataccgggtgagcatgttttgtaaataggacaaccaacacttgatttttacttatgttctgattagaaaatatccctattttcacatcttctttcttgatttgtttactacgtttatctgcctttcctttttctttcggtcatctctttgtgtcttctcatggatactagggccttatgagaatcttcttaaaaactgatttcataaattaaatttaggctccatatttttcagatagtaattttctgtgacatgacaatagacagtgagcatacttgtggtcttaaaccactagttttcggtgtcgttaggtggattagtcgtttagaatttagtacctggtgagacctcatagtttttagtcgcttaaggaaaaggatacatgatgatatgttccatgtctgaacacactatgagtgagttaattgaagttgttgaggtttagcagtgaatctaaagaattgaagacatcaaagaagtaattagagttcttatgaagatgttctatatggtagtgaagaattgaagtgaagttgagtttgtattctatgtgaagatgaatcaagtcttcaagaagtcatctttgtactgacacttgcaaggctagcaggcaagtgcttgcttttttcatgtttactgatatcttcggttgcaggggatcatatcgccagttgtccttcaacaggattgttataaagtggtacatcttcctcgccattttgtatgtttggtttctagtctgagatctttttgttctacattttgaatgcagagatccgcgagggtttgggttcgttcaattt

SEQ ID NO: 1228 - DNA, 637 bp, Arabidopsis thaliana
  Intron number 3 from transcript AT1G55310.3 (locus AT1G553 10) derived from phytozome v7.0 (chr-ID Chr1; pos 20631085 to 20631721)
aaggacatttacctgccaagggattattataccgggtgagcatgttttgtaaataggacaaccaacacttgatttttacttatgttctgattagaaaatatccctattttcacatcttctttcttgatttgtttactacgtttatctgcctttcctttttctttcggtcatctctttgtgtcttctcatggatactagggccttatgagaatcttcttaaaaactgatttcataaattaaatttaggctccatatttttcagatagtaattttctgtgacatgacaatagacagtgagcatacttgtggtcttaaaccactagttttcggtgtcgttaggtggattagtcgtttagaatttagtacctggtgagacctcatagtttttagtcgcttaaggaaaaggatacatgatgatatgttccatgtctgaacacactatgagtgagttaattgaagttgttgaggtttagcagtgaatctaaagaattgaagacatcaaagaagtaattagagttcttatgaagatgttctatatggtagtgaagaattgaagtgaagttgagtttgtattctatgtgaagatgaatcaagtcttcaagaagtcatctttgtactgacacttgcaaggctagca

SEQ ID NO: 1229 - DNA, 610 bp, Arabidopsis thaliana
  Intron number 1 from transcript AT1G55860.1 (locus AT1G558 60) derived from phytozome v7.0 (chr-ID Chr1; pos 20894719 to 20895328 reverse strand)
ggttcctctggatatcacagcagcagatttcaagagtaagctcgataccaccctctaaagaaattcccttttggtcttctctttcgaatgttgtttcccgtagcctactgttcttattaagtttttggtcttcctcggtttctcaatttcgaaacttagcttataggtgaactgataggattctctaattgaatctttctggatgtataatgtgttggtctgtgaggaaactgatttgcatgcgcattttgggatgaaaattttcaaggttgtgaattcctatggtgagcactaaaagaaatgttcttttcacattgccttctgcatcattggtgtttgttttcttttgaagttctgtctattacacacttaaggactggcagggcacagtgcattgctcatttcctttgaatgtgaatcattgcttatatgttacttcatgacatcttgagatgagattggacatgtattgtttttctttttcttccttttgccttaaatttgaaggttaatgatctttcgtttgtgttacactttttatttaagaattcagagcatgtatcaatgcaaaatgctttctttttttttgcaggaaaactcgagaagacgc

SEQ ID NO: 1230 - DNA, 284 bp, Arabidopsis thaliana
  Intron number 1 from transcript AT1G55900.2 (locus AT1G559 00) derived from phytozome v7.0 (chr-ID Chr1; pos 20903438 to 20903721)
tggtgctaccgctgctactggttacgcaagttttggtatgtacttgcattcatgaattatcttttttccctctcgtagatttctagtacaaagttgtttttgctgtgaaatgcgagtaaaaatgtgttatggtttgcttaatcgtggcattgcattacattttcacatatcagtcttttgaattcagtgttcttcacttggtagaactgtgtctttcttcgttatgttgactctttttagttctgattatacttgtttgtttcgttatgcagcttacacgatag

SEQ ID NO: 1231 - DNA, 906 bp, Arabidopsis thaliana
  Intron number 2 from transcript AT1G56330.1 (locus AT1G563 30) derived from phytozome v7.0 (chr-ID Chr1; pos 21087162 to 21088067 reverse strand)
ccaaggttaaatctctctttctacattctccttttagtaatccttttggaagatgaatatcgaaaaagcgcggtgttttatcggattcatcgagctatatatttgttccttgttttaactccaagtattcttaaagtttagacttttaatgatttgttgttggcattgctgatagaagcttagatgggagtttctttattagatcataatcctattagaagatgcaaatcgaaaaccaatgcttgaatctttgtataaatgttcacttacccttataggattcatcgaactcttttcttttacttgaaggtgtttgtttagtagctaaaactaaaaccataacatttgttgtttgtttctgttgcaaatattcttaaattttagacctttaatgattgtagatggcacttgtcatgctaatagaagttttgatggaagtttctttttttccatcacaatctaattacgcatgaatttgcttcaagatgatgtttcaatggtacaaattaccaattttatgaagaaagttttagtaatttttaccttagttctagccagttagtggagttatgttttggacctatgaattatgttggggacgaacttcttggtaattttatttctctggtgacattagaatgtatctgatatgattgtaggcattgagccaatgtatatcgtaccagagttgtttatcgtattgacctagagtttatggtgttatcaaactggaatattttcatatcagtgatataaaatatggctatgagtagtgtagagcgaactagaagtatgtttgcgtggatctaattgttttgttagcatgttaggatctagtattgtctttaatcaaatgtattctctttgctgatagaaactctttttttttttgttgtataaaggttg

SEQ ID NO: 1232 - DNA, 682 bp, Arabidopsis thaliana
  Intron number 1 from transcript AT1G56423.1 (locus AT1G564 23) derived from phytozome v7.0 (chr-ID Chr1; pos 21129141 to 21129822)
acaggtacttagattttgtttccgcaaaagtttcgatcttgtttcttctttgaccatgattttcgcgtttggtgtttttggataatttcacataaatgggttttggatttctacttcagggtagttgtaaatgtatcgccttttcaggaatctgttcctggaagttcggaactgatgtttgagatctcgatttggttctaaacttctagtactctatctttgatctgattagtagaagtttttttaaaaaattcatcatctgatttatgtaataatggaagatttggacactaagatgagattaatgactagaatttagactatatttgacattttcaacacttcttcatagcttaatgtacgtttagttgaacttgaattgatgaatgtgttagtgttttgatgtttaaattacttaatgcccttttcttggaacctctctgttggtcactcatgctgatcttatatatggaagatcgtgaattcgcgaaattagcttttttcatttgctatgctgcataatcctgttttgctatggtttctgatactttttgtttagataactgtgctttgattagtctttaaatatcctttaggactaaaatttgttacttgtgggttgttcatacaaatggctgtctgaatatatttatctttgttgtatatggtaaacagctgaaaa

SEQ ID NO: 1233 - DNA, 788 bp, Arabidopsis thaliana
  Intron number 1 from transcript AT1G57765.1 (locus AT1G577 65) derived from phytozome v7.0 (chr-ID Chr1; pos 21393543 to 21394330)
actctgcgcttcgatttgtctccacttcttcttaggttcgtcttcttcagatctgtgatttcaatttcacaaacctgtttctcttaggtagaatcgttaggttttgtaagatttggtagtgattccgctagatttagcttgacttggctctttctcgatttcccaagaaaacattgtttgatttctctgttcctacgatttcaaaagcatcacaatttgatttgacaatcaagacaagtaatttcaagttaaacatgtcggtttagtgaaaattcagttgtgttttctgggctttggtcaaaagtttgtctttttgagtcactttttgatctcttgattatctgtagtttaaatggtaaatgataacaatttggtatactgatttgttactagcatcatgatatacttgtatgaatcaccagcaatgttgtatcttgattctgtgtatcagtgtatgtatgaccaatgaaactgttctttcgattcctggcttttggagttgtacatttgctttctcttctatgttttattgagcatatgcttgtagcaattgatcatattcccttgcgataggcaacagattctatactcttttgaggatagatcgtgtagcttcttcaggactattgatattcgctgcaacaaaatttacgattaagctgattttgtttcatgctaacatagcgtcatcttctaggcttcttgaaatccttagcagctttgtgttgattctattgcttatgatactttcaggtatatctggtgatcccaatagttcaagtactgga

SEQ ID NO: 1234 - DNA, 554 bp, Arabidopsis thaliana
  Intron number 1 from transcript AT1G57870.3 (locus AT1G578 70) derived from phytozome v7.0 (chr-ID Chr1; pos 21435335 to 21435888 reverse strand)
cgtgatttttacttttccgttcaaggtaaatcgatcatcttcggcttcaagcctgaagatagcgcttcgaattggttgaattgtgtaattttggaggaagttaaggttcttgcagtaacaactgctttactgatttttctggttttttttgtaattgtagaaactgagtttaaggacaagctttgtcccttttagtggaatttagatctggttttgtcgtaatttcttctgggtttcaattctagtcttctgtagtagtatcagtgttgtgttatcacccactatttcaaagtttcaatgaaattttaataccaagttgttgacttttctgtgtttctatctgatcataattaacttcggaagaaattattgtgacctcagaaaattaggtagctgatttgattcttttgttttctcaattattctcttgttaatttcattgttcacatagaaatggttcatattttctgctaatatgtttcctctttcatttcaattcaccatatttcttctttgtagtgattgatcaagggaacataagcagctagagacca

SEQ ID NO: 1235 - DNA, 677 bp, Arabidopsis thaliana
  Intron number 1 from transcript AT1G58110.2 (locus AT1G581 10) derived from phytozome v7.0 (chr-ID Chr1; pos 21517375 to 21518051 reverse strand)
ctgaaatttctccgatttggatctgtctccaactggttagtttgttcttcttctttaagttggaaagtagaatcaattatcaaaacttgtaatcaggaagacgaatctgtatctgtctatctgattctcatagtttctaaaaaaggaaactttctgattttacttgccttttatagattcttgatattacaattttactacttgatgtgttcactgtttggttgctggaaaatgtgggaagatgaaaaaagcttattgattaacttggatgagtaagaaaaactttgattagctgaaatgaaaaaatggttatttcttgtaatcgcttttatgtgtttatgttaatattaataagaaagcaactgaatttggatgacctgttctggtctggttgtctgaattggtcagctatagtgttctgcttcagtgtcagctttataaaacattttaggctctatagatttgttgcattgatctgtgtttgatgttttgttaccaactttttccttactttattagcttaattaggttttggattgcttgttttgttctaaatctgctactgagttcttaggagttaggccaagcttaaaaagatttgattttgtgggttttgatgcaatggtttaaatagtcagatctatcttttactgttgttttgtcaggcaagggtgaca

SEQ ID NO: 1236 - DNA, 870 bp, Arabidopsis thaliana
  Intron number 1 from transcript AT1G58440.1 (locus AT1G584 40) derived from phytozome v7.0 (chr-ID Chr1; pos 21716169 to 21717038 reverse strand)
ttgctggttctgctcttgcttatactcttggaaaggtcggtttctcgtctctttgatttgattgcttatggattcgaattaggtggtgatagttttgttgatttgattctggatttgaaaattttagagaatgagtgatgaagcattgttatgtagtactaattgtttctttttgtcaaagcgaattgtttcgattctctgattgtgtattgaatccagttctggtttcgtggaattgattgaatatgcatagttcaaatccagattttctgtaaacaatttttgtttcacacaatgcgcgagttcttgagattaataggatgaaacattgttatgtagtacccgttgtgaaattgtcaaagcgaactttttcgagtcttcgattgtgtattgaatccagttctagtttcgtggaattgattgcatagttcaaatccataatttctgaataaaacttgtttcacacactgtacgagttcttgtgaatcagcatggtcaacgaacactgttttgagatttatttatgttgcacacaatgcatgagtccgtttttttcgaaaacaacttgtgtcacacaatgcacgagttcttgaggttgatcatgatggtcaacgaacactctttgattaattttggggaaatgttaagaatttattgttcttctttgacttttaaggactaaaataagttaagttagaagccaactactttacgaaacaggtttaaatgctgttatggttgttcctttggacaattattttattggtttattatatgcagtctactggtttgtgtctagctatatttgatgccacgttgtagaatcatggatttgatcttatcttatgttgtaggataaacgccgagttc

SEQ ID NO: 1237 - DNA, 210 bp, Arabidopsis thaliana
  Intron number 1 from transcript AT1G60710.1 (locus AT1G607 10) derived from phytozome v7.0 (chr-ID Chr1; pos 22356213 to 22356422 reverse strand)
aagttctcctcggaaaggttcgattttgattattccagatcttcggttttattagattcccgctaagatggttgattttcaatgttttttctcttttggggaacaaagaacgatttagagatgggagttgccctttgattcttctagcttcatagctgtagaaatgatttggatgttgaagaagtttggatttttgtcaggctctcaagg

SEQ ID NO: 1238 - DNA, 492 bp, Arabidopsis thaliana
  Intron number 3 from transcript AT1G60930.1 (locus AT1G609 30) derived from phytozome v7.0 (chr-ID Chr1; pos 22437478 to 22437969 reverse strand)
gctgcaaggtaatgcattatcttcttttgaggaccaatcagctatttctgtatgtttttcttgcgtttttgtatccatttctgttcaattgtttggttactggtgaagattacttataactaatcccgctgactttataaatagtgtttccaccacgctgtaacatctagcttttccagcttcgtttgaacctgtgttattgcttgttctgattctggatataggagatcttgagctagaataaggctatttctttatgagtgaaaatcccgtattcattcttcagttacttccaacacctccagttaaaagagagctagttgttcataatatcatcctttgatctttctagtaaataattcagtgatggaaactcttgtgaggttttctctgttgtcttcaggtattagtctgttagctgaagtggtctgaaaaacttgtttctctctatgtctaggtcaattgaaaacatcgctcctgtaactgtacaaa

SEQ ID NO: 1239 - DNA, 435 bp, Arabidopsis thaliana
  Intron number 1 from transcript AT1G60930.1 (locus AT1G609 30) derived from phytozome v7.0 (chr-ID Chr1; pos 22438303 to 22438737 reverse strand)
ccgcagaagcactagagtttcatctgtttgaaaatgtaatctcgatcttcccgtttcccagtcatttctaggggtttttgttcgctttttctcacaccgattcatttgcgaataatttttgagtgtattgttcggtgttcgtctgtgtgtaaagaggaattttcgttagttatagcagaatcgcttcatcttctagttggagaacttattagcttctggatttggttagttcttcgttttcctatgcatagattttgaaattaatcgtcaaattcgttgtggtgtattgtaattgtcatagcgatcatgattacagctcaaaatcggcacaattgtatcttccagctggtacagtatgcaatttctgcagtttatgttacaatttcatcagattcaactaatcgcaatgccacttgttttgtttttgtacagtaa

SEQ ID NO: 1240 - DNA, 553 bp, Arabidopsis thaliana
  Intron number 1 from transcript AT1G61080.1 (locus AT1G610 80) derived from phytozome v7.0 (chr-ID Chr1; pos 22496466 to 22497018 reverse strand)
tgttgttcggtcgtaaatcatcaagcaagttacaggtaaaacatcttaatatttcttgattgattatagatgattattcacatatccttgattatatgctaaacttttctcgattgattttgatatacgtatatatacacacaaaaccctttcatataaattttctatgaatcatatttatgaattggaaattaatcacatgatccatatataaaaaactcttaataagtttcctgtctctaggagttatggttacatgaactagttccaagaagactaaaaattccatgtagtcttcatttgttcatgttagatcattcttgctaatatataccatcataaaatctatatcttttggtcaatagaaccatatagttctgcatctttggtttcttgatggttcttgaaacttaattctatgatgatgaaacaaaaaagaactaacaaatttttcatcatcacgtttccaaaatgcaaaatacttgattctgaatttctatttttgttttttttagcagcctgtaaaagggcaagcatcacctaaagttagcaa

SEQ ID NO: 1241 - DNA, 692 bp, Arabidopsis thaliana
  Intron number 1 from transcript AT1G61160.1 (locus AT1G611 60) derived from phytozome v7.0 (chr-ID Chr1; pos 22545519 to 22546210 reverse strand)
gaagaagtaatatcaatttgtaagttccttagatattctcaattttctattatctatttcacaatatctattaatgattttgataaaatatattaagaaactatattattttcaatcttttagctttcagattagtttgttagattttttttttctgtaatgataaagcatgaaatgaaaatcttgtaaaggatcatgatcaaaaggtctttgctcattttatatcaaattgaatcaattttatttttgcttaaaatatttaaagttcaataaaaataggtgaagatagatctttttcagacaaaataaaataagatataaatctcttttccactattcgacattacgattgctttattctatttgatccatttcgagtcatcatttttatactcgagtttcatataaattatgttttcgcaaaattcagttttaattttgttgaattataatgataatttatactccctcaaatccataatatttgataatttgttagaattttgatgtaaagttttttatttaaatatattagatttagcatagtcatgattttctaagataataaattgtttttctaactgaaaactatccttgttttcatattttgtaacaaattattaaatgtataaaactcgatgaattattgacccgcaggcagaccaggtcgatcaagacatctggtgaaccaa

SEQ ID NO: 1242 - DNA, 394 bp, Arabidopsis thaliana
  Intron number 1 from transcript AT1G61900.3 (locus AT1G619 00) derived from phytozome v7.0 (chr-ID Chr1; pos 22884275 to 22884668 reverse strand)
tttctgatatctctatgtgagtttcctttccttaatttggggagttttgagggaaatgggtttagaattatctgtttctaattctgtttctgtttgatagaaaaattcgtttttttcgttgagatttcgcttgttttggaacaatttgcttgtttatattgatgggtcattgtaaattcaccttctttatgtagaaattgatcgaatttgtggtggaatgttgaagtaagcttcatggtgttttaggttacttagattagggttttggtgtagttaacgaattaggtttctttcttcagagatatttaagcttttgcaaaatcaaaagtgtgatgatttttgtatcttatctggttcaggttcatcacagaaacctgaggagttcttacctgag

SEQ ID NO: 1243 - DNA, 854 bp, Arabidopsis thaliana
  Intron number 1 from transcript AT1G62420.1 (locus AT1G624 20) derived from phytozome v7.0 (chr-ID Chr1; pos 23103384 to 23104237 reverse strand)
caggtacatatatatagtctataatcatctctttctatataatatactgaaatttacattttttatattgaaatgggaattaacggagatgattttactagtttgtgactaatatatgggattatatttaacctacggaataattttcgtatcttatgtaaacttgtaattttgtttaactatttcgtgattttacaagtgtaattagtggctaaaatgaatcaaagttttgattttatttgtgtttttcttttaaaagttaactagaagatttattttcatcatactgtagttccattccaccattttataatttaaatcacgattccacaatttatttttatcatctagagcgtacgtaaggttccttaacttgagtattttcttcattcgttttatgattcagtagtgtcttaaaaaattagttttttgagttaataaaatagtgttttggatattggaaatttagaaccataaaatattcagacgaaatggctgcgaagattttttttcttggggggtcgaatagctaagtagattaaaaaaaatcctccttttcaccgcaagtagccaaatttgtttttcctactgatatctatgatttgtgcaattgcttaccaatcatattaaacagaagttacctaaataaagtacttagaaataattaagttgtactaaaagttatataaatatgtactttatattgcagccaaaaaaagttgtactttctgtagtattatgatgtactcgtggtacttggaataagtttctactatatgtaagaaaaatgacaataatcatcgccatgtatgtgtataggtctttgcaagtcgagttgggaaagattcggcaaa

SEQ ID NO: 1244 - DNA, 833 bp, Arabidopsis thaliana
  Intron number 2 from transcript AT1G62440.1 (locus AT1G624 40) derived from phytozome v7.0 (chr-ID Chr1; pos 23112185 to 23113017)
aatctcgaggtctaaacctaactaatccatatatatatatatatatatatatgtagtctctttgaatttctttgcataaaatttcattagatagacactcaacttcattttgtacatgcttaacttcaagattccaacactaaatacaaaatcttacgggtccaaaactaccttgttggtacataatgtacaagacaaacttgttgtccgtggaaaaatgttgcatatataattacaacatcagcttgtacctataatgtttgtgagagacatgcatcaaagttataacatgcagatgtgcattcatgtctttttgagttatataaaaccatattatttgaattatcggttgacgcgttttataggtaagtgacggcttgagagaatctttagggacatgtatccaagtttatatatagagttaaagtcggtgacggtggctccaatctattgccgcgtaattaaaggtcagtctttttgtctcctccttcgacgtgcttatcaatatgtcatagtattaaacttattaacacaaaaattgattgattacttgtaattttataacaaaattagatacgacttctgagttttttttctgactgttatttttataaagaagcacatgggagttcttagatgtcacaattagtgaggtggggtctcttttcccatgtgctaaattatattttctcccaacaaaaacctctcaaaattttcaattttctcaaactcttgaaactaagaaaaaatgttgttgtttccttctacttctttacgtctcttcttctttctcttcctcttgttctcctcttgtttcttacagattagaggag

SEQ ID NO: 1245 - DNA, 707 bp, Arabidopsis thaliana
  Intron number 2 from transcript AT1G62570.1 (locus AT1G625 70) derived from phytozome v7.0 (chr-ID Chr1; pos 23169939 to 23170645)
aggtattttcataatctacgatacttttttaatactaaaattgactttattattgacagctataatctttcactacattaacctaacgtacggaccaagtctcaattttatagaaaacaaaacgatgatacaacacgtaacttttactcattttattaaatcaacattttagacttttaagttaattaaaatatagttaacgttgggatacgtgttgagagaagaaacgtatacatctatgaaaaaaaattaatgaaagatgagttaatgatggtgacgaaattcttgttagttgttacgctttctagtttatgttctcttttctttattcgattcctaatgctttttttcagtgaataaaaaactccatttcattgtggaccgcagaaaataatatctcaaaatttgatatagtataaactatgtcggtatagtcagatcttctagagagttgtggtatccacaaacaaagaatacaatcgcagattcgcaaaacacttttcattaaatagtaattaataatcacatatagtactctttaaaatgtataaaagtcacttttggtttaacccatgtgggagggattaaatggaatagattaatttgctttgatacatctttaactgtataataataaaccaaacgttgactaaaccatacattaatttgcaggtggtggtagtaatcgggaattttgcgagtggagc

SEQ ID NO: 1246 - DNA, 981 bp, Arabidopsis thaliana
  Intron number 1 from transcript AT1G65000.1 (locus AT1G650 00) derived from phytozome v7.0 (chr-ID Chr1; pos 24147277 to 24148257)
accagaaaaggttatgtctcctacaaaccctaaatctattcactaatgaagaatctcacatcccaagcagcttgattcgctaatttataatggcaaagcacaaattgttgagatgggttttgaaagccatccactttattgtattaaggttctggatctatagctaatttagttagataccttagattctttgtagccaataattttgaagtgatagatgatcatgatctcagtttaatggctatttgtgggtcaaaggtcatgttttggttgatttgaaactagctcttagccttctttgcagataattagctactgttgtatttgccttgcccatttcaaactctttaggcataatcatgaagctgtttaatgattgtggtcactcttaaacgtcgaatactcttaaccactgaggataaaaaattatctcgacaagttttcaagctgtctagtggcctacactttgttctgctagttgaaaaaatggtttagtcgacggttaatagcataaataaagagtggtgaaaaatacagtttagagatttatcatctgattctatgttgcgtgttttatcttggtaataaactttggactaggaaggaacgtaggtgtctctgttccgttattggctcctttggttatttacttacttcctctgtttgtgattctctctgttccatgcattgtagttacccacatagcatagacttaactatcttttgttgagcttttatcgttatgtgcaacgaatgagtttattttggtgtttatggttgttggttttggcattcatattcttgctggtacctgatatttgttatttcattttaattttaaggtgtttcgaaactgaatatatatttattccaaaccatgtttaatcgacttgagtatgatgcatctgtttgatttctactttttactaagaagtggaattaactagaacttgttttttttaatcaataaatgaaggtact

SEQ ID NO: 1247 - DNA, 860 bp, Arabidopsis thaliana
  Intron number 3 from transcript AT1G65040.3 (locus AT1G650 40) derived from phytozome v7.0 (chr-ID Chr1; pos 24161993 to 24162852 reverse strand)
tcagtcttcttcacgtttgagtaagtgtcttttacctcttacttattttcatggaatcaaactttttttgttgggttgatgttactaagacgggctaggattcttatagagttgaaaatttatgaaggatatacgcgcatttacatgttttcagagcgttaggttgttttggctgccaagaatttgggctgaattttgaaatgtttgaaagtttttgcacctgccaaaacttgtgaatttgacgtagctgagttacataggagaaggatctctaataaatcatctttcaggattttatttggtctacgataactgacctttcggtttagatatcattgtagccctatatttggatagctagtatgttttaaatctctatatacaagtaaaaatatgggaactattactattgtgaataataactctgatgtttgtttgagctcttttggtgtcaggaagaactaactatatgggaaactattgtgaatgtgtttttctatgaaccttacttaaaggcctcttagatactgttttagtttctaggatcctgtttaattatcctcctagtttaaagcttatgccagctatcaaacacaaaagatacatgaaacatctgtcgaaaatagctgaatatatgggggaagggctcaggtgattaagagatcaggatatttattcatgttattagctttgtttacggtgcatattgtttagttatgtatccttctttggatatgccatcaatagaccatgtgatatgtccccctgtttagctgtttgttctgacaatttagtcttactgaattttgcatcatacagcctagctttagacttaattacgaattttatgttgcaggtat

SEQ ID NO: 1248 - DNA, 575 bp, Arabidopsis thaliana
  Intron number 1 from transcript AT1G65560.1 (locus AT1G655 60) derived from phytozome v7.0 (chr-ID Chr1; pos 24372900 to 24373474 reverse strand)
acggttcctatctcccgccttttgttcctggccaagtatagattattcccacattttcaagttttcagcttttttgtttttttttgtcgattggttctgtaattggtcttttgggtatcggtttttgctcattggaaaatcaaattttgaagagggataggtaagtagagtttttgtgtgatagagagatttttgcacaccaagtgttcgacgttttgatggaacttgtgttagttgtgtatgtatctagaaatgttgcgaagtcttgagatttgtcttgtttattggtgaattgttcatatttgaagagagagagatgtgtagatgctgtatatatgctttagagagatcatgcacaccaagttttcgatgttttgacgaatggatatattatatgctgaggaaacttgagatttgttatattttattggtgaaattgttcatattcttcaatgactctttaatatgtttctttggttgacgtttcctttgttatatgctctgtattaagcgactgatagttttgtaatcttgatgcagcgtatcgaagggtttggtttagcaagagtgataga

SEQ ID NO: 1249 - DNA, 476 bp, Arabidopsis thaliana
  Intron number 1 from transcript AT1G65580.1 (locus AT1G655 80) derived from phytozome v7.0 (chr-ID Chr1; pos 24382782 to 24383257 reverse strand)
tggtccggttctctccattgccatttcggcttgtgagtgttgttctattgtaagtttctgttttccttgtttacatagtttgggaatagatttgttgttagattaagtagctttttaagatgaaagaagaaggattttgaatggttacatcgagtttcttattgtggaaatttggttgaggaacaaaattagtgatcttgatgatatttggtcggcctgaatcagattgttatactggctaacacgtatattggctcctctagttccaccggacaagctggtttagtcatgtagtagctggtacattataaatagcttatagagtccgtcttgtaattgtgttgttgagttagagtttcactgccttcagtagtgtatgatcgaagttagtacagtttgtacaatttcaaaatgtgaataaatgatgacacccttgcggatgacacaactttggttatcaattgtgtaggagatat

SEQ ID NO: 1250 - DNA, 795 bp, Arabidopsis thaliana
  Intron number 1 from transcript AT1G65620.3 (locus AT1G656 20) derived from phytozome v7.0 (chr-ID Chr1; pos 24398926 to 24399720)
attccctctagtaccaaatcctattactattgaaggtatactctatagttatttatttagttaagtatatatattaaaaataaataacattaattagtactagtcttatcatatttattagctcattttcttataaaatactaatataataggaaatttaagcacaagatgagctttgcccatcgagagcctcaaaacccaaaagtctcttcttcttcacgagatccaatcttttgctttttagtaattaattacatcttcttccttctcttctctcttcttcttccctctctcatacctacctataagcaacacaaagaacaccattgatcccatctgttttgttccctatatttcgttaatccatccatacgcattccaactacacggtacaaatttccatctctttttaatttgtttttataatgattttaaatctctcaggttgtctctagactcttaggtctagttaccaaaatttgactagcaatcatatagctacaagttcctctatatcatatagctacacatatctctaggtctgaaatgatcttttatctcccaagcatatattatatatttggatgcatacctttatgtttgactttcgaaaagcaccttcatgttactcattttttcctctatttgctttcaacagttgacaagaaggttggatcagtatatataagtatacatatacacttatgtgtgtgtgtagtgtatgtgcatatatagctcaccaaatatctttaatactactaattgcaaagtttctcttattttacagctttttgt

SEQ ID NO: 1251 - DNA, 868 bp, Arabidopsis thaliana
  Intron number 4 from transcript AT1G65700.1 (locus AT1G657 00) derived from phytozome v7.0 (chr-ID Chr1; pos 24434682 to 24435549 reverse strand)
aacgtgtgttttccacaaaggttagcttctgattcctgttttaaagtattttcatctgaacttttcgatgttactaaattgaatgggtgcaaatacatttttctgcaagtaaattggccagtgtatgacctgcaaaaccttgttggtttgtatccatgagtggctatgatgtagcagagttctcgatgtctccatattttgtttgtagtgatcgcataaaactagaaaaatagaggtactataaggatgctagtttatcttttgttcattgtcactcaaagcatctttcgtcgtctggtattgatcttttaattggtactacgttcttgctaataatgtacattgcttgatttagttgcgtagtgtcatcttttcaacagaatattgaggaaacttactcagatatttaagataggccttgtcctacagttctttgtttggtaagagaatagtgaatcatgaactaactggcctctgaatggaagtatctaaatcagatagtgttggatacaccgaaacagatttagtgttagtattcttcgagtgttataactgattgaaaaaatcttgtgagttcatatgtcaaaagatttagctagtgataggtaagtcaaatacgtagatattggcagtgtgtaattaattatacatgatcacctcctttttttcgtaagagggttaaaggtttgattcatgtctgttttcttgtttacactaagagtatgtcaggtcatgttgatacttcattagacaaatgttcttggatatttttggtgtgaaggcagagttctgttaaaatgatggatattggaattaggattgagacctcttactatgtcttcatctttgcaggaaggagtacaacaac

SEQ ID NO: 1252 - DNA, 317 bp, Arabidopsis thaliana
  Intron number 5 from transcript AT1G65700.3 (locus AT1G657 00) derived from phytozome v7.0 (chr-ID Chr1; pos 24434828 to 24435144 reverse strand)
tttaagataggccttgtcctacagttctttgtttggtaagagaatagtgaatcatgaactaactggcctctgaatggaagtatctaaatcagatagtgttggatacaccgaaacagatttagtgttagtattcttcgagtgttataactgattgaaaaaatcttgtgagttcatatgtcaaaagatttagctagtgataggtaagtcaaatacgtagatattggcagtgtgtaattaattatacatgatcacctcctttttttcgtaagagggttaaaggtttgattcatgtctgttttcttgtttacactaagagt

SEQ ID NO: 1253 - DNA, 516 bp, Arabidopsis thaliana
  Intron number 1 from transcript AT1G65860.1 (locus AT1G658 60) derived from phytozome v7.0 (chr-ID Chr1; pos 24501654 to 24502169 reverse strand)
tcactttacagaacctaacgttgctcatattcctggtaaagatccatttctctatacttatttcaaataacttggtttctttgttcttagtctctgggtctaaaattttttaggatcacctcagttataaaggaagaagtataatatatgtactttcgaaaagaaaagaaaaattattttataaacttaactttatggcttttcacttcaaaatggtttaaatgaaattgagaaatagttgcactaaacaaaacctagtaagactaatctagtaaatagtaatcttgatatcgcttttatctacaaaagaaaatgaaaaaaaaatcttcgtattcctagttggaaaacgctcataaaagttagttgacaaaaaagaagttagcttcattaagctatacaaagattttgagtttattgacaaactattagtacctaccccagttttataatcatcttcttaacctgaaatatgtatctttagggataaaatcgtggccaggaaagcagatccatagc

SEQ ID NO: 1254 - DNA, 552 bp, Arabidopsis thaliana
  Intron number 1 from transcript AT1G66250.1 (locus AT1G662 50) derived from phytozome v7.0 (chr-ID Chr1; pos 24693145 to 24693696)
aaggtgagattcttgtatctgattcaatcttgtactttgagtttcagattcaatctttactcccaaatttgaaagttttgatttttgcatgtgttaatgttcttctagaaaaccaaatgttccattttttatgtagtaataattccactgtcagtgattaatgaaaatagctttaatataaagtaattaaagacaagtccttttgtatgtatgtgttggatttgattcattgagtatgtttgagagtgtggtaggttatgataataaatgtcagtatgtgtgtttggcaggtgggtttgtttttaaatgctcactaagaaacaagaaatggtgaattttcatgtccccaaatatttattacaagacaaataattcaatgtctaatgttttgaccagagacatagttctttttagttaagtctatgaatccaaatctttgagtattgtacactcttttggactagttctagatatgttgatactaatggtttagttgaaatcaatatattttttgtaggttcatatattggagtaaacatagggactgatctt

SEQ ID NO: 1255 - DNA, 940 bp, Arabidopsis thaliana
  Intron number 1 from transcript AT1G66410.1 (locus AT1G664 10) derived from phytozome v7.0 (chr-ID Chr1; pos 24774773 to 24775712 reverse strand)
gaggttagtctcaatctcatcttcttcttttaaatctctcttgatcgttgttaaaaccataacggatctcattttttccgatttcgtctgcgatcagcttcagattcagaaaatatttgagtctgattctttgatacgctttggatttggtctaatctctggttttgctagattcgatctctgattcaggtgattcgtgtggtgaattgttacttcgttgttgattgaatcgtttgattgtctcttttgatgtagttttgttccatctctaagcatggatttgtgattttgatgtttctttgaaggtgacttatattgaaatgttactagctttgtgcagaatatcatgttcctgattcttgttctgaatcgtctttttgtgtcattcttctgtagtttaagtaggtatattgctatagatttcagttcaaagatactgtttagttttagcacctgtcatgctttttccatagccaaagatattcagattctagtgtttttatgagattcatttaatggtcatgtttttggttgattagtggcttttttttgctcaaaaacgtttaaacaaaagacctggtttcattcatgtttcgtatgtatatcaatctgactttgttatgggaatctacttgtaaggtggtatgtagctacaggtttaagttctctgataatatttagtttcgtatgagaagcaaacagtcatgtatagtcatgtatgttttagaacagatcatgagttttccataatgaaagattccagagtctagtgctttttttttctggcatccattgatggtcatgtgtttagctgtttgttggctcttgtagcttaaaaaagttttattggagacttatttatcacaagacctggtttttattcatgttatcttttactgattgaacaggttgcatcaccacaaaggagctgggaacagtg

SEQ ID NO: 1256 - DNA, 774 bp, Arabidopsis thaliana
  Intron number 2 from transcript AT1G66410.2 (locus AT1G664 10) derived from phytozome v7.0 (chr-ID Chr1; pos 24774773 to 24775546 reverse strand)
gctagattcgatctctgattcaggtgattcgtgtggtgaattgttacttcgttgttgattgaatcgtttgattgtctcttttgatgtagttttgttccatctctaagcatggatttgtgattttgatgtttctttgaaggtgacttatattgaaatgttactagctttgtgcagaatatcatgttcctgattcttgttctgaatcgtctttttgtgtcattcttctgtagtttaagtaggtatattgctatagatttcagttcaaagatactgtttagttttagcacctgtcatgctttttccatagccaaagatattcagattctagtgtttttatgagattcatttaatggtcatgtttttggttgattagtggcttttttttgctcaaaaacgtttaaacaaaagacctggtttcattcatgtttcgtatgtatatcaatctgactttgttatgggaatctacttgtaaggtggtatgtagctacaggtttaagttctctgataatatttagtttcgtatgagaagcaaacagtcatgtatagtcatgtatgttttagaacagatcatgagttttccataatgaaagattccagagtctagtgctttttttttctggcatccattgatggtcatgtgtttagctgtttgttggctcttgtagcttaaaaaagttttattggagacttatttatcacaagacctggtttttattcatgttatcttttactgattgaacaggttgcatcaccacaaaggagctgggaacagtg

SEQ ID NO: 1257 - DNA, 632 bp, Arabidopsis thaliana
  Intron number 1 from transcript AT1G66900.1 (locus AT1G669 00) derived from phytozome v7.0 (chr-ID Chr1; pos 24959855 to 24960486)
gggtaaaacatttatgttattgaatcttaagacattatgcataattggtttgttacagcttcgaagttcagacattttgtagaaagattactactttgctttgctttgtaaagatcagtgctttagagcttcaaagttgagacattttcatcgaaaaactaagacttttctttgtttataatttgccccaaaactaggatctgttgatacattgttatagacatgtaatgaattgttcgtgttttaggttttttagtaaaggataagtttttgagaatttaagtagaattggtttttgtggtcttatagtaatatgttgttagaagaatcaatccatgtaaaacaaacagtgtgttatagtttcaaagtttgtgcctttaacctgaggcaattaatccatatcagtcacactttccctatgcttgtcattgccaaaactaggatctgttgttacattttgttataatgtgtgacttaacatttcaactttcctttcgtgattgattcatttccatctaaaggtcttctatgacttgctatcttgctttcgtcaccgttgataaattgtttctcatatattagtgactgttagattgttttctaatgtgttcatcggtttttctttctcaggt

SEQ ID NO: 1258 - DNA, 593 bp, Arabidopsis thaliana
  Intron number 1 from transcript AT1G67070.1 (locus AT1G670 70) derived from phytozome v7.0 (chr-ID Chr1; pos 25042656 to 25043248)
gggttgtgatcttcctttccttttcaaggtaatgatcaatttctctgttttttactctgttttgaagatgttacatttgactaagtttttctgattaacaaatttgatttttatgtgtttctaaaagttataatatacagatttgagtataatcatattataaaaacaactatatatctatatatatatatatatatcttataatcaaaatatacattttcagattctgttttattgtcaatttctctgtttttttcctctgttttgaagatgttacatttgactctgttttcattattaaaaaggttgatttttttttgtgttttttaaagttaaagcataccgacttgaatctaatgagaagttttttcttgttgtaatgcgaaaattatcgaaatcattgttgatttaggcacatcctaataatttctctgtttttttgctctgttttgtagatgttaacatttgactctgcttctctaactaaaaatggtgactatttgtgtgaatttttaatctaatcataagtgttttggtttttgaaatgtgaaaaattaggttttgtcagtaacgaaagcattgtcgattcaagc

SEQ ID NO: 1259 - DNA, 378 bp, Arabidopsis thaliana
  Intron number 1 from transcript AT1G67170.1 (locus AT1G671 70) derived from phytozome v7.0 (chr-ID Chr1; pos 25127349 to 25127726)
atcaaataatcccagtgagcttcttccattccaaggtacgaatcgataaagtcatcaaacctataccttttcaggatttaatggtaattagtcaggatctaaatcgtttcttcgaatttgatttcggtgatctagaaccctaatttggtcgggaattttcaaatcaattgatttccctgccctaatttaatttgatgattgttctgtttgcctatgaataagtttgatttcaatggcaaacaaaaaaaagagagacattgatttgaatatttttacttaggtgcattgattctgcagattgtgttaatgtgtgtcactcttaatcttctgtcttatgtttttctcagttgataaggaatttgaagaagcctttgttta

SEQ ID NO: 1260 - DNA, 502 bp, Arabidopsis thaliana
  Intron number 3 from transcript AT1G67430.2 (locus AT1G674 30) derived from phytozome v7.0 (chr-ID Chr1; pos 25262448 to 25262949)
aggctagaggatccgatcttagggttcacttcaaggtatgtatagctctgtcaattgtcattttgattattcgatgtagttagatttatgattaggagattgtagttttaggttaaacctgattgagaaaaagcagagttctgttgcaatttgacagatctcacgtatacttcagggaaattgaattggtcatcgtgattgggtgaatctatgtttatatatctcataactataagattcagtacatgatggtacattgatttatcatttcactttttgaggcttgtttatttttagggcttttggttaatcgcttagtattgctttgttattgttcttatgtgaacctatgtagaattttagtgacttgttgttttggttagtgattccacataattaatactgtgtttttgaatttgttggttggttcttattgtgttttgttttcttcggattgtgtgaaacagaatactagggaaacagcgcacgcaatcaggaagct

SEQ ID NO: 1261 - DNA, 597 bp, Arabidopsis thaliana
  Intron number 4 from transcript AT1G67690.1 (locus AT1G676 90) derived from phytozome v7.0 (chr-ID Chr1; pos 25369899 to 25370495)
ttacctacagtgtctggtaaggaaaattgaatcatgtgcttctcttatgctcttaaggtttttcactgtctcagacattacttatcacattctttctgctaatgcaatctagtgccttaaccataaacacattctaacaactgagattatttagttcatctatcttccttagcatatttgttatcatttctaatttctccaccacaattctagattttgttaggtccatgactttgtactattgattttctttacttttgctatggaaagtgatttaccagcctcaaattctttaataacatgtccacttgcgaatgagatcattagtttttttctacgtatataacaagtctttaaaggtattgttatcctcatggactatcaattagcactcttataagagttggaccagagaattttgctttattagcttcattcagttactctagaagaaagcagttgaaataatgagcttctttttcgtagctcatttgaaagagttgtttgcagacttctgttcactttacttagcagtgtgaattgaaccgaattattgatttctgttttatcagtgacaggttagagactttgaggaca

SEQ ID NO: 1262 - DNA, 409 bp, Arabidopsis thaliana
  Intron number 1 from transcript AT1G69340.1 (locus AT1G693 40) derived from phytozome v7.0 (chr-ID Chr1; pos 26065853 to 26066261)
ttcgcttttggtgaatcaaatttctttaatttcaggtgaatccttaaaaatctcacgacctctccgtttcttaattttttggtttttgtgataaaagctcaaggctttagattagaattatctgaaagttttcatctttttttttctttagctcttgtttttgtaacactttctggtttgtagactatggttgattttggaatttttagatttttgattgcattagtacgatctgattatctaatttcgatgattgtcgacgtaatttgacttgggcattgagaatttccaaactttctctgactgaaatttcatttttccttcatggaaatgattcttcctagttacttgttttgtctgtcttccatttccagtgaatacgcttttgacaggaggaccatactaagtc

SEQ ID NO: 1263 - DNA, 358 bp, Arabidopsis thaliana
  Intron number 4 from transcript AT1G69340.1 (locus AT1G693 40) derived from phytozome v7.0 (chr-ID Chr1; pos 26066976 to 26067333)
atctaccagcgaggtaattggtgatggagaagacggtttaaaataaattctttacttattagaggactgaaaaagaaagaaattgtgctccttgaatctagtctctgctctatctatcaactatccttgtccatatgatagagcttctccattgttgactatgtacagttttttaatgctgtgtgagtactacatcctatgatttctgaggaacttctcatttctcaaaataccaagcattctgtgcgactttaatatggactgtgaaatagatttgtgccttagtccccaactcaaaaaaatgtgttttttgtttgtcttttgttcaggagggttatccatacagtaggacccaagt

SEQ ID NO: 1264 - DNA, 439 bp, Arabidopsis thaliana
  Intron number 1 from transcript AT1G69750.1 (locus AT1G697 50) derived from phytozome v7.0 (chr-ID Chr1; pos 26235348 to 26235786)
ggacgaagtaagtcaatcttcttttcttaccaacaatctcaattcgaattcttagaaatcgattcatttttggtagaaccgtgtttttgcttaaatctgtgttcataagatttcaaattatgtcgatcaaggtttttgtgtgtgaacgccattgatttcaacatagccagttttcaatttatcatttctaaatgtgaaatggtgaatcgattgggttttggtagaatcgtgttttgtcattatgtgattcatatgaatttgctaggttttggatcagtgtatgaatcgccatttattcaactttgcgatcttcaatttatcatgtcaaatgtgtagaatgttgtttttccgattttctgttgagaacattttaggtttcttttgtgtgtggacgcctttgattaaacaattccgatgtcaaatgtgtaggacctgcgag

SEQ ID NO: 1265 - DNA, 499 bp, Arabidopsis thaliana
  Intron number 2 from transcript AT1G69750.1 (locus AT1G697 50) derived from phytozome v7.0 (chr-ID Chr1; pos 26236355 to 26236853)
agtacaggtgcgttttcttctcttctcattatgatttcttttcttttttttctattccgatttctctggaattgaagatgtgatgatgattgaaattggattgaaatcaccttaaataccagatttgtgagatagcttttagaactaatcactgcaaattgatatcatcatctgcaattgtgtatgtactgattagtcctggaattaatctttatagccagtaaattctctatgttgttggagacaagataactgtgcttgagtttggtttattagtaaaacccaaaaccctagatcaacaaaggttcatactttatagatttcccactaatgttgtatcttgttttgtatttaatcaaatacactacaacctatattgatttagttagaagagaggaaaaacaggttttaatgatgatcactataaagttcgatctgaatcgttactcgcgttcatggggcaggtggagcatttggaggaaacagaggattaagacca

SEQ ID NO: 1266 - DNA, 922 bp, Arabidopsis thaliana
  Intron number 2 from transcript AT1G70410.2 (locus AT1G704 10) derived from phytozome v7.0 (chr-ID Chr1; pos 26536506 to 26537427 reverse strand)
ttctgctgcgctaaaacctccccggtaagtcccagcaacaactcaaatttgcttatgagaaaaatactcaagctatttttgaaacttcgagaggattattagattatagtatgtatataaagtgacgaaatgtatatagagaaagtaataattaagtaaactggtgacgcgtagatgccaactggcaagtccgttaaaaacatgaccgtgtcagcctgtaaggcttgccttggttgacttatcctgctttgtcattggccaccggcctatcggaaaagacgcagaccaatttgccttcaccaaaataaaaattactacttactaccatatgctttttgccctgcgtttacttttcaagtcgagatcatttatttggtcaaatgaggtagaaaaaaactattctagtcaatgtagacattcgaatgaaatttgcatttataaaaaaaatgtacttggaaattcaaatgggtttataatttcattttaatcagtaccgagacatacagccacatgcttaattattcctcctcaatcaaaaccatttcaccccaaaattttaaaatagttttatcaaatcaccatcccacaaaaagattttttaatataatataaaccttcccatttttgtggagtttcttttttttttcccttgtaaaaaagaaaatgtaagagtagaaccaaatggcataatagagctctaggcctataaataccaatatccatctctactactactgcattaactgatttcacattcttcgataaggattttactctccagagaaagaaaaaaaaaacctcctctgcttttgtgatcctttaaggtttctctcatcagatccaattttcatgtttcaacatcgtcaaatttcaccgattaaaattacttgttgttgtttgtattcattaggaaaaagacgaa

SEQ ID NO: 1267 - DNA, 957 bp, Arabidopsis thaliana
  Intron number 2 from transcript AT1G70560.1 (locus AT1G705 60) derived from phytozome v7.0 (chr-ID Chr1; pos 26605379 to 26606335)
ctgtcagcgtcgtcgccgccgctcctttttactccgtaagtccccaccactaaaactcctcctcgtatctttttttcctttttaattttgttctataacatgatctccgttgacatatttttaattttgcattatataacttttgtggggattgttttttgcaactaacaacaaaaaaatcaggtaaatattgtatgtttaataattcgatataatagtagggcttgattcttgacttatgagccggttttttagctagacaagtgcagatctattctttggtgttaatattatcttaaattcaattctcaaatctactgcacattttcttccataagggaaatgattcttgaaattgatctgaataaataaactaaatcttaaataaaagaaaaacagaattttaacggttttcaaatgttgctttggatccatcttttaaaaactgcctaaccaaatgtaaacccgacaaagaagcaattattgtatttttcacttatatgggatgtcatacgttacttaaattaaagaatttatataatttgttttaccaaaaagtatcttcctctctggtataatttgctttgaagaagcttcattagaatgttaatgtatttttatctataatcgtaagtcgtttttaaaaataaagttgatttgatgtgaatcaaagattcagtgggcgttgtttctgaaaagcaagattggagatctaaaagacacagtgacagacatgtttctcgaacacaacacaacacatcgatccatcatttttttttctttttgattttaacaattttttacaaaacacttttccttcttacatactacatgtgttgtagattcatgtgcaaagacatcagtaacatgctcatgtccccacttttattcctcccattcttaataatttcattcttgagattataaaagttttattcttattttgaatatagacat

SEQ ID NO: 1268 - DNA, 745 bp, Arabidopsis thaliana
  Intron number 2 from transcript AT1G70790.2 (locus AT1G707 90) derived from phytozome v7.0 (chr-ID Chr1; pos 26700815 to 26701559)
ttgttatcacattggctaatcaggtttggttcatgtcctttttgattagattatgcatcgttttgggtttgattctttggtgatcacaaatggaatgtggattatgaaatcttattagagttatagtcacatggtggaggtacaatgtgagggactgatcattaccatgtgatggtttttgtggccacccatgtgagaaagatctcaatttgatctttgctttgtgtttctttggctaaaaaacaaaactttataagacatcctatgcaaaatcttgtcatgttctgaaattacaaattcttgtattagtcttgtgttgcaaaacatatatttctttttcaatataaaattttgttgaagggtattagtctttttacgattagtctctatgcataatcttgttgaagagtcatctcccaaaactaatgagcatgtataggctcttgttgaagggtcatttcccaaagctggcaaatcataattacataatcttgttgaatggtcatctcaggatcacagtttgtcaaatagaaacaatgtcatctgggttaagaaagttgaaagtggacatgattgacttggcttagatgattgtgtctctatggttgtactttgtgaagccttctttatcattatttgtactatgtaaccttttgtttgtgtatttctttttcatatcttcttgacccgtttttatctcgttcattcagaaactgaagacgcgtgtgattaataataactgtaa

SEQ ID NO: 1269 - DNA, 306 bp, Arabidopsis thaliana
  Intron number 1 from transcript AT1G70800.1 (locus AT1G708 00) derived from phytozome v7.0 (chr-ID Chr1; pos 26702886 to 26703191)
ggtccacaggtactttttctctctttctgattctaatctgatttggttctcttctgtttgatgtttctatttctgttcttgagatgtatggtttctctgtttactttcttcgcagatggaagaccaaagaatcgacctttaagaaacatgattaataatcatttaaaaagattttacatttcatgctacaaaatgaaaacaatctatagctataggatgttgtgttgcattcgttctaactgaaattggttgtatctttgaattgcaccagaagctgaaatcttttactgtgaagaataactgcaa

SEQ ID NO: 1270 - DNA, 545 bp, Arabidopsis thaliana
  Intron number 1 from transcript AT1G70860.1 (locus AT1G708 60) derived from phytozome v7.0 (chr-ID Chr1; pos 26718438 to 26718982 reverse strand)
aagtatctactttggttgggatccttgagacaaccgtagacctaaaatcttcgacagaaaagtttcatgacatgtttgttgggaggccacacaatatctccgatgtatctccatccaactttcaaggctgtgagctgcatgaaggcgaaatgggacaagttggtgctatcctcttttggaattacgttcatggcaagtcaaattcatttttctctatttatataaatttttataagattcatcgattttcaaatcaaaataaataggaaacgggtggattaactcatatgttttatatattactttagatcctctcatcttatttcaatgtgtgatttctaatactctcatacctataaatatacatcaacgttatattgatcagatggggaggcaaaagtagtgaaatagaggattgagtcaatagatccggagaacaatcgggccacatatagggtgttagagggtgacctaatgaaagagtacaagagcttcttgatcaccttccaggtgacccctaaggaaggagaacctggaagtgttgc

SEQ ID NO: 1271 - DNA, 409 bp, Arabidopsis thaliana
  Intron number 1 from transcript AT1G71750.2 (locus AT1G717 50) derived from phytozome v7.0 (chr-ID Chr1; pos 26988468 to 26988876 reverse strand)
taaagcttgacatcacgaacaagcacgttgtcttggtaatctccatctctttatgcgtgatggatctggatttgggtaatatgtgttttgcatcagttttgattcagtttctttagcaattgagttttagtattcatttgaatttcatgaagtttgagtctttacagcttaaaattgatatgttggtttctgagttttaacgtttgaagaacacttgtgatatgcaaaaatgtgatgaatatattagaaaggagaccacactgaatcactgatgcttcacattctcatttgataatgtcttggtaattattttactcttaagcattcgaaatttcactactttttatattcactagttatgtgttttcttaaaggtcgaggacattgtggatactggcaatacacttag

SEQ ID NO: 1272 - DNA, 955 bp, Arabidopsis thaliana
  Intron number 1 from transcript AT1G71870.1 (locus AT1G718 70) derived from phytozome v7.0 (chr-ID Chr1; pos 27032970 to 27033924 reverse strand)
cgtctctgctcgggtatgtatctttatactttctgttatgtgaatgtaaatggtcaaaattatagttaaattaaagatgattaagtggtcaaaatttgagtcaaagctacaaagttgatttgagtcatgattagactaatgattagtgattaagtggtgaagatttaagtctagaaaactatttgactaagttgatttgggttttgcatttgaaggttcaaaatcatgaaacttttgaatattaatttcgttttttttaaaaatgaattatgtggtgtttatgattgatattggaaagagtggaagtaattatattaaattaaagactaaaaagacaaaagtcttggaacttgaaggtaccaaaacatttcagtagatgcaagaatgttttattcaagaaagatatgaacttttgttcttgtaattgacataagttcttttttctgtgtgtgtttttcgaggaccttattatgtgtttagaaggttctctgtttcctagtgattagtattttgttcgagaaaattttgaattttgttcttgtatctaattatggatttactcaagggaagttcttagaaggctctttgtttcctagttgttgtttttttctttataagtttcttaacgctttttcgaaaagaagaaaagagatgataaaaaacgtgcaatgtaatgggaaaatgttacatcaacttccattaataggtcactccgtggtatgtgattggacgttaacatacctaaaaataaaaatatataaaaaagtggttgaaaagagagtagtcaagtgtggtctattttattgttgccaatctcatgatactgttcaacctcattgatgtccttatctttcctttacacgtgacaaaagtttggcttcaataacttttttaagatttggtttcattgattttctcaggttgggaacgagctcggtgcaggtagaccttacaa

SEQ ID NO: 1273 - DNA, 321 bp, Arabidopsis thaliana
  Intron number 1 from transcript AT1G71950.1 (locus AT1G719 50) derived from phytozome v7.0 (chr-ID Chr1; pos 27081061 to 27081381 reverse strand)
tatcatctccgtaccctttcctctgctctcggcaggtctgtaatcaaattgcaactctcgatttccatgggttatagatgcaatttgtcttggatgagattttttttgggtttgatcgctttgattttagggttttgtttctgtgaaatgggggatttttcaatttagtagctgaaattgttttaaagaagagatattgttgtctgattacggattgtctcactttatgtttatagtttggattgcttcaacattgattctatgtgtggatgtgtttgttcttatgttactgattattatacagtgaggaagctgcaaaag

SEQ ID NO: 1274 - DNA, 275 bp, Arabidopsis thaliana
  Intron number 2 from transcript AT1G72070.1 (locus AT1G720 70) derived from phytozome v7.0 (chr-ID Chr1; pos 27118968 to 27119242 reverse strand)
acaaagatttcaaggagatcaaatccgcttacgaggtaaaacaaaaaaatgtttttctgatttcttgattttttttggattatttaagtttttttttggttttggacaaaaaatttctaagttaagaataaaaaatacaaacccgtattttgtttgcttttctgattttgattctttcttatctttaactttttgaatatgtggtgtttaatattagccatggtaaaacgtaattgaaaccattttccttatattaatcacattttcagtgtttg

SEQ ID NO: 1275 - DNA, 295 bp, Arabidopsis thaliana
  Intron number 2 from transcript AT1G72125.1 (locus AT1G721 25) derived from phytozome v7.0 (chr-ID Chr1; pos 27134573 to 27134867)
tcctggttcgtctccttctgtctcttctctttcgatctgaattttacaattagtgaaggaattgtagaaattgattcgtttcaaccgcaatgtgatggtttggtacggtttcggttttgattaagtcaaataaaatttttaattttcaaagaaacttcggttttagatcggttttattccttttcggtttgatttggattcggtttctctgatatagaagaagtagaaattgagttgagaatatttgaatttgatgtcagggactggcgtttctgactttatctgcgtttctgat

SEQ ID NO: 1276 - DNA, 465 bp, Arabidopsis thaliana
  Intron number 1 from transcript AT1G72420.1 (locus AT1G724 20) derived from phytozome v7.0 (chr-ID Chr1; pos 27263187 to 27263651 reverse strand)
aaagctcaggtgaagtgaaaccaaactcatcctttgtcttgacgatttgatttctcttgtttttgtttgtgcaattccctatggattcttctttggtcgttggtcttttttgtttttgtctgtgggtcgatgtgattttatcaattcttgtctttcaagtgtttgttgaaatgcctcaatgggaaaatgtaaggtttttcagggaatccattaatgggttctgctcaacccaaggattcaagtaaccctataacttcagctccgaatagggctgcagtaaaattgcttaagtctctcttcattgggttatgcgttgtgctagagtttccaaagagatgatctttcatttctcttttgcaacctcttgttatcaatctatgggatattaaggttattctccattttcattccggaaagaaattaaccagttagtgttgttcccattgatccagcaacttcagaact

SEQ ID NO: 1277 - DNA, 359 bp, Arabidopsis thaliana
  Intron number 1 from transcript AT1G72450.1 (locus AT1G724 50) derived from phytozome v7.0 (chr-ID Chr1; pos 27275659 to 27276017 reverse strand)
cgatcttgaactcgccggaaaattcgatctcaaaggtatttatttatttttccctatctattccgacggccgccgcctataaagaccaaagtttatatcatatacttttagtatcctgcttcgttgattattagcataaagtttaactatatattttttttgttgaaatgcaaaattttaaatcatttttttcttttcttttctttaaacttaagcatggtattattttggacagcttaagtatattaaagttagagattctgtgaagttttttaaaaaacgtaataaacatgtaatttgattttgataaattttaatcggtttgcaatttctgttctaatttgttttaggacaacaaa

SEQ ID NO: 1278 - DNA, 454 bp, Arabidopsis thaliana
  Intron number 1 from transcript AT1G72770.3 (locus AT1G727 70) derived from phytozome v7.0 (chr-ID Chr1; pos 27390220 to 27390673)
cgaatatcttctaaagattcatcaactggttagttctttctctcttcttttttctttcctgatttttttatgttgtttttctgtgtagttagcttttcaatcggaagatttttgctattatgtgtcgaatctctcttgttgttttgagctttgtgtttagttttgcttaagaacaaagtttaaattcatctttctatttctgggtaaagctaaagcttcttttttaatttagatccaaggaaacccatgttctactatatgattatggacgttaatggttcgaattttttagggctttcttgtgattgatttcgctgattttccctcctttttctggtttttgtgtgaattttctttgacatgaccgtttggataatgattcgtgagtttttgattagtgctttgtgatctctcaatagggttgaaatcaagataaggatttgagaaaagatcg

SEQ ID NO: 1279 - DNA, 879 bp, Arabidopsis thaliana
  Intron number 1 from transcript AT1G73480.1 (locus AT1G734 80) derived from phytozome v7.0 (chr-ID Chr1; pos 27629874 to 27630752)
gtcacctctttccccaaatcacaggtcatttctccattattttaatcatttaaggatttttggtttgattaatgtattagtagtcgttgtcaatcttaggatcaatacataattatgcatattagcctttttgagttcaagtgagtcttgttgttaactagagaataatgtcaattggatgtttctggaaattagtaatggaagaacaaaaaattccaaatgatttagatgtcaagtgttgagagaagatatttgtgttggattttattttattttgtctggtagtcctaattaatatcttggctatagcttgaggcttgagtaattgaatattgtggtggatccccttgatatttatatatatattccttcttgctcataatattacattattttgattagcttaaccagagatagtcatatatgtttttgttgaactaacctttaatagtgatgattatttaatcaagtaacaggattagatttagttggtaagcttttcttgagtgttatgaagaaattatgaagcagattagctgggaaaatttagagaaagatgatatttgcttgtcaaagtggttttcaaggatcattgtataatattagatgcatgtgactttgttgataatgatagatacatacgaccgtgtacagtatctttccttgcaaaagacatacaatctggtttaatgtttcgttaacactatcactttcctttcttttaatatggttttgaatctttcatgcctctgattttgtaagctattctgagctctgtttaaatacaagtcaagaaagtggtaaactttcaatcattttcttgtctggtttcttattttttttctatatgttcttgcaggggacttattgttctgctac

SEQ ID NO: 1280 - DNA, 489 bp, Arabidopsis thaliana
  Intron number 1 from transcript AT1G73760.1 (locus AT1G737 60) derived from phytozome v7.0 (chr-ID Chr1; pos 27740126 to 27740614 reverse strand)
ataaaaccaatagtaacagtaataatcatagagaggtacatttacattttctgttttaatcctaaagtttccatttttattattctttgcgtgtgtatgttgttaatttgattttgagtatctattgaaatttagcttaaatatttagggtttttaatatcttaagttagtttataatatctatagaatatttgatttgcctctatctagtagttagcacacttagcaagcattagttttttttttcttttttccgttttgatttaggtttatcgtcttttcgtatctataacaaaattaggctttgttctttgatatcatatcaaaagcttctgtggattaaaagtaagtttttttcagtctgtttgtaactgatgaagtttttctagtagtttcagtatgaggtttggatttttgtgttcctaaatcttttaactcaactgttacattgcagggttcttcttctcttcttcctagacgatctctcaa

SEQ ID NO: 1281 - DNA, 751 bp, Arabidopsis thaliana
  Intron number 1 from transcript AT1G73860.1 (locus AT1G738 60) derived from phytozome v7.0 (chr-ID Chr1; pos 27776038 to 27776788 reverse strand)
ctttcccgataaaaacatcgtcttgattttctaaggtaatgagaacaaagatcgcatctttttttctttctcctcatatctttgttgccatgttgcgattttgctgatcgcgactttgagctatgttttgacttggtttttcaatgttgaatttttttttctcttgttgcaccaatgtacccttctggtaggttcgtctttagttttgtttccttctggctagttttgttttatcaagttttgttcgattgtctcacgttgctgtttttgtcttaatccctcaattcataatgctgtataacggttaaatcatgtgaatttatactgggaactagaaaaaatctcatctttgaatccctagattaatgaaattaatggaaatgtgattgttaggatttagtatcggctttaaatatggaaatatgagaaatttccttataataaattaagaattctcaaattcatcacagtaatccctgactctggttactatgttttattgtcagctaagattttttattacagagtaaagctgattacaatgatgactctgagatagttatgtctagcagtgccatttgatcatgttcttgcacgtctttgcatgtaggaaaagacaaaaagaactaggctttggttttcttttcatctagattgctcttctatgtgtgtgtgtgtgttcttatgaattttgtctaatgctcattttctttccctcaatcaactatgtttcaggagtttttgctaaaga

SEQ ID NO: 1282 - DNA, 294 bp, Arabidopsis thaliana
  Intron number 1 from transcript AT1G74010.1 (locus AT1G740 10) derived from phytozome v7.0 (chr-ID Chr1; pos 27833522 to 27833815 reverse strand)
tcgattttgcccagatcacagattcctcgtaagtgtctccttcttaggatctccaagattataacttttcaagatcatgcttctggtttaaggaatctttttcttatcaaatatcaattgttatctaattaacgatcttgtttctttatatagtaattattatctaatattcttaagacgtatctggctcattattattttaaattgttgtatatatattgtaacaaaatatttgtattgctgcattttttaagaaatattttttaatcggtttgattactctaggaactcggc

SEQ ID NO: 1283 - DNA, 734 bp, Arabidopsis thaliana
  Intron number 1 from transcript AT1G74020.1 (locus AT1G740 20) derived from phytozome v7.0 (chr-ID Chr1; pos 27836336 to 27837069 reverse strand)
ttgactttgcccagatcactgaatcctcgtaagtcttgttcttttctaagatcataactttttgatgattatgcttcttctgggggttttgaaattggaatctaaatggcattcgtttattaacactcgtttctttatggctacaatattatggaattatgatttatgactgatcagagatgatatagccttcttatttttacaaaaaatatatcatatccgcattttaatccgattctcttttggactatttgaagttacgagatgatgattttatggtttcttaaggaaataatctaaaaactcctctaagctacttatcatgtaacttgattaaaatttcacatgtgaaatcttgttacatgtgttgtatattacaaataatggatgatacttactcaattttgtccacccgtaaaagaattcatgtagggacgagtggacgaaaagcaaccttttttagttccttgtttttatcggcttacgttagcaatctgtcatataccggtttaggtgaccaaaacgcatctcggcgttcacacacacacatgcctccacgtgaaaaagagtcaaaaactaagatacacatgatacctatggatactaacatataattttgttgttgtactaatcaaaaacatttttatactacatgggaactcttataagttcatggttatttgtttctcttgttcttaaaatgttttttggtttgaatactttaggaactcttc

SEQ ID NO: 1284 - DNA, 825 bp, Arabidopsis thaliana
  Intron number 2 from transcript AT1G74710.2 (locus AT1G747 10) derived from phytozome v7.0 (chr-ID Chr1; pos 28070756 to 28071580)
ctccgtcgttttcctccggcgtcgttcggttacaggtacatcactacatcatcatcatcatcatcatcctctgtttttttcttctaagacacaatccgatttgctgctgtatgtgaaagaatgagatcacgccacgtggtgtttttacattggtctgtggtgatttcgttctctagcttgctgtcttgctgcatcgtttatgcctaatcatttaagatcctaatcgttatgattattaaaatcatactataaagcagagctcacaacaacgataaatatatccaaatctaacagttaatcataaactattagaagatgactaataattatcaaaaagatatggttattatatttcttattagtttatgaataaaacacacactcgaactcggtcgtacaagattccgtgagtccatcgaactatttaattgggacttttgggacctttacatgtaaattataatgaatattttcttttagtcaattttacgtagactaaatcaaatacattttagaaagaataatcatgtttttttagtcctcgaaatctaatttaacactgttaacttttagttagtgtggccatgctaagataatttagctagaaaagtaataattttgtgttttgtgggccagaaaataagtaaaataatgattagaatccaatttgttgtaaaggcaaggcggcgatcaaatacagtcactctcattaaaacgcagagttttttaaaaaacccaaatcacagtcgaattttcccgcgcaataaaccctaatttggatttggtgcaggttccaattgaccagcaaatcggagcaattgattg

SEQ ID NO: 1285 - DNA, 696 bp, Arabidopsis thaliana
  Intron number 1 from transcript AT1G75020.1 (locus AT1G750 20) derived from phytozome v7.0 (chr-ID Chr1; pos 28171083 to 28171778)
tcgccaacttcttccgtttcttcatacttctccaggtacttcgtcgagttcctcgtgctttagattgtttttgcttttttcgaagatacgtgagagaagtgtttctcttgctctgtctcttctttgatcttatatcacgtgggatctgattttttagttgcggtattcacaagtctttcccaatttgaggatgttttgtctccgtgatttctgtgtttttgttttggaatattgatgattatagattcgaaattatgcagctttagatactaactaaatgacgaatcttttctcattattcgcttgttgaatcttccactgagctcatagataaggaattctctgttcattgttgcttttagagcttaattcatgttcctgagattcaaatttgcaacctttttcccacttatgtaagaaaaaatggctttttatatattcttcattcatggctgtgttgattaggaatctctaatctctatgtctactgttagattaattgtttggtattgatactcaaattgcatatatttaggttcttgcattggttttttatagtatcttttctgcaactgagtctttgtatttaccaaaaaaagaaaaaaactcaatctttgtggggaacttaaaggtggcactgagtaatatttgaatctcattgctgcagttttgtcttgaggtttatctggaaaaaag

SEQ ID NO: 1286 - DNA, 851 bp, Arabidopsis thaliana
  Intron number 1 from transcript AT1G75090.1 (locus AT1G750 90) derived from phytozome v7.0 (chr-ID Chr1; pos 28188400 to 28189250 reverse strand)
ccactggatcacacctaattcaggtctctttgtctgacacctttttttttccctctttgcctcatttaactttaatttaaattcacattttttctctcatttatttagagaaaattctgttttttacctctgaatttcgtgaataacgaggaagtatataatccatctgttactttttgtttgatcttttagaaaatacacaaatattaagaaaacataataaatgttgcatttaaatgtattattttttgtgatttacaattttcaataactttaaaccaatgatattcactaatttgtgttgaagtttacaatttatcaattataactaataactattgtattgaaaatctaaaaaattaatctttttgaaacaatttttttttctaaacaatcaaacaaaaaggaacgagggagtatatttttaaagaataaaacaaaatattagtttttaggttttattgttaggaataaaatgttttacactatgtagagacttgttgtccttgtcacaacatttaatgaatctgcaaagaattaaaagatacttaccaaatttcttcgtttttggccccaataaaatatctcaatcgactttataaattgatgccatgtgaatggctttttatggttttcgaaatgtaattttgttttgataatacgttaaagttaataaaggttacaatcagttttcatagatgtcaacaacacattaattgcacctagcaaaaactaggtattgtagttgataaataaggacaaaaaaaaatgtagaagatgattgatgacattggatatgtaagtttttcagttaataataataatggtgattgatcaaacagacccgatct

SEQ ID NO: 1287 - DNA, 485 bp, Arabidopsis thaliana
  Intron number 1 from transcript AT1G75560.1 (locus AT1G755 60) derived from phytozome v7.0 (chr-ID Chr1; pos 28372742 to 28373226 reverse strand)
gaggatttttctcggccaagttttctctagctcaggttcgtcgtcttctatcttctctttctcctcctaattttttttcatttttgcttatcgtcatggagacgtagtttagattcaatccatgttgttctagtttttggctggtttcataatctgtggttgaatattattgttaggttaaaattcgatttgtgagatctgttagttagattgtacatgacggtgcgaatttattgaatctgtttaaatctattgaaacgtgaaacgcatttgagtattgtgaggctgaggaaatttctgaaagtggttttgggacgatgatgctggtgttgcggagtttgccataatcagatctgtatgtatgtgggtttcttgataaaagttgtatgaggaaggcattggagatttgtgttgaagaattgatgtatgggagtatgaaggaggtaatgttgttggtgtgtgtggttgatgttggcaggtgtttg

SEQ ID NO: 1288 - DNA, 266 bp, Arabidopsis thaliana
  Intron number 2 from transcript AT1G75760.1 (locus AT1G757 60) derived from phytozome v7.0 (chr-ID Chr1; pos 28447600 to 28447865 reverse strand)
tggacgacaaagacaattttgctatctactacgtcgtaagttgttctttctttctttccttttttggttctttttcgagaatctcaacttgtgtttttgaagaatgtgaatcatatatttgaaaagggttataaagtagcaacctttagttccattagtttccatatgtgatcatttttgttagatttcctttgctaatcactttgagtttcattgttgaagtgtttagttgtgaagagtttttaaatatggttgcaggttattcc

SEQ ID NO: 1289 - DNA, 566 bp, Arabidopsis thaliana
  Intron number 3 from transcript AT1G76200.1 (locus AT1G762 00) derived from phytozome v7.0 (chr-ID Chr1; pos 28593952 to 28594517)
gtgatcacggtcacggagatcatcactaggtaatgtctttactagtagtattgtcgatggaatcattaagaaagatgattaaaaaatctcctttttcgtagtaaacacgcattattgtttataccgtatagcaattcctcaatgaagctaatgtctatgcataatgtagagtagcatttctaagttgtcacttactaacaagatctcttgttaactgctatctagttggttttgaagaaagatgatagctttgatctggttttggttcatacaagtggtgaaagtttagaggatctttaacttctctataggatgttcttgatttatatctactagaatgaatcattgaaactctcgggagtgaatgaaaattgagtgcctttattgtgaatgtttgttattagtttagtggtacatgttttgagttttctctttgtttagacattgatgatttgtagttatcctcgagttcacctttcatgtaaccatataagcattgctcaaactacttgacactaatctggttttgggttttgctgctaggtctcactgaacctttgaagatc

SEQ ID NO: 1290 - DNA, 702 bp, Arabidopsis thaliana
  Intron number 1 from transcript AT1G76440.2 (locus AT1G764 40) derived from phytozome v7.0 (chr-ID Chr1; pos 28683006 to 28683707 reverse strand)
aacaccatcatcggaacttaccggagttcgttacggtaccttaaacccaaacccttctccgttttcgctttgttgattatcttcttgagtgacttcgttttgagaatttttctgggtttcggcattgtggaatcgaaattagtttttttttttctgttttgggtctcctctgtctcctttaactccattttcctacgaatctgtttctttaaccctaggaagacgaaaattatcgcttcatcgccacttattctagggttttgaatgcaaagaagaactaatttcataaacctgattgagcttagatttcaaatgatttcgactgattcgtactatgaaactcatcttccacatttagtttctcaaatcatttgagaaatctagctcaaacgattcgagtttcagaacttttgttcatcaaaattaagaatttggtcatgatctagcttagtttgtttcttcccttgtactttcaatttgatgttcttggaatcttccttcagagagattagatccttttactcataaagttttaacctttgctctgtttgtatagaaaaatcttataggtctctttgcttttacatcttcaaacttgacttgtgcttgtgatttgattgttgtcttcttcttttgctttcttaattgtgatattattaacaggtaggtttggattctatctcttgtgaaaaaaacagaaac

SEQ ID NO: 1291 - DNA, 698 bp, Arabidopsis thaliana
  Intron number 1 from transcript AT1G76440.1 (locus AT1G764 40) derived from phytozome v7.0 (chr-ID Chr1; pos 28683010 to 28683707 reverse strand)
aacaccatcatcggaacttaccggagttcgttacggtaccttaaacccaaacccttctccgttttcgctttgttgattatcttcttgagtgacttcgttttgagaatttttctgggtttcggcattgtggaatcgaaattagtttttttttttctgttttgggtctcctctgtctcctttaactccattttcctacgaatctgtttctttaaccctaggaagacgaaaattatcgcttcatcgccacttattctagggttttgaatgcaaagaagaactaatttcataaacctgattgagcttagatttcaaatgatttcgactgattcgtactatgaaactcatcttccacatttagtttctcaaatcatttgagaaatctagctcaaacgattcgagtttcagaacttttgttcatcaaaattaagaatttggtcatgatctagcttagtttgtttcttcccttgtactttcaatttgatgttcttggaatcttccttcagagagattagatccttttactcataaagttttaacctttgctctgtttgtatagaaaaatcttataggtctctttgcttttacatcttcaaacttgacttgtgcttgtgatttgattgttgtcttcttcttttgctttcttaattgtgatattattaacaggtaggtttggattctatctcttgtgaaaaaaacag

SEQ ID NO: 1292 - DNA, 708 bp, Arabidopsis thaliana
  Intron number 1 from transcript AT1G76440.3 (locus AT1G764 40) derived from phytozome v7.0 (chr-ID Chr1; pos 28683000 to 28683707 reverse strand)
aacaccatcatcggaacttaccggagttcgttacggtaccttaaacccaaacccttctccgttttcgctttgttgattatcttcttgagtgacttcgttttgagaatttttctgggtttcggcattgtggaatcgaaattagtttttttttttctgttttgggtctcctctgtctcctttaactccattttcctacgaatctgtttctttaaccctaggaagacgaaaattatcgcttcatcgccacttattctagggttttgaatgcaaagaagaactaatttcataaacctgattgagcttagatttcaaatgatttcgactgattcgtactatgaaactcatcttccacatttagtttctcaaatcatttgagaaatctagctcaaacgattcgagtttcagaacttttgttcatcaaaattaagaatttggtcatgatctagcttagtttgtttcttcccttgtactttcaatttgatgttcttggaatcttccttcagagagattagatccttttactcataaagttttaacctttgctctgtttgtatagaaaaatcttataggtctctttgcttttacatcttcaaacttgacttgtgcttgtgatttgattgttgtcttcttcttttgctttcttaattgtgatattattaacaggtaggtttggattctatctcttgtgaaaaaaacagaaacacaaag

SEQ ID NO: 1293 - DNA, 543 bp, Arabidopsis thaliana
  Intron number 1 from transcript AT1G76660.1 (locus AT1G766 60) derived from phytozome v7.0 (chr-ID Chr1; pos 28770491 to 28771033 reverse strand)
ggctcagagcaggatcaggtttctgtttaattctctctattttcgtttgatttcgacttcttgagcttttacttctctctgtctcagttctaacttcttcagattttaaagctttcgtttttttggcaagttgtttttttttcctacttagatctgactactccgactctgttcacactaatgttcgttagggtttatgttgaatctctcctttgatcattatgttattgtaaaaatcccagctttatgctaaatcgagctagtgattcttgagaattgaacaaaaaagttttacatttttctgaattgccattcaattagaagaagaaaaaattcaaccttttactggttatgatctagattcgatgcgtgtaagctataagatcaccatttcgtgctttagatccataatcattgattcactatatggcaattatcttcttgcttcacagatctcttttacacttacatgtcaagtgtctgagtgtgtgtgtgtgtccttttgcagaggaaaaggtggggaggttgtttaggagtgttctc

SEQ ID NO: 1294 - DNA, 775 bp, Arabidopsis thaliana
  Intron number 1 from transcript AT1G76900.2 (locus AT1G769 00) derived from phytozome v7.0 (chr-ID Chr1; pos 28881966 to 28882740)
acggagaagacgaggaaaaacaaagacacaactctgtaagttctgacccaattttttttatgttttgtctggaaagtttcaagatttgatttttgtggttctctttacattttctgggttttgtgtaagcatttgatgtgtggagtgtctctctttttgttattcgaattcattatcaatcttttgtgtgtgtttcatgtagatttgctcaatttttaatctagatctaaccaaattaattaactaaagatttagataagaaaagccctaatttgtgatctactatatgatccagaatctggagtctttgtttctacttgatatatgtaaatcttgaaagtttccttttttttttcttctcttcttgaagtagtaaagactttatcttttctcaattgaatccaagaatgattagagggtttatttattttgggaccaataaacagactttgttcttgggggcagagactgtttctttcccttttcttttttttcacttctttagaagattcttcatttgaattctgtccttcaattttgaagttgtcttgttctcttttttactaaatgtgaatcaaaagaatgttttcttaagttttaaaaaagcctgtggtggttactgcttttggtccattgataagaagaatcttcttttcttctcttctcttctcttctcttctcttccgtgtcattgctttgttattaagtatcattcagaatttgaatcaaaactctacttttgtgtcttgcagaacctttagagagagaaaaacaa

SEQ ID NO: 1295 - DNA, 686 bp, Arabidopsis thaliana
  Intron number 1 from transcript AT1G76900.1 (locus AT1G769 00) derived from phytozome v7.0 (chr-ID Chr1; pos 28882055 to 28882740)
tttttgtggttctctttacattttctgggttttgtgtaagcatttgatgtgtggagtgtctctctttttgttattcgaattcattatcaatcttttgtgtgtgtttcatgtagatttgctcaatttttaatctagatctaaccaaattaattaactaaagatttagataagaaaagccctaatttgtgatctactatatgatccagaatctggagtctttgtttctacttgatatatgtaaatcttgaaagtttccttttttttttcttctcttcttgaagtagtaaagactttatcttttctcaattgaatccaagaatgattagagggtttatttattttgggaccaataaacagactttgttcttgggggcagagactgtttctttcccttttcttttttttcacttctttagaagattcttcatttgaattctgtccttcaattttgaagttgtcttgttctcttttttactaaatgtgaatcaaaagaatgttttcttaagttttaaaaaagcctgtggtggttactgcttttggtccattgataagaagaatcttcttttcttctcttctcttctcttctcttctcttccgtgtcattgctttgttattaagtatcattcagaatttgaatcaaaactctacttttgtgtcttgcagaacctttagagagagaaaaacaa

SEQ ID NO: 1296 - DNA, 606 bp, Arabidopsis thaliana
  Intron number 1 from transcript AT1G77670.1 (locus AT1G776 70) derived from phytozome v7.0 (chr-ID Chr1; pos 29190163 to 29190768 reverse strand)
cgactcagaacgagtctactcaaaaacccgtccaggtaaacttctctgtttcttagtgatctttactttgatggtaaatagtcaaatgatgatgaacaaaggcattgtttcgattctcgtgttactgttcttgaaagatctaatcttgaagggtcctcctatttgtttgggcactgcttttccaacattggaagctgctgttctgtctatttgatgttttgttttttacctctgttcgtaatgatttccaactttgtccgatttggattccacttaagttcttgctgtttggtcccactgtaccttttaacagtttacactatcgaatcaatcccagtttcatcttcgttagctcgatgacccaattaatgggttttgcttaagcatcgcagagtttaaacccgataaatgattcttctcgtttgtgactttagggtcatcattggcatacgtactgatctcaatgcataaaagatttgtactttgaaaattttggatttggtatttgagatattagcagtaaagttttttctctctgttcttctaaatatttccaaacttgattacttaggtggcgaagagattagagaagttcaagactactat

SEQ ID NO: 1297 - DNA, 587 bp, Arabidopsis thaliana
  Intron number 3 from transcript AT1G77940.1 (locus AT1G779 40) derived from phytozome v7.0 (chr-ID Chr1; pos 29304278 to 29304864 reverse strand)
gaagtaagttcctttcttctttagctcgtccagtttttaaagattcattgttctcttgtttttgtgaaggttttcattgtgtataataactgagaatgtataatcttaagtagatgaaagtgttaaaatctgcttctatagaccattaaactgatgatggaagtatgatctcaagtcgaagaaactgtaatgtatattgacgtgaagtcttgatctttcgcaagttcacgatcggtttgaactgctgttggtgtctctgtatgtggttattgcaaatattgacatggttcataataccaaagattgctctgttggtctatgatttcgcattgttagattttgactcttagacaaaacttgatcttgctcgatgataatactcgaaggagcgttttaatacattatcttgatgatttcatcaaagaaagtagatgaatgtttattctattgaacatagtttcatgtttcaacgctcattcatcggttattcctcttgtatctaccactttggcttaactgtgtttttcttctctccttgttaatggctttcagataacgttgatttgggaacagcttgcggaaagtac

SEQ ID NO: 1298 - DNA, 848 bp, Arabidopsis thaliana
  Intron number 1 from transcript AT1G78780.3 (locus AT1G787 80) derived from phytozome v7.0 (chr-ID Chr1; pos 29622176 to 29623023 reverse strand)
ccgtgaacaagcttttcgaagaagaaagaacccatgtaactaaaaccaactcctttctcttgcctatctttattttctttcaacactatgcttagattactaacacaaatcaccacgctgttagactagatgtacgaaaacatcataaaatttaagtagagacctatatagtaattaaatggttcactagttgctgtaataatttccaaaaagttcaaaaatctttgattaccatatgatatccgatgtgacatatagcaaacatatacttcaaaaagttgcacaagattttcttgtaaaattccttggtttacattttctatttcctagtcttagaaattatcattatgtaattggatagaaaagaagccaatttggacagccaaagaagtaattgttggttattggttgcaactttttagaaaatatgattgagacaattaacaacttcaaaatgtcaactttacgcggataagaaaacgggattcaccactaatccattttaaactaatttctaaatatcaatcaacatgtattgtgagattataaaagatacaagcaatcataactcattctccattaaaaagctaatatggctactagggaagagagagataagtatagatcagtccttgaagatgcaggacaggttcaatggaggtatgataaccctccagacttcaatagtgtgaaccagctctttgaagaaggccagactaaggtccttcggttaatatatgtttcacttaaggtatgtgctatgtttatattttgtgaatctgattcgttgatagtatttgattttgagcgcaggtgtggccagaaggttcgttagaagagacagtgca

SEQ ID NO: 1299 - DNA, 448 bp, Arabidopsis thaliana
  Intron number 1 from transcript AT1G79270.1 (locus AT1G792 70) derived from phytozome v7.0 (chr-ID Chr1; pos 29816170 to 29816617)
ttccaaaacatcctcgtaaatgtactctttctctctttctttcctacacacacgtgtttaatctgtgttgttcttacacgtctttttaacttttgcgtttgaccttttatctgaatcctgtgtttgtgtgtctgtaaatatatatatgtgtgtctatgtgtatagtgctctgtttcttgtgattagactcatatgtcttattttcaatattaactataaatatataagtcacgcctagttattagtttttatcggtacgactaaatattcagacatcagttcacgtttcaaacctgtctcttcacatagttaagaaaataaaggcatcaaaaagattactagtaatgtttgtgtctactttatacatacatatgtcttgtttctttgtgtttttcagaatctgatctcttcgggaacgtttgtttaatttgtttcagcctttgaagat

SEQ ID NO: 1300 - DNA, 631 bp, Arabidopsis thaliana
  Intron number 2 from transcript AT1G79590.2 (locus AT1G795 90) derived from phytozome v7.0 (chr-ID Chr1; pos 29946433 to 29947063)
cacaatcacaaatcgcggtgcatatagtctaaagggtaagcttttcgattcctttcaccatgtaaatttaggtcaattccgtcgcttctttgatttggggtgtttttcctggcgcgaaatctttccgattttccctgattatgaatttataaataatgggtatcgcagattttgggtctcagtggctgattcttttcgactctagtttctgcttccgccgtctcatttttttttctacgcaacagtaaagtttttatttttccacctgaattttcggatgatggccgaagattttgtgtctatgctgatacctaatttttccatctgaaattgattttattcactgctattttcattttgttttcatatcattgtgactcgctactaaaagcttctaaatttgttgcctttttgtgaaaagctctttacacggtctatggtaattgtgttaagattcttgttcatcatgtacgagattttcattgggtcacaagagtttcgttgttgaagctactagtttttttcatgatcaaatacttctttgagctacttgtgattctctttacatgatctttatgtagaagataagtattgctgtgttttaattagttaggtacttgttttcaggtca

SEQ ID NO: 1301 - DNA, 731 bp, Arabidopsis thaliana
  Intron number 2 from transcript AT1G80380.1 (locus AT1G803 80) derived from phytozome v7.0 (chr-ID Chr1; pos 30218232 to 30218962)
atgtacctcctttagtggtactaaatattgttttttttcttcccttatgataatctcaaatcactgatgggtggatcaatctgatacatgtgttttgacgatgcagattggatttagcgctcctcaaggatgtggcaagactacacttgtgtttgcacttgattatcttttcaagacaacaaaaaagtacattgctctgctgcatcttatatctcatgtaactatagtgattcttatactaacattgcaagaatatctcaggaagtcagcgacgatatccgtagacgatttttacttgactgcagaaggccaggtaagagatatattaagattatacttgtagtaacctctgttgtctagacgttctctcgtctccgtttcttagcttccatttgtttttgcaggctgaattgagaaaaaagaatccaggaaatgcacttctagaggtaaatgctcaacatttttattttctgtatcttttctttagtttgaatctatggtcatggttacttgtttgtattcagtatcgtggaaatgcaggaagtcatgatctgaaactttctgttgaaacactagaagccctgtcgaaactgaccaaagaaggtttgtttcatcaataaagttttattcttaggttactattttcttatttaccatctaagtttttggtcattaactgcaggcttaaagatgaaggtacctaggtacaataaggtgagtcacagcttgat

SEQ ID NO: 1302 - DNA, 387 bp, Arabidopsis thaliana
  Intron number 1 from transcript AT1G80680.1 (locus AT1G806 80) derived from phytozome v7.0 (chr-ID Chr1; pos 30324222 to 30324608)
acgtctctttctattcaaccatttccaggtaaatcttctttgtgttgctattgatgtttgagtctctgctatgtttttatccttagctactcaagtcgtgcgcctgaacttgggctattaatgttttacatatcatgttagcttcagaatcatgttcatcattcaactcttataaaattcgagtttgtaacactgatgcttagagtacattgatttgctttttgtttttttctgatgtttgagtctctgctatgtttttatctgaccttacccgctcaagtcctgttctaagttcatttgattcagaatcgtgtgctacttaggttgtaacttttatcatctgattttgaaattttcaaaaattctatgtcgacagagatttcaagg

SEQ ID NO: 1303 - DNA, 535 bp, Arabidopsis thaliana
  Intron number 1 from transcript AT2G01660.1 (locus AT2G016 60) derived from phytozome v7.0 (chr-ID Chr2; pos 291270 t o 291804 reverse strand)
tgcgcgtggaggtcactctagagccaacggctgtaatgtcttctttgctccgttgctttttatttcttttataaagatttttatttgattttaaagtttttaattaagggaaaaacccgaaaaaatctccggctaattttagtttgtctgtttaatacctctattatttaattttctcaaaaaatatctaaattaatttttatatctttttaaaactttcgttttattaaattttgttaaaattagatattcaaattaacagccgttaacagtggtaactgaatcaataactgcagtaaaaacttaactgtacagtatttactatttatatatattttattatcgaatagttacgaacgtattgtcttagtcatgtggttatgtgagatttttattttcaagatttatttttttcgtttattttctccatcttctttgcatagaatttacaatttatgcatataatatttttgataattgtattgttaaaaatgtgttatttttgggatgtaattaggtgggaatcgtaataaca

SEQ ID NO: 1304 - DNA, 551 bp, Arabidopsis thaliana
  Intron number 1 from transcript AT2G01830.2 (locus AT2G018 30) derived from phytozome v7.0 (chr-ID Chr2; pos 367430 t o 367980 reverse strand)
ttcaatcctctcacaactcattacaggtaactaaaataatttctccatgtgcttgcttattagtcgttcttcctaatgttatgtttctctctgtgttctttctttctttggtcaaagctttaattttttttctattgttggatttgagacagtgaacatagctatgttcttgttccaataataaacaatcacgcctgtaaagagcttatgattgattagtgtgttttttagtattaattaatttctctgacaataattacttagtttttaattcttctctgtaagaaacctttggaaactgagcaaagttgcttcttttgagaaccatgcgtttctttctctcttttgttcttgaattcgcaaaaacatgtcctttttcgtctacaggtttctagggtttgtttctgtactataaactatgtttatggtaacattcttaatcataactacactaccaatgcttttatgttatatgtatgcaaaaaaggctctaacttttgttttctttcactattgtttcttcttttgttctctattgttgtagctcagat

SEQ ID NO: 1305 - DNA, 613 bp, Arabidopsis thaliana
  Intron number 3 from transcript AT2G01850.1 (locus AT2G018 50) derived from phytozome v7.0 (chr-ID Chr2; pos 386032 t o 386644)
caatacagtatcctctggtctgattctcacatcatgtaagtaaaaaaaaaagtaccaattctctcttaatctttgtttgtttggttcaatttaaaggaggttaggctattgaccccatttgatttaaaagctttatggattcaataatatgatcttctatttaaggaaacccaagtggggttttaatgatgggacgatctttttgttgaaaaaatatgattcaattttctttggtggatattaattcttattacttcttgtggaaagttttgtgatgcttgggacattatttgcttttggttgtaatgttcctgtcaattttcaagtgtgtgtgatcgcctaaaatggtttacagctttcgttttttggcatcaacaatgaccccatagagagtatgtttggggtccaattcacaagttgagaatctttacttaagttcatcaaaagctacaaatttttatgccaataatgttatctttctaagcttacagaatctaacttacttaatccaaataaatgttttttttggttataattatgtagtttgtactaaactactgatcaaagttgtgaaattgttgttctttttggttatgcagattctttgtagaca

SEQ ID NO: 1306 - DNA, 422 bp, Arabidopsis thaliana
  Intron number 1 from transcript AT2G01900.1 (locus AT2G019 00) derived from phytozome v7.0 (chr-ID Chr2; pos 406277 t o 406698)
cacaaccaacacaaaaccactcttctcaactacaagtacgtaatacatttaccctctttgatcacattttccttaacaaaaaccagttatcttcgtttatattgttaatacattgaatacttgggcagagaaaagagaggatcacaataccgttttattgccataattagtcacttttcttgcgtcgcactgcatttaaacctaattccggatacgcataaaccagtagagcttaacacgtagatgacaaaattgtaatcttaaggaaaccttcatttgattcctctgtgttccatgagttacaatgtttttaaataatgtaacgttttctttttcaaaaaaaaaaacaatagtgtaacgttttgacaatttttgttttaaatttaattttaattatctgtttctagggtttttgtaagcac

SEQ ID NO: 1307 - DNA, 424 bp, Arabidopsis thaliana
  Intron number 1 from transcript AT2G01910.1 (locus AT2G019 10) derived from phytozome v7.0 (chr-ID Chr2; pos 417234 t o 417657)
atactacttgtaataatcttctccgtgagcttcaggtttgtttttcttcctctctttttgatttgttggtttcttgacgatgacggttgatgataaaaaaaaaagtctttgtttttttttaactctcaagggttaaaggattggactcataatgagtttggtagagacaatttaactgaatttttagtcttttgttttcattatcttttcttctcttaggtcaaaaggattcctgtgaattttgactaaaacatgtcagtttctggaaatttctttactttttttttggtcttcatgtgttgatgttctttggttttaatttcatgcataagctcttgtactagaaaatctctgtttttgtgttgtattgtgattgatttcatgagtttaatggggttttttttgggtgtatgaaacagaaaat

SEQ ID NO: 1308 - DNA, 404 bp, Arabidopsis thaliana
  Intron number 1 from transcript AT2G02410.1 (locus AT2G024 10) derived from phytozome v7.0 (chr-ID Chr2; pos 632840 t o 633243)
aaagcaagaagcctcatcaatcttcttcttttaaggtccacacatagatgcacatttatgtaaaggtttcttctttgagaactaaaagtctctttttaatccaaaatagttgagaattcgaagcgggggtttgtgatcaactaatccatcataacattcattgttttgaattgattctgaaatggatttgccagtcttttcttcttggtttatgatcaattggtttactgatttgaattgaataattgaattctgaaattcttctctgtttggttccttttagatctctagtatcggagttacggatatgatgaattgttcattgagcattttgcaaaccattcacttgattttggtttttgatggcaggagtcagagccagaaccaccgagaatcaaatccaa

SEQ ID NO: 1309 - DNA, 344 bp, Arabidopsis thaliana
  Intron number 1 from transcript AT2G02410.2 (locus AT2G024 10) derived from phytozome v7.0 (chr-ID Chr2; pos 632900 t o 633243)
taaaggtttcttctttgagaactaaaagtctctttttaatccaaaatagttgagaattcgaagcgggggtttgtgatcaactaatccatcataacattcattgttttgaattgattctgaaatggatttgccagtcttttcttcttggtttatgatcaattggtttactgatttgaattgaataattgaattctgaaattcttctctgtttggttccttttagatctctagtatcggagttacggatatgatgaattgttcattgagcattttgcaaaccattcacttgattttggtttttgatggcaggagtcagagccagaaccaccgagaatcaaatccaa

SEQ ID NO: 1310 - DNA, 381 bp, Arabidopsis thaliana
  Intron number 1 from transcript AT2G02760.1 (locus AT2G027 60) derived from phytozome v7.0 (chr-ID Chr2; pos 773890 t o 774270)
gaatctccaccgatcttttaccttttcgcacaacagtgagatctctctcttgttctctaatttctgttctacgatgattcgttgctagatccattgattttagtttcttttcagatgttatcatcatcctttggacattttcgtgtgaattgatctcaaagcttcctaggttaaagagaattgtgtagttttgtatagaattgatctcaaagcttcctagttgtgcttataagctatttaggtgatgatcattaggttaggttataaacttgcttggcagattcaaatggtttgagataattgcatatccaagctctgagatagttggtttttgaaatactgtaatggttggttactgggatttgatagagtaagagaagg

SEQ ID NO: 1311 - DNA, 707 bp, Arabidopsis thaliana
  Intron number 1 from transcript AT2G02790.1 (locus AT2G027 90) derived from phytozome v7.0 (chr-ID Chr2; pos 787991 t o 788697)
ttttgaagaacataacagtaacgattcgctacattgtgagctctatttcagattctacattttaaattcttgttttgtacactttttaggaaaaaaaaactcacaacaaaaaaatgtttccgcttttgatttcttctactcagatctgagtattcactgttactccatcttcttcttcgctttgattttggttacaaagtatctctcttttcgattttgtatctctattttgttcggggaacgaaacggtttttgtgtgttttctggtatttgttcatatgaaatttaggttttttcccgctaaatcgacatgggttttggtttgtaatcttcaaaatctctgcttttgttcactttagttgatgggttctttggctttcgttacttttgattttcggctctctcttttgattcatgccacttttgctttaatcactgcaccgtcgatgtctgtgttcgtcttgtttgtaactgttaggtttaatctccctctctctctctctctgatttatgtcttgtgtgtgtttctagggtttctagttatggaatatgtttcagccttgtgtaaaattgatgcttccatgacttttgcgaccgtatatttgatgtgtgttacttgaaagtgtcaggcttttttcgttttaagacgaaatgtgtgttttggttttgcaggtttctatttttgtagcaagtttctaattgtagcc

SEQ ID NO: 1312 - DNA, 331 bp, Arabidopsis thaliana
  Intron number 1 from transcript AT2G03060.1 (locus AT2G030 60) derived from phytozome v7.0 (chr-ID Chr2; pos 901283 t o 901613)
tagtatcagcttggcgtttgaatttgcctctttaggtaagtttccttttcttcttctctttccttatctcttcttaataagggttttcacaatctctctgttttcttcagaaaaagattgaatctttattgaaaacccaaagtgatgaaattgaaattcatgatctgggtattatagattgcagattctggaaacgtattatgttaatgattcatttcaagttttgattttttgtgttggattgaagagaagaatagtttattgatgttttgtgaagaagaagaagaagagattttgattttggtttaatatatagttggggattaacagg

SEQ ID NO: 1313 - DNA, 356 bp, Arabidopsis thaliana
  Intron number 2 from transcript AT2G03060.1 (locus AT2G030 60) derived from phytozome v7.0 (chr-ID Chr2; pos 901784 t o 902139)
ttgcggtacacgaaggtaatctatctaatgtgtcttcctttgttttgtttgttgtcaacataatcattgtctctcttggattgtgttatctgaatgtattatgattgttcttcagtagcatggaagaggtgattgctaagttttctcaagtaacaccgcaggaaagaacgaaaaggtttggtgttttcttatcgatatgtttttgtttgtttctccggcaatggttggtcttgttttactcattggtttcatcttttttgaatacaggaagttcgagagtcttgaagtaagtttattttcacataatcaaatgaagtttttggttaattttgatccttgagaatctctgattttag

SEQ ID NO: 1314 - DNA, 331 bp, Arabidopsis thaliana; identical to SEQ ID NO: 1312
  Intron number 1 from transcript AT2G03060.2 (locus AT2G030 60) derived from phytozome v7.0 (chr-ID Chr2; pos 901283 t o 901613)

SEQ ID NO: 1315 - DNA, 682 bp, Arabidopsis thaliana
  Intron number 1 from transcript AT2G03360.2 (locus AT2G033 60) derived from phytozome v7.0 (chr-ID Chr2; pos 1023506 to 1024187 reverse strand)
tcgtcaattgtttcgttcgttaagtttctctcaaggtatgtatatatcaaattacctcttcgattcaaccatataaatcttaaacttcttggttgagtcgtaggctacgatcaaacacttttacttttatattacctaatgttttaacgatcgagtcaacatttttgcaataactcacacatacttggctggatttgaatctaaatgctaacattacgaaaccgcactaattctaaactccggtcaaaagaagcaactaaaagtaaatgataatgattttttagtctaatgaaaatttgtttcttgttagtttataattgcctttttccacgggattttcttgatgagttaaagggttacgtgataatttttttcttcttttaattttttgttaaaaggttacgtgatagactgctatatagttaatccggaatgttctataaatagaataatacaagttaatctattgcatgggaattaaattcctgccaataatttacttataagcatgtgaagtgtttcttcatttaataacttttgtttttcttgaatatttttatagtaaaaaaatttcttgataaaacttttttaatagttacttattgttttcttacaaatatttacgttgcgttttgaccaaaaaattgaaaaaagtttcctctgtaggtacgttacaacaaag

SEQ ID NO: 1316 - DNA, 682 bp, Arabidopsis thaliana; identical to SEQ ID NO: 1315
  Intron number 1 from transcript AT2G03360.1 (locus AT2G033 60) derived from phytozome v7.0 (chr-ID Chr2; pos 1023506 to 1024187 reverse strand)

SEQ ID NO: 1317 - DNA, 321 bp, Arabidopsis thaliana
  Intron number 1 from transcript AT2G03480.2 (locus AT2G034 80) derived from phytozome v7.0 (chr-ID Chr2; pos 1050945 to 1051265)
cgccattgttgttgctctgaaatctgttaactttggtacgcatctcaaaaaccctaatttgattatcgtcattttgtctgcatttaatttatttgatctgatcttcttcgccattctcgagatctcaatcatgggtttatccatcagaattattatcaagcttttctttttcttgaattttcgccgacaaaaaagcaaaattcgcttaatgtatagattcactagaaatggtaatgtttcttttttgggaaaatttcgatttttgatctgtgagatttgattgcaggtgatttgattgcatttgcctttgagagttttaat

SEQ ID NO: 1318 - DNA, 973 bp, Arabidopsis thaliana
  Intron number 1 from transcript AT2G03810.4 (locus AT2G038 10) derived from phytozome v7.0 (chr-ID Chr2; pos 1161695 to 1162667)
agtttgagtctttgtatctactttgatcaagtaaggtttgttacttcactgttctatgagaagattcttcttaaagtcttgaccttttgattcatttggattctacttattagatctgtttatattctccatagtcttgtttctattagtttatttgttggtggtactagatccaattttgtgtttttaacctttatttttctgttgtagattcttctttctctgcaaattccaattgtttattgatgttcttatccaaaattttttatttgatagaaaaaaaatgattgatttgattgcattgcagctttgtgagaaaagaagtttaaagctttttttcttttttgtcttctttcttatgacagtgagctaaagattcttcattctttgcttaagagataaaaactttgctacatttgtgtaaccatgattgcaaatttgctaacaaatgattcttacaattgttacaagtaatctagattaagccatgtttttgcaattttttcttgcgtattgttatggtattacagcttttatctaaatgtctttttctttaaattagtaaaaagttggaaagtggtcattgtagtggttgattgcatctttttgctcatgatgatttgtttttggacttgagaaaataaagaatcttttcgttcacatgtgtgactgaccataagttaagttatgtatcctttagaatattttgtgccttaaggtttgtttctgtcacaatcttcctggcccattgcttcgttgaacaactcttcatatggaggttgcttctgtatctaactttgagatttgctgatagatagattgattctatcctctagatagaagtttgcttatacttgtcttcttattcttgttatctgtttctttcttatgagtcctgcttgaaactgtttgatagagattgtctctttgatgtgtagattgttggtcgcgactggtgcttgaagatatagct

SEQ ID NO: 1319 - DNA, 978 bp, Arabidopsis thaliana
  Intron number 1 from transcript AT2G03810.3 (locus AT2G038 10) derived from phytozome v7.0 (chr-ID Chr2; pos 1161690 to 1162667)
gaagaagtttgagtctttgtatctactttgatcaagtaaggtttgttacttcactgttctatgagaagattcttcttaaagtcttgaccttttgattcatttggattctacttattagatctgtttatattctccatagtcttgtttctattagtttatttgttggtggtactagatccaattttgtgtttttaacctttatttttctgttgtagattcttctttctctgcaaattccaattgtttattgatgttcttatccaaaattttttatttgatagaaaaaaaatgattgatttgattgcattgcagctttgtgagaaaagaagtttaaagctttttttcttttttgtcttctttcttatgacagtgagctaaagattcttcattctttgcttaagagataaaaactttgctacatttgtgtaaccatgattgcaaatttgctaacaaatgattcttacaattgttacaagtaatctagattaagccatgtttttgcaattttttcttgcgtattgttatggtattacagcttttatctaaatgtctttttctttaaattagtaaaaagttggaaagtggtcattgtagtggttgattgcatctttttgctcatgatgatttgtttttggacttgagaaaataaagaatcttttcgttcacatgtgtgactgaccataagttaagttatgtatcctttagaatattttgtgccttaaggtttgtttctgtcacaatcttcctggcccattgcttcgttgaacaactcttcatatggaggttgcttctgtatctaactttgagatttgctgatagatagattgattctatcctctagatagaagtttgcttatacttgtcttcttattcttgttatctgtttctttcttatgagtcctgcttgaaactgtttgatagagattgtctctttgatgtgtagattgttggtcgcgactggtgcttgaagatatagct

SEQ ID NO: 1320 - DNA, 421 bp, Arabidopsis thaliana
  Intron number 3 from transcript AT2G03830.1 (locus AT2G038 30) derived from phytozome v7.0 (chr-ID Chr2; pos 1171599 to 1172019)
aggttcaagcgaacaacttcgagtcacttcttcaggtaaatcaatcatttgagaaattataagctgtttcttaatattatataaagtatttagacctttcttcttctttttcttccttaaagaaatcgataattagcaaactcacataacttaagcacacttctatagtagtcaaacgaagttcaaacaaatagatataaaagtcaaacatacgaatcattgaccatgtcagaagaaaatctttatcaatgtttcttttgctttcttcttcagaattttgttattatctttctaagtataatatataaaactaaacgaaaagattcgaaacctttctgggactttcaaactgagaagtataatatgagatgattttgtattaagtctagtttatgttttgatttcacaggaaaatctaagg

SEQ ID NO: 1321 - DNA, 793 bp, Arabidopsis thaliana
  Intron number 1 from transcript AT2G05220.1 (locus AT2G052 20) derived from phytozome v7.0 (chr-ID Chr2; pos 1895180 to 1895972 reverse strand)
ctccgtctccgtctccgtctccatctctgtctccggtgagtattcataaatctgatctcagacaacattagatttcgattgtaagttctttaggtctgtagattttgagtaatgggtttgacaacattagatttatattgcccactctcacttgtttgtgttgattactgtaatgttgaatttgggtttcatctactaactaagatgaaatcaatttgagaagactagtggataatagtgaacacgtttacatgacttttgacttgatagtttgctattcttgttgtatctgtgtgaattgttataggttgcttgattttgatgttcatgtgtcaaaattgataatgtagcttttgtatctgattaattaagattctaatgcagttgagtttttggtcttaatattaggcattgtatattataccaacgtgtgaagaggttctgttgttttctgaatttctcttattttgtgtttcattcagcaaaagtgtgtcgtgagttgatattcttttaggctgaatataaatgtatgtataaaatttggcttatattgtttgataagaacactagacctctttcaagttgagcgttatgttgatgtatattacttgactcattttcaattctcttgacaatatttgacattgcatttacatgtggttcctgtgtttgtttagtgttcaacctgaatgttgaagtttaagacataaatcatctatacttggttgtttcttgattttgaatccttaataagacatggaatttctcctctcatcaggtaagtcactgaaag

SEQ ID NO: 1322 - DNA, 789 bp, Arabidopsis thaliana
  Intron number 1 from transcript AT2G05220.2 (locus AT2G052 20) derived from phytozome v7.0 (chr-ID Chr2; pos 1895180 to 1895968 reverse strand)
gtctccgtctccgtctccatctctgtctccggtgagtattcataaatctgatctcagacaacattagatttcgattgtaagttctttaggtctgtagattttgagtaatgggtttgacaacattagatttatattgcccactctcacttgtttgtgttgattactgtaatgttgaatttgggtttcatctactaactaagatgaaatcaatttgagaagactagtggataatagtgaacacgtttacatgacttttgacttgatagtttgctattcttgttgtatctgtgtgaattgttataggttgcttgattttgatgttcatgtgtcaaaattgataatgtagcttttgtatctgattaattaagattctaatgcagttgagtttttggtcttaatattaggcattgtatattataccaacgtgtgaagaggttctgttgttttctgaatttctcttattttgtgtttcattcagcaaaagtgtgtcgtgagttgatattcttttaggctgaatataaatgtatgtataaaatttggcttatattgtttgataagaacactagacctctttcaagttgagcgttatgttgatgtatattacttgactcattttcaattctcttgacaatatttgacattgcatttacatgtggttcctgtgtttgtttagtgttcaacctgaatgttgaagtttaagacataaatcatctatacttggttgtttcttgattttgaatccttaataagacatggaatttctcctctcatcaggtaagtcactgaaag

SEQ ID NO: 1323 - DNA, 704 bp, Arabidopsis thaliana
  Intron number 1 from transcript AT2G06025.1 (locus AT2G060 25) derived from phytozome v7.0 (chr-ID Chr2; pos 2348214 to 2348917)
tagaaagaaagctgagaattgcaactgcttacaaggtaagaatcactcactatccatttccatatttcttcatcaatcgagcttaatgcagctttttcgccttttaattttgtcaattcgaagtgtttagaattgtggatttgatgttcttgttattgatcactaaatagacaatggtgatagataaatgaacttaaacaatgatctaaagcttcgttgcttgtttttcttcttaagctcctctttgatgtcttactttcgcctctcctctgtgtggtagtaagagtttatagaagaattatcttcgtgctctttttatttattttcagctttgacacaaaagttttatgatttcacaagaacccttcagttgttgatgttgtcgcttctctcgaaccatatttgtcttaaggtattaaaacttgtcctaattctccttgtcttattggtgatggatttgaaattctgtactttcctgcacactattccttagctaagaattcattgtctttgaacttgagaaagtgatcttattagaaagttttatatgtttttgaattgattgtgatctttattggtactgcattaagaattaatctttgtgctcctggactagtattggtaaggaatactgccattttttatctccttatgtgaagtaaaccgtctttgctcatatagtttggtttctctttcacagagca

SEQ ID NO: 1324 - DNA, 838 bp, Arabidopsis thaliana
  Intron number 1 from transcript AT2G07050.1 (locus AT2G070 50) derived from phytozome v7.0 (chr-ID Chr2; pos 2924818 to 2925655)
cgccttcaggtattatctctggcttctctttgtttccgttgactttagtgtggtcttgactggtgacgaatctcgcaagttttagtcagtgatacttaggactgtgttgcttcatcacattgaagttaatctaattcatcacttgacttgtaatgtgaaatcaattcaaggtgataggagcatgtgaacttagcttgtaactagatttgattgtatcttactccatggatatgtaggagagtctagtttacaatagatggaaaagtacacagagcatatacaacaacaaaaactagagttaatctaccttcgccattttctcaatggaagtgaaaaaacaatcccaatctagagaaactaacaaagccatatgattcttttactgatttatttacaacgggagagttgtgataccagttatgcatttggtctaaagctgagatctgaatatctgtgttaacttattgctaccattatttgaaggcttctctttactacctattgtactctcttgtgtttctatagtttgtaatcatttggctttcattatttttattagtctttgagtccatgactttctctttaattttatgatattccatcagggcctgatctatggcaattcttcgactgattgcaattctctgatgtccagcctttaattttcttcttaattttctgctgtcctatgatatatcccatgagggcttaatctatcacactcctttgacagattacagttatctgatattcaaccatttctaatccaatagttatcgctctctctctttctctgtttgtagttttcaagagaaaatttgattagcccagttttacc

SEQ ID NO: 1325 - DNA, 533 bp, Arabidopsis thaliana
  Intron number 2 from transcript AT2G13100.2 (locus AT2G131 00) derived from phytozome v7.0 (chr-ID Chr2; pos 5390421 to 5390953)
tccgtttaacggaacccaaggaaccaagagacttggtgagcttgatttggcttttctttcttcttatgctttgggtatgtattttgctggacatttaggagataggattgatttgagatactttcttgtgtttggaatgatgggtagtgggattcttactcttgtgtttggtttagggtattggatgaatgttcatacacttgggttttatatgagtgttcagattgtttgtggtttgtttcaatctattggatggccttgtgttgtttctgttgttggtaattggtgtgggaaagagaaacgtggtttgattatgggtttgtggaactctcatacttctgttgggaatattctcggttcggttattgcgtcttcggttcttgatttcggttggggttggtcttttgttttgcctggtgtgttggtgcttgtgtctggagtggttgtgtttatgtttcttgttgttagtcctaatgatttggggtttgaagaattgggtaaagagattgagattgagatgagtttaggtgaga

SEQ ID NO: 1326 - DNA, 593 bp, Arabidopsis thaliana
  Intron number 1 from transcript AT2G13100.3 (locus AT2G131 00) derived from phytozome v7.0 (chr-ID Chr2; pos 5390421 to 5391013)
tccgtttaacggaacccaaggaaccaagagacttggtgagcttgatttggcttttctttcttcttatgctttgggtatgtattttgctggacatttaggagataggattgatttgagatactttcttgtgtttggaatgatgggtagtgggattcttactcttgtgtttggtttagggtattggatgaatgttcatacacttgggttttatatgagtgttcagattgtttgtggtttgtttcaatctattggatggccttgtgttgtttctgttgttggtaattggtgtgggaaagagaaacgtggtttgattatgggtttgtggaactctcatacttctgttgggaatattctcggttcggttattgcgtcttcggttcttgatttcggttggggttggtcttttgttttgcctggtgtgttggtgcttgtgtctggagtggttgtgtttatgtttcttgttgttagtcctaatgatttggggtttgaagaattgggtaaagagattgagattgagatgagtttaggtgagaatgtagaggaaagtttgaggaaacatgaagctgagggcgcggtgctacttgaaaacgtag

SEQ ID NO: 1327 - DNA, 769 bp, Arabidopsis thaliana
  Intron number 3 from transcript AT2G13790.1 (locus AT2G137 90) derived from phytozome v7.0 (chr-ID Chr2; pos 5742479 to 5743247)
ccagaacttggtcagcttttaaacttgcagtacttgtaagccatctcttcctcaatgtcgattaattctatagtgttcaagatggacttgaatttgttatgcatatcatatgcttcatcttacttgtttaatgactgtgacatagttgtgtttttgctttcaaaagagaattgtggataaacaatttttttctcagagtagaaaactatgtgtgtgcgctctcttgtggttgatgcatctgaaatatatatatatatgtcgatttatttttgatatcgttggtaatcaccaatcagtgccattttagatctctttagctaggcttctcgagccttgttactggaatcctttataatcatctttcagctagaaccatggcattatgaaagacattttattttttgaattctctatgtcaaatgttctcatttaactctattagataagtaactggagagtttggatctggtatttctctacaggtgatctcaactctacatatttgtgttgcggctgcaaaatgtttttttgaaaatattgcttacaaatatagtttccacgttcatgtatcttagctgtctacgattattatagttcttcatattaatgggtatcttgtttattacatacttcattatgttttctgtagcctgaatttctggtaaaataattttagagattttccaatcgacaataattaagcaaagcttaatgacaggtttgcttaatgacagggagctttatagcaataacattacaggggagatac

SEQ ID NO: 1328 - DNA, 314 bp, Arabidopsis thaliana
  Intron number 1 from transcript AT2G15290.1 (locus AT2G152 90) derived from phytozome v7.0 (chr-ID Chr2; pos 6643409 to 6643722 reverse strand)
aggtcgacaaagcaaaactcgctcaggttctctatccatttcttcgcctttttcacaagctagctgaaattgaatgtagaaagagagaaaatgatctaacaaatcgaaattagttacaatctgcttttgattttaggaagtagataacaatttaggatttgagttttcagaattgaaattttgaaaagtgcttagtgtgaagaatctttatgcagtaactgtattggtgtggaagagattttttttgttttatgagtatgggtggtttattattcacaggttgcaaagagattggagaagacttcaaggtactt

SEQ ID NO: 1329 - DNA, 864 bp, Arabidopsis thaliana
  Intron number 1 from transcript AT2G15570.1 (locus AT2G155 70) derived from phytozome v7.0 (chr-ID Chr2; pos 6791854 to 6792717 reverse strand)
cgttcgtgattctcgaggtacatatactgatttactttcattgattgcctatctttagttctggtttaagaatgataaatacttgtgtggtcaaatttgggaatgaaacttaaactttagttttttttggtaactttatgaaaaacctgttttcattttcttatgatcgagatcatatatgtaggtttagctgcttttctgctaatctagttttgaagctatgttaggtttggtcgaaagtgccttagaactcatagtttataagtaggcatgaattgtaactactagtgtctatatatacattaaaacatggtcttctgccttgtgtacggacacaaattcgtatgccggaacagtatacttaactgaaccgcataactgaaccgtatacagaacagtatgtcgtaacgctggtaaaggtaaaatagtcagattttggcataattgtcaaaatgtgagattcaaatctcactttgccaaaagctgagaccaaatcttgtttctagcataaacgtgaaaatttctttaagcttaacatgtgagccagtgtggttccaaatgcttttgattcccactttcatatcttttcataaattaatttgtaactttgggttaccttctgattgtatgacttgttgatacaacttggtctacttccattgtttattacaaaaccaaaaataatgtaaaatgagatgcttaggttgtcatgttgaagtatttcaacattttcagttacataggacactacttccagttctttgagattgtcttgttggttcgattattagaatatttgagttttgaaatcctccatcacgtctcattttctctatgagcagcagctgaagttacacaacgatc

SEQ ID NO: 1330 - DNA, 864 bp, Arabidopsis thaliana; identical to SEQ ID NO: 1329
  Intron number 1 from transcript AT2G15570.2 (locus AT2G155 70) derived from phytozome v7.0 (chr-ID Chr2; pos 6791854 to 6792717 reverse strand)

SEQ ID NO: 1331 - DNA, 625 bp, Arabidopsis thaliana
  Intron number 1 from transcript AT2G15910.2 (locus AT2G159 10) derived from phytozome v7.0 (chr-ID Chr2; pos 6934497 to 6935121 reverse strand)
acctaaaactcgtcaccctgtggccgttgcctaaggtaacaaatcttccatctgattgaaagttttttttttttttttgggggattttgtagaaactggattgtgtgatatagaattggagcttggttcatgaaaagctatgtcgttggattgttgagaggtagatatgattgttggtgtcagttgttcaagctttaggtagatatgattgtgcatatgtttcatgtttgagctggtactagtacttaagtcattattatgttttgatcttgaagaatacaagaatgtttcaattagctcattgaggaaccatctcttagtagaaacatggatgtcaaaagttatggccgatgatataggagaagaattttgcttcgttttcggaaatatttgttgcacttgtgttggatgttaccgatatcagaacgttcgagaaacggtatgagttgccttggagttaggattcaaaacgatatgagctcttagtgttgttaatggtatgtagagaaggaagtatttgcaatttactgataagaagacaatctgcaatcatgacgaaaacacctctgctgcttttttcggattacttatgtgagtgtatatgttgcttctttgcaggatagtc

SEQ ID NO: 1332 - DNA, 550 bp, Arabidopsis thaliana
  Intron number 1 from transcript AT2G15910.1 (locus AT2G159 10) derived from phytozome v7.0 (chr-ID Chr2; pos 6934582 to 6935131 reverse strand)
agaataacgaacctaaaactcgtcaccctgtggccgttgcctaaggtaacaaatcttccatctgattgaaagttttttttttttttttgggggattttgtagaaactggattgtgtgatatagaattggagcttggttcatgaaaagctatgtcgttggattgttgagaggtagatatgattgttggtgtcagttgttcaagctttaggtagatatgattgtgcatatgtttcatgtttgagctggtactagtacttaagtcattattatgttttgatcttgaagaatacaagaatgtttcaattagctcattgaggaaccatctcttagtagaaacatggatgtcaaaagttatggccgatgatataggagaagaattttgcttcgttttcggaaatatttgttgcacttgtgttggatgttaccgatatcagaacgttcgagaaacggtatgagttgccttggagttaggattcaaaacgatatgagctcttagtgttgttaatggtatgtagagaaggaagtatttgcaatttactgataagaagac

SEQ ID NO: 1333 - DNA, 362 bp, Arabidopsis thaliana
  Intron number 1 from transcript AT2G16365.3 (locus AT2G163 65) derived from phytozome v7.0 (chr-ID Chr2; pos 7074568 to 7074929)
tacttgtttctggattttatatatctggtgtaattgtaagtataaatttgtggaattagcttcttttttttttttttttttttggagaatttactgaaaaagaatgtgatcctagtttatcaaaaaaagaataagaatgtgatcctcctcacatttgtttgatgaaactttttgtgttctttaggtttaattctgaggttgtgtgaaatttggtgaagagaattttgagatcatagtaattatccacttgcttgatgctcatgagctctagtttagtattgtgtttgttttgaattatgattgagataaaggatatttacttctcaggtgatttaatcaaagcctctggagaagatctgtag

SEQ ID NO: 1334 - DNA, 518 bp, Arabidopsis thaliana
  Intron number 1 from transcript AT2G16365.4 (locus AT2G163 65) derived from phytozome v7.0 (chr-ID Chr2; pos 7074412 to 7074929)
tctttggacagtgtacctccacgtattcgtctctggtaataatctccatcacaaatctcttttttttttcttttgtgtgactcttgtttctggtggtacagtttgctcatcgattgaatcgatttgtatttcttccacacaagaaaaatggatttgtacttgtttctggattttatatatctggtgtaattgtaagtataaatttgtggaattagcttcttttttttttttttttttttggagaatttactgaaaaagaatgtgatcctagtttatcaaaaaaagaataagaatgtgatcctcctcacatttgtttgatgaaactttttgtgttctttaggtttaattctgaggttgtgtgaaatttggtgaagagaattttgagatcatagtaattatccacttgcttgatgctcatgagctctagtttagtattgtgtttgttttgaattatgattgagataaaggatatttacttctcaggtgatttaatcaaagcctctggagaagatctgtag

SEQ ID NO: 1335 - DNA, 852 bp, Arabidopsis thaliana
  Intron number 1 from transcript AT2G16950.1 (locus AT2G169 50) derived from phytozome v7.0 (chr-ID Chr2; pos 7354090 to 7354941)
acaactatctcgtcttcatcctcgttcgcgctgaggttttggaacttttctctactctctcttcgcttcctgagattttttttcttctccgtattgactcaatctatttgtcgaatgagttcggatcgttgaattttcgtttgcttatcggattctctttgttgcttagctttagttgaatctacgtttcctttgaattgcttaagattctcagactttagaacattgcttctctcgttatgagtttctctgttctgtaccttaatggatggatatatctccttttgatcatatttgtctatgtcaatagttgatgtttctgttgtatgagctttttgattcaattgacttgaagtttacttgtatccaaataacataaatgttgtgtagaatttgtggattgtgtcttcttcacttgataactcatatttatttgcattggcaagaactagccttgagtttttatgttgctgttgctgtttgattaggttttatgcatttatatcttaattcactcaacattcgtctatgtctccttctgaataattcttctttgtcaatagtatgacctttgtgattcaattgacttgaagtttacttgcatccaaataacaaaaagtgttgtgtgatttttagtggatagtgtctttctatcttgagaactcatatttatttcaatttagttggatctacatagtctatttgcagatcctaggcaagaacaacctggagtttttcatattgctgttgtttgattaggttttatgcatttatgtctgtttgttaaattgctgatgtgtgcttgtacaatgatcagggaaagtctgttgaggttcgtcaagctgctggatt

SEQ ID NO: 1336 - DNA, 888 bp, Arabidopsis thaliana
  Intron number 1 from transcript AT2G16970.1 (locus AT2G169 70) derived from phytozome v7.0 (chr-ID Chr2; pos 7369688 to 7370575)
ctctcgccgtctatctcaccggagtagaacaagtggtatccacctctacctatatttgtatatatgtattgtttactgtcttctttttactctttgatggctcttttttttgggtcaatgtctcttcaaatcctttggttataactgattctcccaaaactcttcaatgttttcaaattagtaacagagaactcaaatcattatatataaaactcaaataacctaaattaaatgttattaatggaatattatatgacgacgttttttaaaaaataaaataatagatgaagacgtgttaaaatacatatgcagtgaatattacatgaaattttgagttactcactatataatgacataatgagttttttggtacataatactctctctattcctttttgtttgatcttttacgaaaaaacataaatattaaaaaagcatattaaatgttatttttaaatgaattgttctttgtgatttacaatttttaataactctaaactaatgatcttcaataatttatattgaagtttacaatttatcaattataactaataactattgcattaaaaacctaaaaaatcaatattattgaaacaatttttttcttctaaaaaatcaagcaaaaaagaacaaaatgagtatattttgtaccaacaactaagtcgggaaggttttgggataagttttagtaaaattataattaaaaaatttggttggtcctcacagaaagtcagttggtttaactgaatcaattattttcaagttgttagttacttcttctttagaacaacttcaatattataattcttaagaaaattaagttaattaatgtaaacatcttttctaacggtgaaaatggtaaaaaaaaagacggtaggactggggaca

SEQ ID NO: 1337 - DNA, 384 bp, Arabidopsis thaliana
  Intron number 1 from transcript AT2G17220.1 (locus AT2G172 20) derived from phytozome v7.0 (chr-ID Chr2; pos 7489344 to 7489727 reverse strand)
aacaacaccttcctctactggtaacatcagttcaggtttgtcctatctatatctactgaattttcccatctgggttttgcttaaacttgcgtgatacgttgcaatttctgtacttggttgtttgatgcataaaggttacgcttttacatcttcttgtatcgtttgtgactcttcttttggtgttatctcgtatgggttctatgaaagttttgaccttttgattaaaagactctgttcttcttgtgtttttgttgaatcagattcattatcatacttaatgctgtttgtgatctgttatgtgactctctgttttgggcttgactttgttttcttgtggttgtaattgaagtagggacttttaagtcatcaaacaacacgacgact

SEQ ID NO: 1338 - DNA, 387 bp, Arabidopsis thaliana
  Intron number 1 from transcript AT2G17220.2 (locus AT2G172 20) derived from phytozome v7.0 (chr-ID Chr2; pos 7489341 to 7489727 reverse strand)
aacaacaccttcctctactggtaacatcagttcaggtttgtcctatctatatctactgaattttcccatctgggttttgcttaaacttgcgtgatacgttgcaatttctgtacttggttgtttgatgcataaaggttacgcttttacatcttcttgtatcgtttgtgactcttcttttggtgttatctcgtatgggttctatgaaagttttgaccttttgattaaaagactctgttcttcttgtgtttttgttgaatcagattcattatcatacttaatgctgtttgtgatctgttatgtgactctctgttttgggcttgactttgttttcttgtggttgtaattgaagtagggacttttaagtcatcaaacaacacgacgactaca

SEQ ID NO: 1339 - DNA, 294 bp, Arabidopsis thaliana
  Intron number 1 from transcript AT2G17260.1 (locus AT2G172 60) derived from phytozome v7.0 (chr-ID Chr2; pos 7504856 to 7505149)
ggttctttttgtaagtaatcaaattttaaaaagaaagtttcttcctttctcaaatcttcaagtatacccacgattcataataatattccatgtccttttattttcttttctcttgcttgttcctcatgccttctcattttagttattaatcttgcttttcctacttctttaatgatgatttggttttggggtttcgtataatctctgcctctaagtaatttcctgtgacactgaaagctacttgctttgggttttaactcaaaggtctctttttgttgttcaatgttaagctca

SEQ ID NO: 1340 - DNA, 331 bp, Arabidopsis thaliana
  Intron number 1 from transcript AT2G17290.1 (locus AT2G172 90) derived from phytozome v7.0 (chr-ID Chr2; pos 7516622 to 7516952)
atttcatcgtcttctcgctgttctgctatattccggtactagatcctctgttttctcatgtttcttttattaccaaatgatttcttcatttattgttgtgtctttgattcttttttgggatctataatgatcgatgaacatttaaagctacgacttttcaggagctcttgtctttttttctttaatctttgattatgttacaaaacaattatgttttttgaagcttgatctgatgtgggttctttgatttcgttccaaagtttgatacttttttggcttctctttatctgattttttttgtgtatgtttgttcatgaaacagtttcgttgg

SEQ ID NO: 1341 - DNA, 627 bp, Arabidopsis thaliana
  Intron number 1 from transcript AT2G17530.3 (locus AT2G175 30) derived from phytozome v7.0 (chr-ID Chr2; pos 7626687 to 7627313)
atactcgcacttctgtacgcatctctctccttatatcttgctttactatgccaacaagatcttaaatgcagaatttgatttcgtaaatttgttttaagcatgttcccgttagtcttctctaattcctttcatctgggctttgatctgttttggtacaagatcttggcttcgtgtgaattaatcttttagataagcaaagttctgaattttgtggttctgatttggcactgcactctgtagttgaccaaccattgcagtttgtttaaatagcttagtaagggaaatgaatgttctattaaatggcgctgttccttaaatgccaacgttactctatgggtgtctcattaactataggcttaatttaatgttttgttctcttttgagctctatctgtggagtccttttaccttgtctgaagcagggaaacacttctacgctcttagattctgatgtttgctcttagaatgtaagatgcccatgactttatattaaggaattccgctgaagtttttctaaaagttacgaattgaaattaaattctacaagctccttgtcacatgtaacctcctctttggctttattctcattagttataataaaccatgtgtttttatctgttgtagaatt

SEQ ID NO: 1342 - DNA, 480 bp, Arabidopsis thaliana
  Intron number 1 from transcript AT2G17787.1 (locus AT2G177 87) derived from phytozome v7.0 (chr-ID Chr2; pos 7731411 to 7731890)
tttggaaagaaagtctgatcgaatcgatcaaggttgatttgttgagcaatttaaaagtccatgactttggttcttttttatgttcttggttcatgtgatttttttattgctcagcttcctgcttctttgattttgataatcttttgtcaaagttggaaactttgattatcatggagaagtaatttgccatatagatgggaattcaaatcttacttaaaaagttaactaatttatctcaaagcatgaaattgattcattggactgaatactgacaaatgtggttgaaattgaatagcctcctaaaacttatagaagtagagtaagtcattgacaatttctacattgtttgtgtgtttctactctccttctttgtcctttggaggtttactggataagaaagttatggacacttattgttgtttctttcattggtttggaaatccagggggcaaaggaggaagtgaagaaagatagaaaaca

SEQ ID NO: 1343 - DNA, 978 bp, Arabidopsis thaliana
  Intron number 2 from transcript AT2G18360.1 (locus AT2G183 60) derived from phytozome v7.0 (chr-ID Chr2; pos 7977339 to 7978316 reverse strand)
ggttcccgaaacggctcttcaaggatttcattgaggtatatacctactcaaactctgccactggctctctatagtataatttttcttaaaaacatatttagcaactttattaagtatccatatggtcaaatatggacacgaaattgatcccggagctcgataaagagcttgtcataactagattacaaattccagtaataataatttaaaaataaatagtaaatatggaatcagactatagtatagctgtaagtactagtagctatcttgtcgttttagctttgttttacaaactctaacgacaaaagatagacaagttagtcatatatatatgtttgtaaaagaaaaaagaaaaattggtatgtggttttatatttaactttatacctaccgagaccttttatttattaattttgcaaaaacttatatttatgaactcctaatcattagttaagaatcagtttggtcaggcctgggcataatacccgaacccgaagaaccgatccgaacccgacccgaaaaacctgatgcgaacctagacccgaacttttaaaatagtctaacgggtctaaacttcaaaacccgaaaaacccgaatccgaactcgaataagtacctaaacatatctcaaatataagtatatattaattatatttatacttatatatagaaaatattaggatttttttggatattttagttattttgtgtatttttaaatatattcaagcaaaattacaggtgttgttttagaaatttttgaaattttcaagtaatttaatagatttacatacaaaattttaatatttcaatatataaataaacccgaacccgaacccgaacccgacccaaaatcttaaattacccgaacggatcttaaatttttaaacataaaatacccgacccgaatatccgaacgcccggggctaagtttggacgtgctgtcgtaatatacattcttttgcaaaatgtgaaggtg

SEQ ID NO: 1344 - DNA, 279 bp, Arabidopsis thaliana
  Intron number 1 from transcript AT2G18770.1 (locus AT2G187 70) derived from phytozome v7.0 (chr-ID Chr2; pos 8134705 to 8134983)
tgcattgattcgcagcactgagtcctaaatttccagtattcttctctaattctttcgctgtttcattgatctcaattttaaaattttctctttttttttttttttttgcattcgcattcgttttatgatcggtgactaatttcacttataggcatcaattctattcaattcctcttcttcgttttatgattgatggtttgatctccaatttgattgtatattgtctgatcttaatagtggtaaattgttatgttctcaaggtgtaaaaaaaatcagaaa

SEQ ID NO: 1345 - DNA, 1034 bp, Arabidopsis thaliana
  Intron number 3 from transcript AT2G18880.1 (locus AT2G188 80) derived from phytozome v7.0 (chr-ID Chr2; pos 8175328 to 8176361)
aaggggataattttacaccatttcaatctcataaggtatcttcacatccctatttgatttgtttcactacatagcgagcataatacttttgaataagttgtaaattttcatgtaataattgtttttaaagtgttagagacaaagggcatgaacttgttaatgttccagatttgattttcgtatgaaaactattttacataaccatcatgtgtagtgaatcttttatgtattcaattcaacgagatcttcatattaagattttgaagaaaagaagaataaatctatacatcataatttaaatatctacatctaatatatactaacaatttggtcacttggagttcattgccaaaagttatgtttttcaaagaaagttcactgccatcctagtgattctaaactcttaggatatgaatggtagacaataggaggaaaaggataaggtaaaaacttttaatgaaattgttttgactaatattttgggggtgaaaaaatatcactactctaggacactatttcgattaagacaactattaaaagaaaatcattttcatttttaaatgaatagttaacttacaatattcttagcaacaacaagtttcactaacataaaacaaagctcaatctcgtctttaagtcaagtaaaactttgatttattttattcatcaacctaaattaccattcaacaaattttcataacctaatgtaaaatgtaattctaaaaaaaaatacgaatgacatgcaaagtatcatgtgtccctacatttataaaaactctcttgtttcgtcttcttcttctccagtctctccgttcaacaaaaattgaatctttttgacatagtttgtataagaatcattgtatttggtattcttcttcttctttttcgcgaacgattactctagtcacaatcttattttctctgtttgagttcatatatacccacaagttttcttttcaaagtctcagttttttttttgctttttctatttcattgcaggttttcaagattccgagtatatactttgggtttga

SEQ ID NO: 1346 - DNA, 592 bp, Arabidopsis thaliana
  Intron number 4 from transcript AT2G18880.1 (locus AT2G188 80) derived from phytozome v7.0 (chr-ID Chr2; pos 8176389 to 8176980)
gcttcttttcataaaggtaacgtttttatttggattctgcatttcatagttttagaaagttttagacttttttctgactcgtgaagatgaacgtagcgtaacgattgttttaatcttgattttacatcctagagttgttttatttggaaagttacatgattgtgagtgctaattatattggttgatgtgttgtaccataaaagaggaaactttctttgtctaagatgttcttggaacttatagtaatgaatgtggattcactacttgctttgtctttgtgaatgaatgtggaaacatgtatcttgttctcttctgggttttgtgagcttttgtattgttgtttctagttctctggctcgttgatgtctcagcaacatgtagaatttgagttgttttgttctgcggttgtagttgaggtttctttgtgttactgtacaaggtaccaaattagattttctagttgcataaattttgatctgaaatgaagtttggtaaacaagctcatgtagcttttatttttgttgatacattgttattttaggacacaataagcttgttttttcttcttcatccaggagctgcaggtgactca

SEQ ID NO: 1347 - DNA, 837 bp, Arabidopsis thaliana
  Intron number 2 from transcript AT2G19060.1 (locus AT2G190 60) derived from phytozome v7.0 (chr-ID Chr2; pos 8257558 to 8258394)
gtgccggacttctcgaagaaactagccaacatttagtaagaacagaataaactcaagagcgagagctacaaacaaaaatatttttatcttctttgggtatttcatttcatatacatatatgattaacttaaaaaaatagttattttgtaataatggttttaacttcttttttttaaatacgagtggtaaccatatttacaaggtttacaattttgaaaacataatattctatagaaatttaatttatccaatatttttaataacggtaaacgcaaacgctttaatcatgcgtttgtgattacagtttccaaaaattgtttgataaaaatacttaaatgctgtgttctatgataaacacattacagtagtttaacatgtaaatgtaaacaaaaataacagatataatgctttagattccaatttaacagcttaggcaccaatattaagctatatatatatatatatagaatcgatgagttttctttccaggttatgtataaaacatgtgattgatcaaattatatatatattttttttaaaaatcttaattagtctcttaatagacagcatgaatcacaaggaatcaaacttaaaactatactatacatgttttaggtgactaaagaagaataatgtggtccatggaactaatcatttgactataattgatttgcttttttggcaggggacgttaaaatcactcatgtattatatttaacattgcttgcagtcttttactatatataaaacttaaactaattacctatggattatgatatattatttttgacaatatatatagggtgaaagaatcagttttgaaaagcaaataactaa

SEQ ID NO: 1348 - DNA, 709 bp, Arabidopsis thaliana
  Intron number 1 from transcript AT2G19160.1 (locus AT2G191 60) derived from phytozome v7.0 (chr-ID Chr2; pos 8310124 to 8310832)
atttgggatctggttccgtttagaagattttccaggttcaattttgctcggcgttttgattatttcttcgttggtagtgtttttaagtttttcgattttggattttgtgcggacgatgaataggctttagaatggatccgatttggtttaggatttggagaagctctaattagatttcgtttgatttgatctcgttcctgattctgataacttctggggttgggaagcattcgtgtaatttgttgactgaggcaatgcccgtggttgtgtgtattagaagctgtggtgatgatttgacttttcttggtttggatagagttagaggatttggtttttgtactagtttgaaatggtctcattgaaattgtcaaattaattttcctgtagatgtttgattttttctcttgggatcatcataacaagtttcttcagctacaattggtgaaattgtgttgttctcttcaggaaaaagaaacaaaactttgaaaattaccatcttcaagaatctaagttgtctatttatgcttcacacttttggtgtgacattcttttttttaaatctttatctggtgtagttttcagatttgtatcctatgctcctctatggtttacttatgttctgctctgtattgatatctgatattcaagtatgggtttttgtatgtaaattttaggtttcgactggttctagctgctaagtggaatcgac

SEQ ID NO: 1349 - DNA, 536 bp, Arabidopsis thaliana
  Intron number 1 from transcript AT2G19500.1 (locus AT2G195 00) derived from phytozome v7.0 (chr-ID Chr2; pos 8446242 to 8446777 reverse strand)
tgttagtaacgtccttgaattggacgttattactggtacgcatcttctaaactttgatgtacatacaacaacaaaaactgtttttgttttatagtatttttcattttttgtaccataggttttatgttttatagttgtgctaaacttcttgcaccacacgtaagtcttcgaaacacaaaatgcgtaacgcatctatatgttttttgtacatattgaatgttgttcatgagaaataaagtaattacatatacacacatttattgtcgtacatatataaataattaaagacaaattttcacaattggtagcgtgttaatttgggatttttgtaatgtacatgcatgacgcatgcatatggagcttttcggttttcttagatttgtgtagtatttcaaatatatcatttattttctttcgaataaagaggtggtatatttttaaaatagcaacatttcagaatttttctttgaatttacactttttaaattgttattgttaatatggattttgaataaataatttcagggaaaggtgaa

SEQ ID NO: 1350 - DNA, 609 bp, Arabidopsis thaliana
  Intron number 1 from transcript AT2G19720.1 (locus AT2G197 20) derived from phytozome v7.0 (chr-ID Chr2; pos 8510530 to 8511138 reverse strand)
aaagagaaaggtgagatttttcacttcttctttcttctggtctaattgggtcttaattcatttccctaatttttcatctacttgtttagatttatcagtttcgtcgacattggttttagtcacttttgcttgtagtgaagtatgattaatgatccatagtctctattgttttgttggtccttgagctgatcctaacacgtatagctcaagaatttccatgtgtgatcactcgatgtaagagattggttacaacatggtcccaatgattaagctttgttcttggttaactatgaagttgcagaagattgaaaagtttctgttttttgattcttatggataagttacatcttgatctatggttggagaaagtcatatctgctcctgtttagtttatggtctaacttaagtttgtttcgatcttcgtctgtgttttgtatgtttttagttaggaatttgaagtagttcttttcaaagttgatagtttgtgactgaagtataaagataccatttctatgctcaaaccgcagaatcagctagttttttgtctattactttacaaaatgtatgttgatgtattatgtatagggtacatcaagaacttccaagtcc

SEQ ID NO: 1351 - DNA, 625 bp, Arabidopsis thaliana
  Intron number 2 from transcript AT2G20270.2 (locus AT2G202 70) derived from phytozome v7.0 (chr-ID Chr2; pos 8738557 to 8739181 reverse strand)
agttgagccactggttgttgaattggatcaacttggtatgctcaattctttactttggtttgctatatgggtctgagtagtttgctatattggttttgataatgtgtgtgatattgtttatatcgatcaaggaagagctggttacaagtgccctaatgtttcagcattttgactggatgaaattaatacttgtttccaacttcttcttgtttatcttctggttcatttggctgcttgcttgaattggtttgtatgttttttgattagattttgatggaggattgatgatggttaggggggtttctaatggcctaagatagctttacatttcagagattctgtgtcttgtttatgtgaaaaatttacttccactgtagttttccttggaccaatgacttgttgatgaagaatcaacgggtaggctagtacttctaatggcttaaatttttcaaattgaagattctttcctgcctttgaatcttagacagtatgcttctatttgttagaaactattatgttgctatcttcttagttatcttttctcgtgtcaagatttggtgactttccaaaaccatttgttctttcttgtcttgtttagtttctttgggtaaaacatctctgcctc

SEQ ID NO: 1352 - DNA, 703 bp, Arabidopsis thaliana
  Intron number 2 from transcript AT2G20270.1 (locus AT2G202 70) derived from phytozome v7.0 (chr-ID Chr2; pos 8738479 to 8739181 reverse strand)
agttgagccactggttgttgaattggatcaacttggtatgctcaattctttactttggtttgctatatgggtctgagtagtttgctatattggttttgataatgtgtgtgatattgtttatatcgatcaaggaagagctggttacaagtgccctaatgtttcagcattttgactggatgaaattaatacttgtttccaacttcttcttgtttatcttctggttcatttggctgcttgcttgaattggtttgtatgttttttgattagattttgatggaggattgatgatggttaggggggtttctaatggcctaagatagctttacatttcagagattctgtgtcttgtttatgtgaaaaatttacttccactgtagttttccttggaccaatgacttgttgatgaagaatcaacgggtaggctagtacttctaatggcttaaatttttcaaattgaagattctttcctgcctttgaatcttagacagtatgcttctatttgttagaaactattatgttgctatcttcttagttatcttttctcgtgtcaagatttggtgactttccaaaaccatttgttctttcttgtcttgtttagtttctttgggtaaaacatctctgcctcatgatattggtctgaaacatttacaaaagttttggtggtttttggcgtttccaggttcagaagggtcgcagctgcaga

SEQ ID NO: 1353 - DNA, 1030 bp, Arabidopsis thaliana
  Intron number 2 from transcript AT2G21300.1 (locus AT2G213 00) derived from phytozome v7.0 (chr-ID Chr2; pos 9118293 to 9119322 reverse strand)
atcactttgaggaagaagacaacatatctcacaaggtataaagcctctctcactcatattcaacatctaacacacaaaatattgtacacattgtacatgaacaagagaagatttagagtttcttagttatcaagatgtggggtattttgcattcaagtcaaaatctattattatattgaattagtcatgatttctttttatgttaacttagacttttgtttttcctttgtttcattattatgattaactcaagtgcgctgttgagaaagacttatgagtatacaacaacttctatatattaaattcctttctcttttttttttgttctgtctgcttttgcgtgtgtaagattacaatcaaagtactttgaatatgatgataactttttctttttcagttctttctttgccattataatatagagatacgtttaaacagagaaggtatggttttgtgggtccttttgttacttatattttctttaaagaaactttagattgatgatacatgacttcgttttcaagcatagttagtgggtgaccactaaagataaaaaaaagtcggtagtctttttgttgtttgttcttcagtttaaaggttgatcaccttctaagtaagctctcttttgttattctaattacaacatccctccctattaataagtaataagtcatctctctttcggtttctttttctttctgtttaagcagtgtgttgaagaaattcttaattctagtgtttaaatacagtgtaatcgacatacgtactatgagcttgctttgttgaactgttcaagtttcctctgtttttaaggaacactactaagagattttttaggcatgtttcttgtttttggtttggtaagttgagatttctgagctttatcatttctttatggttgtgttagttggaaagtaagtactcttttggtctctcctcagatctattctgttcttgatagctttcaacattccttaaaatatgaatgaaatgagctcattgtgcatcattgtgatttgaccagtgagca

SEQ ID NO: 1354 - DNA, 512 bp, Arabidopsis thaliana
  Intron number 1 from transcript AT2G21640.1 (locus AT2G216 40) derived from phytozome v7.0 (chr-ID Chr2; pos 9254473 to 9254984)
gaaagaagaagcgaagaagagaaactaagattcaggtaactgcaagctttgaatctcttcattaatttcttgcttatgaattacttatgatcgataatgaggctggtgagttctgtttcactgaatccgcagcaaattttgagaaattcgttagtttttgtttgaatctctcttaggaatttggtcgaacacttggtggatatcttgtttattagtaaatcgttttggaattgttgttttttgcttcgattcagtatcacggggtgtttcttgctaatgattattgctttaattttcttgctgggcttgagctgattattttggttgttgagaatccgaatggttttggttagatgttaggtgaatttgtttatgtttgtgagactttagggttcttgagacttgagtttgattattggattaacataactggttttgatagatgtgaggattgctttgtgtaatatcttaattggatcattcgtattcatgagatttctttctgttttcag

SEQ ID NO: 1355 - DNA, 521 bp, Arabidopsis thaliana
  Intron number 1 from transcript AT2G21940.1 (locus AT2G219 40) derived from phytozome v7.0 (chr-ID Chr2; pos 9350583 to 9351103)
ccggcgggagtagaaaattcttcttggttctgcaggtggtaatcttgttttccttaatgaagtttcttagcgctaattttttatatgttttctcgtttaaaaagtgtcaatttttaaaaatcctttcccttttacggttcaatttgatttggataataattctctttttctctggaaagttcgaatttttttttgtttggaagcttggagaaaatattatactcttctcattgaatgatcaatttacaaatcctcatttgatcgatcttgtcaatttttgaaaaaaaaaatctgaactttgagaaaagttattgagtttcgatatctgtcggtcatggtttgattgtggctgttgggtaagacaacaaattaggtagggttttgtgatattgatgtccgtagtccttaattatggccaaattgttgtcttttaggttttgacagtagcaaagaaaagctgaatctagttagaaattgcttttgcagggtttttgaatagtttgtgtattgaagattgtctg

SEQ ID NO: 1356 - DNA, 548 bp, Arabidopsis thaliana
  Intron number 2 from transcript AT2G22080.1 (locus AT2G220 80) derived from phytozome v7.0 (chr-ID Chr2; pos 9387064 to 9387611)
ctctcttctttgctagagctcttctctcaggcaagctttttctattttcaacttttttttttttccttcttaacaaacgtttacaagtattcgcggtcgcacaaaacaacaactttataaaaatagatttttttctacacaaaagtttcacacaaatttttttggctacaaaactaaatcttgaccgacttgaagcgttacttcatcagaatgggtggttggaaaaatatataaaattaaaaagttttggttaaatattgtgagggtatgtatataataatagctattagttgaggacggttgcttttaatggggaatattaagatagatttttaaaatctaaattataaattgtaggtccaaaaaaaatcaaaaaggtatattccatatattatgcttccaagtttttcaaatttaatgtctagaagaagcccatgtcctaatttagtatgtcggcccaatttgtaaaatcatgttaacttggtaaaagattgtttctggtagtgataaaatgaatatgaagctgcaggttactgtcttgaagggtg

SEQ ID NO: 1357 - DNA, 611 bp, Arabidopsis thaliana
  Intron number 2 from transcript AT2G23620.1 (locus AT2G236 20) derived from phytozome v7.0 (chr-ID Chr2; pos 10047720 to 10048330 reverse strand)
tgaagttgggtctctaccagctttctccagttgaggtaatttaattcatcatcttattacttgtctacatatatgttttcaattccctttttttattgtctctaaaacaaaaccggaagtgcttttgggatcatcgaattacttgatgaaatcggggactcaatggataaatttgtaaaatacaaaatgtgcacatttacaatagacatatttaaataagcgtatttaaatatatcgttttaaatttttcgtggtctacaaaattattgcaccagaagaaaccaatcatatattgtcttcaattcaatatatcatctatatgagattatgtcatcgttaattgttcctaataatttaaaataaaataaaattaaactatatagtttaaacaatttaaaagtagtaaaagtctacaataaatgtagaattaatgtagaggatagcgggtcaatggcaaattaagcacatgtaaaccatatttgtttccaggattatggccaaactagtcctaccgatggatctaagaaaactatttcttaggttttttttttggttttagtgacatatatgtttttatcttgatttaggatcttgaactgggattactttta

SEQ ID NO: 1358 - DNA, 811 bp, Arabidopsis thaliana
  Intron number 2 from transcript AT2G23760.2 (locus AT2G237 60) derived from phytozome v7.0 (chr-ID Chr2; pos 10110978 to 10111788 reverse strand)
cttgaagaggtaacgttttcactcaatattttttctctaaccaaactaattaattttctatcaaacttttaatgaaccgttctaatgattgaattgatcaaacaaccaatttcatatcaatcgctacaaaattttatttttcttcgtgatttttttcttcttatataattaattctaaatcgaccaatattttcataaactctatatatgttattttcttaaaaaaataaatgtatagagaatgaccgactggtacaagagcacgacacatgctctagttggtaaagcctgattacgcaatcctactatcacttatataatttttctaactaatatcattatatggtgttatatggtctaatttgatatattaatgcatattttgtgtcacgcgtttggtggcatcgcttaatcaaatttaacataagaaattaatatatgattgattaagtgatttagtcttcacaaccataaattttaaattagagtttccttctccatataagctagccaccttcactacgtaaccaaaactagtccttgaagttacttcattatttatcttacaatttattttgtagttgacattatcttctttcaagaatttagtatatgttccaagatagcataaattgttagcaagagaagataacacattgaagtatctaaacgaactaatcacttgaggtttatattttatcttagaaattgagctaataaaaaaaaaacaagaactcatctatgtatagttcatttatttaaaatttaatttgtaggtggaccgacggtacaaccactactgcgaacaaat

SEQ ID NO: 1359 - DNA, 499 bp, Arabidopsis thaliana
  Intron number 3 from transcript AT2G23910.1 (locus AT2G239 10) derived from phytozome v7.0 (chr-ID Chr2; pos 10178679 to 10179177)
gttggagtgatcttgacttctgtctcaaaaaaaaggtattttagttcaactctttttggttcattcattttcttgaaaagttcaagacatttataaacatgttggacccacagtttattcatattcatatatgatagttttgacatagaatgaacaattatttcatgtaccttttcatcaatcaatctgaaatgtattatttaaattattgttattttgaaattacaagataccatattatttgttgaacttctaaaactttgggggtagtgaatctttgttggaaaagtaaatcaaaaattgggtcttcatgtaatgtatttgacatttgtcataatgtcatgtgtttatcttagactcattttggtcaagattcaatgtaagactgccttaataaaatattaaagaggtcaaaactctaactaaatcctacctagatcatattttagaatagtacttaatttaattttgtaactactttcttaatcacagttgtggc

SEQ ID NO: 1360 - DNA, 615 bp, Arabidopsis thaliana
  Intron number 1 from transcript AT2G23970.1 (locus AT2G239 70) derived from phytozome v7.0 (chr-ID Chr2; pos 10199978 to 10200592)
agaagaaggttcttggtatctgctttggccaccaggtttaatctgatccgtttagatttatgttttgattcttatccgttggatcgtacttgattaggggttttcgaaaaaaccatttgctcaaataatcacttagaaatgatcaaaaccatagaagataatttggttgatgtgaatctgagtgtgttgagaaatctagtgactcgtaaaagtgtgttataaatattaaggtcttgattgtttgtttgtgtttacatttacatttgatttactaatgaatccaaaaccttaatcattttaaacaaaatatctttgttaacaataatgttttatgaaaaactgcaaccataacatgtagcttagtccgatagtatcatcgttgattttgatgttggtttccatgtcttaaggttgatattgtctgagtaaattttaagttctaggcattgtggattctttattggctagaatctgaaacggatttccaaaacgatcttgaatatgaaaaaaccaatgtgcaacagtttgattagaaagattcttgatgaatgatctgttttctctctgttgttgaaaccagatactaagtagaatcaaaggagggaaagtcggaag

SEQ ID NO: 1361 - DNA, 396 bp, Arabidopsis thaliana
  Intron number 1 from transcript AT2G23980.1 (locus AT2G239 80) derived from phytozome v7.0 (chr-ID Chr2; pos 10204027 to 10204422 reverse strand)
ccgtttcttcttcgccgtcagattcgactgtaactgtaagttcttcttcttcttcatgttcctcctgatctcagtcgctgagcttgattagagtttgcaattgtttgactttggattcgatttaggctatcttagaaatgagtttggttcgttttgtgtagctaaagtttcgatttttgtttctgggttttaaatttatcatcttttatgaatctggtgaaatgataaattagctcaagtaacctaatttcagaacccaatcgctttgatttgcaaaaaaagaaaaactcctccttagttccaattaggtaactcctaaaattatagctgaaaagggttcgctagtgattctcttcttgatgataatttgtctcaaaagcagtttttttaggattc

SEQ ID NO: 1362 - DNA, 553 bp, Arabidopsis thaliana
  Intron number 3 from transcript AT2G24150.1 (locus AT2G241 50) derived from phytozome v7.0 (chr-ID Chr2; pos 10266266 to 10266818 reverse strand)
ggatttgcctctcaagcaatcagactctgcttcatgtaagttttttgtattcttttgatattttttaattgccgccttatcttatcttatgtgtgacattgtcaatactataatgctgagtattctatattatatagtttgttttatgtgacattaccatattatatcgtttttacgataatgtaaaacgaaatatatttcttctgtttaaatttttattatctgtttgaaagatataatacggttgtgacatgaaaaataatatggttgtgacaatattcaaaaacaatattcattttttttttgttgggatcaaatctttgtcattttctaatcatgtaaagtagtggtaaattgccccccaccatgtgttgttgttttcgatatgtcttggatcttttcttctctcttgagctttgaacccaccaaactttttgaaaagattacataaacttttgaggaaagaataaagaatgatgctttactcattcacatgactaagctttaaaagattctctctgtaacaggattcgaacgtgacacatcacatctc

SEQ ID NO: 1363 - DNA, 542 bp, Arabidopsis thaliana
  Intron number 1 from transcript AT2G24360.1 (locus AT2G243 60) derived from phytozome v7.0 (chr-ID Chr2; pos 10366084 to 10366625 reverse strand)
gtaatcgactgttttattgggcttagtagctctaggtaaaccttaatttcttcttcttcagtacttgattcatcggatctgcgtttttcttatgttttttcttctgggttttggctcagagtcatgatctgtagctttatctctgttaggaccttaaagttataaactttgatttttctgtaatgggtattgattctactaatgaaagttttcgaatcttatggtaaatagttaacctagttggtttcttcgttttgactagctcgtttgtcttaatttgggtatgtgcatggtctttgagagcgaaagctgttttttttgtttcaaggttcttgttttcatttttgaagcaagtctttcatatttgatatgttaattttgatgatagtaagatcattttactgatggctagtgctgttaatgagactttgtttccagtttttgagctaatgcttcttgtttgtgtttatctttgagtctaaagattttatttgtgtgtacttgcagtttggtcaaagaattcgtaacaagtgaatcttaga

SEQ ID NO: 1364 - DNA, 688 bp, Arabidopsis thaliana
  Intron number 1 from transcript AT2G25090.1 (locus AT2G250 90) derived from phytozome v7.0 (chr-ID Chr2; pos 10671233 to 10671920 reverse strand)
acattgtacacgtaagtatttcttgaccaggttttggcccaaaccgtatttgtttttgttatttatttgacgaatagtgagatacaaaaaaatattgaactaaaagccaaagtagtccattttgagttgggtttctagatgcatctcaattttacatcacatacttatatatgttaaaaagaaataataatcatttttggttaaataaaatattatttgaaagagacagtttaacttgtaccaatagatacaaaacttggatataagatatactatttgaaagtttacacacacaaaaagaaaagatatatagtatttgaattatttgttcacgtaattcaaattttaataattactcaaaattatacaatattttccaagatattgaaactattatcaatttgtgaatattcgggtggtattttaggtacattaatctgatatcaaattcgataaatgttggtcgatcgtatatttcattatagttctatattatcaaaatttcacgtcccgtattttactagataatttataaaactcccgccaataataacggtctcaaatagtgctcttcttacaaattcaaatattagtattgttgaatgtgaatgtgaattgatcaaattctcattgttgtttcttgtttgattgaacctttcgaaataaacaggaagatcttcaaggcgga

SEQ ID NO: 1365 - DNA, 604 bp, Arabidopsis thaliana
  Intron number 1 from transcript AT2G25170.1 (locus AT2G251 70) derived from phytozome v7.0 (chr-ID Chr2; pos 10713807 to 10714410)
cagatcccaaccatttcaaaggttcgtcttctccttctcttccacactcttctctgcttcactttttactctatcttcgactagtaatatcgctttcgacttctcaaattacttctcaagttactatttttctcttcctttctttcaaattttcgttacaaactgagtttgaaactgtttgggttttgtaaagttttgatcttttcatgatattgcggtaagagattgttaattcgacttctgggtactcacatttcgatgctcaattgtttattcttatgggtaattttggctagggttttttccaatttctctctcgttctctttcacaaggttagtcgatcttgctcatgtggtatagagtttgatgaatcgagttgtttagtagctattgtacgaactatctcttgatatagttgtaaaggttttagattgggaacaaaaaatttcactgtgatgtttgtttaggtagtagagttcaattgtgtgaaactctaatttcatagtttgcttaagtctcagaactagcactgagtctattgttatatgtgttgtttatgtaagtttgttgttattgatgggagatatgttttgtgtgcagaaa

SEQ ID NO: 1366 - DNA, 543 bp, Arabidopsis thaliana
  Intron number 1 from transcript AT2G26300.1 (locus AT2G263 00) derived from phytozome v7.0 (chr-ID Chr2; pos 11197434 to 11197976)
cactacctttgactccatttctttttcttcttcaggtgaattctactttacttttcttcttaccccaaatttactcttttgggttttatgaaagttttgttttttattactcagatcttgtcctagttctcctccttgttctgttgtttttctgtttcgtttcgaattggttttgtttttcaagtttagggttttgtagatcagttcgtcgttactgtagattggaaatgaaaattatgattctttggatctgattatagcagttcaagtgtgaactctatctattacttgatttgctatctcacagtttttgaatttcttaatggtgttagctactcgacttttagagctcattttcttaactactgaacttgtttcatttgagaggtactaatccagtatatattataaagtttaatgctttttcttacttgcattctttgaacatgtttgctattttggtgagtgaaactttatgtatatttatgaattttgagctaaagtattgattgtttcataagtaggtgtaggcattgtcttgtt

SEQ ID NO: 1367 - DNA, 416 bp, Arabidopsis thaliana
  Intron number 1 from transcript AT2G26330.1 (locus AT2G263 30) derived from phytozome v7.0 (chr-ID Chr2; pos 11213436 to 11213851 reverse strand)
cttgagcttagtagctactgtgacttcagaggagggtcagttattatactgatgcatgcttcttcaagttcaagattttcgtctttttgttttatattagtgaaaaaaacttaaagatgagatttttatatgatttttgaagtttcatttggtgaaaatgagatctgggtacttgttattttctatttttgctttttgtaatggtttttttttacttggtgggtcttctatagaatcaaaagaagctttgaataaattagggtttgagttttattttgttttcttggaagttgaatttttaatcttctcaagaactgacaaatatttttttttgtttttgtgcgtgtgtgttaataaaatatccttaaaacaaaattaaaggagcaacgttgctggagattaagaagtcattcaaa

SEQ ID NO: 1368 - DNA, 890 bp, Arabidopsis thaliana
  Intron number 1 from transcript AT2G27070.1 (locus AT2G270 70) derived from phytozome v7.0 (chr-ID Chr2; pos 11559224 to 11560113 reverse strand)
cttgaaaagtccaaatacagaggtaaaatcttattatcatatataatatgttattgattttttgtttgtgatttcatttagatttttatttctattatttttagcatgaaatacaaattttggagaaacaactagctgatttaaaaacaaaacttgaatcgagaaatttaaagatgttctatatattttgttgaaatttaaaaattattcttctaaataatcaggatttgaattccgtttacatgtacacatctacaattttcagttgaggtattcatattttgatgacattgaaacgatagtttgattgataatttgttttaaccaatatgctatatgtaaagtttctttttattttttgtcaaaccatactttatactatgtaatttttaaaagagattgttgaacaatagtttatttagaaaatagtaacatagtgttgaattaaaaagaaattatttgtagatcgtgtttgcatacgacatgtgaattttcttagtttaattaaaactatagctgatattcttcaaatcgacttttcttataagtaatcgaccaattaacctttcaatcacaacaattttgaaaacacttcaatgaaaatgtagtgattttatagaatatgttttactatgctatgaacttttcttaaaatttgtgaaatatttcataactaatgtggaaaccttatgtttcctatataagccctacatacgaaacataagtaaaatatatttttcttaaggttaaaccaatcaaaaagtaataattcttagaacttgcaatatttttcacattatattttagtttattaattttattttgattaaatgattttaaatccatcggttatagagatcacggttatagctgtagactatccgaagaaa

SEQ ID NO: 1369 - DNA, 321 bp, Arabidopsis thaliana
  Intron number 1 from transcript AT2G27150.2 (locus AT2G271 50) derived from phytozome v7.0 (chr-ID Chr2; pos 11602044 to 11602364)
tcctttcaagagtgtcaagctcggctgtggcgaaggcaaaatctctatctctcttctctgtttttatgttttagttttaattttatttctcaccaactgttataaaagagattcctttatgtccggaaacaatctatatgtgttgttgaagccttgtgttatgtcttacttcttaccagaagaattagtgaagttgacttaaatttagaatccaaatctgagttgtgtgtattgagatagagttttaatgtttgattgaaaatgtgtgtgtatttggttagtgcaggagggtgtggtgcttgtcttgtagtgttatctaaa

SEQ ID NO: 1370 - DNA, 347 bp, Arabidopsis thaliana
  Intron number 3 from transcript AT2G27970.1 (locus AT2G279 70) derived from phytozome v7.0 (chr-ID Chr2; pos 11912593 to 11912939 reverse strand)
ctaagcttttacctaagaatcgtattctttcggaagtaagttaaaaattagggctttcctctattcgctgtataacccttgaatcatcgtaggctaagagatttacatgtttaagaaattaagttaggaaattgaagtttggacttttgagagtcgaagaaattgaagtttctgcttaggaatttgaagttttgcttctcattaacttgtttattaactttaggttgtgtaattgtcagcagtgacgaagatagtttagatatttttttgtgttatcagtcaattctcagttttctgattttgaagttaacagttttcttgttttacaatctggttttgtagagtga

SEQ ID NO: 1371 - DNA, 691 bp, Arabidopsis thaliana
  Intron number 1 from transcript AT2G29390.1 (locus AT2G293 90) derived from phytozome v7.0 (chr-ID Chr2; pos 12612106 to 12612796 reverse strand)
gattctctcgttgaatccggttggaaggtacttcgtattcctctatctcgtcgcgttcctttgtatgcgattcctacgttttttttttttgttttgttttcagagattgaatcgtgttttttgtttctcggtctctggcgacttgagtgtactgcatttatgatacaagtgtaggtacgggattagtatctgccgtgttaggttgattttgtgtttgtcgtctgtggtccatcgtattgtattgttgtggtccctttatgttgagattgaattggtttcgtgtcgattgcgttgtggtttcagatctggatttgactgttctagttacagattattactgatttcgtatgtgatctctgtttgtgcttgtatttttttttggaatttgagtgggatttatgtattgttgttggagcttggactagcttagaggatctgtgattgtgatacgtgttgataagcaataggttttccttgaacgtcttcttaacttgcttttctgcgtgagtgactggatggatggtgtcaatgatatacaattgccttcagttttcgtggaattgaacaaattttatctccctttggcaatcatgtttagctctttagtttgacagttctagctgtgacactgacccttctttgtggcgatgatgcagtaccttgttacgcatttcagtgactttcaactggc

SEQ ID NO: 1372 - DNA, 453 bp, Arabidopsis thaliana
  Intron number 1 from transcript AT2G29510.1 (locus AT2G295 10) derived from phytozome v7.0 (chr-ID Chr2; pos 12634697 to 12635149)
cttcagtctctgtgttacgaactgattccgttcaggtacggttcgatttttttccaagctttttcactctctgacactgccaataacactctcgtgttagtcctggtgttagtgttatgtgaattcatcgattcctgctttgtgtgtgtacgctttaggcctttcctgttactaatcttgttttttagtacttctttggtaaattaagaaagtttgagaagaatgtgattttgttttggttcttttgatactttagttttactttttttcctcagctttaatcttgtagagattcttctaatcagatcttacggattcttaaggatctataaggtctatgaagattcgttttgtaattctattacattgtgtgtggataagaaagatgtacttttttttttttttggtatttgttatgacttaccattttttttgtttctacagtgaaaaaaa

SEQ ID NO: 1373 - DNA, 629 bp, Arabidopsis thaliana
  Intron number 1 from transcript AT2G30010.1 (locus AT2G300 10) derived from phytozome v7.0 (chr-ID Chr2; pos 12806161 to 12806789)
tccctaggttatttaaactcactcacttgtcactagctctactttgttagattaatttggttaatgttaattttagttgtcttgtttttgaggaagaaatattcattttattgataccgaggttataatctgacatccaatagtaaaacttatgctttggcaaatgaatttttggtagggccactataccaaccaagattgtaaatttgattactttatgaaaaagacaaaaacaaattctagctggttataccaagaattgtcatatatatacgatagtatttggatcatacaatgatcccaaattatttgttagtatttaatattttatggttatagacattccttcactacatttttttcataattaggggtattacatacatacaactttataatatatttttctattagttaattatgagagattctccttttctaaatgtgtaataagtacaagtttaacagattcgtttttaacaaaaaacaaattgattttactgttaattaggtggagtttggtacggttaatataataagtacttattattttaaatatgtaatgtcgacgcaatgatttatttatggaacccctttctgattatactccatttgggaaagcagattca

SEQ ID NO: 1374 - DNA, 618 bp, Arabidopsis thaliana
  Intron number 2 from transcript AT2G30260.1 (locus AT2G302 60) derived from phytozome v7.0 (chr-ID Chr2; pos 12906240 to 12906857 reverse strand)
ataaaccagtcagtatttcatcactcttgagtatatcaatctctttatagtttccatgaaagtgatcttctatgtgttgtatagatcgatagaagcaaatcgttagtgtgtttgtgtaattgattactaacaatttgttttggaacctttgacctttttctattcccaatccattggtagtcatatatgtgtttagattttgttgctgttgatgagtaaccaatgattagtatccactaccttttctgtcttgagtatatcaatctctgtataatttccctggaagtgatattctgtgtgttgtatagattgattgatgcggtaaaagcagaaatccttagtgtgtttatgtgattaccaatgattacctttgactgtgttattctcaatcaacatttagttatatgtgtgtttggattttgttgctgaccttctcaaatcacattctcttatgatttctgttgtcaaaatgtttgttctgtttgatatatacattgtttttataactaaatcttacctctttcgattgtttgtaaactattcaactacttccaatcaggttgagatttattattattcatactttttatgtgatcttttaagtgcagcgcttacaat

SEQ ID NO: 1375 - DNA, 592 bp, Arabidopsis thaliana
  Intron number 2 from transcript AT2G30420.1 (locus AT2G304 20) derived from phytozome v7.0 (chr-ID Chr2; pos 12961068 to 12961659 reverse strand)
tacagacttgtcggtaataggtaacaaattctcttcttctgtcatgtccgattcaacatattttaaaaacaactagtattttataaaattaaaaaaaaaaaaaaaaaaactagtattttataatttaaaaaaaattcacatggcgagagtaacaaatcaaagctgataaagtgttatgttatggtaaacatgattctagagtagtttagactttcgaacgtgtttcgagaaaaatgacatgccaatatttaagcaatgacatgagtattttacttgtataatttcaaaaaaagttttatgttgttgataaactgataaaatgtataattaacagaaactaaaatttcttcttttcttaaagtgtgatgattttaaaaacagtgaaaggattgaataatatattggctcttgaatattattgtctttatatatatacattttaaatttcatttctgcattatatatgttgactcctgaattttgataaatgttttttcagaattttgtgctcgtctataattcaaaaacacattatatgcttgaatattgattgtcaggtgggatttaatagcaggaagagtcgtaggaagaa

SEQ ID NO: 1376 - DNA, 961 bp, Arabidopsis thaliana
  Intron number 2 from transcript AT2G30432.1 (locus AT2G304 32) derived from phytozome v7.0 (chr-ID Chr2; pos 12968825 to 12969785 reverse strand)
tacagacttgttggcgacaggcacgtaacatttttcttcttctgtttatatattgatctagttccaaatagaaaaattaaattcttgacctaattgtattataatatgtgtgaaaatatgtgctttaacaattaaatatttttgtttgtgtgtgagggataaaactgtttgccgtgattcaagcttctatccaagatcatttttaccttgttctgaaaattcggatgtcgtgagagtcaggatctgtccacaccaaattttggatcatatattataattgtttttataaaaaaaaatatccggatctatagttatatatatattttgaaagttttttttacataaaaataattttagataccaaatttattttaaaaactactttttaaacttaatccatattttctaagactgttcaatatttaatttttattttttaataattcgaatctgaagcttatataaagaatcgatgacttgcctaacaattgttataaactatactataattttttttattttataatacttccctttgattctaattaattcaagtcttacaaaaaataaattgtttcataaatatatcaagttttctatgcattctttagttaatcatgagatgaactgtaaactcgaaaaaaaataatactattggtttagagttagagaaatttattaatcacaaaatgatatatttataatcaaattttaattattcgttcttaatatgtgttaaaaccttaatacttaaattaattagaaatagaaaaactattgttgttttaaatttatataaatatatagactgttaatgtaatgaaatcaaaaatgtaattttagttttaataattcatttttttacaataatcagaatactaataataacatatatatgttggtcacaaattgaatcatatgatcaggtgggatttaatagcaagaagagtggtgggacgtg

SEQ ID NO: 1377 - DNA, 634 bp, Arabidopsis thaliana
  Intron number 1 from transcript AT2G30700.1 (locus AT2G307 00) derived from phytozome v7.0 (chr-ID Chr2; pos 13084435 to 13085068 reverse strand)
ataaaggcttcaggtagcttcacttgttccttgttcttatagatatcgctttctcgtattagtgcttgaaaagtgttgcaaccagttctaattcgagaaatttacatgaatgtttaatcgtagcctctgcgttttcatttgagcttagtaattgtttttgggagaatttgtgagtgtttgagaattgggtattgactctgatttctgggtaaaacagaaattttgaactttttgttggatccgaataaattaggatcttgaatacaaaaaaagcaaatggttgttagatgccaaaaatatttggtggaagaacacaaagatttaatagattctttttttatgtgggggttggattctttactagttggaataatacttaaaaagacccaaatgttcgttggattcaatgataagaggtatagagtgatgtggttggcaagaaaatagagctcttttataacaaagaacatttcactaaactatctaacttcctttttctgcatctaccatacttgtaaatgtccattagcctcattctctcgaatgggttcattggaaaggttactaactacttttgggtttgttcttttcttctgaaggttgttgtagaggtgtttttgccagccttggtgct

SEQ ID NO: 1378 - DNA, 484 bp, Arabidopsis thaliana
  Intron number 1 from transcript AT2G31110.2 (locus AT2G311 10) derived from phytozome v7.0 (chr-ID Chr2; pos 13261327 to 13261810 reverse strand)
ttccgttggcagcctttctcctgtcctctccctaggtacttttgcacatgtattactattaaccactatagttttaaatagttagttagaagaaaagctaaggtttagattggcttatacactaatttttgcgtttgtgtataaaatatagatatatagtattttctgataaaatactttagcaatatgtaaacacaaacttgttggtgtttgcgttcacaattaacaaatgagttttgtttaaagatagtaaagattatgagtttatttgaaaacaaaagatagaaactatatataaacgcaaacgcgaacaaacaatccaaaatgtttttggtatcaaatgaacgagtatgaaaagtctaactagtatcttgatcatgcagaaaattggttttgaattgggtcaaaagaaacataataaagtttataagatatgtttttcgaaagaggtatattaacaattaaaaatgactatacagattcg

SEQ ID NO: 1379 - DNA, 959 bp, Arabidopsis thaliana
  Intron number 1 from transcript AT2G31130.1 (locus AT2G311 30) derived from phytozome v7.0 (chr-ID Chr2; pos 13265536 to 13266494 reverse strand)
cgagtgagaaatcagaattcgtacgttgctttgaggttaatgatccgtctctcttcttatcctaaagtttattccttcttttttttctgattgattgcaaaagaggttttccgggttttagggtttttgttttctcatcacgtttttttcgcccgagtcgtgaaatttctcttttcccacgttttgggtttcgaagttttgtaagtctgcttctatctccgtcaaaattcgttgatttttgtgataaagtttgtttttttcgcaagtttagcacaagcttaaatccttcaattttcagcttctgtttgttaaatttcaggtttttgttgtttttgagctaattgaagaccctatttgatcttaagaagcaatcagcttttagtttaagcatctagaaacttgaattttgcgaacctttttggtatttttcaaaatttagtctctctgtagaactttggttttgtgtccgatgatcgttgattggtttctcagggtttaagttggtgttgaaatatttaactttctatttatggtctctacatgttttctgtttaattctattagaaacatgtgatacagagaggtagcttatatctgcagtcaaaagatcttataaaggatatgtttatgttatatatatcttaaggaacttgtttcggttagaatttagcgtctaaaaggctcctaggatttggggaatattgattattggtggatacaactatacaaaaggcttacttagaagttgcattagccatgttttcttggataatctctttaggataacggctaagcaattgtcttttgttatgaatatagctcttctattcttttgcaatcttgtttctctaactaaagaattgatgttgtgtatgcgcatatgcttcttctctctctgagttttctttttgttggcattgacaggacgcacacaagaacttaattcgattcagagagat

SEQ ID NO: 1380 - DNA, 813 bp, Arabidopsis thaliana
  Intron number 2 from transcript AT2G31170.1 (locus AT2G311 70) derived from phytozome v7.0 (chr-ID Chr2; pos 13284300 to 13285112 reverse strand)
acaaggtgagctaactctgcttcttggtggttagctcagagattcaggggtcttatacaacttaagctctgtttagaagtttagagacagcttctcgagttcgttcaggaaagttttttagtgagaacctcttaagattgagttttgtggtaccgttaggttaataggatgagtagccagtgtctgttatggcattcctggaccgcgtttaagttatttattttcttggcggctacatattgggcagtagagaagttgaagctgattgatcttatttctagtgtctccaatactgttatttcatctcatttacttgtgagaggcatgtaaaaggatggatcatagtgccatcaaagttgcaagatttgaacgtttagactgctaaagttattatattggtggttgaggctagtgaaaatgttgtactatgaaatgccaaaatggagaatagtcagtattttctctttgttagggagaagttcacttagttttatcctttatgtatgtgtctgctcttttacatctgcctacgtttgtgtcaccaactttgattaaccttaacacagactaattagctagaagaatagaactaattagtaatgtcctttactagatttcctccgtattgtgctacaagatttcacaaatgttttctttatttcagcctctctctgactatattttctaggggaactttcactttttcttattgaagttgtatatggctagattctttagctacatatgcaactgactcatgaaatttcaaattttgtagattattgccagagcgaaagaattagaggaagatcc

SEQ ID NO: 1381 - DNA, 752 bp, Arabidopsis thaliana
  Intron number 1 from transcript AT2G31320.1 (locus AT2G313 20) derived from phytozome v7.0 (chr-ID Chr2; pos 13358686 to 13359437 reverse strand)
cccgtatgactctcttttctctcccagaatttggaactgtctctgtactatactctcgtgcttgttagtgtgcgttctaatgtttctttctgattttgaggacaaaattgattcttttagaattattgtcagacaaattgggtttatttggttgaaattggttatttttgagggttcaatcctgttctctctgcttccactgttctacattccttgcaaatttgtgtgtgtgtgtgtgtcaagcttgttttctatctcaaaattggaacttttttaacttcttaaatagatgttaaccttcctcacattatgttctttcctccttttgtgcctaatcgaatgtgataaaagagcatttgaagcttaaatttgagtcacttgtgtgtttatttagtacttgatgattgccaaaaggttcgtgcttttctgcaatgacgtatgtgaactcctattattccctttggaactctgacgttattctgtttggatgatcataatcgtttgtttagctgtgttttgatatctttatgccgccaatgctatgattgcaatcagctgtgtttttcatgagcttttatgcttgttgtttaatggaatggcagtggtcattcttctcttcttcttttcactatgtagttccttcttcatgctgcttcacttcaccatgttaattatatgttgcttttagctccagttgacatgaagttttcctagctgactatcctctttgtacttttatttttctcacacag

SEQ ID NO: 1382 - DNA, 844 bp, Arabidopsis thaliana
  Intron number 1 from transcript AT2G31390.1 (locus AT2G313 90) derived from phytozome v7.0 (chr-ID Chr2; pos 13384900 to 13385743 reverse strand)
aactcaatctcgacctcatcagatccgtacgttttaaatctctctctcttcgctatagatttttacgattttgggattgtagaaagccagatctagaggatttttagtttaaattttctgggaaacgcagaaacgaaattcgattaggagtgttagttattgggaatcgcgttattgaatttagaaaacgtagaagatgatctcactcactggcggtgacttttctcttagatcttttttattttcgcgggtcttatttagatccacgtgataccacgtgatttctccaatttcttcatctttcagtttttacccaaaacaacttcaaattaaaaggctataacctttttggccgtgtagttaaccatcaccatcttagctcaattctagtgacatgtttcccttgagtagtttttttactgagcttaatatgtgttcttcttattgatctatattaaagtcttgagtatttttaggtttatgatgtgaatatgtgattaaaagtaaatgtgcacatatacgtgtaaagtttggttttttatagcaatggtgtgaaatgatgccaggttgagtatttttgtgtacatttacctttacagctaatttcatggcgaggatcttttgcttttcttgtatagtttgataatgattgacccttgtcgtagttaatattcaaaacataaaccacaattgggtcccttgacaattatattccttatgatctaagttgtgttattttgtgagttgtttttggtaccaaccttggttttgtttttttctgttattttgacgtttttgtgtcccatgatgtggtgtgtttttgtgtaggcgaaagtgtttcact

SEQ ID NO: 1383 - DNA, 1012 bp, Arabidopsis thaliana
  Intron number 1 from transcript AT2G31580.1 (locus AT2G315 80) derived from phytozome v7.0 (chr-ID Chr2; pos 13444803 to 13445814 reverse strand)
tagaaaggaagctgagaattgcaactgcttacaaggtaagaatcactcactatccatttccatatttcttcatcaatcgagcttaattcagctttgttgccttttaattttgtcaattcgaagtgtttagagttgtggatttgatgttcttgttattgattcaaacgtttgaacaaattatagtatttggtagtgtatgatgagaaacatacagatctatttattatgtgaccgtggcattgagatgattttagattttcgattgtcaataggaatactaaattgtatctttcataaacatcgttggctcttatgttagttccactaatctctctcaccttattgccactgatttcatcttccaaaatcaaatttagctcagagatcactaaatagacaatggtgatagataaatgaacctaaacaatgatctaaagcttcgttgcttgtttttcttcttaagctcctctttgctgtcttactttcgcctctcctctgtgtggtagtaagagttaatgtagatatagaagaactatcttcgtgctcttattatttattttccgctttgacacaaaagttttatgatttcacacgaacccttcacttgttgatgttgtcgcttctctcgaaccatatttgtcttaaggtattaaaacttgtcctaattctccttgtctttctggtgaggatttgaaattctgtactttcctgcacacgattccctagctaagaattcattgtttttgaacttgagaaaatgatcttattggaaagttttatatgttcctgaattgattgtgatctttattggtactgcattaagaatcttatatgctcctgaactagtattggtaaggaatactgccatttttttatctccttatgtgaagtaaaccgtctttgctcatatagtttggtttctctttcacagagcaatgtcgactcagctttcggtttaatatcctgttcgattgcagttttttttgtgtctggtagtttcaaagtcgatagc

SEQ ID NO: 1384 - DNA, 378 bp, Arabidopsis thaliana
  Intron number 1 from transcript AT2G32430.1 (locus AT2G324 30) derived from phytozome v7.0 (chr-ID Chr2; pos 13771704 to 13772081)
gggagcttctgcttcggaatattattcaccgataggtatgattgttaaaaatcttgacttttgaatttcctcagctattatttctggaaagttttgatttttgttctctttagttttacatgatgttcttatggtttgtttcttcagagattcatcgagtcgttatagtaaaagtttcctatttttattttattttatttaacaatttcctttctgggattcttctcttgcatcaccattgtttgatgctcactgtttctattttggattccaaatttgtagttcaatccatgagatctgattaaagctagttctagtctgtttcttggttatgcgatgagactttttctcaaaacttatgaaactctctgttacagg

SEQ ID NO: 1385 - DNA, 662 bp, Arabidopsis thaliana
  Intron number 1 from transcript AT2G33360.2 (locus AT2G333 60) derived from phytozome v7.0 (chr-ID Chr2; pos 14140177 to 14140838)
gcttcgatctaatcacttcttcttccatcctccaggtatagattggtttttaaaaatctgttcttggagttattactagtaactagcttgtgggttcctttttactagattggctttggtacatgaagtgattcagatagagaattttagtttctaggtcactcctgagtaaaattcctacctttctactttttctctgttagcttgagttaggtgcttattcttcaaatgtttctttcgagcttggaaacttcatcaaagttttagctttttctgtgattcaattaatggctacatctaaaaattcaagcttttctttgattgtcaatattgtgtagggttcttcgtttttagctttttgttgcttttaggtaagagattaggtcatatttaaagaccttgacttttccgcaaattagttttgttagcattaagagtctcaaattcagcttctatttgaaacagtagatttctgtatagtacattttgggattctgcacaattttgatttttgacaatattacaaaatacaaaggttgttgaagatgtcttgtgtccaaaatagttaaaatcttgttcacttttgacttaatatgctcacttgttctgttcatgtttgtctttcagattacttggaacttggaagtggtctttcttcaatc

SEQ ID NO: 1386 - DNA, 281 bp, Arabidopsis thaliana
  Intron number 1 from transcript AT2G33600.1 (locus AT2G336 00) derived from phytozome v7.0 (chr-ID Chr2; pos 14226959 to 14227239)
ggattacttcgtccacggcactgtcagagaccctggtactactctcctcaccttttatctctccctctgtaaattgtcaacctttattctctcgcatttctagttcatcgaatttttgtagctcagcctggtcaaaattgattctttcgtctactttctaaggttttctattcccaattctttttgtagctccgatgtttctgtctacagacagaagattaagccttttgagtttgtctattgttctgatgaagagtttcgcatggttcttgttataggta

SEQ ID NO: 1387 - DNA, 723 bp, Arabidopsis thaliana
  Intron number 1 from transcript AT2G33620.4 (locus AT2G336 20) derived from phytozome v7.0 (chr-ID Chr2; pos 14234026 to 14234748)
ctgaagtttcgcctcagtcatctcgtaagttttctctctctttctcattcaattcaatttttaatgtaatttcttgtttgatttttctattttcttcgagaaaacaaaattctcctgtaaaatttaatattataaaagtggtttctttttcatttatgtttatataattttcatctttaatcttaaattctggtaaccttaatgcgcgatccgcttttctaaagttttgtgagagagaagagatctaaaaaaatccacaattttgttcaaatcttggagttaaatgctgaattttaggccttgttgcttagatttatggcttaaagtttcaaacttttcattggatatggtacaaatcttgtagttaaacactgaattgtgtccctcgtgggcgttgttgctttgatttatggccaaaagtttcaaacttggatatggtacaatcttgtagttatacactgcattgtctctcttgggtgttgttgttgctttgatttatggcttaaagtttcaaactttttcttggagatggttcaatcttgttgttgaaagttgaaacactgaattgtctctcttgtgcgtgttgttgcttagatttatggctaaaagtttcaaactttcttcacttcagagcttcttgaatggaaactatggttttgtggttttggttaatcttctgctaacactttttgccctgttttggtttgggaaagtgagaagaaa

SEQ ID NO: 1388 - DNA, 981 bp, Arabidopsis thaliana
  Intron number 1 from transcript AT2G33655.1 (locus AT2G336 55) derived from phytozome v7.0 (chr-ID Chr2; pos 14243453 to 14244433 reverse strand)
ctgcaagggaaggagagtttcttgggatcgcgaaggtgtggaacagggtttatttaaatagtgtcaatctccatgttcttatgttccaaagttctttcttacatacagaaaaaggggatttctttcttacatgttcttatgttccaagttcagtgttcttttgagttttggatttgataagaaacgttagaaatttttgtttgttacagtttgacatcaattctgcttgttttcctaatatcagaaccaggaccaattagctagctggcaagtggtcactcagccagctactgtatactccgatgaaagaaaacagaggcagaatcaaccttaacaagtaacaaactttgttagaaacatacatagaagaaatttgccgccataagacatacaaagctgatgtagttcgacagagcttgctaactgctaagcatatggggtggggttatatgctatatgctatataattatacattgtacatagataaaaaaaaagtctttcttgagcttatttagttccaactccttttgatgaactcagccttctttgacaacttgaagcatacatgttcgtttttgttgttttgtactcctctaagagcactacatgatgaaggaaagcttcacttgaaaaattaatgtttcttttaaacttgtaagtaaaggagtcttcttctcttcctatgagataactttctcttggtgacaccattttctttttgctattttgaagaatatttccggtgaattatacagtttttaaaattctttctactcagatatgttacaaattaaaccaacaaaactgtcacattaccaagaaaaaaaagaaaaagagaaataagaaacaaaattacctgaaaggaattggtgtgggtgtggtgttgagagtcaaataaccatgtcaatgggtttcctctagcccttgtgctataatcagtcccagaagaagttttgccgtaattcattcttgttgttttc

SEQ ID NO: 1389 - DNA, 463 bp, Arabidopsis thaliana
  Intron number 2 from transcript AT2G34110.1 (locus AT2G341 10) derived from phytozome v7.0 (chr-ID Chr2; pos 14402724 to 14403186)
gagttccacggtacgtttagctattgatttagaagccatgggtacgggtggaaagtccagtatttttcaagtataatcttatgcattacctctcgttcatgacggttacaaaaattatcacttaatcatatataattctcttgttagaataaacttcataattgagtcgataaattaatctctataatttgactttgaaattgcgaagtcaatgacgccaatatatcttctcagatgcttattcgtgatcttacttaataatattttgtgaaactttgataataattagtgttgttgaagtgatcaaagttcttgttgttgttgaagtgatcaaagttcttgttgtttgcaagagtccagatatatatagataataattattgttgttgaagtgatcatattcttgttgtttgccatggatgctaaattaacatagttctggatacatataaataggtagata

SEQ ID NO: 1390 - DNA, 484 bp, Arabidopsis thaliana
  Intron number 1 from transcript AT2G34300.1 (locus AT2G343 00) derived from phytozome v7.0 (chr-ID Chr2; pos 14476843 to 14477326 reverse strand)
ttgaggatctttgacataaccataaatatcctctggtaaatcttttgcctcaatattttttattcttccagcaagcctctttcgatctcattgcttaattctgggtattgcttttgatgtattactagtttgtgattttgttttggtggaacaaagttatttgattggatccatttttaacatttttaacattttgaactcttcttcgagtagtaagatccgagtgtttttgtatatgcttcagaggtaactcttgtttagtttggtccatatctagatctgtaactacgtgttggttcttgctctgctcaagtttagaaaattgtgtatataagctaacgaatttaatctcttgtgttgaccaaacaaaaaaatctcttgtgcctgaaaaatttgactgatttgtttttagtttatacttaacatttctactggttgtattgcgccagtttcatgtcttctttgtgattggtattttaggtgg

SEQ ID NO: 1391 - DNA, 415 bp, Arabidopsis thaliana
  Intron number 1 from transcript AT2G34300.2 (locus AT2G343 00) derived from phytozome v7.0 (chr-ID Chr2; pos 14476843 to 14477257 reverse strand)
agcaagcctctttcgatctcattgcttaattctgggtattgcttttgatgtattactagtttgtgattttgttttggtggaacaaagttatttgattggatccatttttaacatttttaacattttgaactcttcttcgagtagtaagatccgagtgtttttgtatatgcttcagaggtaactcttgtttagtttggtccatatctagatctgtaactacgtgttggttcttgctctgctcaagtttagaaaattgtgtatataagctaacgaatttaatctcttgtgttgaccaaacaaaaaaatctcttgtgcctgaaaaatttgactgatttgtttttagtttatacttaacatttctactggttgtattgcgccagtttcatgtcttctttgtgattggtattttaggtgg

SEQ ID NO: 1392 - DNA, 594 bp, Arabidopsis thaliana
  Intron number 1 from transcript AT2G34680.1 (locus AT2G346 80) derived from phytozome v7.0 (chr-ID Chr2; pos 14628301 to 14628894 reverse strand)
ttttgattttactggttacttcattgttcagtgcagtaagtatttattttccttgtcctgtcttactattggtttatttccttaaatgaagaaactttattttccccgaatttcttcattgctaaaaactctcactttctgcaatttcgtctgcttgtttcactcacaagaatttcacatttttttcaaaaataaacactgcttaatgcggattggttgttcacaaaaggaccaaaaaatcgtagaaggtaaccgacagtgttagctgaaagaagccagaaactctgtttgtctgtgttcttgaatttagacaatctactaaagtccgtactttttttattagtaaatcctgttatgaccggacccaataaagtagagtaattgttacatgcgcgttccattccaaacaatgtgcgtgggccacttggtcatttgattctgtatttttacttcggagaaatttggatacaacaaataaagtagagagattgtgtataatgaataaagtttccttttttttgttaatgatttgatcatgcgtctcttctgatttgagtttcttttgtatctgcataagtttggattgatttcact

SEQ ID NO: 1393 - DNA, 597 bp, Arabidopsis thaliana
  Intron number 1 from transcript AT2G34710.1 (locus AT2G347 10) derived from phytozome v7.0 (chr-ID Chr2; pos 14643199 to 14643795 reverse strand)
cctaagcagatcaaagtttggtttcagaaccgcaggtgaaatttcatcttctttccttatcaaagttgttaccttttgtctgtattaattgttttcttaccattagattatctttttgtttgtatatgagtttatgaagatgttaaatgtttttctttctttgactggtcagttgtatttaagtttccttgctgttcttatctgacaagaattttttggatctcagtgatcattttgttatgagttttaatcgtcttctaaatctctttaaagcaagaaactttgtttaccatatgctttgacgtatctagttggttgaatatctaaattcacgaaagtgacatttaatcaaattgtctttgaatgcgtttccaacatttatttctgtcaaaagcttaagattttctgccagaaattatgatatgataaaggggaaaaatttacattatcttttcttctttatatcattggatgtgttttataaagacaaatggtgtctgtctctgttcatccactaacatttcttcccatcatccatgcacatttggcttttatgttggcttagttggtctaacgaagcttccttttgatttttag

SEQ ID NO: 1394 - DNA, 549 bp, Arabidopsis thaliana
  Intron number 1 from transcript AT2G35230.2 (locus AT2G352 30) derived from phytozome v7.0 (chr-ID Chr2; pos 14842398 to 14842946)
ggctcttctgggttagctaggatccaaattctcaggtgaaagacctgaacttttgctccatcttaatcgctttttttttcttctctggctggtctggtaatatatacagagaattgatagtgtaagaattgtaattctgctttagtgttttgatcgagtttctgagcttagtatcgtgggtttttgggttcaggggaggataaagtagcttaagaactgaggatctacttacttaagctaggcactttcagctgaattttgattcgtttctggactcattagttgggtaatgattagttttagtttctctttggtgaatattttgtttgattaggtaattactagacagtagtttctcattgggttttggttgatttaggataattcttgggtcatatttggtgttgggtctgttggttggttttttagattggtagtgaggtttttactataggtattggatttttgtggagatggataggcctagacaaaatgatcatttgggtgtgaataggattgggaaaaatatcagaaagagtcctcttcatc

SEQ ID NO: 1395 - DNA, 350 bp, Arabidopsis thaliana
  Intron number 1 from transcript AT2G35880.1 (locus AT2G358 80) derived from phytozome v7.0 (chr-ID Chr2; pos 15065394 to 15065743 reverse strand)
catatacgctttgtctttcttaatcgactgataaggtactttttgtggaattttgcttttcttcattcactttgtcttagtttcgacttgtttggttgattctacttgtcttgtttcagatttagattttgactagtgggtttgctttagttgttgtctacaggaacaatggtttggttcaatctgttttcaaaatcagagctttcgaattttaaacattaaaacggttggtttgtttttatgaatatggtgataggtgatgactaggttgatgatcgtagcgttttgttgcaaataataaaagtgattgttgacattgctatgttacaatgtttagtccttaggatcag

SEQ ID NO: 1396 - DNA, 829 bp, Arabidopsis thaliana
  Intron number 1 from transcript AT2G35900.1 (locus AT2G359 00) derived from phytozome v7.0 (chr-ID Chr2; pos 15070538 to 15071366 reverse strand)
aaaacagaagaaatcctccgccactgttttgggaagtgagtgtttcggatattttctcgcttttgatcataaccctaattaagcaaaagataagcttttagattttgaattacatgtggaaaacaaatctccagggtttatagatcaaatagatgaagtgtgtttgttttgagctctgagttaaaaaattttgacgtttttgtggttatgtaaaagctaaaagccaatagttaaagattgactctaaatttgtgtttctgatgctaagcttactaatatgaattgcagaaagatagttgtgtttatgcactggaatggttacattgcttacttcttgtggtttgatgttgttttcttcgaaaggactctctatcactgaaccattatggtaaaaatgtttcattataaaagttcttatgattttatcatctttgtagtgttataacttgcatgttttttttggttaagtaagtggagcaactgctggttagtcttttttgggttaagtaagtggagtattctcatataagaagaagatgcatagagtatcacatcacagtttctgtgtattcggcgagcttcatgtttgtttgtttgctacctgtgatatgagttattccatgttaaatgtaatgctttcctttggaagacaactcttgttttctttctcgccctttcatgtgtgattttgagattgagccattaaaatgttcaagcaccttgattgtttgttacctttcgcgcctctagacaatcactaaatcgatttacccttggttctgtatctgctttaggccctctgaagtcgttcaatccaacacagagcaca

SEQ ID NO: 1397 - DNA, 824 bp, Arabidopsis thaliana
  Intron number 1 from transcript AT2G36270.1 (locus AT2G362 70) derived from phytozome v7.0 (chr-ID Chr2; pos 15206572 to 15207395 reverse strand)
ccaccggtttttagacacacagatttcattttcaggttaacacttttcttgttttataatttttcaagatcttggattagaagactgttaaataaatctatctctttatttataagtttaggtcttcgttttctggtccttacttatctgcgtattaccaaatattaaactttgtggtaaagtgatacttagtaatagacggatataatgatgacccaagctaatgattaatttattttactaatcatcaggttaagctctagattatcttttgtttaaaaccgtattaataaatgattaaagaggaaaaaaatcttgtgttgataagttcgctttaagaagaaaacgagtgggttaagatattttcctcttttggtaacgaaaactttattggaagagtaaattattagtttatttattgctaattttagtatcgtttgtcgctgtcacgatgtggaccgttcttctttattttcacgtggaccgacttaattaccttctttcattcttgttatttcaatattttttacgtcatttaaactccactttaccaaaataatttatttcattctttgagagcatcaattatcaaataattcaattgtcttttttcgtgatagttgaataagggacaactattaagtgagtttcgtgaatagctgaacagggacaagtaactgaagtttggtcaaaataatacgatgaatttaatatataagagacaaaattgttattgtcgtttaggtggtatccatatttcaatatagtttgtgtgaatacagatataaaaatggttattgttgtgtatatgatgcagttgttaa

SEQ ID NO: 1398 - DNA, 607 bp, Arabidopsis thaliana
  Intron number 1 from transcript AT2G36350.1 (locus AT2G363 50) derived from phytozome v7.0 (chr-ID Chr2; pos 15238208 to 15238814)
ttattaggtacgtctttgtatctgtacttgcttctgcatttttcgatatttgtttcttttgatgagatttggggactcttccttcagaaggatttgaagattttgacatcttccattaaaagttgaatctttacttaagctagtgttcttagcattctgtttatgttagcttcatgagatctgggatctcgaggctgctttttttttttgctttgatttcacatttaatgggttttgattacattttcattaggtgaagtgagttgaacttggcttgtggttttgatgaatttctttctattaaaagttttggtttccctaccaaaaaaatgtcttctttttgttaattaaagtctaaaagtagctaatctctatctgtacttgtgtagggttcatcatttgagtctataactataatgactttcactgttcatttcctttttaaatctcttgttgtttccctttccttactttgttcatcatttctccttccctttactcaatagacactgctcttcctttggattattgctctgtgagttatttaaaataagccataaggtctcttcttatgattgttgcagggtgttgtactggaattattagg

SEQ ID NO: 1399 - DNA, 399 bp, Arabidopsis thaliana
  Intron number 1 from transcript AT2G36410.3 (locus AT2G364 10) derived from phytozome v7.0 (chr-ID Chr2; pos 15279321 to 15279719)
aacaagaaaccaaacgtctctctactattcgtgaggtttgaattttactctgtttccttttcaaagttagagtttttaacatgtttgagaagttgttctattttgtataaaccctagaagatatagagattcgatgtttgttggcgcatctctgtttagggttttcaagatctaggatttggctaagtgagaagaaatgtttttgtactttttctttggacatgtactgtttcttttgatggagttatgttgtgttgtgtcttgtataggagcttgagtctatggcagatcctaggatttggccaagtgtaattgttgttatgatttgagttttgatggagttatgttgtgtttcaaggtaagaacttgtgttgtttcttgtaacaggagcttgagtct

SEQ ID NO: 1400 - DNA, 476 bp, Arabidopsis thaliana
  Intron number 1 from transcript AT2G36550.1 (locus AT2G365 50) derived from phytozome v7.0 (chr-ID Chr2; pos 15327807 to 15328282)
tggaccaaatcttggtaacatttcaatagtagttttatttattcatttcttttatataattagcttgattgggtttgttttgttgtttagtgtataagaggccatttgctgaagagtttatgaagttttgtctagagagattccaagttggtatttggtcctctgcttgcgagttagtctctgattaattttcaataatttcaatctcttcctcttaagagactaagagtacctgatctgtttcttccatggtttttgactgataggaaaaatgttgacataattctaaacattattcttgaagatctagaagataagcttttgtttgtgtgtataagactcttatactatatatacatgtgtgtgtgtgagtgtgtgtttgtttgtctatatatatatatatatatatgtataaactttcgtgttcttttttcttgttaggatcaagaaaagtgtacggacagtggatataaaac

SEQ ID NO: 1401 - DNA, 302 bp, Arabidopsis thaliana
  Intron number 1 from transcript AT2G36630.1 (locus AT2G366 30) derived from phytozome v7.0 (chr-ID Chr2; pos 15354628 to 15354929 reverse strand)
tctcttctctctctgccaccgaaaaaatttggccggtaaattaaaaagattcttcctttcttcttctgaatattccatcgtcattattcattaacttgagtccttttcaattagtctttgattgttttttaatttgatttatgttataatatattttgcttacgtaacaacattaattaaaaatacaccttttacccaaaagcttggaagaatcttttaaaagtggaatttgacttttgtttgttttgtatgaaattgtgtaagtaggatttgaagtttagctggaaacttgtgttggctac

SEQ ID NO: 1402 - DNA, 484 bp, Arabidopsis thaliana
  Intron number 1 from transcript AT2G36960.1 (locus AT2G369 60) derived from phytozome v7.0 (chr-ID Chr2; pos 15523064 to 15523547)
tcccacttccaattccacatttcaaaccttttcaggtaatatttctcatatttttcgtgttttttttcggggtcaaacttatttttttaaaaatttcaattcaaatttcgagtttgtatttagtaaccctagttcttaatttttcaatttttcgtcttcccttatgagatttagcttaattagggtattgaattaagtagaattgggtttttgtttttgttgtgatctggtgaaattaattttagggttttattgaaggtgaaatttgtttgttcttcgttatatcttcgaaattagggtttttcaaatttgtgtcgtggatgtaaaaattatgaattgcctgtaaaatttttctgtcggttgctaaatttcttgtgattttagttgatgatcgctatgtagagtttcgccttttttttgggattttgaatgttcatggtttaggattcattgctctgatttgtaggaagttgaaatcaaaagc

SEQ ID NO: 1403 - DNA, 485 bp, Arabidopsis thaliana
  Intron number 5 from transcript AT2G36960.1 (locus AT2G369 60) derived from phytozome v7.0 (chr-ID Chr2; pos 15524193 to 15524677)
ctacggtacttgatttatacatttcttttctgttatgctttgtgctggtatggtagattgttacgttatcgtaaacaaatgatgaatatcactctccgggtatttttctagataacaagttatagcatgttatgatactatgagtattattaagtaggcatggtcacattcatttaagggttccatttgcgtaaagtaatttctgtagtatagctatgcatttcctgctagtgacaatataatgttaaggtaaggttttttgtttttttcatgtgctttgataatatctgccaggaacctcatacatgatcagatagtagcaactgacttatatttcagacatcatagcttcttccattctcctagatgacatgatttcacatatcatgatcttaattatcactcagctcgtctgactaaagtaaacatgctttttcatgtgtcttgcaggtggtctttgcttgaaaagtatagctgcaaagctt

SEQ ID NO: 1404 - DNA, 843 bp, Arabidopsis thaliana
  Intron number 1 from transcript AT2G37025.1 (locus AT2G370 25) derived from phytozome v7.0 (chr-ID Chr2; pos 15549199 to 15550041)
cagtgttcttcgtctcctctcgtcgtctctctttggtatcttttttcttagcttcgagtactattcttttcgctgacattgtgttagattctctcttgaacttgaacgatctcttttccaacacaaatgtaatgtatgatatcgttcgattttttctcggattgttagtttcttcaaattgcaggtgtttagttaaaggaaggggataagctaagcagctggattttcttttcttttcttttttttcttccctggaaagttatatttttattattattttctaatgtaacagctgtgagtcgtctctatggcccacattatacgtatatttcttttatgtttttttttttttttctatattgcatttgcattttgaatgttgtgataaacatttaaaacattgacgcttctgtagctgctgagagttttgatttttctttatttgtgtttatctattctgtcaatgagactgagatcatccgacagaaatttgtctggctactctgtttctttatactgtaattgcatagaatgtctgtcctctgttcttaagtaaatcttatattacttatttatatattttcactagatttgaggcaaattaatgttttttaatttggagagaacatgtttcatgttgtgaatttgtttattagtgcttaaaaaacatggatgaatctaatggattgggataacatgcatatatagagagaaatgagatctagtttcgtgaatgtagcatgtaagttagattggtttatgggcaacattgtccggttctgttcaattattgtgacatatacttggttctttgcagtgtaaaaacttggaccttgacttgaa

SEQ ID NO: 1405 - DNA, 904 bp, Arabidopsis thaliana
  Intron number 1 from transcript AT2G37080.1 (locus AT2G370 80) derived from phytozome v7.0 (chr-ID Chr2; pos 15584077 to 15584980 reverse strand)
ggaccaaaagaggaaagctgcagccacagttgcaggtgaagaacatagaacactgtcccttctctctctctcttctttatctgtttgaaatacctaaaaattggttctttatctgtttctttcgttgatgagttcgaaatacctaaaattttgttctgtttttgagttactatgttgcagaaagttttaacctttgagggtttggtttagtttttatgtttactcttttctgggtttttcttgaagattcagctaaaagaaaagaaaaaaatttgttttcaagaaagtttttttttccttcaaattttgatttttttttttctgaaaaaatgttctcggttaggtttaaattgaaatttctagtttggttagtttcttttaagatctgttgtctattttagggaagatccacctaataaaaccagaacccacgttaaactaaatgacagaaattgttattatctcctctcctccttcaaaagattccaaattttttgaagagaaaacaaaactaaaattgatgacttgacaactacaaaaagattatgtggaatataaatgtactttctttgcttgtaatttggtttacctctgtgagattagattgaatcacactgagaaaaaatctatttcctttgactgtgaacagtttctttttaagtttgtcttgttgccttggtttggtggtagtggtagtggtttcaaatggagtctctttgaagccaatgtctctgtatagtttagtttgttagggttttgtttttgtacacttgcttaagctttgtacttctgttgagtttgttgtatatgcttgcttatgttaatcttataacaccgatttgtgtttcttgcttctttctcacacacagagtttatcttcaaaggacccaaaagagagtgtttt

SEQ ID NO: 1406 - DNA, 1047 bp, Arabidopsis thaliana
  Intron number 1 from transcript AT2G37440.1 (locus AT2G374 40) derived from phytozome v7.0 (chr-ID Chr2; pos 15718125 to 15719171)
ttcacaaaaccttgttttgtataacttatactcatgtaagttctgctactaactctgtaataacctttttgttccttgatgaagaagtcgttttcggacaagactgtttattgtttgaactcactaatgtcttcgcttgaattttcctgccgccttcttctttgttactcgctctgttttcttcttcatgaaagctctgtttcctcattttctcctttaacactatgacacacaattttttccatctcctctataataaatactttccaatttttatcctttatctcatcgattaaaactatcaaatcgatcttgttattgcaccttcctaattcaaagatgggtacgcttatatttttgtataattagcttttatttcgaaatcaagaaacaaagtttcaattttggttttgtctatgtttccatacactctgtttttttcctctcttaaatgctaagcttaaaccaaactccaaaagcatttacatctaaacatggcttcttccgtatcatgcatgatatgtgttaattaaattttccaacatgctttttacataattctccttaattaagactcttggtctggtctctgttttgttattaaaaatcttagtttctggtttccatacactctgttttacctctttgtaaaggaagcatctagattgttccgtttcatgacatgtattaattaaattttccaacatgcttgttatagaattctccttaattaagagcctctaattaatcatttctctagtttttaaaatatctgtctccaattctcctgcaactaggatttttatatacttcccgttgaatttcttagctactagtagtattatttttggttcaatttttgtcttcgttttcttattttacattttaatttctgtctttcttgcttgttgattggacccaaattgcttaagatatattattcgtcattatttttcattaatttcgctttcatttacgcgcactaatatcttgcttacctctaaatttgcagatcctcatcctttataatcctctagattgtggttc

SEQ ID NO: 1407 - DNA, 598 bp, Arabidopsis thaliana
  Intron number 1 from transcript AT2G37540.1 (locus AT2G375 40) derived from phytozome v7.0 (chr-ID Chr2; pos 15753132 to 15753729 reverse strand)
ccagtcatctcactgccatcatcacaggttctttcatttttccttttccttctgatattttcttgcaaacccaatctattactattgccaaacaaattttattttacgtttactcgtcgtgtaagactttcttccaaaaaaagaatcggaaaacactataaaattagtcaagtctactataaattcaatgaatggaagatgaaatgttttaatggtggatgaaaagtcaaacttttaggattaagctagagtttcgattgtgacttgtgaggcaaataatataaaggggacttttttttttttttgtatttcaaacaccaaagattttctttctgttttgtcatgaccgattttttgtccataaacaaaatatcttagttatgtatcttctctctaattaagactaagttaatagatcaaaattaaactcgcatatgaatgttgttgccaaagttattttcattaaaattgaaagctaatatgttttgtagtatttagttggtactataatttttgaccaatatgcaattttatgaacaattattgtttgaacaaacaaaaaggtggaacaagtgggattggattggaggcagctaga

SEQ ID NO: 1408 - DNA, 468 bp, Arabidopsis thaliana
  Intron number 1 from transcript AT2G37620.1 (locus AT2G376 20) derived from phytozome v7.0 (chr-ID Chr2; pos 15779293 to 15779760)
ttttctatctctactttttttcctctcgatttcaggtactttttgagaccctttgttgtgattttcgaacacacaccccaattacgtttgatttttgatcccgcatcgatttcaattcatccgtttctgagtttcttttggatctgggtgtcttgagctaatcttttcgatctgttgtttatcgattttactcatgcgtatgttcattacaccatttgttatttgtttaatcaaccaaaagactcatgtttttcaaatgtctttaatataatttttctgattgaattttataatatttacatgattctggatccagaatatccttcttcttcttccattttgtcctgtattgatttgtctttgaaaaaggattgttctttgtatctgtattggtgaaaaaggattgttatttgttgataaaaatttgatctttaaacaatgtttggttttgcataaaggtagaagaaa

SEQ ID NO: 1409 - DNA, 468 bp, Arabidopsis thaliana; identical to SEQ ID NO: 1408
  Intron number 1 from transcript AT2G37620.2 (locus AT2G376 20) derived from phytozome v7.0 (chr-ID Chr2; pos 15779293 to 15779760)

SEQ ID NO: 1410 - DNA, 857 bp, Arabidopsis thaliana
  Intron number 2 from transcript AT2G37640.1 (locus AT2G376 40) derived from phytozome v7.0 (chr-ID Chr2; pos 15788352 to 15789208 reverse strand)
taccgtgcaggcattgtccccgtctcctatcgcaggtctctctctgttttttgttttgcgtcgttttggttttgtcggctattataatttggcgaaatcaataagaatttcactgttaataatacggtgaagaaattacacaaagaaccatatgcattaatggatgattcatgatagtgacttttgcaaatctagattatgtttaaaggagattaatattttgaaggggagataaatgttttacgtgtaaaacaaattagaggctttagtgtaaaacaaattagaggctttagttttcgattattcgttataatatgctagaaactacagagtttgaatatagcactttcatgtctcatgtgaaattgacgttttaaaaatttcttaatccaatattcaaaaaaaaaaaaaaatcctttataaatctaaagattctttttttaaaatagtattttcacaatatctatttttttctttttaggttctgtttctttaattaactttaaaagatacttgtaccgactaccgaacatgtttttttgtttacctctaggcttgtagcacttttagataacggcctatgtgtttcagagttcagaaactgaaaccatcactctcgattattagtattattttttgtttctttctttctctttatacacaatttaaatacgaattatttatatagtatttccaattatcttttcgggaaaccaagcaggacacatagacacagtaacccagagatccacctctctctgtcactctcagtctcacttgtcttgttgttaataattgtctgaatttctgtttcctctgaagggtaccttgtcggaagataggagggataagattca

SEQ ID NO: 1411 - DNA, 463 bp, Arabidopsis thaliana
  Intron number 1 from transcript AT2G38020.1 (locus AT2G380 20) derived from phytozome v7.0 (chr-ID Chr2; pos 15914191 to 15914653 reverse strand)
ttcgtaccttgctcgattctcctctttgaccaaacgtaagttttcttattgatcgatgtttatcaaatattactcctttaacgacgttctcaaaatcgattaaagtaatgagattgatgaactttgattgctccagtttcattgtagagcctttacctagattagtcttcatataaattgtgtagttatagattgggaattgaaaaaattcagcttagtttcgagtttgatcgcagctaacgtaatttctagggtcaaatttgcgatttttagatgattttttaagtgtgattttgtgtccatcagcttaaaagagttctcttttagcaattcattgctactttctagccatggatgatgttttgggggcttattactcctttagatatgtgtttctttgttttcataaccaaatcaatgatcctggctcttttgattattctgcaggtcctgacgaaataag

SEQ ID NO: 1412 - DNA, 393 bp, Arabidopsis thaliana
  Intron number 1 from transcript AT2G38660.1 (locus AT2G386 60) derived from phytozome v7.0 (chr-ID Chr2; pos 16165999 to 16166391)
tttcaacgccattgacgacgctttatataccactggtaaatctctcctctgttttttcctattttccgatttcttctttgttaagaattctatgtatgatgaatttagctgagtgaagaagatgaattttagctgagtgaaagcttatgatagtctggtgaaatctttaatccatttaggttcaatctggtgcaagtttgtttttactgtattatgcgcctctttatttgtttgtgtggatgtaatgaagagtatggagctaaaaggatcaaattatggttttattctagcttaggctgacctgtctaaggttctcttgtctggtctgtacttttacattgacttttttcttgtgcttgatttgaatcagtgactgttcttttagttttgagt

SEQ ID NO: 1413 - DNA, 393 bp, Arabidopsis thaliana; identical to SEQ ID NO: 1412
  Intron number 1 from transcript AT2G38660.2 (locus AT2G386 60) derived from phytozome v7.0 (chr-ID Chr2; pos 16165999 to 16166391)

SEQ ID NO: 1414 - DNA, 433 bp, Arabidopsis thaliana
  Intron number 1 from transcript AT2G38740.1 (locus AT2G387 40) derived from phytozome v7.0 (chr-ID Chr2; pos 16195556 to 16195988 reverse strand)
gcttctctgatcttaatccttctgagaggtacgctttgtctgatcatcaatgatgcttataataatctcatttatacatgatcttgcctctatatatttgttcatcttagtaatcttcggtctcagcttccattttcgtctcccactatgtttctaggattttgtgttacttttgttagaaaactgcgatttttgtgctagtgtttgtttctccaagatcaatggaactcgttgcctaaaattcctgattatagttacataaacatcaaatggttctaattggtctttgatcttaaacccatttgattatggtatctaaagtttgatccttttgatgcactctcatcgcagtttctcgtgattttaatattattgaactcttttgatttgtggtgaagcaaaccttctctgtcacaactagctccattagaag

SEQ ID NO: 1415 - DNA, 512 bp, Arabidopsis thaliana
  Intron number 1 from transcript AT2G38840.1 (locus AT2G388 40) derived from phytozome v7.0 (chr-ID Chr2; pos 16227383 to 16227894)
tcaacgtctctctccatcgataattttcaccaagcgtaagtctaatttcttcttctcttcttgccattccctcagatttgtattcttctaattggcaaattatcacaatttggctttaaagtcttgatttttatctttgtttctggactattatagtaccgcatcttgtagttgtagtaatggcaatgggaaataaatacacaacattgtagcaatggatctgatatttgattgaaagacaggttttttgtttttgtctacatgagaacctatgaatcttcttgataatgtattgtctattgccagttgtttctcaagtcttaggtttgttataagccacattgttgctagagaatgttaccactgtataccagtagcaatttcctgtcatcaactgtagcaaacagctcctgatgattgatcagttgtgatgggcaaacactttttggaaatcatttgtgcttgttttttatgcagttttcctattgttgaacctgctccgggtcatacaa

SEQ ID NO: 1416 - DNA, 592 bp, Arabidopsis thaliana
  Intron number 2 from transcript AT2G38920.3 (locus AT2G389 20) derived from phytozome v7.0 (chr-ID Chr2; pos 16249800 to 16250391 reverse strand)
caaagcttgcccttgtatgtataacttctctctctttttcctctagtcttcacttaacttagtaatctttgtgcaacagtctaatggggaacgtaacgatctacttggtatgtatgacacacttaaaaagatggtcctaattctgaatatcttaagttacatggatttctaacttaaagccaattagtaacgagtagatttgggcaatgtctcgtatatgtttttaagtatttctaaaagaatatttgatgtgagattctaacaagtcatttggagatgatgattctttcgtccatctcaaattgaaatccactgaaagataagcaaacatataccctacttggatcaaatgagataccatgttaagtttctaattctaaaccaattgacaatgaatggattagtctaattcttttatatactgtagatttttttctagtttctgatgtgaatcctactagaataatctaaatgtttattgatgtaaaagatttcaaattattaaggagtggagtgagttttttgtttaattatttgagattaggtggttgatgtaaaagatgatgttaattacaatgcagggtgtgatcag

SEQ ID NO: 1417 - DNA, 662 bp, Arabidopsis thaliana
  Intron number 1 from transcript AT2G39170.1 (locus AT2G391 70) derived from phytozome v7.0 (chr-ID Chr2; pos 16335422 to 16336083 reverse strand)
ttttctctctgtttcgtcgtcatctagggtttcctgtaagttataattatctcttcttctttctcaagttttgttcttttggtggttttaggagatttttccatctgggtttatgttattgaatcgctttggtgtttgaaggcctagctagtaaaaaattgggcgttttcattggatagtgattgaaggggttttaggtgttgaattgtttgctaaactgtgtattcttactgaaacttgaatgcttatggagttaaagtgatatttttttgtaattttagttttttggtgaatgataagatgttatctagaaattgtacagatgattcgtgtaggcaaagtgattggacatggttgtgattttgcattactctgcaacactaaatgtattagaggttgatataattagtcctcaattcattgaaggctctcttttgttaaccttagcttctcttggatcacttgtgaaacgtagtttgcattagattcctttgaagattctcaaacctctcgtttggtcaacattgttattggcattgtttattttgtattttctagttctgttttgattgttcttgaccaggtgtgctaggtttcctttgttactgttgattctagagaccttaagatgtttgggattatttttatttttttgttacaga

SEQ ID NO: 1418 - DNA, 598 bp, Arabidopsis thaliana
  Intron number 1 from transcript AT2G39770.1 (locus AT2G397 70) derived from phytozome v7.0 (chr-ID Chr2; pos 16588803 to 16589400)
gctcagatctctgatccggtgagatctctctcaaggtaatgcccctgcaattttgcttacttctctggttgtgatatgcatgttcttcgaattttcatcgtttgtgatttgaattctcattttgtatttgctgttgttggtttttaattcgattttccggaacagattatgggatttgtattcgaatcttcgatttgatgacataatgtcccagccttttatgtttaatcttgaaatgatggacttttatccgatctgggtttaaagctggaattttgattgtgggtactattaggtttcattgatttattgcttggtccaacatttttagcagctggtattgagctcttgttgtctgaattttggaaagaactatttttgttgtatcgttttgatttatttggatctgaattcattcacctttttctctgattattgttttgtgtcggttgcatccactttgattagatctgaatgaatcatttttttatgtgctcaagttattgtatggattgttctgtttctagcatgttttggttagacattgttaagatctgacgtttgcattttcaggaaaaggagttagagcatcatcaag

SEQ ID NO: 1419 - DNA, 784 bp, Arabidopsis thaliana
  Intron number 1 from transcript AT2G40020.1 (locus AT2G400 20) derived from phytozome v7.0 (chr-ID Chr2; pos 16711030 to 16711813)
cttccacagtcgccgccgattttatcttctccgccgtaagtactctctttccctatcgaatctgaacgaaacagctcagcacattgtcatctctgtagcaaaattaagttcgtgtttttgtgttttgttgtgattctgtttaggtttcatttgggtttgaattttagggtatttttggtttatctctagtgttactgattcgggatttttgggaaagagctcaacttttgttttgtttcatctttcgttgattttgttgttacataggtttgaaaaaagggatcacttgtttggttgcctttgtttgtttgtttgattataacccaaagacttatacttttggtcctccaatttcttctgaaactacagggaattgtgagggatcaacaaatggctcccagaggaagaagaaaggtataagctgtactgttttttttgttttgtttttccaaattaaaatgctggctaacaagtaaagatatgagcttttgaatcatatagtttttagagagtatagtggaaaactaagataaaagcatagacatagacattagagtagaatgactatatagatgaagtatttgaatgacatgattgttgaagttaacattttgtttctctctacgacttctgtgtactcaacgttgagaacactgatgagataagtttacaaatacttctttttatgatgggtgttcttgtttttttccttctatgattatctctcttttctatgcttttaaattgctacttttcttttgcttttttgcagaaggctggattg

SEQ ID NO: 1420 - DNA, 359 bp, Arabidopsis thaliana
  Intron number 1 from transcript AT2G40060.1 (locus AT2G400 60) derived from phytozome v7.0 (chr-ID Chr2; pos 16726845 to 16727203)
gagaaggttagatctactcaaagttttgatctttgttgctttttgtttacttcttcctgaagaaaatcgataaagtggataaatttagttgagaatctctttgataatctgagaatttcaattttgaattttgattcacaatttttgtgaattgaagttatctgctagttagtgtccattgttctcagaagtaatcagtttattagattggatctgttacttttgcttagagtttattgctcaaatcgtgtgttctagaataacatcttgatccgtaagcttgtaatgcttgttgagttgattaagatgtatagatctgatttcgtgctatggctttattatgtttatgtgtagacaaa

SEQ ID NO: 1421 - DNA, 608 bp, Arabidopsis thaliana
  Intron number 1 from transcript AT2G40110.2 (locus AT2G401 10) derived from phytozome v7.0 (chr-ID Chr2; pos 16748238 to 16748845)
aagacatcatctccaaggttttgtcccttttccaatttcttgacttttctggagattattctaatgggtttgtgattaatctgtttttgttgtttttctgcatgctcctaaaatttgaaatatataatgatagatggttctctagaagatgttgtatgttgataagatgtggttgtatgacttatagaaatacttcaactttcttaacattctttttgttgtgtatttctcttctgcttggaatagggtcatgttatgtagacgagactgttaataaaacccctagatcactttcgaaattttcattttgagttactacattgttgaagtcatggatcagtacttgtattttgcccacttgccattaagcagataatgattacaaccacatagttttgaacattgagctcccctttagctgatcagaccacatagttttgtctttttgattctctctgtggtctaagatggattatctttatgcttcttgagaataacagagagttgagctattgagctttccctgattctgcatttgttgtttcttgagctaagactgtagtgtgttgtgtttttatgtttccttgttcagtcttttcactgcaagc

SEQ ID NO: 1422 - DNA, 437 bp, Arabidopsis thaliana
  Intron number 4 from transcript AT2G40510.1 (locus AT2G405 10) derived from phytozome v7.0 (chr-ID Chr2; pos 16919135 to 16919571)
ttcgtactcctccacctcgtttcgccagacgcaaggtaatatctctctctctttttcgactcaatgatcattaatagttttaagcttcatttctcaatcttttgttacttctgctcgctccattttgtctttggtttatgaagatagtttgaggttaaactggtttttttggacatgtacaatgtatagttgacactcgctggaaccaaattttgggtttgattaccttctgaactataatagttgtttcaatatatagtctttacgacttcaataagtagactttcttggtggattaagcaaaccagtaccttcacttcattcctaacaaaactactttcagtgagactgttttgttctatcttttattgcatgaatgacttactcttctgagataatcaggaggatactcccaagcctgggcaaccaggacaggc

SEQ ID NO: 1423 - DNA, 863 bp, Arabidopsis thaliana
  Intron number 1 from transcript AT2G40620.1 (locus AT2G406 20) derived from phytozome v7.0 (chr-ID Chr2; pos 16955584 to 16956446 reverse strand)
gagctttgggtcgtcgaccctaaaagagctaaaaggtttcatctttaatccccaaacgtcgagaattttgtttgatatgattgaaatctagttccttgttttatgcttttgtttacaattcgtggggaagaaaggcagtttctttatgaccttttattgatgaatatgtaatcttttgatgttgatgtgatgcattagtcattaggtgttcttttggagatctttttgtttttcttggttacgtgagtacatcaccttttctttttgactatgatctcgaatctcaacgataactgatttttaactgaaattttagttatagcttctactatgctgcttttttattttaggtctttcctgctgagagagagagaccatgagggacccataagtttgcttttttgtctaaattccaagttgaattctgtgagaatgtgtctctttcatgatgattttatggcccccaactaatttttttttgtactagcttttgcttgattggtctgttcaattcctgtttggttagagatcatatttgatgatgtttttttgtgtggtatggctttcaagatgatcccttttttacattcacttttagtagtcaactgtttggaattggaaattatagtttcaagtgactttggttcaaattgtttgggaattagctttgtgtgagatctgatctgtgtcaatagggttaagggtgatctaatgtaatctctcggatgattctttggtgatggtcactattaattgcatgactgttcttgtgacttttattaattgatgctccaaagtgtctaatcctgtctcatgcactctgtgcaggataattgctaatcgacagtctgctgctcgttcga

SEQ ID NO: 1424 - DNA, 365 bp, Arabidopsis thaliana
  Intron number 1 from transcript AT2G40660.1 (locus AT2G406 60) derived from phytozome v7.0 (chr-ID Chr2; pos 16966039 to 16966403)
tttcagctctctgcaaacacttctctttggatcctgtaagtattgaagaagatgacatctcaaaagcttctgcttttttgtgaggttttgcttggtagctgagtatgtgtatgatcattttttgaattagttagtggagaaaactcgaacattatctgattgggtactgaaatcaattagaaagtttatgttttggacttatcagtgtttacgcttatgcatcaagctggtcatgaaaaaggaaaaaactttagaaattggcttttatgattttacattgtgatgatttattggttctgtttctgaaattgatttgattcatttgtttaggaaccttttgtgggcggagcgggtgaaagtgatat

SEQ ID NO: 1425 - DNA, 424 bp, Arabidopsis thaliana
  Intron number 3 from transcript AT2G41700.2 (locus AT2G417 00) derived from phytozome v7.0 (chr-ID Chr2; pos 17394926 to 17395349 reverse strand)
gtgtctgtagcgaagtgaggtatgttttgttcttttttccagctaataagaaggcaatttcatccctagtttcttgtcgccttcaaactttttcttgtacatctctctgtttattctgtgaattggttagcatttcttgaataatggcagtatctccttgggttagttgttacaaatttgctacaactttgatgattatactacctgaacaagactggtatcttttctatgttggaaacagggagatattttggcttcacatgcccagtgtgtctgcattttatcttcactagtactatcatcaaagttataactagctgtctatgctttttcgttttttttttttttttaaatgttaaaactgattaagcctcatcatgtttgcttaggaattgttcgaatccaaaaataaaaggagcagtgg

SEQ ID NO: 1426 - DNA, 1010 bp, Arabidopsis thaliana
  Intron number 1 from transcript AT2G42500.2 (locus AT2G425 00) derived from phytozome v7.0 (chr-ID Chr2; pos 17700151 to 17701160 reverse strand)
cagtgcaagcctctctcggagcaacaggtgcctacaactttctctttagaccttagcccttgacgttttctctactttgtttttatcgatgattggatctgttttttttgtttttttgagtggagtggtatttttttctgtgtttgaggtttctttgggtacgagattatcagatttgatttggaaagtttcgatttttttttttttttctaaatgaacatcttcaggaaatgttattagatcttggcatgtatgttctcacggaagctcatttgtcaccgcagttctatgggttggagaattggctttgcttctatggtttgatgttaaattttggctgatttggattcttagcatagtgattaatcacatctaagctcgtgtttttatgtgcctggtaatgtcaatcgggattcttatggactgataaatttttaatattttcgtatcaatagctgatcaatacttgttggttttttttttttcttaattgatgctcctgtttgttgcctgtgtcaagttgatttctctaagtatatatttctatgtcatgtgtttgatagtggttattagctgcatgtcttgagagtgttaaagaggtgaaaatcatatgcagcattgttttattttccttaggttagagcattatgcgagaaagccaaggagatcttaatggatgaaagcaatgttcaggttagttcctggtcttgcatatctctttggttgagcaatttctttcaccacacttggtgattctattttcagtgtggtagattgtgctactagccatgaatttattagttctttctatttcctgcatgcagcctgtgaaaagccctgtgacaatctgcggtgatattcatggacagttccatgatcttgcagagcttttccgtatagggggaatggtaacatctataaaatatacagagctctacaaatagctctaccaatcttacaaagtattaattttctcttttttgcagtgccctgataccaattacctgttt

SEQ ID NO: 1427 - DNA, 647 bp, Arabidopsis thaliana
  Intron number 1 from transcript AT2G42500.1 (locus AT2G425 00) derived from phytozome v7.0 (chr-ID Chr2; pos 17700514 to 17701160 reverse strand)
cagtgcaagcctctctcggagcaacaggtgcctacaactttctctttagaccttagcccttgacgttttctctactttgtttttatcgatgattggatctgttttttttgtttttttgagtggagtggtatttttttctgtgtttgaggtttctttgggtacgagattatcagatttgatttggaaagtttcgatttttttttttttttctaaatgaacatcttcaggaaatgttattagatcttggcatgtatgttctcacggaagctcatttgtcaccgcagttctatgggttggagaattggctttgcttctatggtttgatgttaaattttggctgatttggattcttagcatagtgattaatcacatctaagctcgtgtttttatgtgcctggtaatgtcaatcgggattcttatggactgataaatttttaatattttcgtatcaatagctgatcaatacttgttggttttttttttttcttaattgatgctcctgtttgttgcctgtgtcaagttgatttctctaagtatatatttctatgtcatgtgtttgatagtggttattagctgcatgtcttgagagtgttaaagaggtgaaaatcatatgcagcattgttttattttccttaggttagagcatt

SEQ ID NO: 1428 - DNA, 552 bp, Arabidopsis thaliana
  Intron number 1 from transcript AT2G42890.1 (locus AT2G428 90) derived from phytozome v7.0 (chr-ID Chr2; pos 17850080 to 17850631)
gtttcctccatcatcgcaggtactacttcacttcttcttcgatgaaatttctgctaatcggtttgatttttggttattattcatatgaaattttgtattccttatttgtttgactgctctatgattatcatgtagtttgattgtgactgttctggtttttttttactcaaaactgatcatggtttttaacgagaaaacaagttgatactctctttggttccgtggaattcactgatcatcgaatcggtttttgacctgtttcaaaggtttaagctttgatttgagtttattgctctgtctctgatgatgttttgtcgccacaagcagcaaaattttctattcatcgagttgaccaactcatggtcttgcttcgattttcttcttctcagttatgtttgttgatgtatggactactaggaaacacatgagtagcttgtgatcgagaactaatgatcttagcaagttactgttctgctttatgatgcaaaatcagaaatcaactagcaggtctttgatatttgattcatatctgcagttgcagaaggcaaaaag

SEQ ID NO: 1429 - DNA, 542 bp, Arabidopsis thaliana
  Intron number 1 from transcript AT2G42890.3 (locus AT2G428 90) derived from phytozome v7.0 (chr-ID Chr2; pos 17850080 to 17850621)
gtttcctccatcatcgcaggtactacttcacttcttcttcgatgaaatttctgctaatcggtttgatttttggttattattcatatgaaattttgtattccttatttgtttgactgctctatgattatcatgtagtttgattgtgactgttctggtttttttttactcaaaactgatcatggtttttaacgagaaaacaagttgatactctctttggttccgtggaattcactgatcatcgaatcggtttttgacctgtttcaaaggtttaagctttgatttgagtttattgctctgtctctgatgatgttttgtcgccacaagcagcaaaattttctattcatcgagttgaccaactcatggtcttgcttcgattttcttcttctcagttatgtttgttgatgtatggactactaggaaacacatgagtagcttgtgatcgagaactaatgatcttagcaagttactgttctgctttatgatgcaaaatcagaaatcaactagcaggtctttgatatttgattcatatctgcagttgcaga

SEQ ID NO: 1430 - DNA, 623 bp, Arabidopsis thaliana
  Intron number 1 from transcript AT2G43680.1 (locus AT2G436 80) derived from phytozome v7.0 (chr-ID Chr2; pos 18108472 to 18109094)
gaagaagagaaagctacaaaaatctcaacatcgaggtatgttattcgtgtttgcttacctaggagatgatttaagttctgtttcttgatttttcactttctggttttctggggtgtttcaaaagatctgtctttttttgttctctttgatgtctctagtcttgttgggatgtgaaacacatgattttcgaggagtagagagagacagagagaaattaagggaaagagctcacttgtgtgacttgttctgtgagaaaattctctaagcaaaattctcaattttttcagcttctttctaatttatgcatattaaaattcagagcttttacacttgaaagttgtcatctttgtctcagtctctctctctctctctcgtttgcatagaagaaacaatttttgtgttgatttagtcagttcacctaatctgaagagaagttaaaaagtttggctaagatttgtcaaaaagttaaaacttccttttcatggaagctcaacaacttaatctctttggcagtttccttatcttagtttctttggatctgcctttgattttctttcatttgtcttttaactgcagtttccaatttggttcatgcaggtaagagttttggctacagagcaacc

SEQ ID NO: 1431 - DNA, 410 bp, Arabidopsis thaliana
  Intron number 2 from transcript AT2G43680.2 (locus AT2G436 80) derived from phytozome v7.0 (chr-ID Chr2; pos 18108685 to 18109094)
attaagggaaagagctcacttgtgtgacttgttctgtgagaaaattctctaagcaaaattctcaattttttcagcttctttctaatttatgcatattaaaattcagagcttttacacttgaaagttgtcatctttgtctcagtctctctctctctctctcgtttgcatagaagaaacaatttttgtgttgatttagtcagttcacctaatctgaagagaagttaaaaagtttggctaagatttgtcaaaaagttaaaacttccttttcatggaagctcaacaacttaatctctttggcagtttccttatcttagtttctttggatctgcctttgattttctttcatttgtcttttaactgcagtttccaatttggttcatgcaggtaagagttttggctacagagcaacc

SEQ ID NO: 1432 - DNA, 797 bp, Arabidopsis thaliana
  Intron number 1 from transcript AT2G43780.1 (locus AT2G437 80) derived from phytozome v7.0 (chr-ID Chr2; pos 18136648 to 18137444 reverse strand)
ggattttcgagtgatcatcaaaccttcatcaccaggttcctttcgattccattttaattttgtggactttggagtaatttgcttaaagaaccaatttttgattgatattttctgctctcctttcattttgacattttgatctggttttgagaactttggttgagtaacagtagcctgcgtttaaaagatgttagctttggatgtatagatgtagagttaggtttctaattgcctttatttttgctttggttgatgatttatggttgattgactcgttaaagggaagtgcgctgattttgtggacaattatgttagactgatgggcatgaatgtgaccaattgattttctctccgtttccattatgatgcagaagaaagttctattttgctgaaatgttttgcaactttcagttgttcattcataccatgattgtactcatctttgatctcgttgtgagtactatcacttactcttggcgtagtagttcttaggatgaggtataagtataacaattcgaaaattcgtcgtattcaatctgtgtaatctgtttttcactatatgaacaatatgtcaatgtcctgcgatgcctcagggcttctggagtcacttctgcaatgttaaaaagagtaatcaaaagttgttatatcatgcttcagagttctctcttgttattcctcatcttagtatttatgaaactgtgatattgaagatataacataatctaatacttctgatacttgggtctcttctgtaacatgtgacacattggatcttgcaggttaaagactttgaagta

SEQ ID NO: 1433 - DNA, 958 bp, Arabidopsis thaliana
  Intron number 1 from transcript AT2G43780.2 (locus AT2G437 80) derived from phytozome v7.0 (chr-ID Chr2; pos 18136648 to 18137605 reverse strand)
gagctcttactgggtttagggttttcgatagattggtaagtggccacgacactaagcgtcaccgaaccagttgtcaactaaatagggaaactttaggcttctgtcgcatttaggcacgattctctgtagaagaaaaaaatatcagctttgttgtatctttcggattttcgagtgatcatcaaaccttcatcaccaggttcctttcgattccattttaattttgtggactttggagtaatttgcttaaagaaccaatttttgattgatattttctgctctcctttcattttgacattttgatctggttttgagaactttggttgagtaacagtagcctgcgtttaaaagatgttagctttggatgtatagatgtagagttaggtttctaattgcctttatttttgctttggttgatgatttatggttgattgactcgttaaagggaagtgcgctgattttgtggacaattatgttagactgatgggcatgaatgtgaccaattgattttctctccgtttccattatgatgcagaagaaagttctattttgctgaaatgttttgcaactttcagttgttcattcataccatgattgtactcatctttgatctcgttgtgagtactatcacttactcttggcgtagtagttcttaggatgaggtataagtataacaattcgaaaattcgtcgtattcaatctgtgtaatctgtttttcactatatgaacaatatgtcaatgtcctgcgatgcctcagggcttctggagtcacttctgcaatgttaaaaagagtaatcaaaagttgttatatcatgcttcagagttctctcttgttattcctcatcttagtatttatgaaactgtgatattgaagatataacataatctaatacttctgatacttgggtctcttctgtaacatgtgacacattggatcttgcaggttaaagactttgaagta

SEQ ID NO: 1434 - DNA, 837 bp, Arabidopsis thaliana
  Intron number 2 from transcript AT2G43810.2 (locus AT2G438 10) derived from phytozome v7.0 (chr-ID Chr2; pos 18149805 to 18150641)
tgttgtcaagctcaactctggtgttgattatcgaggtctgtctctctctctttctgcattttgtgttctcctctaagatgtatccagttcaaattctttttttttttgccttgtgtgatgatatcttatagtttgcttctgattttcggtggttattaagctatcggaagtctatgtaaacttctttatcactttgggtttagatgtctcaatgcctttctttctcgccatgttactggaacctttggatgttggtttacagaatgactcttttctttgtctaagaactgcttgcttgattctcatttgatttgaaagtcccatctctgaagattcatttttgttgagcttgcttgttttttccctatcttgtctctgtgtttgagaaggaataatacatttcggcttgagatatttgctttggattttgagaaatataatctagatgagcaggaaattaacatacggctttgaaacatatgctttttggaatttgagaggaatattagattcagatgatagctttgtgaattgagagagcttctctcatgagataacagacccaaatgtggttgaatttgagatgcatttactcttgcttctgatagaatatggactctcaccttgctatggagcctttatcacctgaaattaagaccttggtctcttgaactctataatataacttacaggactaggagaacttctagcttgaatatctttctttggtttatctacaaaagtcagacttattctttctttggcatatcatgttgtatcaatctacatatgacactttgtctctcttcttgtttgcaggcattcttacttgtcttg

SEQ ID NO: 1435 - DNA, 584 bp, Arabidopsis thaliana
  Intron number 2 from transcript AT2G43910.2 (locus AT2G439 10) derived from phytozome v7.0 (chr-ID Chr2; pos 18185861 to 18186444 reverse strand)
cacttggccgtgctctggtccccggctgtggtggagtcagtcttcttctagcttacctctctctctatctttccatttggttatatatatatggtttgaattctatttttaaaatgaaaattttaatatagaaaaatatattcttaacaatttcagatttttgtgataaaaaccgaatctagtttgaattagtatgatacggttttggactcaacatcttttttttttatgaagacgcaatataacttcatttacatttcttaaaggaagtttaattttggtgtagtttttcttcatttattttggttgctcttcagttttgttattggttttttaagatgtgaatgtaaaaatattatttgtaattagaaaaaaaaaactatttaaactgaattaaaatcatccagttggccttttatgaatttcactacttaattaagattgaaccaattttacttaattaagattgaaccaatattatttggttagcctccctagtgaaacattttcataatgaaatgattgttacttaacattgtgaataaatatgttatgaatgtgagtagggacacgacgtcgttgcg

SEQ ID NO: 1436 - DNA, 315 bp, Arabidopsis thaliana
  Intron number 1 from transcript AT2G44350.2 (locus AT2G443 50) derived from phytozome v7.0 (chr-ID Chr2; pos 18316358 to 18316672)
tttttctcgatctccgtgaagctctcgaatctctggtatgtttcttcgcttcttcatagtgtttctcatttccttttggtcttccataattttcggagaatctagtcctgtttttctcttcttctggaatctgaattcgccggtgaattccgctgatcgaatctctgagttttgttgaattatttgattcggcgataaaactttttttgtttgtttctgattttggtgagtgttgattgcttgagttttttcacggatcgatttgttttgagaattgggtggatactgtctgtcacaggttttgagttttggaga

SEQ ID NO: 1437 - DNA, 764 bp, Arabidopsis thaliana
  Intron number 2 from transcript AT2G45380.1 (locus AT2G453 80) derived from phytozome v7.0 (chr-ID Chr2; pos 18702069 to 18702832 reverse strand)
cagaaagagcgcgttgagcgagtgagagcgattctgtgggtaaacccctttccaattcatgactttttttatcgacgcacatctctccaaattctccatcgcgtgactcttttagtttttttccacaaaactaaatgaaaccgaaccgaaatcagttttaatttcaaaaccaatgcaaaccaaaccgaatcagcaaatagtgtaaagcaacaattctggacagaaattttatcaacatctcaacaacgggaaaaagagaaaacaccacaactcaaaatcacaaatcatagaaaaatatccaaaaaaaatcacagtaacctttgattaaactttcaaattgcaaaaatctcagaatcaaagccaagaagaatcttgaataacaatctactgcttcaattaaacatgaaaaacattagaaaaagcttagttttactagttttagtaaaatttctcggcaacaaaatcaaaacagagatgaacacataaaaaaaaaactaaaacagaactgcatattcgataagaacaaagactatttgcaataattaaggtttatacatattagactcaccggttgaaatctaaaagcatgaagagctagctcttcgtgtttgcctccctttattatctttcttattttctcaactttgtgtgatttcaactcacaactaaaagtaatggggtacattaagaatatttagattttaaggggttgaagttgtaattttgaagaagtggaagatcaatagaaaataatagaagaacag

SEQ ID NO: 1438 - DNA, 959 bp, Arabidopsis thaliana
  Intron number 1 from transcript AT2G45720.1 (locus AT2G457 20) derived from phytozome v7.0 (chr-ID Chr2; pos 18833508 to 18834466)
aacccagaagctgaagcatagatctttgtttccaggtaattattaaatcgtttaatgtgacagagctctgggtttcaattgtttcttcatgttctcttttgaatctcttgcatgttacacaagctctaaggaaaaaggttttttttaaaagcattttttgttccttttcttatagtaaagacaagttgtggatttgtcaccaaacttgtgtgtagtgtgttttagtggagtttggttcgaactcttatgaagtttttatgcatacgatttgttgaaaaagactcacatcttctctttaaaacaaagtctctcttctctctttattgcttttcctcttaaaccagcttaatcttcaatctttgtggtttttgatctgtgtttgaattgaagctcttgttcctcagaagggtattcttgtcttttgactttcgtttcccaggagccttctcattaaaataaattaatacacaatcatgtaatagaagatgctgattgtgaagattcttgtatttgtttattatcatatcattagctattttgtagcatttattgttcacaccgacgaattaaaggaagttggaaaatgacttgtaaaacttttgtctggtagggttttgttctccagcaaacaaatatcgataagcttttctgtgatgattttcaagattctcgaaactcttttgatggcttcttcctttttgttttaaaatccgtgtccttatttataacaaatctaccaacttgttcatcactcattcaactactcccttcattacttttttctattacagaactaaagtatcaattatttgccagtgtgtctcatcattcatcaaggcatatttgatcctttttggctttggttttttgtttctacaaatcgctaaagtttttgtttttgttttcttcttttgtgcaattcagtgctacggagtgcaaggattgtatttgtgtgtgat

SEQ ID NO: 1439 - DNA, 444 bp, Arabidopsis thaliana
  Intron number 1 from transcript AT2G45980.1 (locus AT2G459 80) derived from phytozome v7.0 (chr-ID Chr2; pos 18918571 to 18919014 reverse strand)
cggatccaatccaattctgcatcgactcttcagaggtatttccgatgaaccattattttccccttgtagaaattattctcctttctcaattgatgattgtccacatagctagattttgtgtaaagagatattttgtattatagattgcatctactgctattgtttcccgattgattgaagcaagtagacaagaaaaggattcggttttgtctggttctgaaatttccattggttccaaattgtcatccttgatgaagaagatactttgctatctattagaaaccagaatggctcgtgtattgcctgattctttgtttaccttttgttgattagagtgattttgcaattggagatgttagatgttctctgtttgttttgtggctactaacccaagaaggtttcttttcagttttattgggtcattggagatttttttcggttgag

SEQ ID NO: 1440 - DNA, 472 bp, Arabidopsis thaliana
  Intron number 1 from transcript AT2G46390.1 (locus AT2G463 90) derived from phytozome v7.0 (chr-ID Chr2; pos 19042486 to 19042957 reverse strand)
ttgctgccgtcgccgtcggattcgtcttgcaaaacgtattctccttctctttctcttgtttggtcgttagatctatatcttcattggctgctttttctctccttcttcacaatttttcatgtgttgcgctcctcctttgatcttattcggatcacaaatactcttgatgagttagtaatttggccttttgaaacattgaggcacgaaaggaacaacctttaattgaaaatttgtgttctttcatagtcttcgttgatggatcaggattgcctttatttgtgtgttgataaaggttatgaatttgatccgtatcaggcgactaagcttctttctcgatcttctggagattatatgtttgaatacataaaccaatttcatctttttttgttggtaactttgatccaaagatttagatttggagtctgacttttggtgtctgatgatcaggtaacgaaaggggagcagaagaaga

SEQ ID NO: 1441 - DNA, 832 bp, Arabidopsis thaliana
  Intron number 1 from transcript AT2G47460.1 (locus AT2G474 60) derived from phytozome v7.0 (chr-ID Chr2; pos 19476568 to 19477399)
ccggtaataacatttacacttttattaacaagatcatgcaacacaaacttaatttaatctataacaatgtatatatgagagaataagacatagagaaataatcgtggttcttgtcgtaatcttcatgaaacatggattcttagtcagttttttttttttgcttttgataaaagaattaaggattgttagtaagttttttaaaaaataaattaaatttttaggaaggttagaagtttaactgcaaccctaatctttgtttccaatttatttcagtttttgggtttttcttttttcgtgcgaatcacagtcacggtgggttgtttaatgtagatatatgtaaaatgctgccaagtgcatgctttaagagggtaggttatgttatagacttatagtatatggacaaatgtttaaaaggaaatacaaacagaagcgtatttatgtatttttgtccgttgtatatcatttcaagaatcagatcaaaaccatatgactagttttgatttgatttctaacctcgcttttaatagaaggttacttaatgtagtagttgagaattttttgtagttgtgatatatattatatgcataagatatatgaataaatacaatgatcaaaaagctaagaatctcgtgagcagtcacacatcagaccctagttaaattaataaatacctgaaaactttatcaaaatttatctaacaaaatctgcataaacatatattttgacgtatgaatctgcatctaaatatgaagtgtattattatattgttaattgtttttatttgttttttggaaaaggattaaaaaggtgtggaaagagctgtagattgaga

SEQ ID NO: 1442 - DNA, 1002 bp, Arabidopsis thaliana
  Intron number 3 from transcript AT2G47730.1 (locus AT2G477 30) derived from phytozome v7.0 (chr-ID Chr2; pos 19557113 to 19558114)
tgtctgaagccgccttctgtgttttgaaacaacaagtcagcattctcttacttcctttatatatattaatcttgttgagattctggattttaggcttgtgtctttggtaacatatgtggtttccggttagttatggaattgtcggtcaatctcgaggcaagaagagagagtatgtatatatgtaaatgttgaaccactaatcacttaatgattatttagttaattacgttggatctcatattgagaatactattttgcatatatatttttctgaaaaaaacaacaaaaagaaaggtcaacattacaagagtaaaattgcatatgaagagagtgataatgaaagttcaagtgtttgtttctgaattcttgacatgtatataatcaccatataactgtttccaaattgtagatggtaatgcaaaaatctgatgaggagggagatggttctgtttccagcaactagatttagttataacataaggggattgattattgttattgttattgatccttcttctcctgttgaattggattgagagttagttggtcaaaaggtgttatgggttttagaaaattaataaaaacaggtgggctttgtctgtacatgtccttaaattatttgttttgggagtagtttaatatcgaatgatacgtttacacgtaaaaagtcttttcttttgagtcgtcgtctcaggaaagatgagattcgtttctaggagaggttgactttttcaatccacacttataactctagaatcttatgtcattgatgacgacctcctctacacttttggatttgtatgtttacaaaggaaggaaggattaccttagaacagtttatgtgatgtttgtgtctttctatttttattcaatgaaatttctttacatgtacatagattagctatattgacatgaatctaactgatttttttgtttgcaaaataacaaattagtgaggggaattttgtttcagtcaataaatccgtgatttctatatgttag

SEQ ID NO: 1443 - DNA, 617 bp, Arabidopsis thaliana
  Intron number 2 from transcript AT3G01350.1 (locus AT3G013 50) derived from phytozome v7.0 (chr-ID Chr3; pos 135358 t o 135974)
tcaccatccttgcttcttcttccgtctactttgtggtaagtagaatcaagtgttaactaagtgctgaaactctcctccaccgtcagacaataacggtcaggcggtgagggaatgttgcttttatttatcttattttataatcgcgttgttaatagaattggttatattttgataatgttttggccttctattagatgtctatgtatatgcttgattaagcagtcattaagtgataaactgataatgggtattaacttgtgcaagaaaaactggtttagacgatatatctaaggaagttataagttaggtgttgggtcattttccgagttaaggaatagatcaagtagaccatcttaaagagtctttaagaaattagatacttggtcaccgtccgattagaaattttcttttaccactaatggagtttatatggatccctttaatagttgggttgataatggaattttgattagaatgttgatatagtgcttataatgggtcttatcggatcttataggcgaaaaagctagcttagtggaaactcgaaaatcttcttttgttagtagtttttaatatattatttctgttttttctttgaagggactagtgggattgac

SEQ ID NO: 1444 - DNA, 970 bp, Arabidopsis thaliana
  Intron number 1 from transcript AT3G01500.1 (locus AT3G015 00) derived from phytozome v7.0 (chr-ID Chr3; pos 196717 t o 197686 reverse strand)
ttgccgctcctgctcctatcattgccccttattgggtatacatttttacattcatcactgtttcttaacctacattatttcttacataacttacattgctgtttacgtataataggggtacattacatagatagcaaactaaagttacagaattttaaaatttgtaaagattttacgaaattattatatagattctgcaattgccattttagtgataggaacaaaaatcttctatagaaactagcttacgaaacttccacaaatcttggaaactgtcacatgtgtttcacatttcagtttttttttcccttggtatttccttatattatccttactattatcatccgtgtttgacttttggtctttagcgtggtactgaaagaattacccaaattaacaagaatcaaactaaagttgcttaattagtgaatcacaagcaagggaagagttcattttcaatccttattctatacagatcttcaaactacttgcttcgacatctagtgaagttaaaaacaaatcacctcgaaatattaaaagcgttgtctcattcctacccaagatccgacatttttgaaattttgagagttagaacgtacgtaggatccacgtgataaaagaaaagttgctagtagtagcttcaacaaaaacgattcatgaaactgagacgtgtgtgtatgcacatgtaccatatgagagcgtgtggagcatagtggtgattaagtcgccatctatatttattcattcaacctaccgatttggttcctactagcgaaaataaaatcataatataaaagactataaaattgtactttatcgtataatgaagttctgaacaggttgattgtagtttcaacatttaaaacacgtcatgactcgctctctacttaattacgttcacgacaataaaatatactagtactcattttcttctaattttatttggtcaaccaacttgcagagtgaagag

SEQ ID NO: 1445 - DNA, 970 bp, Arabidopsis thaliana; identical to SEQ ID NO: 1444
  Intron number 1 from transcript AT3G01500.2 (locus AT3G015 00) derived from phytozome v7.0 (chr-ID Chr3; pos 196717 t o 197686 reverse strand)

SEQ ID NO: 1446 - DNA, 684 bp, Arabidopsis thaliana
  Intron number 1 from transcript AT3G01650.1 (locus AT3G016 50) derived from phytozome v7.0 (chr-ID Chr3; pos 242027 t o 242710)
ttcttcttcgtcgacttctctcacacatacaaaaggtttgggattttttttggtagaatctttttaagttatctatcgaaatcagtttgatctgttttgtttttccctcttctcttctgggttgttggtgaataaatctacttttcatcttaattaggacaaatctctctaattaaaacgcctcagattttgtcttcagttgttttgttttaaaccctaagttacttgtaagttaaatgaaatctacaattcttaatttcttgtttccaaaattgtgaaaaaatccaaacatatatagaatagacacgtaacggctcaaagtcggtaattggaggtaacgtgattgaatcttcttcatcaatcataaatcttctctcttaagaattaagacgccgcctcattacacctgttccataatcatcgtcaatatattcattctgcaaaactattcttcttcttctttcaaagtcgtaattgctctctctcacccctaggttcttaagtcatacccattttcaaggacaccttagaaagtttcgagttttctattaggtaattgcatgttgaatctgttacgttcttcttgtgattccccttttttctggcccaaagaggataagattctaaaaatctgaatctttgtatgcaggtgtattgatcttgaagccttaaagtttgtgtctt

SEQ ID NO: 1447 - DNA, 755 bp, Arabidopsis thaliana
  Intron number 1 from transcript AT3G01860.1 (locus AT3G018 60) derived from phytozome v7.0 (chr-ID Chr3; pos 303012 t o 303766)
caaccctcccatcgattccggtcgttgggattcaggtttattattacgataactattctttgcgtttagtttagttcatatcggcctttattttattttatatgatttatttttgttttgtctctagaaacaataattaaaggtctaattaacgaatggtagaagtatttatatagtaattaaagttgttgatgactgtaagctttagtgccgacaaatgtaaagtggttagctttttcagacccaatcaagatgtaggcacaaatgaggtatttagtactgatgaattacaaaatcgtatacttatatattaagtcaagatttgattaaaaaagttgttatgacttacatatgaaatggatcatggtcatgcatcataaataaacatgggtgaatgtgcaaccgggtcttctatatatctgctacagtagcatttagcagcacatggtggacaacggtggcgtacgatataggttagaatgtcttcaaggcatatatctttgcgagagatgtgtgatggaccacacttcaagttgctacttccatttgcttatttatcttaatgttaataaatgcatatgctcttaaaaattttatcgctagaaatttacaaccgtatatttaggtgtgtgcaactaaaagtatactacattcacatacataacctaccattttaatattagtatcttcttatttgcaatacgttacatgagataacaatgatttggattatgtcttaaggtaacaaagaggat

SEQ ID NO: 1448 - DNA, 313 bp, Arabidopsis thaliana
  Intron number 1 from transcript AT3G02150.2 (locus AT3G021 50) derived from phytozome v7.0 (chr-ID Chr3; pos 391209 t o 391521)
tcaagctcaagaccgtacaaaactttggaactcatgtaagaaacagtacacgtttttttttttgtttcttcttcagtccggattataagaattttgtcgattgaagaaaacaggctaaattaaaccctaattttctctcttagacaattcctactttctctccatttttctggattcgctctcgttttaaaaggattcagaaattaactatattatttgaattcttttgccataattcccttatgttttctgctaatggatatacatttggtcttctttctgtattagatataaagatctcgagaatagcatt

SEQ ID NO: 1449 - DNA, 419 bp, Arabidopsis thaliana
  Intron number 2 from transcript AT3G02510.2 (locus AT3G025 10) derived from phytozome v7.0 (chr-ID Chr3; pos 523851 t o 524269 reverse strand)
gcacggtactatccgaaatatcatgataatgagatttgtcttgttttgattggtctctttgcatttggggacatgattttataagttcttgtaaaatttgagagacctgttttagtttggttttataagttcttgtaaaatttgaaggaaccaaaaaacacatagtttggcttattaatcataaccaatgaagctctgtgtcttcttatcttgtgggaaaagtctcttagttgagattcttgattagaagctagcctatagctcaaagttgttttcttgaacaggttttgtttgtgttatcatggaattggtcattatttcagtagtttgatagctaaattaaaggtttaaattcacaaataagatttaaaacctctatttcgctaagttatgtttcggcttctttgaactgatctcag

SEQ ID NO: 1450 - DNA, 922 bp, Arabidopsis thaliana
  Intron number 1 from transcript AT3G02600.1 (locus AT3G026 00) derived from phytozome v7.0 (chr-ID Chr3; pos 551550 t o 552471)
ttccttgttttccaaattttgggggttttaatcaggtttgttgattcttgtcaatgattttttttcgaaaagatttataatttggtgggttttacttgaatctctctactttagatttgatgtgttccttcaaggtcttgtttggttttatccaggtccaagtaattaggtgaagtttgcctctctctttttttggatctcattggtctgcaatagtctcaattaaaccttctagtttgcatattaccagttgagtgactcttggttccagattcgtttttggtggtcatagtcgcgagtaagaatctcttttgaatattctctgttattctctttttgtggttgtgtggttcgacttctttgcagataagtgatatcttttggtgtgaatcttataaaacttttgtttccagcttgattaattgaacatgcgactagttattatattaggtggttgatatagaagaaagggctttcagatcttacaaaagcaaatacttacggcagatttagcttaccaataattaagtttagttagcttagcaggaaccttttgctccttttattcagtttatgcaggcatgttttagttgcatccatacattattagattggcttgaattaacacaaacatcatgtttttagccttacatatagccgcagttctataccaaaccaatcaaatcttgtgttatttcaatctaaattgcatctgcaatcaaatcgataatttgcatgttcaatcgagtaaagtgcatttggtcaggacattttaggactggtttttccttaatcttgttaattgactattacggggtggtattctttgtctttccctgttaaacttattgcatgtaagagagtgtgatttcttgggatgatcttaggctgtgacaaatcgggggcctgagatttcagaaac

SEQ ID NO: 1451 - DNA, 659 bp, Arabidopsis thaliana
  Intron number 1 from transcript AT3G02600.4 (locus AT3G026 00) derived from phytozome v7.0 (chr-ID Chr3; pos 551813 t o 552471)
ggttccagattcgtttttggtggtcatagtcgcgagtaagaatctcttttgaatattctctgttattctctttttgtggttgtgtggttcgacttctttgcagataagtgatatcttttggtgtgaatcttataaaacttttgtttccagcttgattaattgaacatgcgactagttattatattaggtggttgatatagaagaaagggctttcagatcttacaaaagcaaatacttacggcagatttagcttaccaataattaagtttagttagcttagcaggaaccttttgctccttttattcagtttatgcaggcatgttttagttgcatccatacattattagattggcttgaattaacacaaacatcatgtttttagccttacatatagccgcagttctataccaaaccaatcaaatcttgtgttatttcaatctaaattgcatctgcaatcaaatcgataatttgcatgttcaatcgagtaaagtgcatttggtcaggacattttaggactggtttttccttaatcttgttaattgactattacggggtggtattctttgtctttccctgttaaacttattgcatgtaagagagtgtgatttcttgggatgatcttaggctgtgacaaatcgggggcctgagatttcagaaac

SEQ ID NO: 1452 - DNA, 703 bp, Arabidopsis thaliana
  Intron number 2 from transcript AT3G02940.1 (locus AT3G029 40) derived from phytozome v7.0 (chr-ID Chr3; pos 662369 t o 663071)
actatcattaaccttcattctcttcttgggaacaagtaatcaatcttaatttatttcttcttaaattcccttacttactttgattaattataaattatatatatgtgagattatcatcaagagcaaaaatcagaaaacacatcaatattttctattaattaatcaatattattgtgctatagaattttttactgctttttattattagtgattttaatagaacttttttgctaacactttagaatttcattttgataaaaaaattcaagaagaagaaaatttaactacaggatggtaatgtttgattagataggttctaggcaaaaaagaaacatttcttttattaaatacagattaaaatttaaaatttctaatatcttagtctctttttcagtcggtcttatttatagatcacatatatatagtctaaaagtatatatttttatatatgctattataatttatttttttgttagttgaggtatagacgcatttatatgaataacctgctacactggagttttcttggtacatgcatacgtactcgtcaatgttcgatactaccaagtctataattagttatcttattagagcttgacaatgttatataatagtataaagcttaactaacccaccaaaaaacatatttttgtccatattttctaaaggtggtcgtctatagctggtcatctcccaggaagaa

SEQ ID NO: 1453 - DNA, 501 bp, Arabidopsis thaliana
  Intron number 1 from transcript AT3G03780.2 (locus AT3G037 80) derived from phytozome v7.0 (chr-ID Chr3; pos 957101 t o 957601)
cccatctctcatctccactcttctcattccgtaaggtacgcttccgagtttccatggcttccgcatgactattcttgctctctcccttcccactctcttatttaccttccgtctcttcgttttcttctcaattcaattttcgtttgattccgtttcttcttcgttcgttaatacttagatcttaatccggtgagtgaaattctatgaaacacagatctggattttttatacgatcagattcgtaaaatctctgttttgcgatctttctctgcgttagatctctgttttccctagttgtgattcgttttgatctttaaactctctcatactctgttttcaataaatacgacaaaaaaaactgcaaaagttttttacttttttaacgattggtggcttttaccatatgacaagaagtacattttaggattgtgtttggtttactgactgattttggttttgtttgtggttcaaatgtagtaaaaaaacaaaaaacaaacaaaa

SEQ ID NO: 1454 - DNA, 755 bp, Arabidopsis thaliana
  Intron number 1 from transcript AT3G03790.1 (locus AT3G037 90) derived from phytozome v7.0 (chr-ID Chr3; pos 962186 t o 962940)
ctctcttgttaaatctcatcggagttcaatttcaggtaacggaaaattagtttttatttattttattggtttctctcttgtctgattattttaaactcaattccagtttttgatttttacccaaaaaaaacagttttttttttctttggttctattgaagtctcgaattggagcttccgaaagttgtaaatttccgtgatttatgtattttctcgatgaattttgaacattttctatcgaattgtgctactcattgtgtcttggagatcgagttttatctgtttgccattctcgatttgtgtgctttgtggagatttttttttttgttttggcttcactttgtctctgtttcacacttcacaagagatctaagtttaatgttaaaggcgtgatcttttgtagcgtgtcacattcgtggactaatttttactaattgtatgttgttgcttaacaaatgtccttactggagatccttccttgttttggttcaaaacaatgtacttgttggtagaacatctctttagttctgtttgagtgacactaaatgagattctttgctttgtggttggtggaagtattagtctctagatgcatctttttgtgttttgtttttagaaaaggagcgatgctttccactactcgggtttacttgtttattctttcttctctagatttctcaaagaagctacatgaatattattaatccaatataatctatatccttatcttttatcatcaggactctcggcgctctt

SEQ ID NO: 1455 - DNA, 437 bp, Arabidopsis thaliana
  Intron number 2 from transcript AT3G03800.1 (locus AT3G038 00) derived from phytozome v7.0 (chr-ID Chr3; pos 969317 t o 969753)
aacgacctcttaaaggtttgtcttatctttttcttcacacattttctctgtttcgctttgacattacgtgatcaaggagatttctgctctaatccaaacaaccttttcgtgtatctttattaatttctctctaaattttgaaattagaaactccgaatcttggggtttaaattcgcttggtatacaaggtttctcagaattgacgtttctttagttcggcatttattccgagaaaatccatgatgaagaatgctcctgtgagattcaaaaaatcgtttatagaagtaaaatgatcaaataaatctggaggtttatgttggatttagtgggataaatcaaagatcaaacgttgtgaagcttgtaagtttctaagatgatgtgacagatgttttgattggacagggttcgttagagttctccagggatcgctctaatag

SEQ ID NO: 1456 - DNA, 871 bp, Arabidopsis thaliana
  Intron number 1 from transcript AT3G03870.2 (locus AT3G038 70) derived from phytozome v7.0 (chr-ID Chr3; pos 996196 t o 997066)
ataataaggtaatgttcttaattagttaaatgaatttattttatttttctttatgatatatctttgaatgttctcagttaaataatttaatgaaaaattattggttttatgtgagtagtttcgtcttgaggcgaatatatactaacaattgttttacatatttaatcagaaaacgataaatgtaaaaagtttttgtgttttatttccgagatggtgttttgtatattgataaattatatgatatgaaagaaaagggagtgatagatttggataagagactgtatagaatatataatccacctacaaaaaattagtatttgttaagatgaaccaaaatagtgaaaaggggtggtggaatattattttctaatgttaatggttcatgacgattagttcgtaatctgtctgcttgattgtataaaagttatagttttgatgtattctataaattgtatgattaactgattgataacacttttgattcaaactatagaaataagttttgaatattttaatctcaccaaatgataaggtcaagtttacgtgtttaagtgaacaatctttagaattgaagagaactattcttgttttacctttgtacgtacgttttgttttatgattgtttcttgtgctaacgtcaaagcgataagaagaaattttcttcgtttactaaatatagcatatagccatgtaacaaacccattaaagacatatcaaaatcctaattaaaagcattacaataacatacttgataactgtttaaacatgtttgtagtaatatactaacatttgttgatcatcaatacttcaccaatctctacaatttgaatttgttgataaaattttgtttcattgttggtggatgcagagg

SEQ ID NO: 1457 - DNA, 483 bp, Arabidopsis thaliana
  Intron number 2 from transcript AT3G04290.1 (locus AT3G042 90) derived from phytozome v7.0 (chr-ID Chr3; pos 1135316 to 1135798 reverse strand)
gaattggaatcctcaacgacactggaattcaattcgtaagcatatccaatcaattttaaaattcttgcattaaatacgcattcaagtgttgctgatattaatgcacgacacgacaagacgtgtttaccctctccattaactctcgtgtcgagggtaatattgcctcagaagtaagaaaacgaaaaaaaaaatacacataagatcatcctcaataactgagggtatattcgtcttcttgacatgttactccgcgaaaactcaaaaacacgtgattgacaacattatccttgatttctcaatgaaaaccagtgttaacacgaaggttaatttagtcttctcactaatattttgatgacgtgactttttagttcaaccgctgtcgattcactgcttgtaattttctaaacgcagtcgtttgatagcttagtgtgttaattatgttttttgtttttgcaggtaaacataattagaatttctaaacag

SEQ ID NO: 1458 - DNA, 502 bp, Arabidopsis thaliana
  Intron number 2 from transcript AT3G04680.2 (locus AT3G046 80) derived from phytozome v7.0 (chr-ID Chr3; pos 1271701 to 1272202 reverse strand)
aaatttgcggtatgtgttttcttaatccttggtttttagagcgatcgtaagcattatgctttatggcttatagataaaatgtagcttgttggtaacatatttggtgttgggtttgttggtagaaaataactagccattcttgatttagtttcttttagtggttatctttcttaaagtgggttcttgagttactattgaattcaccctctggccttttggggttggaaaggtacatcctttgccagtgaagtttgagggtttttgggtttgagttggatgaaagacttatgatttaggttgtaaatgaagattatgctgtctaggtaagaattgttaagtgggttgtataaaaagattgatgatagatgtgattttcccccccaatttctttcttttctatttttccttctgctaatgatttatgtaaagttcataatcggagctctgaaacaccgtgcttaccatcttgtgccttttgattattgtcaggttttcacttggt

SEQ ID NO: 1459 - DNA, 433 bp, Arabidopsis thaliana
  Intron number 1 from transcript AT3G04940.1 (locus AT3G049 40) derived from phytozome v7.0 (chr-ID Chr3; pos 1365248 to 1365680)
ttcttcttcttcttcttcgattggatctggaactggtaagctcttctataagtctctggttttgtatctttcgaactgttcttttgtttctctctccaaaaatttcaaactttcataatttcgcctcctcaagttcgatttcagctcaagaacacgaatgcttcactcacttgtttcattgttaaatcttatatttagtttgatactcatgttttctgctgttcgatttttttttttctctgatttatattcgagtttgaacttaaatcatggttttggtttcactttacaattttggatctcatgcagtttcaaaacactcttcgatttatatgaatgttttatattattagggacattgcttgcagactgtgtcttaaatctttttgattttcttgtgatcttcagaactcaaattgggaagaattttgac

SEQ ID NO: 1460 - DNA, 611 bp, Arabidopsis thaliana
  Intron number 1 from transcript AT3G05120.1 (locus AT3G051 20) derived from phytozome v7.0 (chr-ID Chr3; pos 1430698 to 1431308)
aagttaatcttattgagagcagagtaagtttgttgcttcttttttttctggctttatttctgttttttagcttctaaatatatatactgatgtttgcgattattgggttaaattttatgagtgattttgacatgggtctctttcgatttctatgtttaattttgttcttgatgttttttagtcttttgcttttgtgtttgcgcttatgttgaatggttttgattgggttacaaattgaaagctttaggatctcaaatcgttttaggtgatgaaacgtgtcgttagtttgatagtctctgtgcttctccttgcctttttctgtcttcttctgtttgattcttaatatgattgattaatcagattttgttattcaatttcacacttaacttcaactgactctttgttgaattggattctactgtgtagtgttaagataaaaaaaagtttgaattttgtttgttgtgtttgataaagacactcctttgatgcttcacttgaatgcaaaacacttcctttgtgttacttatatatgataagcctaaggcctttcattgatctctcttctattggtgttttctgggtttgatgcagacagtggttcctctcaatac

SEQ ID NO: 1461 - DNA, 431 bp, Arabidopsis thaliana
  Intron number 1 from transcript AT3G05210.1 (locus AT3G052 10) derived from phytozome v7.0 (chr-ID Chr3; pos 1479840 to 1480270)
ccgtcgggcgcttctcaggtgccccacagttcaaggtgttatatatttgtttgacttacctttggaattacaaagtttagattagtttgatgaaattagtgctgcaattccgaacatttctactgatttttaccattcttctgcagtgatggtacgaaagtcgaattagaattgatatctctatgaaaaatgtgattttggttttgtttatttcctgagaaagaatgaaattttagacttgtaacttatgtagcttgatcatgtttctaaagattgaggttgaaaagtcggaaacttaatgtttcttacttcatcttcttgtgccaacagtcagattcagttttctgattagaatgttacatacatactaaatatccacttatttttgttgggtgtatgtttcttttgttgtagccaaacgcatcaaactg

SEQ ID NO: 1462 - DNA, 648 bp, Arabidopsis thaliana
  Intron number 2 from transcript AT3G05520.2 (locus AT3G055 20) derived from phytozome v7.0 (chr-ID Chr3; pos 1598994 to 1599641)
cccagtggagctggtgatgtgagttagcatcttattctggttctattctacttagttgaaattttcatttgttgtgtcataggagttgaattgtcgaacattattgacttgtaatctctgttatgtggaattagctattctcatgatctattaagattcttagagaaatgtggctaatgaaaaggggaagagctttgaacaatacttagtggatcactcagaaggagagaactcaagtatactttgtggtatttgtctctcttagatgtatattgctttcctagggtttttgcttcgctagctgcaaagaggctagagattagtcgatcttagaaattagggattttaaattctagtaggagttcttcaatttcgctgtttggattgagaatttttgagctttgagtgtcttggtcgtgtgtctttttctttcctagagagtttttaaaaacttgcgactgatatctacatgcaacactcttatgctgactattgttgatcaaattggcaatcaacataagtcctgcatcaccttttcatattttttgaagatgttatgggaaaactgtttagtgtttattcgctgcgagatatcgtaatactgttttgttgaatctcaggtgattgtctcatcttacagtgaaatta

SEQ ID NO: 1463 - DNA, 393 bp, Arabidopsis thaliana
  Intron number 1 from transcript AT3G05670.1 (locus AT3G056 70) derived from phytozome v7.0 (chr-ID Chr3; pos 1653355 to 1653747)
gaaaaatcataagtgtttcgtcttcttcatcggaggttcgttttttttttctaattgttcttctctctcgttcttctgtgtatgtattataggagctgtaatttaattttgtattattattttttcgtgttttgactttttatttttctctcttttcattaaatttatgtgtttccaggggtgatttctgcatttggatagattttgatttctattataggatcggaatttaaacactagcatttaagtagtaattttgggtaactgtagaatttctatggtcggaatcaaatcgataccttttctgattttcaattacgtttcttgatttcttgtttgtttttgggttgatttgcagatctcgtgctctgaattcgagaattgaggtttgag

SEQ ID NO: 1464 - DNA, 478 bp, Arabidopsis thaliana
  Intron number 1 from transcript AT3G05690.1 (locus AT3G056 90) derived from phytozome v7.0 (chr-ID Chr3; pos 1678355 to 1678832 reverse strand)
ctcttctctactctctactctatcactccatctgtgtaagttttactcaacctctttctctttttttctttgctttattcttttagattcacataggttttcgtgtgtttgattttgaccaacatttgggattttattttacttctttttggagtttgtttgctattggggatctctagtctgtgaaaaagatttcagttcttgcgtcttatcttctcgtttcacacaatctttttttcttactttagacaacaagtctgtctcttgatgatgattcacatatgggttttgtcattcgtgtggttttgcgtaatacccaatcccaaagttctttcctttctttcttacaagttttctaaattgggtttgaaatttgacaaagatttcacatccaactcttattattactttgttgacttttttttttttgttatcttccacaggaacatatctttcttattcttctaggcactatcta

SEQ ID NO: 1465 - DNA, 630 bp, Arabidopsis thaliana
  Intron number 1 from transcript AT3G05700.1 (locus AT3G057 00) derived from phytozome v7.0 (chr-ID Chr3; pos 1683653 to 1684282 reverse strand)
gaggagataccagctagcttttccatcacgatctggttagtttaaatgatatgaattttttctccctctgttctaaatgattgttatctgatcttttttttcgtctgaaaattgatgggcgaaggtagtttaggtgatagacttgtgttttctttccgatttagaatctctgttttgaagattaagaaatatatgagaaatcttcgatcttgttttgaaagatttcgtattttgtcattttttcatcgccttaggctttgcttgatactagcaaaaatgaaggaaagggggcttttgtaattgatttttattgactgatgaaatatggtttgattctggttttgctcgattcctgagaaaatggatgaaaattatccaaagttgcagtctttgttagcattttaattactcctgtgatgctactatgctcagtgtttatgaacatgagaaagtgaagatattgttctcctcagaagaggagaatatgtttcatatactgtaacctcagaggtagagtaggggtttagtatatctgattactctctttgttttcttatagctttgctgtataaatatttggttgatgtgtttttgggattgcagatacattcttagggtttgaagagatag

SEQ ID NO: 1466 - DNA, 523 bp, Arabidopsis thaliana
  Intron number 4 from transcript AT3G05760.2 (locus AT3G057 60) derived from phytozome v7.0 (chr-ID Chr3; pos 1708388 to 1708910)
tagacctagaatctcgtctgggcaagacacaggtatcatttgctctcttttcattgaatagaaatttgcaagcttttctttaagacagagaatttgtgaaagtaaatttggtctacttgttcttggacatggatgatgtttctatctgggtcccttctacattacaggtctactttttaagcattgcacttttggtttgtttaatctcaagtgtgttaaaattatgcgattcatatatcaatcctgcttgataatatgctagtacctggttctttattaggttttataaacgtttggaatctcagttaaacagatgaaccattgtgaataccttactatatagcaaacggcattgatgttttttttttttatatattgcacgattagtttttttttattccaatcttttctaccattcttttgatatggattagtctttccacctgaggtttcttcaaagaatctaacgttcgtgtttatattaccaggtcgttacaccggtagcgcctctaagtcagcaggt

SEQ ID NO: 1467 - DNA, 469 bp, Arabidopsis thaliana
  Intron number 1 from transcript AT3G05910.1 (locus AT3G059 10) derived from phytozome v7.0 (chr-ID Chr3; pos 1766611 to 1767079 reverse strand)
tctcacccttatcagaggagctgattctggagctggtactttctctatgcttctgtcactagctagatctctacatgtctctctttcttttacttttgtgagtttttttcagatgtccaaaaaatatgaaagagggtacaaaaatggtttcttttgctttcttcatttattatcattcacttcaactacattcttatcagtttgtttcctctctattgtccacttccagatttaacttgtcgttttttgttatgtactcttcaagattactttggtcgttcctgttttattgtctaggaatgtaaataaaacaaaattaatgctagttaagctcagataaacaaagttagaactagaagatgtgtatgttctgtgtcggtagaaaaacaataaaaacaaaatatttgaatttagatatgtttgggcctttacacgtttgtgtgtgtgtgtttgttcacagtttgtttgg

SEQ ID NO: 1468 - DNA, 637 bp, Arabidopsis thaliana
  Intron number 3 from transcript AT3G06050.1 (locus AT3G060 50) derived from phytozome v7.0 (chr-ID Chr3; pos 1826592 to 1827228 reverse strand)
cagtaagttcatcgattttttttttgttcctatctttgttctttgacaccaacctaatccgatgtttagtgtatgctgatttggttctttgcttcagaaaacttgatttgcaacataacatatattattcggttcctggtttcgttgtctaagagttttcagtggtgaagatggttcatttaggaatcttttaactcctcaagtatgtaactcttgttgacgtcctgatagtaatcaacctcttatagttagaactatattactctattattcacgttgtctgtggtctcaagattttatattacaccaatagacgataaacagatctgattctatgattaaatggacttcccttattagaaagttcataattcttgatatggactagcattacaatagatttctatgtttatgttcggataagtttacgtgctagaagaaatgacttaaatgtgatgctcttgaacgttgtctatgattaccttcacattaatagacgataaaagaatttgattctatgattaaatggacttccctcattagaaagttcataattctttatatcgactagtactacatgctagaacaaatgacttaatgtgatgctcttgaacgttgtcataccagattgagtttt

SEQ ID NO: 1469 - DNA, 831 bp, Arabidopsis thaliana
  Intron number 1 from transcript AT3G06500.1 (locus AT3G065 00) derived from phytozome v7.0 (chr-ID Chr3; pos 2013024 to 2013854)
ttagaaactttctccttcatacattgcagttgcaggtaacattttcttgaacctttttgttcgaaatgatgctcttgagtgttatttgattgcttttgccttctgtccaataccatcggttttagactgtctatattaacaatttagagctttgggaactgctcagttaattatgtaaattttcgttttaagaggaatgatcttgattctttgattttcaacatggtcttgcttttcttggttgcatgcacgctcattatctgcaattggaatttgatttctcattctagggaagttatattggattttgtgtaaacgggcaatttatcaagtttgtttactgagttttattgcctaaaggagaaaggcaagagttagagatatatctcccctgttccagttccaggtatgtcttcttgtgtttagacctgaaatgttttattgcttgtcataatttagttgttgaatactgtgctcttgaagaggccaccaagtttcatttataagaggatgcctctccttgccagttccgttagtttctaactcttagaaaagtgttatagtttgttctgagatctcataaatttgatgcttatttgataaaattagttttaatctgtgatttttgtttaactaatatagctttaatgaagctcgaagttatatatggttcttagaaaagtgttttccctttgcttccgttgacttcaattcttgtgtatgcaattgtaaggcatttgatatactgatctaggccggagtttattaatcgagctttttgttgcttggttgttagagctgggagaaaacagtggactgtcacagccctgg

SEQ ID NO: 1470 - DNA, 550 bp, Arabidopsis thaliana
  Intron number 1 from transcript AT3G06650.1 (locus AT3G066 50) derived from phytozome v7.0 (chr-ID Chr3; pos 2082634 to 2083183 reverse strand)
gttttgactcgctcgactcggctaagtgaccacaggttcgttttcctatttctctaacttttcattggagatttccatgactcagatccgtgtttttttcgaatccgatccggttaatctcaaacaaaacttgtcgatccggtttgggttttagggcctatagaggggatagtgatgagtcgatagtggaatgatttcgtttctacaaagactgagatcttaagtaatatggaattctgtaatgcagtggttgagatttgcagtagtgggtccctggtttcgatcccaaatcgttatcttttaatccagaacaactggaataaagaaacaaagcttcttcttgtttgattcagttctcgatcatggtttgattaaatgaatcaactttattaaagttgtgttagcttgaaaagggagaaactttttgttggtgtgtaaccgatgatctgtttgatctgtttcagtgtttgcttttttgcatgtcaatattttattcacgacttctaaatttcacctttttctgattctcagttcctttcgagccaataaa

SEQ ID NO: 1471 - DNA, 407 bp, Arabidopsis thaliana
  Intron number 2 from transcript AT3G06760.1 (locus AT3G067 60) derived from phytozome v7.0 (chr-ID Chr3; pos 2133290 to 2133696)
gggtaattataattgatcatctatcaaaccctgctttagctttaggatagatatcttgatgctttgtttgattcttaggttgatcagttctttgccttagttgtgatccaatgctgcaatttctggtttatagttagaaaaattgaacatgttggaatattttttttttctgttcttcgtgatgatgaactgttctctggctacctctgttgtttcttcttatcagatgagcactgtaatccatttagcagccttgtgaatccaatcttggaatatttcgtttattcggtcggtaacattagtgatcttttcatgatccagactgctactttttttagctacatctctgtttcctcttaaacgtggacttaaaaatgtgttctttgttttttccaggtctgtcctgt

SEQ ID NO: 1472 - DNA, 384 bp, Arabidopsis thaliana
  Intron number 1 from transcript AT3G06930.1 (locus AT3G069 30) derived from phytozome v7.0 (chr-ID Chr3; pos 2188753 to 2189136 reverse strand)
cccattgtttcaattttgatctcgcttccgctcaggtgaatgtcgattcacatgcttatgttactgttccgctggttcttatcggttttgattattttttcccatctcgtttaaaacgtttgtttttgctacatgaagatgacgaaactctgttatttttctgtaactaatctgagattgaagatggttttcatactaatttttacaattgacgatatattttaattctgaaagtttgaattttggtaaaacttgttttgcttatgttttataatcttattgggtcttgttgtatctgagaatgcgtgcattgatcgtattatatctttgtcaatgtttttcccctcagttattcaagttggggccagtccatttcatctgtgt

SEQ ID NO: 1473 - DNA, 980 bp, Arabidopsis thaliana
  Intron number 2 from transcript AT3G07250.1 (locus AT3G072 50) derived from phytozome v7.0 (chr-ID Chr3; pos 2306356 to 2307335 reverse strand)
tgtcgcatccgttgaggcatataaccgttgttccctcaactttgtgaactacaaatttacatattttgttactctttttgtctcgtttttgtgtatataagtttcaccgatggacgttttgagttcgaagggactctccatccatgattttcttagagttttgtttttccttgacatttttcaactaattttacacttaatttgttgcattgtctctcttattaacgtatcagtaaaagtgaagaattcgtgtagttgtatatatatttgtttatttatgcaatttcatatggtttgaattcgtcaacaaatattctctagtaataaagcagttaaaaagtaacagattttactaacaaacaaacgaaaacgctcaacgattagtggcaacaaatgtaaatataaacattttatgaaattgcataaataggacgaaaaatccaaataaaaagaaattctcagcaccttctttctctcgcgctcttcgtctcttcctctgttcttccttctggtgaataaccgtaggaaccgccattggagtgggtgtggaagaactcggagctactcaatactcatattcaatcttcttcactacttcgctgtaatttcaggtgagtcttctttcagcgattccggtttatcgttggttcgaggattagatcagcgatgcatcttttgcttttgatttagtgaaacgtgaagacaatctctatacttctttcgtcatttcttaacaaataagtcatttcttttgtgttagccgctgcttctcaccatttcttttatgattatgttcgcaagatctaacgattttgcgtttggaacttgatttgagatacagggcattgcatattctctgtatcgatggatcctcgtccaaatactgcaaaggtggtatataggatccaacaactgtatgctctgttcttcggatttcattgtcctgtgattgtaactctctgtataaacgtaggtggggg

SEQ ID NO: 1474 - DNA, 607 bp, Arabidopsis thaliana
  Intron number 1 from transcript AT3G07500.1 (locus AT3G075 00) derived from phytozome v7.0 (chr-ID Chr3; pos 2392353 to 2392959)
aaacacaatttggagttttctaatcttcattccaagtgagtacttcaatcgaatcccttttctactattcaataattcaatctattattcaaattctcgtctatctgtttcgatgattttgaggttttcgctcccttttgttatcaaattatggaatctgattcccaatttcgcgtttgtatgtactcgattttctcttttttcttgcatgattacactttggtgaagttcagaattcgagtaatatcacttgaaattgctactctctgcctattcattagggtttatgaatacatagtttagggtttatgtttccattagtcacttcttgaggacctgcttatcttcgagccattgtgtatttgataaactttggaagaagtgtccactatatctagcgtaggactgaatgtagtagattagaactgctaagagttggttagagaaaggggtgggtaatttataaggattttctagggtttggttaggtattcggtagagagtttctggtttggtgaacaagacatagctttgcatcatttgttttgagttgagatgtttgtgtgttgtgttgtggcagtggaagggaactctttacccgaagaag

SEQ ID NO: 1475 - DNA, 688 bp, Arabidopsis thaliana
  Intron number 1 from transcript AT3G07650.2 (locus AT3G076 50) derived from phytozome v7.0 (chr-ID Chr3; pos 2441806 to 2442493)
agatagtagtagtccacaagaaggatcttctttacgtgagttgtttgtttctcttctccctctgtcttttcttttctgattttaataatcccaagtgtgttcttattttcttgctatctgttgtataattggtgttagtgattgattattcattgtatatcgatgaagggttggttttgatttttgttgaattggatcttttgatttggggttttaaaacttgttcggatgatgatgattgggattgatccaaaagttttcgttatttattggaaattcagattttttcgattcagttccatttgaactagtaagtcaaacaaaatctctagatttactgatctggggtttatactttgaagcttgagttgttgttgttttattaatttatttcgattttcagtaatatccatttgtaggttttggtctctgactcttgtttataataaaagctctgtattgagtaaaatctcatgaaagtaggtttcctttcccttttttatccttctcctttggttattaatctcctacaacctttttttagaaattactacctatattcagaaagattccatctatttcttcttcaaggcttgcttttttgaaccaaaagtctctctctttttcatctaataatttgtttacttttttggacagcagaaagttgatttggtcagagccaaggaag

SEQ ID NO: 1476 - DNA, 688 bp, Arabidopsis thaliana; identical to SEQ ID NO: 1475
  Intron number 1 from transcript AT3G07650.1 (locus AT3G076 50) derived from phytozome v7.0 (chr-ID Chr3; pos 2441806 to 2442493)

SEQ ID NO: 1477 - DNA, 444 bp, Arabidopsis thaliana
  Intron number 4 from transcript AT3G07920.1 (locus AT3G079 20) derived from phytozome v7.0 (chr-ID Chr3; pos 2524806 to 2525249 reverse strand)
tggaaaggtaaaactctacccaattagcttctcttgccttggacaagtttttattttttgctttctgcgtgattgaataggaaagctgcttaagaaaattctcttctcttgatacttaacaagccaatgcctatctttgatgattgctgtttcttttacctagtcaggaatttgccaacattagtgtctgatattacgtagttaagagtgatacaaaactcattcggaggcttactatattgcatcatcttgatgtgatgctgatatctttgcctacgtactgcatgataaaagctaatttggttgagcaagtaaatgagtaattactgtctgaatactagtatttaagaagtatccaattttgttttgctattctgcaaatatgaacgtatggggtttgttttgacagtgtggatcaggacgacctgtggcgccaatcaaaat

SEQ ID NO: 1478 - DNA, 380 bp, Arabidopsis thaliana
  Intron number 1 from transcript AT3G07920.1 (locus AT3G079 20) derived from phytozome v7.0 (chr-ID Chr3; pos 2525804 to 2526183 reverse strand)
agcaagaagtaagtttggcttttgacattttgtttttgtctacaaggactccttgattaattccctaaattaagacaatagattttgtttcctttttcgtttggtttgattgttgttgttgcccttttacatcagctatcctttgacccaaccaaaaatgaaaaccaagtaaacagttgtacttcaggatcttgtattaagcatgcatagttggtagatgattctctttggttactagaacgtgcgacttatataaatattgctttggagcattctttccttaagtcaatgcatacttcttcctgcttgttttttttctttttctgatgggaattatatgtacagattcttcgtagggtctttaatatcctgcgtgaaaa

SEQ ID NO: 1479 - DNA, 784 bp, Arabidopsis thaliana
  Intron number 2 from transcript AT3G08610.1 (locus AT3G086 10) derived from phytozome v7.0 (chr-ID Chr3; pos 2615652 to 2616435 reverse strand)
attcgctttatctcttttgtgttcctcaggtgtgtgctcattctctccttaattattcgttccgctttctctgagctctttcttagtttagtcctcttcgatagccatgatactgcttgtatattggaaaatcccccaaagacaccttcttttgttgctcccacgagtcaaatttcatatgcaaatcagtatattggttttgttgtttcataagctaattagtgtgccggtaaaggttcaaatgtgtgatcatttgtgtttttggttcttgaaatttgaaaatggatatgctttcagagctttataagagaggccctgtggatatagctagtgtataagtattcttaagcaacaagcagatttgttactacttagttctcttctctgtcagtttgaggcttcagggttcctggtttggttgctattctgtgtagagaaatgaatcatatcctgagttttgggtactcgataaattatcctaggcacttctgcttagtttttgttttaccactggaagcttctggatggtggtttgttttatttgtttttgccctgtctaggaatgattgaggtcctggttatggttggtttattgataatcttttggagctgtttttattttttgtaatgtgaagctctaggacagtgatgttctttcttctctgcatgcgaaatcctctcactactttcttttcttctcctctggcttgcgatgttaactctgagagtaatatggtgatgtgatgtaggggcttaaggtgaccacttgtggtgacaaataaag

SEQ ID NO: 1480 - DNA, 599 bp, Arabidopsis thaliana
  Intron number 1 from transcript AT3G08680.2 (locus AT3G086 80) derived from phytozome v7.0 (chr-ID Chr3; pos 2637944 to 2638542)
gtcctgaaccattctcctctgaatcaacctctaaggtctctctcactttcgatctctgttttccctcttgttttggggtttattagcttcgttgtttattcctttaaaagatttcttctttctcaatttcaattactccgtttagcttagctggagaaaccctagtttgtagattgcagatctgggttaatcaagtatctgtgcacacatttatgtctaaaattagttactttcgtaattggatttgttttttttgtgaagatttattatttgaagtcaaacagatttcagctgattgaatcaatgtgtgcatatagcttccataatttcatattttgatttgagaatcgagtaatgttgctttggactttatcatcagcattcccactttggtttgagaaattacgctattgtatctttgtcattattaaggaagcttttcgttgtgttgatgatctttttactcatgatacctgtgatgtgtaggtgtcattcttggctactttatccatagatacatttctcatattgagtttagcttttatgtggctataaatcattacatgatgtgttttgtgttctcttgcagttgctgttga

SEQ ID NO: 1481 - DNA, 527 bp, Arabidopsis thaliana
  Intron number 2 from transcript AT3G08990.1 (locus AT3G089 90) derived from phytozome v7.0 (chr-ID Chr3; pos 2743672 to 2744198)
atattatctcaaaggtgaatttcttctagtcacattcttccctttcttctctttttatgcatccttcatttcatttccatttcctacatttatactttgctcttgcttgcttgttaatatcttggtctagtacacttgttagccttcacacttgtgtttgtaatatacaagttttcagaaatctgactgaaacacacaacttacagttacagtttcagataataaaaaacatggaaaatgggaatttgccattctgttgttaatgatcaattcatgctcctgaattgacccttgagaccagatgattagaacacacaaaacctcatttccttactaatcaaacaacttgggaattgaccttcagttcttgtttcctatttttctgttaaactgatcgaacgcaccatgatttgtgtttctacagtgtcgatagatgttcttgcattgatcaaacagctacctgatttgtgtttgtgcttgtgttgtttccagtcatttcactgcaaacacggaagggcttatctttt

SEQ ID NO: 1482 - DNA, 873 bp, Arabidopsis thaliana
  Intron number 1 from transcript AT3G09735.1 (locus AT3G097 35) derived from phytozome v7.0 (chr-ID Chr3; pos 2986985 to 2987857 reverse strand)
gccgcagaatttgatgtaagttctgtcccctctctgaatatctctctttgtctacctgtgtttccttgtctgagatcaaatttttcgttactcacgatgaatcgctagatctgcgtttgactctgtctcaattctgctttcctacaatcgtttgctactctttcacgcgtggctcgtaatcttatgtgttgcttgagtctgatcttctggttttgatgcatgatgttccggtttaagatttgcgattgcgagctttttttgtttatgttcgagcattttggtcaatacgtgtatgattgttgtaacgcttcttaacgatggatgatcaaattctctgaaatttagcatgggttaggacctagcacaattggatcggtaaagttttgttttttctttagaatttcatacattttgagtttgaggactttggttaacttcatcactttcatcttgatcttgccatggaatgtcaagttttttcatttttggctgtttcagagtttaaggttcatggtgaataacgaatatgatggtttatacattcccaaattgtacaatctatggatattataacttgtggtattcgtttcatgatattcgtgcttgtcagtgttagttaatctgcagtaatctgtcacttaaccaaactcttgcagtaatggtctttggtagttagtataccttgtgttctgtcttacgggccaataagattgagaagctagttagtataccttgtgttctgtcctttcaagtttcatatattatatttctcaaatcttcttgtttcttcttgcatctagatttcaatatatgttactaataagaacacaatgaacagggaaaaatcgaaagcaaagggctaaacccgggact

SEQ ID NO: 1483 - DNA, 392 bp, Arabidopsis thaliana
  Intron number 1 from transcript AT3G10330.1 (locus AT3G103 30) derived from phytozome v7.0 (chr-ID Chr3; pos 3200252 to 3200643)
gctgataggttcgtttttcgattctagggtttgttttttaagcccaatttctacaattcagtgttttcttgaagctcaatttcagcaattttgagaattttagtatgtagaagaattgtaatacctagaattctagatgaatcttatgatgggtataagcaaatgtatgtcactgaaaatagaaactatctatttttagatatctgggaaatgagaaaacttgattcttgctcattatccgtggtataataattggttcaatgcgttatgaaatgttattgtgagctgtttttactctaagttaggttgtttgacaaatgccatttactaattctatgaaccttgttgttgctccaggttgggacttgttgcgaccatcaaggtacttactc

SEQ ID NO: 1484 - DNA, 336 bp, Arabidopsis thaliana
  Intron number 1 from transcript AT3G10370.1 (locus AT3G103 70) derived from phytozome v7.0 (chr-ID Chr3; pos 3216863 to 3217198)
gaggtacttttaatttttgaattttctatgtggcgtggatttccgaatttcgtataagaagctctctgaattgtctggtaatattaaaccatttcttagtttactagttggaattgagtggtatgaccattcaattgacgaaattatattgaagaatttgtagctagttacttggtttttgccactcattgttgtgtttttgtttgttaattcaataattgaaggaacatacatgttaaggatatgtattacatttgcggctcttgatacaccatttgatttagtgctcgtttacacttaggggttcgttacttggagaaagctgttttcaatctt

SEQ ID NO: 1485 - DNA, 474 bp, Arabidopsis thaliana
  Intron number 2 from transcript AT3G10490.2 (locus AT3G104 90) derived from phytozome v7.0 (chr-ID Chr3; pos 3268277 to 3268750)
agccctgggatttagcaggttcgctgggtttcacttccactctctcttggtttctgtgcatctcttccatttgggggttttctgtgaatttgttgcttctgatttgggatttttgtggtctgggcttctctcgcttcttctgactcaattcttggaaaaaaggttttacctttttaggttccgattcatttttctgggaaattttgttgcagattctctgttgttacattttgctatgtttaggctataacaccgtgaaggtagtatttcatctaatcgacttcttaagtggttcaaatattcgttttttccagattccgttagaattttatgcttacttgtgctatagttttgtttgcttgtggttcaggaaatgtaaaaagtttgaagttttgagttaagtctggttttaagtaatttcttagttgtgttgtgtgtttaagtgttttcgagattgaagacaagggaccaaga

SEQ ID NO: 1486 - DNA, 309 bp, Arabidopsis thaliana
  Intron number 1 from transcript AT3G11170.1 (locus AT3G111 70) derived from phytozome v7.0 (chr-ID Chr3; pos 3500449 to 3500757)
actggtaaacttaaaaaccctaacttttttcttgttttctcctctgctttagtctcctttagcctttgatttggtcaactttggatgattccaaagaaccaatcgaacaaattggtctttatccatatctcttcaaatagctttaggacataattggtctctcaggtaacaagctgtcattatcatcatactcatcatgttgctagtagaccaacccaattggcaactgtttgttggttttgcaactgtgtaatctgctttgaattgtgaacaaaattattgatttatgttgattacattgcagtggac

SEQ ID NO: 1487 - DNA, 740 bp, Arabidopsis thaliana
  Intron number 2 from transcript AT3G11230.1 (locus AT3G112 30) derived from phytozome v7.0 (chr-ID Chr3; pos 3516867 to 3517606)
tcgtctctaaggtttgaatctgagctaaatcttaatttgggttattgggatttatctcctctgatgatcatatcatcatttggggtctcttttcactaggattgtgttttgaaaattgcataaattagatgatctaatttgattgccaaaatcatatactttttgatgatatctggaatctggatgatcatggatacattaatcatgatcagttaaaaaaaggagctagaattggggatatactgactgttctgcattctcattagatcaacttatgcttcaaacattgttagactctttctcagtgatactggattgcgattagatgctaaatgcaatcgattagtctaagtgcttatggttcagacattgtaagactctttctcctcttgtaatggtgaaaagatttgcaatgtctcttagtatttgtggcatatagaagatactaaagacattcctgcattctctttccgtatagtgatataattggtggttaagctgtgttagatgctgctatatgcaatcgattagtgcttatggttcacttcaatacattggaacactctctcctcatttgatttggagtgtgtggtgtttcttgctttttttacatggctccacaatttcattttgttatgaatctcttctacttggcttcacaatgtcttagtattgtggcatatgcaagatactgacaacatcttgtttgtctatttgtttacagtcttttcagtcccgac

SEQ ID NO: 1488 - DNA, 831 bp, Arabidopsis thaliana
  Intron number 1 from transcript AT3G11440.1 (locus AT3G114 40) derived from phytozome v7.0 (chr-ID Chr3; pos 3602171 to 3603001)
gagctttttcccgcgttatctctctcccactcctggtaatattttcttcttcttcttcttctagattgttcttccgttactagctcttgaatccatttccacggatctctgatcttcaatctctgttttcattctctctaatcagttgttgagcttgatatttttagctaacgtttttccgattcaaatttacgatttgtgtgttttccgataaccaaatcggatatcttcagctcaaactcgagctccgatttcgtctcatgttgtagatctcgacgacttcgtatttgtctatggtttgctgattgtattcagattgctagatactcaatatagagcttacttttacctcagctagggttcgtctttgttgtacctttagttgctgctttttgattcttgtatatatggattttgattgttcaatcgtaatttctggttcattgaaaatcgatttattagtattcgaaattggaactaagatttagagattgcgaatttgatacagaagtcatttcaaagtatcagagctataaaatggtgcttagctagtttctggtttccatttctggattttcattcaaatacgaaatctattcgtcaaaatggtgtcactagtgttctgtagaaatttcattacagacttttagttgttgcctagtatcaactcatatctcagcggtagatatgatgaatctactagacatatttttcaattatcgcctccttttacaagtttatcatgtcattattttgttgataactacatgaatgctggctgaaatattaatttgtctctttttcctcttaattggttcaggttggagcttg

SEQ ID NO: 1489 - DNA, 329 bp, Arabidopsis thaliana
  Intron number 1 from transcript AT3G11560.4 (locus AT3G115 60) derived from phytozome v7.0 (chr-ID Chr3; pos 3639559 to 3639887)
gctagactacaacgacctgggcttgtatcctcaaggtaaatcaaactcactacaattttcagatcattcccagaaatttattagtggaattaatcaaatttggggttttctccgtcgtccatcttcaccagtgttcaattttcgattccgtttatacactcgcttagctcaatcattagagtaggtgcagcttagtttaagtcaaacccagaaaagggaaacttagacgaatgattcaattttgtactttgttcacggtagatcattcttttgattttagtggctgcttaataactgaatctcgccttttgtagctctacttcaaaacc

SEQ ID NO: 1490 - DNA, 460 bp, Arabidopsis thaliana
  Intron number 1 from transcript AT3G11890.2 (locus AT3G118 90) derived from phytozome v7.0 (chr-ID Chr3; pos 3755566 to 3756025)
gtcatcgtcactcccagaaagaaagaaactcaaaggtatgagaagactatccgactcgtagctgcttctggatacgaattgtttctccactatctcaatttgtctccgtctgctaagaaaataaaacaatttgtaattctagggtttgatcctctctctttcaatcgtccctaatttactggtagtttggattgtaatatcttaatcccgcggattatactaagattacaagttcgagaattgattcattcactgcaaatttccttcgtttgctttgatttcttggaaacttctgataacaaatcgtttctgagaacatgtttttcttcttcttgtgattgtgtctttcaaagcatacttctccaattctctttggtttcttccttgtgatttttgaataaattgtgttattttggtttccttttagcttgatgttgttgttttgaaatctcaggttaca

SEQ ID NO: 1491 - DNA, 446 bp, Arabidopsis thaliana
  Intron number 2 from transcript AT3G12200.1 (locus AT3G122 00) derived from phytozome v7.0 (chr-ID Chr3; pos 3889642 to 3890087 reverse strand)
acacggacaagttaaagcaaaccgctttacaagaggtaactatgtgacttttattagttgatcttttgaatcttcaatcgttatgttaactatgctctttaaattggggaagacatttgacatatctttgtatcagttattttattcacacatgtattagcatatgaggtgatatttatatctctagttattgtattgattctcggtgctcatttgtttctacgcatatggtattcatttgtttttgatattcgtctctccattattcgagcaatgtattaacctgataacttcagattagcagagctgttataaattatgatctggtatggaaacacacttcacttattttcattcagggttttgagcaattggtttatttggcatttaactttgcaattctcattcccttgtaaaatcatcatctttttctttttgtgttgcag

SEQ ID NO: 1492 - DNA, 556 bp, Arabidopsis thaliana
  Intron number 2 from transcript AT3G13040.2 (locus AT3G130 40) derived from phytozome v7.0 (chr-ID Chr3; pos 4174510 to 4175065 reverse strand)
gtattaaaaaggtgaagactttatcatcctctcaggtccgtttctattctatcatgccctttgataaaatcaaatataaaatcaaataaattgcttttgattttctctgtgaatgattcgtactactacttgtcagtctcaacattctgaatttagaatttaatacctcatttctctttgcgtttctgtcctcctgtaatcgtgtctttgcgtaacctgatttgattcctctgttcgagttttaaagtttccatgtgtcggcaactcgttttgcattttttggaacaccatatttaatcgttgcatctctctgtgtctgtatatatggtaaatctcaatctcggatgtactcttgttgctccaattacttagctttttagttctcaaggaacttattaacttgtcaagatccagccaagatggatcactggatgattctgtatgccttgttctgaaagttaactaaacaaactgactcaattcttgtcactaacatgtttattgaccccaccattcttatcctaatcatcaaaatgtttggttctcagcggcttgg

SEQ ID NO: 1493 - DNA, 385 bp, Arabidopsis thaliana
  Intron number 2 from transcript AT3G13860.1 (locus AT3G138 60) derived from phytozome v7.0 (chr-ID Chr3; pos 4564604 to 4564988 reverse strand)
gattgtcttgcagctcgtctacttccaggaaactggtgagtttcgtgaactctctctgtctttttgcgagtttgattgcatttcgtttatgggcattcttgttggtaacagagaaattgctagaaatgtgtcaaattactagtcctgatagtttatgcaatgaaaaaaatagggtttacatcaaaatctccaccttaagctacttaatttgcaaaattgctctgcttttattggtttcagatgcaatagaagatcttctagttccggaatgattagcttgaattggccgtaccctgtatcaaactaattaattccgattttgattttcttttggtgttctctcttaccatgaaggtttctgggcggattataagtagcagaaact

SEQ ID NO: 1494 - DNA, 631 bp, Arabidopsis thaliana
  Intron number 1 from transcript AT3G13882.1 (locus AT3G138 82) derived from phytozome v7.0 (chr-ID Chr3; pos 4574842 to 4575472)
tggtcttccttcactcgaattcttcttgccagaaggtactttcactctttgactctattttgattgtatctgtcagtagctagattagtaatttgttcacactctcctgaagctggattttcttggcttatgaatatgatttatagtgtatgcaatgcagtcactagatgctcgagtatcaatcaaatgttgagaggtgttctgtttcttttgtggattgtgtgtcaatggttgatgaaatcagaaactttgcttgcttgctcatgtgcttacacagtagtaacaatgtttaggtcgttttatcgagtcctgttaccggccattttgctgatagtgttctgttcttgagtggagatcatagcgaattataaagtattgggaagcacatttatttaacttatgtctcaacttataggagggttaagaatctggctgtgttgtgctttgagtttgatatagttcaagagtgttatgtgtcctaaaggagagttcagccttgtattgttcattggccttgaggcttttagtctctgcaaagttgtatatttttgctgctcgttggtacctgtctaatgtctttgtatttggtaatgtagttgatccttcaagtgagccattgcttctgtttcct

SEQ ID NO: 1495 - DNA, 349 bp, Arabidopsis thaliana
  Intron number 1 from transcript AT3G14870.2 (locus AT3G148 70) derived from phytozome v7.0 (chr-ID Chr3; pos 5002499 to 5002847)
aggtttgcccgggagagtgtttttacatcgatcaggttggttagctaatcaatatttattaattatcatcttttgttcttctgaatgatttcgtcttcattgttattctgcagtttcttatattctcattttcaatcaaatgaatatatcattgtgacttgtgaatgctcttacaatcccatcattcataccaataatgccatggtcaagcattcacatcagcttgaatattagtctcatattggttctgtgtttatcctttttcctttggtaggtagtgatttataatttcatatgattgatttgatctgcagggtttaagcagaggttggtttgtcatttcgccagt

SEQ ID NO: 1496 - DNA, 523 bp, Arabidopsis thaliana
  Intron number 3 from transcript AT3G15390.1 (locus AT3G153 90) derived from phytozome v7.0 (chr-ID Chr3; pos 5198324 to 5198846 reverse strand)
tgaagaaggtaacccgatgcctttagctctgaaaaataatgtattttgtttctttaacagcgttttgctttcccatatgccttcattttctttctttttctaaaatattttaaatgttttactttttcctggctgagttatattatatagccccatacgttgaagctcatcaagatgaccaccgcttaattatgacctgtgacctttatagttgcatcactctttatttgagctactttaacaataattacaattatacccttgagccactttgacaatccttttctctgtcttggtactactgctgactaaaatttgagataaagttgacttttcataccgactgtcgcctctaattttgatcacttgattgttagtggtatctctataactcttggcatatggctcttgtgagtatttcatttgatcctgcttttgttacaacttcttcttttggcatctacactatattcttcattatattgcagagtacggagaaactgcttgacttttctgataccaa

SEQ ID NO: 1497 - DNA, 744 bp, Arabidopsis thaliana
  Intron number 1 from transcript AT3G15605.2 (locus AT3G156 05) derived from phytozome v7.0 (chr-ID Chr3; pos 5287547 to 5288290)
tacggattctcttccgatcgacgattcagcttccggtatagcttctcctctcttccatggtctttaaatcgtcgtttctgtttgatttttagtaacgttgagctgcttttgttttatcggaagcaacgtccgtacaggtttgcatttttgtagcttaacggtgagtgttttccggtatatttgttggattttctgatcaacgtttgctaaaaaacaccgtgttttatacagattatctttggtatttcgaattaactgttacatctgttgcttttgtgtggagcttatgaacagtaagcgattattttcaggtatttgagtctctgaagtttaggtggcttgattttgtgggtaaagtttcatatacagtgatgacattttgttgttgcttcgtaaaatggctttgttatacagtaatgacttcaatttctgacaagtttatacttgtgaatggtggcaactgtttaggttagtagatgaaatgttgccttgtgttcttttgtggggttgtttttgacaatcttctgtataggttttggatgctttagtgaaccttatactttcctagttagggagtacttcaatcatgtgcttgcaaagtttccttttgaggttgaagacgccttaggtttaaaacttatatccatgatcttacactctctaggactactttggttgtatcttattatgtttatcttgttgtctcttttacagtttgggatatctcagcaggataacttctct

SEQ ID NO: 1498 - DNA, 634 bp, Arabidopsis thaliana
  Intron number 1 from transcript AT3G15780.1 (locus AT3G157 80) derived from phytozome v7.0 (chr-ID Chr3; pos 5341610 to 5342243)
tccgcctccgcctgaggacaccactcagctagaaggttcgattcttcttgcccagattgatattttggtcctttgaatcctactttgtttggttggtctttgttgtacttgcttttcagttttcactttaactgttgtgttttgggtcgaaagtttcaatttttatccgatagtttgatataagtatggagtcttttaggttagtacttggtattgaatcgtgctgagattgttattgtatcatgaaacttccaaaacatgaggatgatttcatccaattagttgttgtgtccatggaaccaaagttcaaatcttgtgacatgattttggcttaggcaattaggattgtggaatttactccttatgattcaaaatggctaccattttatgtggggattttctaaattttctcttaagatgtaaaattgtgcagtagttgtatgttcattggttctgcaattagtccatatgttatgttgaatagcttgggtgatgattcctttataacatagaaggataggctggaaatagaaaaaactgcactcatgactgatactaagtgaaatgaatactcttgttttctttttctctttgtaaaggtcttgtgggagctgtgacaagggttcaagaccgc

SEQ ID NO: 1499 - DNA, 458 bp, Arabidopsis thaliana
  Intron number 2 from transcript AT3G15790.1 (locus AT3G157 90) derived from phytozome v7.0 (chr-ID Chr3; pos 5343262 to 5343719)
gaagaaattggtttgttttctttgtttcatacaaagacttagaatttgttgtatatgtgtagtgctgcaattaccaaatctttttctttgaagactctgaatatggtagcttttggtggcgaaatgttagtataagtgtaaataactttatgttgattaggtgattcaaaggttatagacttagaaaaagccacatttgattgtgtttgatctactatttctacttctttgttcttgacttaatgcctcattttgactatgtttgatttacttcttacttttcccgattcttatggattttaagccacttgtaaacattgtttaagctacattaaggtcttctttagaatttaatctttcagcgttttgaacctcaaattttcatattttcagaggtttacattaactgacttgtttttgcagttttaccccaacaaagtgggttcagtgaagaaaac

SEQ ID NO: 1500 - DNA, 625 bp, Arabidopsis thaliana
  Intron number 1 from transcript AT3G15820.1 (locus AT3G158 20) derived from phytozome v7.0 (chr-ID Chr3; pos 5351623 to 5352247)
cggatcttaacactgttttagccgcactaaacacggtatgtcgtgtgagttaatttaggtaaaatatatatttaatgattatcttcaaattcttattgcctcctttcacctaataatttgtttttttcttcgtcattcataaatcctaatattttagtcaaataaaagtggggtagagatggaaacaaacctcagattattttcccgtgttatttaattctccagctggaattttgctgtcaatggtaacaagcaatgaaatatcctaagtatagtgagagaaaattagcaaaagattaatcctaaaatggtcataaaagattaagaccagttagtggataaaatggtcttaatcggattagttagtggacgaaaacatagttaatactacaaactctttgttttagttatgtgatcttctttttaacaactgcttttttgtttgtttgtacaacacttaattaatatagatcgcttttaactttagaaaagccaataaaaaatgacacatggtgaagaatgagttggagacacgatcacatgcaacacagagagattggttacttaaatctaagttttgtacttttaaactaatataattgggtggggacaggtgttcgtaggg

SEQ ID NO: 1501 - DNA, 664 bp, Arabidopsis thaliana
  Intron number 1 from transcript AT3G16850.1 (locus AT3G168 50) derived from phytozome v7.0 (chr-ID Chr3; pos 5748701 to 5749364)
ccagtaagtacgtttctccctttctttaattcttatttttgatttttttgtctaatgagtttggcttaatctctgtctgcaattctatgattctctcagttaaattttggtaaagaaaatcatatgaaatcgagatagcttgtaggattcttacctcagttctgtgttatttgtttgtaatcgagacctctctgcagccaaatctagaaatctgtctttagattcctctgttttttttttgtacttacaggctctgttacttggatcttcatgtcagtgtgttctgattgatgtttttcttatgaccgatgcttctgtttagtttcatagtttgaagtttatgaactcttatctctgtttatgaggttttccaagaggagaacttatcagattcccctgaatttcttccatggaaaccgaaaatataggagagttcatgtttttaatcagatatgattcttgtcaaactcaatttacgtttagctttcccggaatttcctttacgcaaacgttttttgtttcccttcacatatgactctcgttagtcatcacatataagatttgctaacatcatcagttttgatctgattttgtcgaatttagactgattttctcaagttgtaatgcaggtggcattggtctggctactggcattcactattct

SEQ ID NO: 1502 - DNA, 622 bp, Arabidopsis thaliana
  Intron number 1 from transcript AT3G17120.1 (locus AT3G171 20) derived from phytozome v7.0 (chr-ID Chr3; pos 5841571 to 5842192)
tatcggatctgggtctccttcgctttcgtttcaaggtaacacaaaaaaaacttcaaattcttttctcttttattcacaccattttcgctttctttttcctttttcttctttaatctttgtgactgttctatatcaatcttcatttaacatttgcattctcatcacttatcagtattttctgatatccaatttctgggttttcgaattcgattcgataagaatatttatttcatttttttttttaatgtagtagtatatgttttttccccaaagtcacggcattggaaaaaaggaaaaacacagctgttccttgcttcaagcccgagattaagcaaaaataattactatttctttcttttaaaaaaatattcgaatcaacgcactatataaaattacctacttttgacagtatctgaattaaacatcaaccaaacttcaaactctctcctctgtaatccattctttttgtattcccaaccacgtgattttttgattcggtaattatccatattctacactacgattattaagcattaaaatttatcgattggtgaaaaaattaaacttcgtgattttggcttttgcagattattttgggagacgaggaggcgttagctgtaat

SEQ ID NO: 1503 - DNA, 588 bp, Arabidopsis thaliana
  Intron number 1 from transcript AT3G17410.1 (locus AT3G174 10) derived from phytozome v7.0 (chr-ID Chr3; pos 5956013 to 5956600)
ctttttgagattctctaattatccttttggaagaggtaattcgctatcttcttcttcttcttcttaccaactcgcttaaatttctcttttttgggtctttccccgtatttatctgtaaaatttgtttctagggttcgatttcatgccgattagattgtgttaacggatttttcggagtttattgatagttatttcagtttgaaatccattttaggggttacgatcgttgacttgtgataagtctaggtcaccaaatgtatcatttcttagtgtctcgatttttatcgaattatgctctcgtaatgaaacttcatcatcatgtagatgaaggattttactcttctgatacaaaaatttgttttttgtgaaaaaaaatctgtttccttttttgttctgcttaaaccctataattagaaactttcgtcgagcatttctctataagtttgtacagtttgctctatttcatttggggaagaaattagttacttctaaattttcgtatgttataaagtcttgttctgcaacaccattactgacgtttttgcgttatgaatatactgatacagtttcgtgtgagagagaagcgta

SEQ ID NO: 1504 - DNA, 725 bp, Arabidopsis thaliana
  Intron number 1 from transcript AT3G18050.1 (locus AT3G180 50) derived from phytozome v7.0 (chr-ID Chr3; pos 6181562 to 6182286)
ttggttgcaacaagtgcttgaacagtctctataaggtaaagtcactaactttgctgctatatttagaagctgccactgtgaagttcaaatggaattaggttggctaaattggtaaaatgtgtgtgcaaatctagtaacttttagataatctatagataccctgaagcgttgttggtgtttagcttctggattttgtttgattgactgattaagacaattttttggatgagtaatgaggaattgatggactagttatagtagttaactatgtaaggtttagtccaaagtttagaagcccttttttaatgatatttatttggtgtttaaggattagggttttactatatgagtgagtgaagatttggaattatgtagtttaggattctttctgatctatccatcatatggcgaatggtagtaatttgggaaaagttttgttctttagctttttgttctctttctatctgacagtctgacacacatatacgcgctaacagaatccgtgatctccacgcgacgttttgtcttccatcatatgatttcattcttctgcatcttaatcaccaacccaccatagccaaaagcttagcaactagttgccacctttctactttctacaatcctcaatcattactttagtcagcagcaacaaaccctaatcaaaacaaacacttctgcttcattttgcagctaaatccgaagaaaacttcagggacaagaaaccc

SEQ ID NO: 1505 - DNA, 273 bp, Arabidopsis thaliana
  Intron number 1 from transcript AT3G18060.1 (locus AT3G180 60) derived from phytozome v7.0 (chr-ID Chr3; pos 6184238 to 6184510)
gcaaaggcaaatctcttgttcgtgctttcatgtgagtttggttttgctttttagataaagatttgatttttatagtgcttagctcaatgttgttttcgttgattttgattgatcggactaaaggttttgtttttctgctggtgttgcttttattttgttgaatcggatcgatattaatcagattgaaattgagcattttgtttcttcttctcaactttgatggattattgactcattgtttgtcttggtttattaggtgggattcaggatcaa

SEQ ID NO: 1506 - DNA, 583 bp, Arabidopsis thaliana
  Intron number 1 from transcript AT3G18640.1 (locus AT3G186 40) derived from phytozome v7.0 (chr-ID Chr3; pos 6415854 to 6416436 reverse strand)
aagagctctattcgaattcaagtgagttctgtctatcttcttgtctacttctcaattttagggttatataattttatctattaaactctaattaggttcaatttagtttgactttttttttcccttttactcaatttaggttctatttgggtttatgtgagacattgtgtggttttatttccaggaagaattggtaccagttttagtttcgggttaattcttctcattgtttatctctacttccatgattggtcttcttcacttatgatctcaaagatcaatcttttcaattgctcttggattctgagtttaatggataacaagatttgctatgaatggtttcacactactgttggaagatctatagaatgagcaatattgctcgttgagcagagaatatataaaatatataacaaagaaacttgatagattaaaatcaaatccaatttgttgttattttcgttttcgtgtgcagatgtttccagttaggaggtttaagtctagttattattacagtttcttttttacttgtttgctaattttactctatttcataaacttgttatctacagatattcttttg

SEQ ID NO: 1507 - DNA, 690 bp, Arabidopsis thaliana
  Intron number 1 from transcript AT3G19970.1 (locus AT3G199 70) derived from phytozome v7.0 (chr-ID Chr3; pos 6958701 to 6959390)
tctctcttttccctcttcccgtctctatctctctggtgagtttttcttctctcctttctccaattcgtattttctctcagattcttcaattgtacgttgattaatcttctgaaattcgattatttatcgcacccaatttatacgcggttttggattctgggggaaaaaatgagttttttggtttcggtcggtttatcattgtcttattcggtgcctcttctcccgtagaatgggaaggtcgccatcgccacgtcgtgttgcatttcttttcgggagaaatttatgccattgattttagctcttttaggctttttcttagtttttgggaaaattcttgtggtgggtcctttgcaaatctggggattcaatctctttttttttcattgttccataggtttttgaggatacaaaatttcattgttcataggtttttctcatgatttctgggggaagagaataaataattccatctataaaaatcatctttttttcattgttggaggtgggatcctcatatgattttagagatcaaataatagaagagaagagaaaagcttgtttcttttcccctttgtgtcaacatcatacgaaatcgtttcttttagtatcaagcttcaaagagatgttttgacttgaaacgattgttgtcttgcagagaagcgttttttcggtggagagaaagagagattt

SEQ ID NO: 1508 - DNA, 492 bp, Arabidopsis thaliana
  Intron number 1 from transcript AT3G20250.1 (locus AT3G202 50) derived from phytozome v7.0 (chr-ID Chr3; pos 7062693 to 7063184 reverse strand)
gaagcttgaatatcaccatcaggtacttaactctgcctcttcttccctcttcctctctgtatctacttttttttcttctacaagtcatgcaaggaactagtttatgaatagaaaatgataaagtttaagtcttttgtttaattttgatctctgattatagcttcaggatatgattctctgtttgtgaagaggttaatgaatgagttcaacggtttcgtgtgcttttataaagatggcgtcttttgatgatcttgttgttgtttttcctgattattgagttgactgaattttttagcttcaggaaatggtaaaaatcttagtctgaaatttcgatccttgatatgtagatttcgttcatgtcttgtcgattacttgtttttttgttcttgtgattaatgaaatttgggaccatatcttaaagttcttagctttttgttctcttatggactaaggttttgctctatgtgtcaggtgttgtgaaatttactttgt

SEQ ID NO: 1509 - DNA, 430 bp, Arabidopsis thaliana
  Intron number 1 from transcript AT3G20270.3 (locus AT3G202 70) derived from phytozome v7.0 (chr-ID Chr3; pos 7067082 to 7067511)
cagttcttcttctcagggattacttactacctcttgtaagttctcattcgattctatttttgcttgaattctgtttcagctgatgaaacgcttgttatcatcttagccgtttcgttttctactctttctagttataaaattttgacttcttcaagagaattttttttgggttccaatcaatcagattgctatgatcctctgaatagaattttcttgttgatatagggacttgtgttgttgagtttgagcctatagtgatcaaatgggattctcatatgaattttactcaaattttgttacttttttaatcttataactgtagacaaaagcttatccttttattggttacaaatcgtatgaacatttgattctatgctttttgctttgccattaagcaattgattttttttagtttgcttgtttccggatt

SEQ ID NO: 1510 - DNA, 697 bp, Arabidopsis thaliana
  Intron number 1 from transcript AT3G20270.1 (locus AT3G202 70) derived from phytozome v7.0 (chr-ID Chr3; pos 7067082 to 7067778)
cagttcttcttctcagggattacttactacctcttgtaagttctcattcgattctatttttgcttgaattctgtttcagctgatgaaacgcttgttatcatcttagccgtttcgttttctactctttctagttataaaattttgacttcttcaagagaattttttttgggttccaatcaatcagattgctatgatcctctgaatagaattttcttgttgatatagggacttgtgttgttgagtttgagcctatagtgatcaaatgggattctcatatgaattttactcaaattttgttacttttttaatcttataactgtagacaaaagcttatccttttattggttacaaatcgtatgaacatttgattctatgctttttgctttgccattaagcaattgattttttttagtttgcttgtttccggattatgggaatgaagcttcactgggattaagaatctgtaagtaatatgtttttgtttaataagctttaggcttatagatatgtttttttaaagttctaagttagtgttgtgtttgttactcttaaacatacttaaaaagctactaaatgagtgctattcaataatgttctgtttgatttcgatggaataatttagtgtgactgatgttgcttttatgtcgcttatgtattattggtgatctatgtgtaaaacatgtgttgcaggatagta

SEQ ID NO: 1511 - DNA, 300 bp, Arabidopsis thaliana
  Intron number 2 from transcript AT3G20540.2 (locus AT3G205 40) derived from phytozome v7.0 (chr-ID Chr3; pos 7168545 to 7168844)
tgtgtttgctcaattgctctgtttcgtaagtttgttgttagttatatagtgatgattcgcgttttaagtttgttgaagaagcaggttaaaaatgtgttttgctgcaatttggtttcagtttctcacttagtctaaattgttcctgtgttaaagttatttaggagtctgcttttgattaagcagaagaatgtattttagttgaggtttggttattattctgagtttgaaggtgtttttctttgtgttgatatcattttttggtggttatgatttgcaggaaagtagcaatcataaagggaa

SEQ ID NO: 1512 - DNA, 503 bp, Arabidopsis thaliana
  Intron number 1 from transcript AT3G20540.1 (locus AT3G205 40) derived from phytozome v7.0 (chr-ID Chr3; pos 7168342 to 7168844)
tttcttgtccctcgccgtcgaatcctttgcaccaggttcacagcttttctcatcttatctgttcccttttctcatttttgttcatcgagaattagatttactcattcattagtcaattgctctgttccgtaaagttggttgttagttttatatagtgatgatgattcacgttttgaggttgttgaagaagcaggttaaaaatgtgtgtttgctcaattgctctgtttcgtaagtttgttgttagttatatagtgatgattcgcgttttaagtttgttgaagaagcaggttaaaaatgtgttttgctgcaatttggtttcagtttctcacttagtctaaattgttcctgtgttaaagttatttaggagtctgcttttgattaagcagaagaatgtattttagttgaggtttggttattattctgagtttgaaggtgtttttctttgtgttgatatcattttttggtggttatgatttgcaggaaagtagcaatcataaagggaa

SEQ ID NO: 1513 - DNA, 549 bp, Arabidopsis thaliana
  Intron number 1 from transcript AT3G20770.1 (locus AT3G207 70) derived from phytozome v7.0 (chr-ID Chr3; pos 7262589 to 7263137 reverse strand)
tattctccttcttcttctgctgttcatttctccaggtactatacgcttcttcttctattgattttttagggttattattgatactgaagatgatgataggtttattcatagggttttactagatcgatggttttactttagtttactagtgtttacacgatctaatttcatgagtttatgctacttttagttttttttttggttgaatttttgtttattgtttataaatcgttgatctatttgaaaatgttttctctttcttattcatatatgatcctttctatatttggttcctatgttgaagatctcatcctttttttggaaattgaatctgttgataatttttattatccgattgattatttagtttaggagtgattaaaatacgatctgattatgtgtttattacttaaaactttgattgaattcgaaaagccccttttttataatttagggtttgatgattttttttagtaagttgtttgattcagaagaaatataattgtactgattagttttgtttgtgtatttgatttgttacaggttaca

SEQ ID NO: 1514 - DNA, 546 bp, Arabidopsis thaliana
  Intron number 1 from transcript AT3G20900.1 (locus AT3G209 00) derived from phytozome v7.0 (chr-ID Chr3; pos 7324122 to 7324667 reverse strand)
aacaaagtagcgaggaagaacaaaacatcaggtgaacaaaaaaaaaactcaatccacatcaaagttacaataactgacgaagctaagtaggctagaaattaaagtcatcaacctaatacatagcacttagaaaaaagtgaagcaagaaaatataaaataataaaagggtgggttatcaattgatagtgtaaatcatagttgatttttgatataccctaccacaaaaactcaaaccgacttgattcaaatcatctcaaaaaacaagcgccaaaataatgaaaaaaataataacaaaaacaaacaaaccaaaataagaaaaaacattacgcaaaacataataatttactcttcgttattgtattaacaaatcaaagagatgaattttgatcacctgctaatactactttctgtattgatcctatatcaaaaaaaaaaaagatactaataattaactaaaagtacgttcatcgatcgtgtgcgttgacgaagaagagctctatctccggcggagcaaagaaaacgatctgtctccgtcgtaacacacag

SEQ ID NO: 1515 - DNA, 280 bp, Arabidopsis thaliana
  Intron number 1 from transcript AT3G21480.1 (locus AT3G214 80) derived from phytozome v7.0 (chr-ID Chr3; pos 7567777 to 7568056)
gattgattctaatccaccttcttcttctgattctggtaatttttacacttactaatctcttgtagggtttattcttcatcaaaagctccgatttttgcctctcatcgatctgttatataaaagaaattttgatttttctgagttcttgctctgtaatttgaagattttggaaactaatatgtggtttcttagttactcttctctgtagtttactattacctgacctaatttgttttgaatcttaggcgaggataaagatagcttgcttggggattgtgac

SEQ ID NO: 1516 - DNA, 488 bp, Arabidopsis thaliana
  Intron number 3 from transcript AT3G21700.1 (locus AT3G217 00) derived from phytozome v7.0 (chr-ID Chr3; pos 7645362 to 7645849)
ttagctggtatcaacaagctaggaagtctaatcaggtaatattaatttcactatcatttgtcaaatttgggctctttgttaaaagtcttttaaaatttagacctgggtggtcgggtattcggatcgggtttagggtattttacccaggtctaatcttgttgtgtgaaatttagggttgattggttgtaactgggcgttcgggtattcgaatcgggttcgagtcttcgggtttcggtattttgccgaagcctagtcttgttgtatagaattttggggatgattggttgcgactgtaacgtatattttggctaagcatagacaaagaacaaaaatatggatctaaaagtgtgattgtagaaaattagagttgagacttaaaaaaaatatgatatttttcaatgttttttgtttaagatcaaatgttattgttttggtgaagctaaacactgataggtttgataaatatattacagacggcgataccagtt

SEQ ID NO: 1517 - DNA, 892 bp, Arabidopsis thaliana
  Intron number 1 from transcript AT3G21730.2 (locus AT3G217 30) derived from phytozome v7.0 (chr-ID Chr3; pos 7660238 to 7661129 reverse strand)
tgttctctcattctttcttttttgtgcaacaggtattctcttattccttcttgtcttttaattagtttctcttgacatgatttactgctcagaaagctttagtaattattatttttgtggtttcttcattaataatgtgtgttgattttctggtagtttcttttttggccgacaaaacattttgaatggaaacgaaaagtgttggaactacagttttttgacaagttgttccggccaatttctgatggctcgtagaattatatgttcataggttctatgattgggtgttatgatcatattctcgttgtgattatatcatgagattcaaatctcttattgtgcagccgccttggggttgatttcataacttaaagtaagatgtcctacaaaaaggatcgtttttttggggtcaaaatgattgtttttagaatttgtttttttttaaaaaaaaaattggtgatatcaaaatttaaaacggtcctacgaaacaagcatgttagtatgtaaattgatgatatcaaaatttaaaagcagtagttcaattgcgatttaatgtataatcttgtgtctaagggggactcaagatggatattttgactatattacagaaaaaaaatgctcaaataattaaaagattagtgtttaagaagatatgaaatggtttgacaaaaaaataaaataatagacaatgatgtacgacacttaattttaggttttcctatggtgtattgtgaaagagtttgtccggttaaaacagggattttgtttataaactgtcacaaggatcattctttgtaaactgttgatggaagtatattttcaaagacttaagcttttatatatagtttttggaacagaatcattggagtcattgcctgaggataaactgata

SEQ ID NO: 1518 - DNA, 880 bp, Arabidopsis thaliana
  Intron number 1 from transcript AT3G21730.1 (locus AT3G217 30) derived from phytozome v7.0 (chr-ID Chr3; pos 7660250 to 7661129 reverse strand)
tgttctctcattctttcttttttgtgcaacaggtattctcttattccttcttgtcttttaattagtttctcttgacatgatttactgctcagaaagctttagtaattattatttttgtggtttcttcattaataatgtgtgttgattttctggtagtttcttttttggccgacaaaacattttgaatggaaacgaaaagtgttggaactacagttttttgacaagttgttccggccaatttctgatggctcgtagaattatatgttcataggttctatgattgggtgttatgatcatattctcgttgtgattatatcatgagattcaaatctcttattgtgcagccgccttggggttgatttcataacttaaagtaagatgtcctacaaaaaggatcgtttttttggggtcaaaatgattgtttttagaatttgtttttttttaaaaaaaaaattggtgatatcaaaatttaaaacggtcctacgaaacaagcatgttagtatgtaaattgatgatatcaaaatttaaaagcagtagttcaattgcgatttaatgtataatcttgtgtctaagggggactcaagatggatattttgactatattacagaaaaaaaatgctcaaataattaaaagattagtgtttaagaagatatgaaatggtttgacaaaaaaataaaataatagacaatgatgtacgacacttaattttaggttttcctatggtgtattgtgaaagagtttgtccggttaaaacagggattttgtttataaactgtcacaaggatcattctttgtaaactgttgatggaagtatattttcaaagacttaagcttttatatatagtttttggaacagaatcattggagtcattgcctgag

SEQ ID NO: 1519 - DNA, 698 bp, Arabidopsis thaliana
  Intron number 1 from transcript AT3G22010.1 (locus AT3G220 10) derived from phytozome v7.0 (chr-ID Chr3; pos 7754626 to 7755323)
cgctcttgctttgccgcaggcatttccggggaaatgtcacttatatttatccaatatccctcatacataatttgcaaagtcattttcgaacagaatgtttacttcgataatttcggaggaatttcaaaaatatggcattgatttgtatattgttataaaactataagagataattaaaagcaatcttttcgttacaaatttaaattctagtttttgaaacacgttcatttataatattatcacttttaataaacttgttttttttctttttgcaaaattaccattacaaattatttagtccataaataccatagataaaagtgatttaattttaattttttggtttgggtttatgttttagtttttaggttttgttgtttagaacttaaggtttggtattgtggtatttttgaggaataaaaactagtgatggcatttcattttagtgattttttgagatttatcctttttgttttgattttcatctacttattaattaatttctcagatttaacgcttggaagaaaaaacaaacataacttcgattgaaaaaaatcagtgtcgttcagttttgttcttaaaatggcaataattccgataactcttgatactctgctttggtttcttaattgagacaatatgtaaaatattgttctagattgttgtgttgatatgtatttatgtaagcttcgtaggag

SEQ ID NO: 1520 - DNA, 389 bp, Arabidopsis thaliana
  Intron number 2 from transcript AT3G22260.3 (locus AT3G222 60) derived from phytozome v7.0 (chr-ID Chr3; pos 7871100 to 7871488)
ttgagcttgccaagtcaagcaaccagattttgttggtaattatctcaactttttgtttgctcaactttaggattttgaatctcagagaattacgtttccagtagtgggtaacgtttcaagaatttgagattgttttgggtttcttttgaatttgggtttattcagtgtgatctttgatctgggtttctgtagttttgtgtgattgaatcgaaagttgtcttcttttgttacagattacaacattttaggttgatataccttttggatttggttgcttaatggtattggattgatactagtttctcaagattatggttttcgttttaaactgatcagaggtagtctctgtcttgcttcctaggttgtatttagtataggatccaaataca

SEQ ID NO: 1521 - DNA, 544 bp, Arabidopsis thaliana
  Intron number 3 from transcript AT3G22290.1 (locus AT3G222 90) derived from phytozome v7.0 (chr-ID Chr3; pos 7882315 to 7882858)
tgagttattatcttaacacacttacagtgcaccaggtatgtgtttagttcgagcgaaatctggtgcttttctgtttgttcctctgactctagccttcaaactgctaggaatagtcctatacattcaagttaaacatcttcggtttcatgtgtcttatgaaatccgtagatggatcatgtgaattagtattcttccatctgtcatcgttgagattcattgatgccactttgtgtatgattagttaagattacgtgaaagtatgtcattgtctcattaacctagttatcgtagcgaactatgcatttcttctataggtaacttaacttgattgaggtatgcaaaataattagaatgtcatactcaaagttttgtgattcatatcatttgggaaatagggaattgaagtctctctgttgagttaacttcattgataccctagtttttctatgtcaatatgactgactcgtaggtttttttttttctcattttgtttactataaattatcgtaatcaaattggaatttgtatcattttttttttgtag

SEQ ID NO: 1522 - DNA, 507 bp, Arabidopsis thaliana
  Intron number 1 from transcript AT3G22810.1 (locus AT3G228 10) derived from phytozome v7.0 (chr-ID Chr3; pos 8068883 to 8069389)
gatcgtatcttatctcagtctgtaagtgtttcataacgctttcctaaaaaacagagcatttgcagacaaaaaaattctgttctgttctgtctcaattctcttaatttcgtcaatttgattctatgtttactcaattctatcgatgggtcattacaatttcatgagttaagcacgattttggtctaaagatcacgtttttttttttttatctttcgcaattctcatgaatcatgaattcttcagtgggttcaacgaagttgaatttttcatgcgcaatgatttgtaatcatatatatcatccttaataaaatcgatatgattttctaaaacactcacctttcatgggaccctataacataatcacaaaaaaagtttggagttttcttcaagtcaaaaagctaacaatttcactgttctttctttgtcttctttcttaattcttttgccataactttaaattatgttattgcagcaggaagtgtcgccacgaacatctggtcggctttc

SEQ ID NO: 1523 - DNA, 324 bp, Arabidopsis thaliana
  Intron number 1 from transcript AT3G22890.1 (locus AT3G228 90) derived from phytozome v7.0 (chr-ID Chr3; pos 8113312 to 8113635)
gtaaccccgtcgctatcctcagcgagtaagtccttcttcaacatactcagattcaaattcagatcatagattgttggagaagacgaaaactgagatttgaatttgattttgaacttatctctctttgagattagttaaatacagtataatctcgataaagtaatactcgataaattaataactatgtattcacgattagacttagactagatctgattaatcttgagattagaatttggctatatgtgtaattggttactgaaatctgtttgtttttatgtttgatcagtattgagatttataagcatccaaaggaagaaagga

SEQ ID NO: 1524 - DNA, 410 bp, Arabidopsis thaliana
  Intron number 1 from transcript AT3G22900.1 (locus AT3G229 00) derived from phytozome v7.0 (chr-ID Chr3; pos 8115235 to 8115644)
gttcgttccattagagcttcagatttcgtcgtttggtaatttcaagttagagctacttaatcttttgatctgtcaaaccaatttctcagataaattcactctagggtttgtgaagaacgatgatatgatcacatttcacaatgcaaacggtgctaagcttatagtaaattaatggtggcttgatgcttaattgaaaagtcggaaacttttttattcttctttattgtttgagattcatttcaatggttgacatgtatgccaagtgtttgttaaaatgtctaaaagaaaacttcaagttgatcactttggtaaaattggttagcttgtttctgtagaatgcataatctttagtgaaaatgtgattgactacttctgattctttgaaatgtcactgtttcaggctgaagaaa

SEQ ID NO: 1525 - DNA, 969 bp, Arabidopsis thaliana
  Intron number 2 from transcript AT3G22930.1 (locus AT3G229 30) derived from phytozome v7.0 (chr-ID Chr3; pos 8124417 to 8125385 reverse strand)
gttacatctctgccagtgaggtaagcaaataatttactctttcttctcttaattctaattcatactaatactcctttaattaatgattggaagcataaaaaggagtatgttacttatgtgttaactgattgtagtattattttgtctagtttcgttacatgaaccaatttttcaaaaaacaaatagtattaattttttattttacttgagttgagtagaacacaagctcggaatttagatttatgtattttcttatttttatcaacaattgtgcatttagttagaaaatgacaacaaattgatagctaaatcaaggttagaatcttttgaattaatgaaaacatcagatcacaagtctagacgatatttcgagttttacaagagatcctttatgtgtcttattcataacttggagcagaaaatgacaacaagatatggctaattatgtttttcttaattaattgaaaagtgtcttgtgtcgtaaaaagctaaattgtttgaggcttcgagctagctggcattatgactttttggagataacgaggtcaaaagaaatatttaaaaatattgataacatttagtaaaatgtgtttatgattctattggtttattgggcagagcatatgtctcacttaagcgtaaataatatgtttatactttcacacccagtttcttcttcttaatcatgcattttcgttcgaatatatagttcaacatttttgctcttggaatataagaactcaacaaagactagtattcatctattacatttatttttacaatttagttagagttgctcttttttccctatctttttgtttctgaatttcatagatttatttatctacaaaaactattcgacggacgatatcttatgcattggccatgatccatgcttaacaataaacatcattagtagatagtaattctataatctttgtaattttgatatataattacagttgaggc

SEQ ID NO: 1526 - DNA, 843 bp, Arabidopsis thaliana
  Intron number 1 from transcript AT3G23090.1 (locus AT3G230 90) derived from phytozome v7.0 (chr-ID Chr3; pos 8216138 to 8216980 reverse strand)
ggtaagcaaattgtaatcttctacttcgatatcctctatgtttgatcatctttttgcttcttcgaaattttatttgagatttcaacgttttgtttattgcgattgatgatcatagttcatagtaggtgagatatttttgagctgcatgttcatttttgttaaatgcaagaagcatctgtggttgaacaactaaaatttgagttttcttatatcttaaatttgtttatcatgttcttgttttgcttaattgtgtatattgaggaaaatattaacaaatgaaagtcttaaagtatttatgttggtccaaattcatgatgatttatgcgtttaacaaagtgtcttttcttcgttgattcttgactatgcaaaaaaagatttttcttttggttttgtctaatgcaaaaagatttggtcgtgtgtacagtttcatttatctttttagagaaattgatagttgattattattatatttgtatgtttgattatgtttagaatatactatattattttttcctttaaacaagctgtttttgtctttgatgtccctacatttggttagcctaatggttttaagataataatttagatggttagttgaattcttggtcatcatttgtaactaagtatactttagttattatactaataaggaacttgagttgtggttataaggaggcatagtatagtttctctgttgagtatacccaatatatcataatattgaatcgtgtcgtaaacgtgcatgcaaagtaagttgtcttggtttcacggattttgtgtaatatgatcaatattagactttcttttttgactttggtgattggtgttgtgacagatatctgt

SEQ ID NO: 1527 - DNA, 840 bp, Arabidopsis thaliana
  Intron number 2 from transcript AT3G23530.1 (locus AT3G235 30) derived from phytozome v7.0 (chr-ID Chr3; pos 8437637 to 8438476)
gtctttaatcgtgtacgtattcctttcactttcgctcatttttctttttcattgaaataaatagcttataataagttaatacatttctggaattttctttttttccgtgaaaaaatgtgatgataattgaagctttttgcctttatatgtctactggtccacaaatggaccatgccttgtgttgtgttttggtttcaactttcaatgtagattataagctttttttatttgttgccaaacttatgttttactttgctttctagaatttttggatacacagaacttggattatttttttattaatctgtccaaatctagctattggaattcttttcctttgacctatgagttttagtttggtgtttttaattaagtcaaactttatttttgattttcgaaataactgttgtcgtacgatcagaccctacatggtattcaaatagagaccaactatgaattttgactgatatgatgtttatttatcgttcttgtactactgtgaaattatgattcgttttatatatgacataaaaatgatagaacaactcattatcatcttgtgactattcaaactttcaaaatatatttttatctattcgtagcagtttcattaacaaactatttccagttcattagtaaaattttatggtaaagtagttttatgaattgttggattgtgcacaaatgatttatattacacaaatattagtcttaaaatgttatgagaatcaatgtaagaaacatactcaaaaacttcatattacagattgcttatgtatagttagttctagcttgaccttttggatacgataaataatttgataggttacatatccaaac

SEQ ID NO: 1528 - DNA, 599 bp, Arabidopsis thaliana
  Intron number 2 from transcript AT3G23955.1 (locus AT3G239 55) derived from phytozome v7.0 (chr-ID Chr3; pos 8656203 to 8656801 reverse strand)
ccactaagcctttacgtttgtgagacattggtatctctcaaactctataggctgaacttggttgatcctgagtttgtttcattaccttgtctaaagatcttgctgttggatatgggcttcgccccaccaacatgattaaaggcccaacatatcacgactagcaacgttggacgagagaagagaggatcggcccgtctgaagaagtaatggcccagcaccaaacgaagcccaccttcagggagttattgatcaggaaagagtcccacatcgggaagaaaactgtactatgtactgtccttgcagtactataaatacggacatgagaatgtacctgaaatctgcagagaaaagcaatagaaacttctcattcgtattcagaaacataagtccaactttgacttgtgaagttcatattttcgttgtaccaccttaatcgaggctcggctgtagagataatcctgtaaacagccggacatcgagttatattaataaagatcttcctttaggctcatttttcccttctttaatttggaggttcgattttgtacaccaacaacttttgagagacttgtctcgtcctgccctgtcctggaggagtt

SEQ ID NO: 1529 - DNA, 562 bp, Arabidopsis thaliana
  Intron number 2 from transcript AT3G24503.1 (locus AT3G245 03) derived from phytozome v7.0 (chr-ID Chr3; pos 8921694 to 8922255 reverse strand)
accggcttcgtacgtttcttcttcaactcatgtttttttttattgcacaactactcatttttttcttctttaaattattggtgattttaattttattattgttgattgatgtggtcccgtggacatagtggatcattaaatgtttagggtcttgttctgagtgaatactctttatttgatttgctacgcaattggtaactgtcgcagcgtcgtgttattaaacttatagaaatggaacgagagaaagttgacttattttgtggtttgatgtcactttcatgtagtttagaaaaacattttgcccatattagtataacatatcttttacttgtacttaagtttcacattacttatttataatcaaataaaagttttataggattgttttgtaactcttgtatgtttcaaatttagattggactattactctctttttttatttatgtgactattcctcttctactttttgtgatatttgtatgattaatcttctcacttaacaagtttggtggatgtgatgtgatcaggagagggcaaagcttatcaacaaattcgcagactt

SEQ ID NO: 1530 - DNA, 584 bp, Arabidopsis thaliana
  Intron number 1 from transcript AT3G24503.1 (locus AT3G245 03) derived from phytozome v7.0 (chr-ID Chr3; pos 8922355 to 8922938 reverse strand)
ctgcttcaggttcttttcttgtttttacttcacttctttactccttaatttcacaatttcaaacgttgactttaacaccaaaaaaaagatccttaacgattttggttctagttctcgacataatttcctcaaatcctattctctaaacccatatatttatatcaatagccaagaacacatttggcaagttttttttttttttttttgtgtgaatagtcgatggatgagtattgagtggtccaaaaaatcaaaattaataaacaaaaatttagcttggtatgaaaataaatgaatatccggagtacagaaacatgttccactataaaacacatgaatttgttggtctaccctgagatttttttcttctcaactacaaaattcataattttcttctaattttctttcctcttttaagaagcttgaatgataaagctaatgttttgtacttacctatacaagaaggactcatgatttgaacattgaaccaaatggtttgatttgacatatattgataacttagttttggtttatttgggctaaaaattaaagggaagacgtttgagacgatagaccctaggaacggt

SEQ ID NO: 1531 - DNA, 1047 bp, Arabidopsis thaliana
  Intron number 1 from transcript AT3G24570.1 (locus AT3G245 70) derived from phytozome v7.0 (chr-ID Chr3; pos 8967366 to 8968412 reverse strand)
attccactgcgaaacgtcgtcttcttcgtctcaccgttagtcattttccgatctccttctctctctctcaccttcgattgaagtttcaaattggagtttctctccgattcgtgcggattgatgaaattagttttaggtttttgaatttgcatctatgtatctctgggtttcgtgatatatctgcgtcaattggttcttgtgcatcagtatattcgcgacatttcagtgaatgtggtaatgcttcatcaatgtgttgatttatgtagttcttccttagaccttgatgctgtttctggagtttttctttgatacttggaatattttcccgttgttctcaccttcttgctgctaaatctttcaaggatttgagttcgtcttctccgtttacagttttctgtgatttcttgttagcttatggtctctattagatagatactggaactttaggttgtgttgcctaagttgtaattgagcaatagcactcggattcttttctaggctctctctatggctgtgtgaaatttcttgtagtataacgtccatttacttgtttgctgagattccatgatttcctaatggctattttttccaacaatcgaagacattttaatgcttaagccagaactgtgggctactacagcttcagagttcttttcaaagtttgaacagttcagaagagagcttatatggtatggtgataccaatacgtaaaagatactaatggagacaatgtgttttgtgactctctatgttgttggtgtggtattttcatgttaacattgcaatataaatcgccctttggtccattggtgatacatgttcatgccgttatggattagcagctctagtctactgcttaccttttatgaaattatgcgatacttctttacttataacatcttctgctgtgagacaatccttaaaattcatttgcctttagaggtcatggtatattgtttctgagtttaggctatatattgagattttattgacttaccttggctcaagcactaaaaccatgttcaatataacaggaaacaaataaag

SEQ ID NO: 1532 - DNA, 673 bp, Arabidopsis thaliana
  Intron number 1 from transcript AT3G26440.2 (locus AT3G264 40) derived from phytozome v7.0 (chr-ID Chr3; pos 9676707 to 9677379)
aattttaaagattttgttttctatattctcttctggtaatctttttgtttgtttcttttttttgtcatccatatttgatctttctttgttgctgattatcaacttttcttttactagctgatttttcctttttcaaaactaagcaagtttgtgttcacgtcttcatcaatgacataattgcccttagtttattccacatagttgtcatacaaattactttcgtttctatgtgttttatattcacaatcatagatgaagttcataacttagatgttaaagaaaaaaacagagttcataacttgtgattttgtgctttgtcttatttgttagattacgggtacgtaatttcttacgaaagaaggctctctttaataagataaattcatttttctctcatcttttgagttaatacttcttgacctgatttgagtttggtcgttaggtttttcttgatttcggttcaagttttctcttagctctgaattatatgtaccgtgtaagaaagtgaattatatgtaccgtgtaagaaagtgaaattttcggttcaagaagtgaaattttctttaagttgtgttttttttttcacttatgaagtcatatgataatttgatatgaatcttaaaaagcttttttttttatgacatgatgcagatagtgaagtctcggagactga

SEQ ID NO: 1533 - DNA, 829 bp, Arabidopsis thaliana
  Intron number 1 from transcript AT3G27160.1 (locus AT3G271 60) derived from phytozome v7.0 (chr-ID Chr3; pos 10017940 to 10018768)
ctgctaagcgtaataagaaaaggtaatatatctgtgttgaaaccgagattgggtattgatgattgaactgtgaagattttatgcttagttcgtgaaaattatcactgcctcttaggtttagagggttgaatggtctcaaattttgagtgtggttcatgttacttcaatttggtgattgttttgttctggttgatacatatattgaaacagagattgggtattgatgattaaactgtgaagatttgatgcttagttcttgaaaaatatcactgtctcttaggtttagagagtaaagattttgagtgtggttcatgtttcttcaatttggtgattgttttgttatatctgcttgtgcagtgattgattcatttgttgaaacaaagattggttattgatgatggagttcaatgatagcttgtgatggtcttgatacgtagttattgaacacctattctgtctcttagctttagaggattgaaatagagacgttttagtcacaaatttgtatgatatgtttgttctgtgagaattcttatgctatatctgttttccagtgattgattcatatgttgaaacagattaggtattgatgattaacttccaatgatagtccttttggtaacttggttattgaaaaccttcactgtctttattggattcatctgtgaagattttgatacttggttattgaaaaccttcactgtctttattggatttagaggatggaaatagtgaatagatgagtctcagatttgtatgtggtttcatgtttcttggttgggttttattttcaggcgtcctcaagcaaggtttactcaagaaacaagag

SEQ ID NO: 1534 - DNA, 849 bp, Arabidopsis thaliana
  Intron number 2 from transcript AT3G27210.1 (locus AT3G272 10) derived from phytozome v7.0 (chr-ID Chr3; pos 10046009 to 10046857 reverse strand)
tcggtggtctttctcttcatccaagaaaagtttcggtatttattccaaaacaaaaataatctcttttttgaatttaattcttgatttgggttcttttactgtttcacctcttttggattattggtcccttttaatttacatactctcttattgcataaatattcataaaacaattcctgatttttttttgtgtctatgaatattggcatgtggagattcggtgaccggcaaaaatgttattccatataaatggttcttctacatcaatttgatttgattcctgttaacgtagataggttatttttttcttatctgataagatcatatatcaaatttgatttcttccattaatagatttttatgccgtaaaagacaaaaactttcccgtgatcatagagatttttctcacagcagaaagaaaaaagtaaaagtgagctattttggtgaattatgatttgaaaagttgtctactttaactgtgacccagatctgacaaaaatatgaaaaagtgttgctaatcagtcttcttgatctgggttccattgtttttcacgtattaatttgaagggtttaggcaagaattcgaattttttacccgggaactttacagaattgaatttaaatctctttttactcattgctttgtcatttcctcggattcaatctcctctgttttttcgaggtctagtcagttttggaccttttgagtctattctatctaatgatggtgactaaatcaaaaggtttagtatatcattgtgtgttttgtgtgtgtgtttatctatcactcttggtctaatgttttgcaatgcatattctaatttgtttccactgtcacaggaagcaaag

SEQ ID NO: 1535 - DNA, 495 bp, Arabidopsis thaliana
  Intron number 1 from transcript AT3G27260.2 (locus AT3G272 60) derived from phytozome v7.0 (chr-ID Chr3; pos 10067976 to 10068470)
aatttgtgtggattcagctgttggagattcaagtaagattcgatctatttttgatttgtgggtttttcttaattcgaatgattagaaaaaatagagattcatttgaatttggcatcaagctagggtttgagttttggggtccaaaaacgaaattggacagctaaaggtttaatttttacggtcatatctctcacgtttttgagaatcggaaattcttatttcacattgtttagatctggggttcttgtgtcacaacaagtttcttggcccaatgttatctatcgaaatagggaaaagaatcgtcttagtggttttgaatgggactgtattagtttttgttgatttaagtgaaattatatatgattcaggtgtcttgcaaatgagttgtagaagctagtgagaattatatatattgtggtaagtcttgccaaaacaatggttgaaagtgctgcgttcccaggagggtattatcggaatacttttgaagcgcctgag

SEQ ID NO: 1536 - DNA, 379 bp, Arabidopsis thaliana
  Intron number 1 from transcript AT3G27260.1 (locus AT3G272 60) derived from phytozome v7.0 (chr-ID Chr3; pos 10067976 to 10068354)
aatttgtgtggattcagctgttggagattcaagtaagattcgatctatttttgatttgtgggtttttcttaattcgaatgattagaaaaaatagagattcatttgaatttggcatcaagctagggtttgagttttggggtccaaaaacgaaattggacagctaaaggtttaatttttacggtcatatctctcacgtttttgagaatcggaaattcttatttcacattgtttagatctggggttcttgtgtcacaacaagtttcttggcccaatgttatctatcgaaatagggaaaagaatcgtcttagtggttttgaatgggactgtattagtttttgttgatttaagtgaaattatatatgattcaggtgtcttgcaa

SEQ ID NO: 1537 - DNA, 727 bp, Arabidopsis thaliana
  Intron number 1 from transcript AT3G27325.2 (locus AT3G273 25) derived from phytozome v7.0 (chr-ID Chr3; pos 10095179 to 10095905)
attccgggacatcgcctagttcttcatttaaaacggttagtttatcagtcattcaataatctacatcttttgaatcacaagcttcacggattctgagcaaaagtttaaaaaaaactcatcgatattaccaaattaagctcttagcttcgcattaatggcgagatccaaaaactataaattgtttcctttttccgccatatgtgttatttatttattgctcttccctttctgctaaattactgttactattttaagcttcttccatttttttttttgttcattgactagtttcatttgaatctcatttttttttctctgcgttatttcttgatttgtattgttttagttgtttcttctgtgtagtgattttagatctaagctaagtaatgtatagtggaaaagtttggaaacttctcacagttggactcaatattactgtttatagttcttcatttgtttgaatctattggatactaaaaaaagtttatgtactcttgttttaggagctatatgctttgtttgattctctgttttttcactttcctcttcagcctatgtttaccaaaaagttataatcatgtactagtagttgcttttatgttccataaaaagaaaagaaaatgcaacattcaagctccgagctagtataatctgccaccaaagctctctctcttttacctctgtgcttccagatctatcctcactttcttcaaaatacttcctcata

SEQ ID NO: 1538 - DNA, 1045 bp, Arabidopsis thaliana
  Intron number 1 from transcript AT3G27325.1 (locus AT3G273 25) derived from phytozome v7.0 (chr-ID Chr3; pos 10095179 to 10096223)
attccgggacatcgcctagttcttcatttaaaacggttagtttatcagtcattcaataatctacatcttttgaatcacaagcttcacggattctgagcaaaagtttaaaaaaaactcatcgatattaccaaattaagctcttagcttcgcattaatggcgagatccaaaaactataaattgtttcctttttccgccatatgtgttatttatttattgctcttccctttctgctaaattactgttactattttaagcttcttccatttttttttttgttcattgactagtttcatttgaatctcatttttttttctctgcgttatttcttgatttgtattgttttagttgtttcttctgtgtagtgattttagatctaagctaagtaatgtatagtggaaaagtttggaaacttctcacagttggactcaatattactgtttatagttcttcatttgtttgaatctattggatactaaaaaaagtttatgtactcttgttttaggagctatatgctttgtttgattctctgttttttcactttcctcttcagcctatgtttaccaaaaagttataatcatgtactagtagttgcttttatgttccataaaaagaaaagaaaatgcaacattcaagctccgagctagtataatctgccaccaaagctctctctcttttacctctgtgcttccagatctatcctcactttcttcaaaatacttcctcatagatcaaggaaacaagagcactttcactctagtactcttgaaagcttgaaaatggttagatctagcaagttttcacaggaagcgacgctaaagagaggagagagcagagaaaaccctactgatttgagatctaagctaactaatgtaactataacacttgtgtgattcaatttgatacgaaaaagttttatgtattcttgttttaggagctatatatatgtcttatttttaattctctgtttttattatggaggattttggtgacactggtctgttaattgaatatgagatgatttttatgcagatatatactattgaa

SEQ ID NO: 1539 - DNA, 806 bp, Arabidopsis thaliana
  Intron number 2 from transcript AT3G27340.3 (locus AT3G273 40) derived from phytozome v7.0 (chr-ID Chr3; pos 10121567 to 10122372)
gaaaagtcagatcaatcggtggtgaaaaggtaattttgagatggttcaaagccacatgattgttttgtgaaggttatagagttttgatatcttgtgttagctcatcttttagacattcttaattgcaatattgtgatagctacctatgagactagattaagcattggatgctgcttttgtttatttttggcttattgtttttggtccagctaaaattgtgaccactagcttgttgttcttactccaacttatgcttggttctagatggattctggttaaaggaaattctagtttggtggctctttgacttttttataatccctgtgaaattattgacaactaggttgttgttcttgtcacgacatgtacttaaaaacttgaagacgaggtttatgtagattaggctacggttaaccaatacgccgtgtttttgtttctctaccttatgactactagttttctgttctagtggctgatcattcatagatccttgatgggttttaacaaagatgcaatctttttaagtataaccacttcaatagtatagttacactggatggagatatggtgttgtttctttgccacttttgcttagttctgttaggattttgttcttttaagtatcttagctatgagtcttgttattgttctttgtcttatggttacgagtcattaaactactcacatgtagattctatacagtttcgaacaaaaatgcattcacttagctttactctatgcgcaatgagtctatctttgggctaaacaattttgtttattcaatcaggtgatatctggaaggcggt

SEQ ID NO: 1540 - DNA, 585 bp, Arabidopsis thaliana
  Intron number 2 from transcript AT3G27390.1 (locus AT3G273 90) derived from phytozome v7.0 (chr-ID Chr3; pos 10135468 to 10136052 reverse strand)
tttcattggattgctatttctgggtttcatcaaaggtatgaactttagagtgaatcttttacttcaatttataacatttgtttctacttttggtactgatggtcctcttttaagaaacttttggttgttttatttggtgtcactcactaaaaggtctaaacttttgatgaatttctacttctttaagcccaatttttcagtttattcagacagatttcttttggtaagaacataactcaccaggatgttgacttcttgtttagatggatgttgacttttagttggttcctttattgttctccctaatgacttttctttccttgctcaggcctctttcaattacattaatatgtggaaactgaagtcaaactcatgcattttgattttgtttagggtccattagggttcactaaatatagtaaaaacgtttggaaaagtctaagggtttaagggttcatcaatactgtctagtgttttcttatcactgaaactcatgaacatgttttttaaagattcactggaatttgttttctgatctgaaaggctctttctttgttgcgtaggtattgttttgtgcccactcgt

SEQ ID NO: 1541 - DNA, 334 bp, Arabidopsis thaliana
  Intron number 1 from transcript AT3G27390.1 (locus AT3G273 90) derived from phytozome v7.0 (chr-ID Chr3; pos 10136164 to 10136497 reverse strand)
ttggttcttcttcttcttcttcttcggacaaaaaggtcagtttttgctttttggttctcgtgctttgattttttttatttgtttattgagaagagaaacagtttcttaaccgtaaatctctctactcaaatctgtacaacccatgtgaggacttttaaagccaagatttcaacttgtttgtttttagtaattttaaaagacttgtgtgtttgcggagagcttcaaagttttcgtaattaagaattaaattccagctcttctttacttatttttgaatttactctgtttcgaatctttatatgtttcaggaagaaggtgttgactgattcttaag

SEQ ID NO: 1542 - DNA, 517 bp, Arabidopsis thaliana
  Intron number 2 from transcript AT3G27890.1 (locus AT3G278 90) derived from phytozome v7.0 (chr-ID Chr3; pos 10351097 to 10351613 reverse strand)
gtttgcttctcctgagtataacttctctgtttcaggtttgtgtaataaagattcttcttattgcaaagttctttagtgagtttcacttttattgtttggtcttaagaggtttcttgatttgctacaagaacatatgtcttaagatgtctgaggattatgattttggtttatcaagtatcattagttggatttgatgatcattatcaaaaccaagctgattataaccattgattttgtggagagctgtgacagttcttatgttaattcaaatttcttatcgattttatggacaccattgattagggttatttagtatgactcatgggaccggaccagcttaaggctcaaactgaaacactctcacatgttctgttgcttggattttatgctttttgactgtttgttggcttttgaaatttggttttgcggcaagttttgtatacttttgcttaatgttggaaaacaagaatgtgttgttggttgaccttacatgttattgtaccagctccacttaaga

SEQ ID NO: 1543 - DNA, 371 bp, Arabidopsis thaliana
  Intron number 1 from transcript AT3G28910.1 (locus AT3G289 10) derived from phytozome v7.0 (chr-ID Chr3; pos 10911541 to 10911911)
tcctggtaattggagagctgttcctaccaatactggtatgtataatcttcattcatcatctctcctctctacctctctatagatttgtatgtagatattatttggatttaatctatgagagtgagagatagacaaggaatcaaattggtttggattgaaatttgtgttctccaaattggttttgatcttcatttggttcttctttaggtctttaagattgtggaatcagcttaatgaaaacatatgtagaaattagggttttgtttattgaccatgaaattaagatctaatgcatgagatcttgttatttatatattttctcatcggttctcaatatttgttcgttcttataaattttcagggctgcttag

SEQ ID NO: 1544 - DNA, 390 bp, Arabidopsis thaliana
  Intron number 1 from transcript AT3G30390.2 (locus AT3G303 90) derived from phytozome v7.0 (chr-ID Chr3; pos 11979003 to 11979392 reverse strand)
attttaggtcttttgattcctacttgtctaatcgtgtaagttctgaatcaaaacagtcaaatttcatttcttcaatcagaatccattttctgggtcaaaccaatttcgatcaaaatcaattggttttgaatcaattttagatcttttgattcctacttgtcttaatcacttgaatccaagttttgtctctttttaaggttgtaataaaattggtttttgtaataaaatcaattgggtttggatcaattttagagctttttgattcctacttgtgtataatcttgtaatttttgaatcaaagttcaaagtctttttttcaaacagtaaaatttcgttttttaatcaatttcatcagaatccaatttctgggtcaactttcgatcaaaatca

SEQ ID NO: 1545 - DNA, 565 bp, Arabidopsis thaliana
  Intron number 1 from transcript AT3G30390.1 (locus AT3G303 90) derived from phytozome v7.0 (chr-ID Chr3; pos 11978828 to 11979392 reverse strand)
attttaggtcttttgattcctacttgtctaatcgtgtaagttctgaatcaaaacagtcaaatttcatttcttcaatcagaatccattttctgggtcaaaccaatttcgatcaaaatcaattggttttgaatcaattttagatcttttgattcctacttgtcttaatcacttgaatccaagttttgtctctttttaaggttgtaataaaattggtttttgtaataaaatcaattgggtttggatcaattttagagctttttgattcctacttgtgtataatcttgtaatttttgaatcaaagttcaaagtctttttttcaaacagtaaaatttcgttttttaatcaatttcatcagaatccaatttctgggtcaactttcgatcaaaatcaactgggcttgaatcaattttaggtttttcgattcctacttgtctaatcagttgaatcaaagttcgtctcttttaaggttcgttgcttcaataatacgtataaagatttatttttgtacgatgtcttatgttatttttgttctctaaatgaattttgacagcttgcaatttcaaag

SEQ ID NO: 1546 - DNA, 643 bp, Arabidopsis thaliana
  Intron number 2 from transcript AT3G42150.1 (locus AT3G421 50) derived from phytozome v7.0 (chr-ID Chr3; pos 14310605 to 14311247)
cactgtttccaagttagtgtctttgtttgctaatcattagagagagtaaggaacatatattcagtctttgtttcttaactgtgatattgaaatttgtgacttaggaatcatacaaagttttatcagcgagtcattagttattagccactgttacttgttttcacttgttacagttctcaccattatacttaatcactattcactacattgcttttgaattggaaaaagaagtaaccttagcatctaacgggtgtattggtgtctagtatcttatggtgtataacagtgtggttgttgttctaagttgaagcattctaaagtgtagaaaatttcaaattcttctggtgtataaagtgagcgtttcttaactgtgatctaggaatcatatttttgtcattgagtcatcagttacatagcccactcttagtcgttttcacttggtcatgccaccatgcttaaccactacattgctttgatttgctaaaagatgtaaccttagcatccaacattggtatctagtatcttctaatgtaaaaacacagtgtgattatcgttctcgaagttggaacatcctaaagtctaaatatatctatcttttttgggtgcagtgcattgggaacttgggtattctcagtcctaggcg

SEQ ID NO: 1547 - DNA, 704 bp, Arabidopsis thaliana
  Intron number 1 from transcript AT3G42170.1 (locus AT3G421 70) derived from phytozome v7.0 (chr-ID Chr3; pos 14321134 to 14321837)
cttcacaacgcagagcttcaatttctccctcgcaggtatttttcacgaaaccctaaactctggatctaatttcgcctggatctaattggggattttagagttttgcctcgattgtttgttaaattgttagcttttggtctactctgcgaaaatacgtttggttcatttactttatgcaattaccatactggatctgctaattctgaaataattcaactcataggacaattttactgggttgataaagttcttaaggtcgtttaggagccaagttcaaatgttttggtttaactcatggaggcaaattaattttgaaaaaaaaacttgaaattgttgtttgtgtttgtgtgtgtgtgtgatttaaagaaaaaagcccgatcttataaacttctgtgttttgtttgaatcagtttcgttatgttgaagactttataatctgggctctagtttttgatttgcagcccatgtttgatcgactcttaggaccttttaaaacttcagatctgttttttttctctctctctttttaagttgttggatctacgcgatgttgtcaaataccgattttgcccttataccaatcttattatttaccgttggtcatggccttttggaataggcccaatgtttaatcattgttattattatagtgggctttgtttgggtaacagttattttcctttttatgttatgttgcaaagaag

SEQ ID NO: 1548 - DNA, 805 bp, Arabidopsis thaliana
  Intron number 1 from transcript AT3G42870.1 (locus AT3G428 70) derived from phytozome v7.0 (chr-ID Chr3; pos 14949498 to 14950302)
gcatttgttgcaattctaaggcagtgaatggagactatgtcttcgcagattttgaagtaaaagcgtagaaaaccgtgatttgtcaccaattagtgaaactagaaaataaattacgtttttcaaaaaagaaaaaaatagagcaactgtggatttcaaagtataataatacaggaccacacttctaaattgtcatactccttttatgtagtggtccaatgtaaaacgcatggtacaatattattttcttttgtaatttctttctttattaattattccttatatatatatattgttaaatgtgtcaaacacaattcacatacacaaacacaaaaattcattctctctcgtcatactctctctctttttctactttgatattaaagaaaattgcaaacccccattgaaggtacttattggtgtataattttgtttataaaattttttaaccacacaacactatcaacttagaacaagattttatttaaataaattggataaagaattcatattccggttatgtgaaagcatgtgtaatccattgaacatcatgcttttactttttttttaatatacgtgtatgttgcataataattatttttaatttctttttgtaatgaatttgttactacaaaattatttagtatcaaagttagattaattaaaagattgtttttcacattcttatttggtgtcttataaacataaccattattatctcttatttatatattaatagtttaattaaacacacgagcatgaaattgatgaagaaagtgaagattactcagacactgatagtggtaac

SEQ ID NO: 1549 - DNA, 781 bp, Arabidopsis thaliana
  Intron number 1 from transcript AT3G43520.1 (locus AT3G435 20) derived from phytozome v7.0 (chr-ID Chr3; pos 15406501 to 15407281)
gaagttgactcttggttacgcttttctcgtcggaggtgagattcattgtaactctagggtttatacttgattcttcattgtgaaattgatttagaacttcggtataaagctaagattatccagtttcttgtgtagtaggtgagattcaattttgtgaatgtgatgaacttctagggtttagggtttacctgcttcttcatttatactttgaaattttgaatttgaagatctaacgtgatgtgttagggatagcaaaatcatcacagttctttatcgtggatgagaatttgatcagtgttcttgaactctaatgttcttggggaatctatattttggatgattttatcttggggggttttaagaattggattagggattagaagcacactcattagtatttgtgagaagaaaaaggttcatagagggttaattcctatttgcatatttcctagagatggagatgttacttgaattctgcaaaacttggtttctggatctgactgtcatagctttaggttaaacatggaggttccttgttcttgttgatgcctttaagattctttttatgagttgatgttactaatgtgattgagatcggagagtccaggttagttcagtctgtatatgtgtatgcttattaggtgaagttgagttctcattttattaatggactcacagatatattgaaacgtatcgaagaacagtgatgttatgcttgcctataaagcgatactcaaatgctcatgaactgttagatggttttgatgtagttggtgggctg

SEQ ID NO: 1550 - DNA, 527 bp, Arabidopsis thaliana
  Intron number 1 from transcript AT3G44100.1 (locus AT3G441 00) derived from phytozome v7.0 (chr-ID Chr3; pos 15866691 to 15867217 reverse strand)
acctgctttgcacgccacttctttcacctactgcggtttgttccttactactactctcttcttcttcctctctcagattaggggtgttttggatcgtacctagaaaatatccagtattttctatgtttaaaacacttcactttccataaagattgaatctttattgtgattttggttcagattaatatttagagcatggtttgatttaagggtgaaatttctcaaaaagtcaattcttgactatgttattacagatttagcaataacttcagaagaagagagaaactttcagtttaatagtgttgttctatgtttaaactgcattaagtttttagtttgcagaagaaatttcgattatccatgcttgtttattcttctttgtcgattggcatgatcctatctatgtcttttgtttgcttgtcatgaactggatttttccttggtattgtttagtctgaatcttatttgtaaactgttgctgactctttgtagataagaggctcgatcccgttaaggtcacgggtgtg

SEQ ID NO: 1551 - DNA, 603 bp, Arabidopsis thaliana
  Intron number 2 from transcript AT3G44300.1 (locus AT3G443 00) derived from phytozome v7.0 (chr-ID Chr3; pos 15983690 to 15984292)
cttctgctattaaagttcctggtaaatgctattctgttgacttttttctcttattgtttttttggacaactttaatctttgataaacgtcaaaacaattgtgcttgattatctgaatatccatgtacaccacctgatctcggatcccaatctctgatccaatcatatcgggtctgaaaaattgagtatccaaatcagttttgtgtaaactaggtttggacactgatccgtagtcatatgccctatatctgatctttgcaacaattcactatgtatatgcgttattaccaaaccgaaagatacccgtttaaaactatctctacatatttagtatttacataattacatataatcttatttaagagaaaacaattatatttgaagttagaaatcatggtctttgaaatatgatgttagctttgaatattataatttttggttaaatattctgaaaagaatatgactttttaagcattaaaatgttataaaagtatgaatactgactaaaacgtaacttataaagtattattttgtttatatggtactttttttgtgtgatgaacctgtaggccctgaagtagaaaagttggcggagttggccggg

SEQ ID NO: 1552 - DNA, 437 bp, Arabidopsis thaliana
  Intron number 1 from transcript AT3G44620.2 (locus AT3G446 20) derived from phytozome v7.0 (chr-ID Chr3; pos 16194189 to 16194625)
acattgattccgctggaacaattgattatcacgaggtatgataattagttccaaaacaattaatctaattttagggtttatgagagatgcttgattcatggttgatttgaaatattggtgaatgatggttttgtatgtagaaaggtttggttttggttttaggtttttttggtggatgtaatttggtaggaatacagagttatagagactttgaaattcatgtttctgaatcaattttgatgtgaaattgctcttcttactagggaagagcaaaaacagtaatctatttttatggtgattgatgctttgattggaacaattaggcaatggtgctttcagattttggtggatgtaatgtggttgtaaattaggagcagtggagactttggaatttatgtttctgatttgtgaaaatgttggttttttaaaaggggaat

SEQ ID NO: 1553 - DNA, 999 bp, Arabidopsis thaliana
  Intron number 1 from transcript AT3G45130.1 (locus AT3G451 30) derived from phytozome v7.0 (chr-ID Chr3; pos 16516370 to 16517368 reverse strand)
ctaagcatagttctgatcttctctaccgttttcaggtacattttttttttcattttccttataacgcatattggtacagcagcaactatcttaaattcagattttaaacttgataaaattttattttattttgtgcacccaaaacttgataattttattacttagttttataaatcatggctagcatatttctaactgtgaaatttagattactttttttacaacacatgatccacagttgcatgtaaaaggtcacttattaaagctgtaaaggctatagaacatttcaaaatttgagacgattatattttgatatgtcttagttttttttaagccagctaattttgggagtgactagaatattgactttaaaaggttttgaagactttaagaaacaaaaaaattctttaaaatgatattttatcccatcatgcattagtgattttaaagtcatataagtctgcataaaaacactcacatccttattttgttctttcatgtttacaacatttctgtaaggccgagatttaacgttttttagtcaaagtcattgttctttacttcttatttgggtttcagaaaataagatccgatcgtgtcatttatgtagacatatatggacaaaacatatgataagataggatttgaaaattgtttgacaacaaaaaaatgtgaatatcacgtaattagtataattttttctatttcaaataatactttgttctttaaaatagtggttgtgattttaaacgaatttaaagatgtacgattggctatgaataaaaacaaaatgggctatgagattagcttaattaataagaacaaaaaaaaatgaacggtgacaaaaattagcttaatctccaaggctattagattattaaagtataattagagaaaattagattttaattaaaagaaagtgaaaatctttatccaatactggattgaaatataaacatgaacttgaacgtatagtgttggaaagagaaaggaaaagga

SEQ ID NO: 1554 - DNA, 1002 bp, Arabidopsis thaliana
  Intron number 1 from transcript AT3G46270.1 (locus AT3G462 70) derived from phytozome v7.0 (chr-ID Chr3; pos 17003186 to 17004187 reverse strand)
tattgttcaccttgttcaagctcaggatcaaaaaggtaaatatttttgttagatatagttgtatatccctttggcattcatgatcatcgtcttactacaatgaacataatggaatcaacccttatgggttgacgacatatgtagttgaaacttgaaagccattggtaaaagataaattctttaaaataccatacttgtaagttttgttgcaataactactactattagtttcataaaattgtgatttagaacgcaaaataatttatggttaatttcggtttagtttgattttttttacactaaccatagaaattaatttcggaagaattttaaaatgcaattaaccgatataataaccaaaatatctgattggttcggtttggttaattcgaagtggcatgcttagtttaggcttcaaggattagttttgaatcttgaaagttaaattttagttttgttgtacttttgaaacctaaaacattcaatggtattactaaaaacttatatttaagtggtattttaaaaaacaaaaacttaaatgtggtattttgagaattgtccttgctaaaatcatctaaacatcgaaaagggtgttactacaatatgtgaagaaggaaatgaatatagaccacaaaagtgtctaaaatctccttcccgctgtgtttaattgttttgtttgatcactgtagtttgatttagggatgggcagtctagttaaagattaggtttggtttcagtttagtttttttcagattttttcgataataacaaaatatccatataaaatcatttttaaatcagtttttattgttcttcttttggttgttttgttgaaacctaaactataaatatctgatatatagattattataatttttaaaaacctcccaatgttatatatatgtatccatatatcaatctaatttttaagttactgatcagtttttatttcctccactatcgttaggtataagcattgactgtggaacaacgggatcctac

SEQ ID NO: 1555 - DNA, 306 bp, Arabidopsis thaliana
  Intron number 1 from transcript AT3G46510.1 (locus AT3G465 10) derived from phytozome v7.0 (chr-ID Chr3; pos 17125999 to 17126304 reverse strand)
tcaaattttgtagccaagggagcaagatttatctggtgcgtttcttcttcgatttattagcatctatgattagatctgtgtggtcactgagaatttttgttctcgttgacgaattggtgttttcattgaatgagagagccacgtgctttgttttgctatggtagtgtttgagtgatatcaatgcttctttggtatttgattagatgttagatttggtagtggttgatgtgacttgattgatctatggaagttgttgagaatttgtgctctgatacacaagagatgttgttgttctgtgtgtaggtg

SEQ ID NO: 1556 - DNA, 712 bp, Arabidopsis thaliana
  Intron number 1 from transcript AT3G46640.2 (locus AT3G466 40) derived from phytozome v7.0 (chr-ID Chr3; pos 17184212 to 17184923)
agaattaaaaagagtctatagatggattcaatgggggaggaagagataggtgagcttgttattgctcgtggaactgataattattgtcaagtttctgtttttttaagtacagtacagttataattcttactcgatttgatcgaaattttcatcaagtttctgtcttttactataaatggtatacaataaagtcttaataatcacttgtttggtgatgttgacagagttaatataatcaactaagttgaatttgattttgagattcttgtgctatgttgaaatgttattgagaattaagtatcaaaattgctctcatgtgacttgagacttaatgtaatccagatcatgtttgattcatcttcggaattatatggtggttttgaaaaccatgtgtttaattttctcttcgggactaggtaactaacactgtgagttatgtcaaatccaagagagcatatgtgtcatgtggctcgacattttcttgtgtactctttttgcagaagtgatagtgtcatgttattttggttttggtttcctcattgggaaagtcttgtgatgttttttgatctagacaagatattacctgtgcaagcttttaggtagaatgagcagtttctcttttatgtttgggttctgcatcttttgcaggtcttgatcatatttgattgttgttacaggttcttggtgtctacaaaatttcttatcttttgcg

SEQ ID NO: 1557 - DNA, 814 bp, Arabidopsis thaliana
  Intron number 1 from transcript AT3G46640.3 (locus AT3G466 40) derived from phytozome v7.0 (chr-ID Chr3; pos 17184110 to 17184923)
gagctggtggaagtgcgtttgagtcaaatccttatatgatgcagcagaataagtttggatccatggcttcttatccttctgttggaggtggaagcgcaaatgagaattaaaaagagtctatagatggattcaatgggggaggaagagataggtgagcttgttattgctcgtggaactgataattattgtcaagtttctgtttttttaagtacagtacagttataattcttactcgatttgatcgaaattttcatcaagtttctgtcttttactataaatggtatacaataaagtcttaataatcacttgtttggtgatgttgacagagttaatataatcaactaagttgaatttgattttgagattcttgtgctatgttgaaatgttattgagaattaagtatcaaaattgctctcatgtgacttgagacttaatgtaatccagatcatgtttgattcatcttcggaattatatggtggttttgaaaaccatgtgtttaattttctcttcgggactaggtaactaacactgtgagttatgtcaaatccaagagagcatatgtgtcatgtggctcgacattttcttgtgtactctttttgcagaagtgatagtgtcatgttattttggttttggtttcctcattgggaaagtcttgtgatgttttttgatctagacaagatattacctgtgcaagcttttaggtagaatgagcagtttctcttttatgtttgggttctgcatcttttgcaggtcttgatcatatttgattgttgttacaggttcttggtgtctacaaaatttcttatcttttgcg

SEQ ID NO: 1558 - DNA, 313 bp, Arabidopsis thaliana
  Intron number 3 from transcript AT3G47040.1 (locus AT3G470 40) derived from phytozome v7.0 (chr-ID Chr3; pos 17326008 to 17326320 reverse strand)
cgtggccgtaagttccttatagcttagtcaattgaatagagcctttggtgggatatctttgagtgtttattgagaatatatacgttttatttggcatctcacccatcctaatgccaaatatgtgtgttgttgtccattaagtatgagatgtgttcaatacatgagaattttcttaatccttagacgtctatacaaggaagaattcctaacaagaaaatcaagaaaatatatatgaggaaggaattgaaatggtgaaagagatttttatttttattttttataaatctttttgataggctttgagagatccgag

SEQ ID NO: 1559 - DNA, 874 bp, Arabidopsis thaliana
  Intron number 1 from transcript AT3G47420.1 (locus AT3G474 20) derived from phytozome v7.0 (chr-ID Chr3; pos 17474219 to 17475092 reverse strand)
aatttcttttggaggaagcgttatttttgctaaaggtactaattcaacttatttttcgttttaaagtttttgttgtgttgttactgtttatctttgaagtgaacttggaatgtttctggttttgagtcaaatctttggtatcaagttatcttctattttctcagagatttttgttctgtccaatggaatattctagtaattattacagattttacgaaggaattcttcaaatcgtgatatgcgtcttcatcgttctatatctttcttcatcgtcccccgatggttcttttatattcttagcattcttcgagattcgaatcttaagttgatcctgttctgttttataatctgtatttaatataattttgaatatttcaaaggatgagttttattttcttgcatgatttcaacaaatattatcaagatgaacttggatcaggtcatgagtaaactgtttaaggatttgatgaattttcaagctctgttattttttttgtttaaagaatattccttaaatataccaatttagtggtcataactcataactcatataaaggtaaagaatatctagagtaaaaataaataaattaaggtaataaaatctgagttatttaactaatcaaaacacttcaaatagtttctcttgagagttcataaaagagacacaagtacaaaatcacgatctgtcactcattccgacacgtttctagagattcctcactagatgtaacctttatgtaacgccaagagttaaaaaagtaaaattctatatgaaatattcgaatatactcttttttgatactttttttttatctaatatttatttctccaatctttaggtcaaacaaaacattggatttcgagaactgaagaa

SEQ ID NO: 1560 - DNA, 260 bp, Arabidopsis thaliana
  Intron number 1 from transcript AT3G47550.1 (locus AT3G475 50) derived from phytozome v7.0 (chr-ID Chr3; pos 17523581 to 17523840)
tttttttctccttcgtgttacacaaccatttctaggtaatgttttgatttcgaaagagctctctttataatgattttcatttgtgattctggaaatcaaatcgttctattgaaattggggattttttttcgattagggtttgtttggttcctgttaaattatcaaacgttcctgcatttaattgatttttggtcttctaatattttggagcttcttcttgttgttacagatatcattttggtgattaagttatttaagaa

SEQ ID NO: 1561 - DNA, 480 bp, Arabidopsis thaliana
  Intron number 1 from transcript AT3G47850.1 (locus AT3G478 50) derived from phytozome v7.0 (chr-ID Chr3; pos 17655031 to 17655510 reverse strand)
cggccaaggaggaggaggtatgtttgaatttctttgatattaatctctatgtgaccttcccgatagaatttgagtactacttagctgagttaagtctagaatcgccatgctcattgagttttgtgaagtacataggaagattgggaaagattatgtcattttaggtgaatttactgaagttaagtggctgatctgttgaattgtagaataaacgttgtataagcgaagccgccatggtcacaagcagtttgattcattgatgtgtgtgctcaagtagtttaagtcacgttgatagatgttgtgaatttgtgatgcaacaagtctattgatgaaacaatcaggcaggctgcaatagagttaccaattagggaaccttgaaggcttaaatctcgtagttattttctgtgaagttgttttgtttctctatagctttgttgtttttcgtttcgtgactgtattctcttttctcgaaacagacga

SEQ ID NO: 1562 - DNA, 582 bp, Arabidopsis thaliana
  Intron number 1 from transcript AT3G47960.1 (locus AT3G479 60) derived from phytozome v7.0 (chr-ID Chr3; pos 17699986 to 17700567 reverse strand)
ccttttatcattggtaacgctcctttttacttgtttgtgtctaattcagacatcatttttttcttttggggtgctttgtcggattttagggaagtgtaacattttgtccgtgatgtttttaaatttcgtttcttttctcttctctttgacttgactctgtcaaaaatctcgaatttggagttctttctctgagatttcgaagtgaaattggttttaaaactgagatttcgttgaaacaatgaaacccagataatcttacagatctgtctaatggaaattatattttttacaattgttttcattttattttcaaagagacttttgaaatctttaacacaaaaaacagagactttaaatcatgcagttaagtttctgaaaaaagtagataagatttttgtgaatttctggataagacaaaattagtttatgggagttacaaaacagttataaagtttcatgtgaaccaaagtcagaacattggaagtccaaactttgatttgtgtgtttccttgtacattaaatgtaaaaaaaaaactgtaactgtattcttaatttcttatcattaatttgctattgtaggta

SEQ ID NO: 1563 - DNA, 814 bp, Arabidopsis thaliana
  Intron number 2 from transcript AT3G48030.1 (locus AT3G480 30) derived from phytozome v7.0 (chr-ID Chr3; pos 17726198 to 17727011 reverse strand)
accggttattactacggtgataatccgtggaagaagtgagctccaactacttgttcgttttcacataattgagatgacactcgggaaatctgcgggcaaaggtgtgtgtgctctcgctctgagtgtagaaatatgcggtcttgctaggatttagtaagggtacattacatgatttgaataatttgaagaacgaacaagtatcgttgtatcttgatcaattgattagattgatttaaggaaattctccgaaaaccatctttactctatctgtcaaaatctcattatctttctgccgacaatctctgtgttgtttatttacttacacttatgtttgagttttgacttcttgaaagatcctttgagaaacatgggacaatgcattatcacatagactctattatcaaaatatataatggcaaataagtgggagtgaagagactatgtattagaaggcaagctatgtttaatgatttcagaacatcttagtggaagacaatggtgggcctaatagtttcctaatcatattcttgtgtttttttccagcttattgtggttcttgaccttctacatgtgaaatcctaattacatttttggtctttttagtcaataatggttatggtttagctaataatcatgccaccaagacataaagatgggaccaatgagaagcttttggaatgatacacttttaaagcgtgtcttgatgtttgaaatctcatgactatattttacagtgactgatcactgagctatactcaaaactgctttttctcttcaaacaccaaaatgtgtaggttacttttgtctgaaatcc

SEQ ID NO: 1564 - DNA, 779 bp, Arabidopsis thaliana
  Intron number 1 from transcript AT3G48030.1 (locus AT3G480 30) derived from phytozome v7.0 (chr-ID Chr3; pos 17727135 to 17727913 reverse strand)
gaagaagcgtgtcaggaatcctctcgttcctctcggtttgtgtcttcttcatttcctctttcttctgatctcatttcacgaaatctcttttggactttcagatgtttataggcttctctttaccaaattggtgattttagtttctgggtttttatctacccgatccctaaacacagttacttgttccgtttgaatcatgagattcagaaatgattgtgaaaatatgtaattgaaattcaatttgtggattttttttgtttgtttgttacaactctgtgtcggtatgtatgattttgtctttacagaatctcaattctcaagaatcatggtagatggcagagctatatagagagtaccttcagattgtagaaactccattcattataaatgtttgtggagttgaaaacacatttgaaaattagtgagaacaaattcgtttaggatatatcagtttctcgaattagtctttatgttctcttgctggttcttatctatggaggttgtttcattggcaaattgtatgagaatttgtaactttggacctcagcgagcaaatccatgattatatgtatctataaacattgacagagaaaaaactgtttcattgtgtcaatcactgacaaaatgcatggcttcccctgtaatgagattttgaactattgaggattgtttaagttttgttttgttgatgttctctgaatagactccaatattctcttggtcaatactgttagacatttcaaaaattgataatttctttcaatattgcaggtgcactt

SEQ ID NO: 1565 - DNA, 782 bp, Arabidopsis thaliana
  Intron number 4 from transcript AT3G48100.1 (locus AT3G481 00) derived from phytozome v7.0 (chr-ID Chr3; pos 17759287 to 17760068 reverse strand)
tcttcagagaacatcttgcctcgtatcgataggtatattctactataataatcttaactatgatccttaattcttgtttaggtcaagattatgtaggaccaaaatttaccaaatatagtagattttgtgcatttattacttcaggagatggggatgattagatttagagggtattgtttgtttaggaaactttttaaagtaatcacactaatttaggatttgtgataaagttaccgttaaaggatatgtattgactaaattaaattgttgtataatcacaagattttgttatgatagaaaaggttattatatgattactttttaactatcatggggttaactttggtggtggttgtatatttgatcaagctgagatttggtgtttattttagtgggtcctaaaatgatttttaaaatggatcttaggaataataaaatttatcttgtggccataaatttagaaaagaataatccatcataagttaagcaagatcttctcttgagatttgattctatataagccggtgacatgttaggccctccaaaactttataatatatgttttaattgtttgggttgcataatcttaggtagggtcatttataaaatcccaatcctcgtgatagacacctcacatgcctttgcttattactaaggaaccaaaccctctttaccagattaagtttaatgattatcatatatgagctggccattttctgtatccaaagttataaactttatggaattagatcactaacatttggttccttatatttattcag

SEQ ID NO: 1566 - DNA, 440 bp, Arabidopsis thaliana
  Intron number 2 from transcript AT3G48540.1 (locus AT3G485 40) derived from phytozome v7.0 (chr-ID Chr3; pos 17991213 to 17991652 reverse strand)
tttctgcagaacgatccaaggatcctaacaggcaggtaaattttgttgtttgtgatatttgaacaacatgagtatccaaacagttatatatgtgtaagctgctcaaaatgtattatgttcatgatactatatagttttctatcatcaaagtggaggtattctttcggtgttaagatatcgcactggctgattttgtaatgaatggatgcattggtgttttgatgtctagcacatttagagtatagtttatggactttaaggtctttaggattagagtatagttttgactaaaggttcacaaattcgaaatttatatcttccttttgtggcaatttcatatccatttctgatggatcatatgatgcaaaaaggatggattttgttggatgcattcaaaaattgactatctttcccggtcttatggctgtgcaggttggcgc

SEQ ID NO: 1567 - DNA, 952 bp, Arabidopsis thaliana
  Intron number 1 from transcript AT3G48680.1 (locus AT3G486 80) derived from phytozome v7.0 (chr-ID Chr3; pos 18035480 to 18036431)
ctgcgtggtcgtcgcctacaggttcttgttctttgtcattttttcggaatttgagtctctgtatggttccattgtagcttctagtttgagttctggatatccaattgctgtagttactgcttgctagctaatggaatcattgatattggaatttagggttttcattttcatcttccattttgattatggaaaatgtagagtctcacctttaaggagattttacacttttatctgaagtagtgaagtgtaagtaagcatatttgtttggagtgaagatgtccccagatcaagaatcatgaatgatatttgttcagtaaagttaatcttcagagcattttgcgtttagctagacaaggatgcatagaattgcgtagttctttaggtgattagtgatattggaagcaagaaacccattgatgatatgtgcttgattttaaaatttaggtaattcaggggttgaatagattagcatggtggagaccatcttgtttagttgtagaaagttgcctagcagctctggagaagtttcaggaactatgtcatagtaaagatttttagttatgcggagagaattttgcagaaagttgatattatattcagtggttggaaccgagattctgaagctgcgtcaagctgaatgaacataagcgtcttttagtcttaccaaggtggattccgtgtcaaagtctttagttcaacagcctcctggtttgattaagctgtagtttacaactagtacttaattacttgattcaccattttttcgggttaatagctctgtattatcaaccagtcttcatgctttttctatactaacatcttgaaggatagagcatactgtggtgctgcttttgaattttgatatgatagataaaaatctgatcttagaagatactttctactttgatttttttcaggattaccagcacaaacattgatcgataggtacgtg

SEQ ID NO: 1568 - DNA, 501 bp, Arabidopsis thaliana
  Intron number 1 from transcript AT3G48760.1 (locus AT3G487 60) derived from phytozome v7.0 (chr-ID Chr3; pos 18075978 to 18076478)
tgatcagaacttataaaggctggaaaggcaataacgtgagcttcttcttcttcttcttctttatctcttttatgattggtttttgtttttctgggtcagatttaatgtctttgaataagatctgaatcaaaaatcctaagcctttttggtggaattactcagaagttgtggaataatcattctctctgtttttttgctgggtttggtcatattttcagaagtttagagtaataagtttgacttgtatgtataccctaattttgagatttggtcttgtttacgctgtcaaagatgctggtctctttcaaaattagagctttttgatgtttaacacaagtttgagtaaagatttacctagatgtgtgatcacatagttacaagagtctttaagttgttaattcaactagatttgtaacatttgtcaatatgttactgatctttgatttattcttttttgtgtctccaggtgttcttccttggaggaaggctcgtgtttggacc

SEQ ID NO: 1569 - DNA, 997 bp, Arabidopsis thaliana
  Intron number 1 from transcript AT3G48890.1 (locus AT3G488 90) derived from phytozome v7.0 (chr-ID Chr3; pos 18129964 to 18130960)
tttctcagagcaggtatttcttgtgaaatctttacttgttcattaaattatgattgaatccaaatgatcactagttaaattaccagtaataaacgattcaacccaatagtttcgagatttggggtttaggttagttaatcatggttgactgtttgatttataatccgaagtttccaattactatctatcttatgattctagtatatctactgatgctcgaactctagtttaagtgattctttattgtaaaactgaacacttttagtaaatctttttgatgaatattctctcctttttgttcataatcttatgatgctctttttattgctttttgcatcttagtgtttgttttttcacttcttttcttggaacaataccattagaagcactgatacaattgtattgtattcaagttatcggaaagatctctactttttcttatactagaaaaacctgtatttagattacatcttggattagtagagattgataacgtacaaactcgtcaaaggtttggcttctaatattgctattgtggcgaaagagatcgttcactgattaattatccacatttgcttgctatttgtgttccatgacgtttgtaaattaagttttggcgaacattgttggtatgtaaccatgctgcagttgtctagatccctgacttgtcaactagacagttcttttacattccagttaccgaaaacttcgttgtggtaattaggttttgtgctagatgaaataatcacttcagtgatcataccgttttgcttgttcatagtggcgacagacacagacacactcatcaacgcatatacatgtcgatgtatatgtatgcataacttttagtttttttcttgtacatagttcatcagctgtactacatatctagatgaatcatattcatatgtgccaagctgtagtttttcattcttcaaactctacttaactcttactggtcgctaatttgcatgaccatctgttctttttatgcagg

SEQ ID NO: 1570 - DNA, 968 bp, Arabidopsis thaliana
  Intron number 1 from transcript AT3G49210.1 (locus AT3G492 10) derived from phytozome v7.0 (chr-ID Chr3; pos 18239995 to 18240962 reverse strand)
ctttgatcagacatcctcgtttctccagtaaagtgagtccaaattaactcgtacatatgaatacaacatggttaaatattatatagttatatgtattaaaaaaaatatcaactcgtatgtataaaacatagattaatgttttcaactctttgatgtatttatggtttcattgacttttctgggtgttgttgcgtgatcgtcgagaactggacgtgtttctttgaccaataatctttagggcggttctttttctaattttgctacaatatcacacagttcacaaatcacaatagttgagcataagccactctgtatatttgcttttattttcattttcaaaagtttatttttatttgccggctatttcattttcagaaattaaagaaacaaacattgtttttatcttcgttttcgaaaattatcaaacattgaaaaaaagaaacaatttagaattagaaaatagtaagaagaaagaaatccaaagatcagtgaaatatttttggtcaatgaaatgtataattctttcggatttcattccaaaaatgggagaatgattagttttacttttttgttataaaaatctagcagaatatagtacaaaaatattccacccaaatgataaaattatttaagtatatttcctaaaactagcaaaaattattatttatcatttgaaagtagctaatcaaaagatcgtacatacaaaggattttgctcatgtatattgaatagctgtttgttttaatcttagtcctaacatatctctatcgtttttctcttgaccacttatatttacgtacttgtccctataaatatgttgtcaaagaaagaaaaagtgttcttcatatatgtacatttttgtctaattttgtatatcttacttttgagcttcttaccattaattttaacatttatttttaataaaacttgaaggtgagcacatccgttgggaacaagaaaagacaaac

SEQ ID NO: 1571 - DNA, 732 bp, Arabidopsis thaliana
  Intron number 2 from transcript AT3G49390.2 (locus AT3G493 90) derived from phytozome v7.0 (chr-ID Chr3; pos 18316515 to 18317246 reverse strand)
atcattttcctagaagggtatatcatcattctttcacattctcgctgaattatgatctctatgttttgttttgtttttttgattgtaaaatttttgtgttgtgttgagtatatagttattttgtatgttttgattgttagtatatagacgttattgcatctctagaaaatggatgtgttttggtgaatggaatgttctttttttcattagtttgtgaattctgatctttgtatttatctaatcttccgttagtattttgatgttacagtgaagtgagagaaatgatggtataaagtttcgagcttttgtgtgtttttgtttaccatgatttgctagcttgcttgttgattgggaaagcttgtatgcttatacgttcagcaaatggataacggaaaaaagtttcgagctttacgtgttcttgcatctatcacttgatcattgatacaaaaccagtttcactttgtgtgtagtttgttgttgatttgatttgtttactgtttggtttttcttttccttatcagttacactttgtatgagctttgaatttttcgggttttaaatagaaagtttcatcgtttctgtggtgacattcttcaaagttcaaacaatggtattagctgtcagatatgtgaaaggaaagtatgcaaaactgtactattgattaaaatcgtctgttggtaattcgtgtgcttcttgttacagagaaggagttttggccaagggaagcgaaga

SEQ ID NO: 1572 - DNA, 617 bp, Arabidopsis thaliana
  Intron number 1 from transcript AT3G51040.1 (locus AT3G510 40) derived from phytozome v7.0 (chr-ID Chr3; pos 18953060 to 18953676 reverse strand)
gatccgattaatcgtcttcctggtcgcttgaactggtatgtatgctttgatctattctttatgaaaaagtttcggaatcaatgtctatgaagatgctttgatgttgactcgttgctagttggattatgtatctttaatggcgttttctggatccctcgttcgccatgttcgtatggattcatcgtttagtgtttaagactcgcgattcgtagaactacgagaattgtttacttagcttttctatgtagtggtcgtagtgttttagcacaatgtgttgattgaatatcaattagacgactcttgtttcaagtttatccagtaatcaatgaattggtagtagcttggtatatgcaaaaatccaaagcagcacagggctagaaggagctgcttatcgcttctggaaggctcagtcccaactcggacttccatgatgggatgatatgcatttatgttttgggttcgatgtaaatgatatgcatcagctattcgagtattaagaacaacttttacatatcaaatccaagtgctttattgaatcttacttacatggggatcactggacgtgttgttttttgcttacagagaatcaaataattgagctcaactggatttggata

SEQ ID NO: 1573 - DNA, 358 bp, Arabidopsis thaliana
  Intron number 1 from transcript AT3G51090.1 (locus AT3G510 90) derived from phytozome v7.0 (chr-ID Chr3; pos 18979147 to 18979504 reverse strand)
ggaaacgtttgtttcttgtcgatacactagctttggtaataacccttccttgttctcttctttttttacttacctgatgatctactgaaatctttttccaatgattattttggtttctgtatcaccatcattgctttgaattgtcttatctgattgcttaaaccgtaggcaaggtattgattcaaggaacttcttgcattttgaaatgagacaatagaatgattttattctagaccggattgataaaattcaataggatgctatattattagatatagtcttaagagtatagttcaaaggagaatttggtatgtgattttcaggttaggagcttagaagcacaaggcctgccttcaaa

SEQ ID NO: 1574 - DNA, 641 bp, Arabidopsis thaliana
  Intron number 1 from transcript AT3G51180.1 (locus AT3G511 80) derived from phytozome v7.0 (chr-ID Chr3; pos 19013761 to 19014401)
gccaccaggtcctaagctttgtcaggtataattaatccttatatgttccatgttttcttatccactttctaatcccaaattgattgatccatctcaccaaatctaaactctcgattataacaattaacctaatttctggatcctaaaatttcgattttgaagttttcctttaaacccaacgaattgattgatacgatcttgaatcgctgaattatttaatttcaatatccaatcgaaaaatggtgaagaaaccaagtcttgtttgttgttactttgacggctcttttggtatgtagaaggctttgatttttctatctttgaagataacgttttagctcatatagtttacatgaaattgatttgaatcaacaaagatatattcaaggttttggatttggaaatttgaatcaacatacagttagatttagattgaaacaagatatgatcaagttttgaagtttgaatgcatcaatccaatactctgcaactacaaatttacaatctttttacagatagacttgggaagccttattggtttagttacatagttttgatacacgaaaaagtcagctttggttagcttctaactatgcggattttgaacaggttaaggtttttcgaacagaggacagtcctgccaa

SEQ ID NO: 1575 - DNA, 586 bp, Arabidopsis thaliana
  Intron number 1 from transcript AT3G51670.1 (locus AT3G516 70) derived from phytozome v7.0 (chr-ID Chr3; pos 19169576 to 19170161)
ttcaagataattaccctgaattggttgctactaaggtaaagaaaatttctctgtcttttgtttttctcttatgtttctattggagacagaaaatttatgtttctgtacttgttgtctgaattgttacggttttttcatgtggttttgctctgttttgcgtgttggggttgcttctctttgcatttaaacagaaacgaatctcattcaagaaaatctgaaatgtgtcaaatgcttaatggggaatctaaaccatgtttcatgaaatcttttctttattaaattgttggtttatttgtgtgcggtttcttgagttcctaagaaatatgaatggttttagatgttttctgtgtggcgttattctatgtattgtccattttgattctctttttgtcttactttcttaaaattacttccatagctttgtcttctactgctacagtaaaattgaagcattctttgtgtggccgtacaatgaagttattataatcatgtctctattctcgattactacacaaaacattttgatgaatccatttttttcactatttcagatattcataaacgtgccttggtacttcagtgtgat

SEQ ID NO: 1576 - DNA, 425 bp, Arabidopsis thaliana
  Intron number 2 from transcript AT3G51860.1 (locus AT3G518 60) derived from phytozome v7.0 (chr-ID Chr3; pos 19240259 to 19240683)
acacctctagctgagcgagttagctttttgacagagtaagttattatcgtcccacaaattttctataggataactacgagatatttcatagtattaccattttattcttttcgacataaatgtgttgggttaagtttgttttagtttagtaactagtataaagtaattgacatttccaagtgttgactgaatgatcatcacttttaagattcttttgaaatttcgaaacgatgttaaatagctaaatcttttgtttctttaacagaaaaaagagttacacacttagacttttctacaaaataatttgataaaagcgttattgtattagaaacgaattttatactcccttgttaagaaaatagaacatgatcgtcttttttattcttgcaggcaactagctttctacactggtccaacaggtaacc

SEQ ID NO: 1577 - DNA, 514 bp, Arabidopsis thaliana
  Intron number 2 from transcript AT3G52730.1 (locus AT3G527 30) derived from phytozome v7.0 (chr-ID Chr3; pos 19543190 to 19543703 reverse strand)
ttggggtatgtttattttcttgtattctgaatcatgttttatgcaatctgatgcctaaatatgttgacgatgaatgatttttttgttactcttttgattcgaagttctgcattttgtttcggaaatgtttagtattggtgatgttaatgtttgtctgtcatttgaactagagagtctagatggtaataactgtttcttcattctctttattgcccatcttgagatatggaatgatcacatttttctacacacacttctttggtttcatgtcatcgtcgtaatcatcttctgtaatctctgcttgttgttagtgttattagctaataggtgaatgcttttcgaaaatctattgatgcctgattcaccttttctagcttctattggaatgtgtatagttccccctctaccttcgacatcctgatttttctgccttgtgtgagtatctgtgaaagtctgaaagagaatggttatattcgtattcacaatgattttcttgtcatggcgcagaaacgat

SEQ ID NO: 1578 - DNA, 966 bp, Arabidopsis thaliana
  Intron number 1 from transcript AT3G52780.1 (locus AT3G527 80) derived from phytozome v7.0 (chr-ID Chr3; pos 19563112 to 19564077 reverse strand)
atcctacgttccccgatcaggtaatatttacattaaaatctatattttttgttatatattatgcatattggattctgtatcatttatgtaaaatccttgtaagtagaattttgacacggcaagtctcaagattttgtctttcagtattgatatgtgttagttttcaaacataaacaagatcgacttaagttttctcatgaaacaccaataatacgaatatcaagaaaacttggatcttcttcacctcctcggcttattggcttcagtaatgttgtctcttattaaaatgtttttgagggtaaaaatttaataaagcagaaaattgttagattaatctattgaattaattctttctcgtgtacaaagttacgttacggaagcattgccataatttcgggtgattttgtttgtttttttccaatttaaacctttgtatacacatgctatttgaaacgacactgtactcgcctttttattaattacgaaacgttgaatggagacattttcaaactatacatgcataaaaaaggttttaattgtatcaacaaattcaaaatttgagacagatagttaatgataattgtctaaggaaacatcccctctagactctagataaacttttcagaatccttaaaaattaaaattaaaagattttcctatgtttgataaaatttagtttccacagtagtcaataacagtttaagttgcaaataattcagagattcgcatcgtgcgtgtcatactgtcatgtgacgtatggagtcaccacgtgtctaatgaaaaaaacattactacaaatttacccactttgtcttctttctgttagatctttcgtcactcatctgttttgcagttttgcttgtacgctttgtctttgtttatttatagtaatgtgtgttcctaaattacttatgaatttgtgacgtttaaattcaggtgcatatatctctggttgggccggacaaa

SEQ ID NO: 1579 - DNA, 263 bp, Arabidopsis thaliana
  Intron number 1 from transcript AT3G52840.1 (locus AT3G528 40) derived from phytozome v7.0 (chr-ID Chr3; pos 19581383 to 19581645)
ccggttctatacactatccaagaagcactcctgaggtaatctctaattattcattaatctttttcttagttacatgcaaacttttttggttatgaacaaattttcttccggattttttgaaatgattgctttgattttctgcacataggtttttggtttctctgtaatctgctaatagtataggctacatcatcaagagtaatacatttgtttgaatataataagttgaaagcaaaaacttgtggatgttctgttctatgcag

SEQ ID NO: 1580 - DNA, 984 bp, Arabidopsis thaliana
  Intron number 1 from transcript AT3G52890.2 (locus AT3G528 90) derived from phytozome v7.0 (chr-ID Chr3; pos 19608082 to 19609065)
tctcagcaagcaagcttcttctttttttgtcctgggtaagcctttgttccttcaatttatcgccagcttcttctttatctcttaccttttcttctttgcacgcctccattagcactttatttatttttcttctgtaaccctctctttgatttgctttaattcatgagatttggggaccgtattcagggttttttttgggtgggtttctctgatttttttttcctttttcagacctttcattatctctatgtggtcacttaaggtctctgcagtttcaattcaaaaatttagtttaaaaaaaaaaaaaatctgggtgtgtgttcattagctagctcctctttgttcactcattggctctctatgatttgacatttaagattattgctgcatttaattgtgctaaatcgattctgcactcatgcttcagctactgttctttgtgtccctgtaaatttaagtttttgagatctgaaactataagaaattttccgattttggttctcattagttgttagatctcttatctcactcgaagcttctttttttacgcggtttgatttattaatttcgttacttctctgtaaattctcgatctttagggttcttctcatcccctggtttaataatgggtccaatctcagttcttgttcactctaattttactttcacaatatctccaattacgcagatgctttttgacaaattttctccattaaaagtgtcttcttttttagctgtattaaatttataggtctctctatctgtactggtatagggttcatgattgagtctacaaaaacataatgaatgacctaaaagctattaactttcgtttctagatctgcttgcttctctttaatatcttcacctcattgctctaatagacattaatctccatttgaagttagtattcttttaccagttttactgatttttctttttcattcaggtaactgtgattgttgcaggatcttgtgtagaaac

SEQ ID NO: 1581 - DNA, 983 bp, Arabidopsis thaliana
  Intron number 1 from transcript AT3G53350.2 (locus AT3G533 50) derived from phytozome v7.0 (chr-ID Chr3; pos 19781590 to 19782572 reverse strand)
atccaacaaaaaaagaagctgaatcgacggtataggtgaatacttcttcacgactttttcaaacactcagaaacttctcttcctttcacattgatttattcctaattttagtgcgattttttccttttttttctcagaagtttatcaatcttgttaggtagatatttactactagtttgttttttctactaatttgctgaagaaagtgttaatctttggttggtttaaggtataaatttgcttacatctactcaaatcagctaacttttattttggtttggtagcttaaagattcagtcaaaaaaaactttaatctttgttttcctgcaaaaagcaaaagtgtttctgtaataaaacacctttttgcagagaatgttaaaagattctctagttttaggctttatgtaaaaacgatttttttgctgggtgttctgtttttggatctgtgtttcttttttgggaagatccacccaatgaaaccaaatctcacattacaaaatgacaagaaattgtctcttcttcccaataattccaaaactttgatttagtaaaaaataaaataaaataactgggtgacttaacaaccagaaagattatgtgtaagatattggtgctttctttgcttgtaatagggtttatctttggtgatttgatgaatcacattgacggcaacttcttttctaattacacttctaaatattttatatatttggaattgttccaaatcattacaatattcatttgttgtctctttgctttcgtttggtggtaataggagtctctttgaagctaaatgtgtaaatattattcttatgtttttttcgtacacttgcttaagctttctttcttccctgagtttggttgtctatatgcttatgataagttttttttttccctctgttgcttctttctcacactttccattggtcttcatgtactatttgtcagattcttcaaagaagcaatcataacgcaattgatta

SEQ ID NO: 1582 - DNA, 743 bp, Arabidopsis thaliana
  Intron number 1 from transcript AT3G53620.1 (locus AT3G536 20) derived from phytozome v7.0 (chr-ID Chr3; pos 19880748 to 19881490)
atctcgggagatttcagatttgtcgatttgttcaggtacggatttcgaaatgttctttcaatcggatttgttcttcctcggaaggtttctagggttttgggattgggtgtctttaatctgtttgcataagccatgaacgagtttttttgttcccccgagagatctttgtgacttgtagatctgagttgggttccaaaatattcaatctttgtgatgtatatctacatttttagattatcaaactccattaaagagaaaatctttgctcgtttctcttaaggcccattgctttttatctgaagatgatttcaagagagtgccctgtttttttgtataaataaaattttgatcttttgctcgctttatacacatgtgggaacggttttgtcggtggagacatttatggattcgtgaactgctgcaaaaattatgcgtttcttggacgtttctgtaactttctctttattagattttgtatcttgtgtctctgtgtccaccattgcgttgtgtgtattcaattgatttccccaggtgttgaagattgttatttatatatttaacttattttatgcacagagatctttagtataattcatgaaaatatggttttatcttccatgatctaggggaactaaaacatttgtaaagtttgagcccatattttgtgtttgttgcttttcagagatgcatatattatggttgttgttctgtttatgaattgttatgtgcattgttttgcagca

SEQ ID NO: 1583 - DNA, 408 bp, Arabidopsis thaliana
  Intron number 5 from transcript AT3G53620.1 (locus AT3G536 20) derived from phytozome v7.0 (chr-ID Chr3; pos 19882321 to 19882728)
caggtaacatattttttcatacaattttgagaacctgcataattcattacataatgtttcttgttctattttgatttgtgcatctgataagctttgaagaagttcaagcgctcaactcttagctatagactctactttataactgtgtagcttaggaatgaatgtagcagatgagaaatgttgccagtcagttatcgagcagttagtggctgctaggcttataaaggtgtctcagcatattgtttagagtgtggattttctagtgtttactctggaatttaaaacctcttattaatcaatcaagtctataagcatcatcagcatctcagtctgtcttatttgactggtagaaaacacatctcatgtgaatcttgttgaatattttctacaggaaccggtgatcccagg

SEQ ID NO: 1584 - DNA, 974 bp, Arabidopsis thaliana
  Intron number 1 from transcript AT3G54100.1 (locus AT3G541 00) derived from phytozome v7.0 (chr-ID Chr3; pos 20036346 to 20037319 reverse strand)
cgtgttctcgaaaagcttcccgtgagtttgttcatcttctttactttaaacatttagggatttaaaaattcaatctttgtgatcaaattcagcattttttttagttagttagatactacttgggatcaatcctaattatgtgtttgttcctgctgaattgtttgagggttttgttgaacagttcattagaaatgatcctaagattgcgaagttagtgtaaacagattgcaatgtttggattagtgtctccttttgggacgaagaagaagaagtagtggcctagtggggtaggtaataagatgaattctggcaacaactttaatgattgcaaaactgaattatcattgtgcaattataatagcttttctaacaatcaatatctcggtggcgatttttatgagaggtttacttttttgctattggattgagactttgacgagcaatatatagtcaatggaattataggcggcttcgatgtgtggataataccttcctaccattttagttgacttactaattttatgcagaatccataacattttgtgttctagtttgtgaagacttgaaattgaaactctttataatcctctagctctgcaatatgtaatcttgaagttccataaggatccaagttgatattggtttgattaatagttcattaccgttgactatatggtttaatctgtgttagtgtctaacctgttttgttgagttaaattgtaacttgacttaaattcgttaagtaacatatttaaagtacgcgaagttctctgtgatcagtgtaatcggaggtcttacatgttttgatagttaactaattttttttttatcatttcctctgtttttgcaatgtaaggaagatagttttttcttctgtttgacttcattttcgaggatcttggtcatttggatttatgcttttgttgtctcttctcacagattccggaaatttggcagaaacctgaaagcgggaa

SEQ ID NO: 1585 - DNA, 587 bp, Arabidopsis thaliana
  Intron number 1 from transcript AT3G54110.1 (locus AT3G541 10) derived from phytozome v7.0 (chr-ID Chr3; pos 20038933 to 20039519)
tcgcctgcagtgccttcgctgcttgcgtcggcgaggtaatcgccggattcctcaatttttcatctcttttaactccatttttcttatcgctgagtatgcttcgattgtaccggaaaactatttgttcgttcgagaaatgtgtgtcgcgatctagactttgttggctatacgcggaaatgtattttcgaatttcgttggtatttgtgaagttctgatcaggttgatctttgtcttttttgtctttatcatcgtatagctggagaattttgattttagcttctatagtgtttctccagattacgtaattccgatagaaatgatttgatctcggaataatcggtcagatctgtggctagaaattgaattttggcatgtgtagtgttgttgatttatgctttagatatgattttgcgaaacattgaaatgattatgagacttgaaaatggaatctatttgatcattgtgattgctatgcaacgcaactgtataatgtttaattatcctcagaacaacatgtatcttctctttggctgtgttgtttcgtcagataattctgttcttatgcaattaaactctctggaccaggt

SEQ ID NO: 1586 - DNA, 606 bp, Arabidopsis thaliana
  Intron number 1 from transcript AT3G54790.1 (locus AT3G547 90) derived from phytozome v7.0 (chr-ID Chr3; pos 20284364 to 20284969 reverse strand)
ttcttccagcctcagtatcacttcaatcttctcgggtacctccaccttcttacattcctttgttacaatctttttccaaattcgacattagctttgtactaagttagggttccttacttgtgggttttcactgttctgtcttatttctttgttgagattctttttcgatttgataggtttatcagattcagagtaactctgttgttttctccacactttattagactggataaattagtttaatcaaatataagggaaaaaggaaactagaaagcagaaacatctgttgagagaatgtgctcaagtcaagtctctgtttaaatttacttccttttcttcagttttccacaagaattgactgaatctagtcatgtctgtcttctcagactaataagtcaaaaagtcaatgcttttctatgtctgttctatcagaaaactttgtgttcctttctttttttccatataatacacagaaaagtctgaatatttttactaatccaattgataacactatcaaggaaccaacactctttttaaaagtcatgaaagattataatgttgatatgtgtgtgttttgttttttgtgttcttcagcttgatagttaa

SEQ ID NO: 1587 - DNA, 676 bp, Arabidopsis thaliana
  Intron number 1 from transcript AT3G54790.2 (locus AT3G547 90) derived from phytozome v7.0 (chr-ID Chr3; pos 20284294 to 20284969 reverse strand)
ttcttccagcctcagtatcacttcaatcttctcgggtacctccaccttcttacattcctttgttacaatctttttccaaattcgacattagctttgtactaagttagggttccttacttgtgggttttcactgttctgtcttatttctttgttgagattctttttcgatttgataggtttatcagattcagagtaactctgttgttttctccacactttattagactggataaattagtttaatcaaatataagggaaaaaggaaactagaaagcagaaacatctgttgagagaatgtgctcaagtcaagtctctgtttaaatttacttccttttcttcagttttccacaagaattgactgaatctagtcatgtctgtcttctcagactaataagtcaaaaagtcaatgcttttctatgtctgttctatcagaaaactttgtgttcctttctttttttccatataatacacagaaaagtctgaatatttttactaatccaattgataacactatcaaggaaccaacactctttttaaaagtcatgaaagattataatgttgatatgtgtgtgttttgttttttgtgttcttcagcttgatagttaaatggatcctgttcctgttcgatgtcttcttaacagtatatctcggtatcttcatctggttgcgtgccaga

SEQ ID NO: 1588 - DNA, 592 bp, Arabidopsis thaliana
  Intron number 1 from transcript AT3G54810.2 (locus AT3G548 10) derived from phytozome v7.0 (chr-ID Chr3; pos 20296365 to 20296956)
atacgatctgcacaccactactaagaacaacagaggtttgatttcctcctcctccttcttcatttttggttttctttggaaattcttgaaattgtaatgtttttttttggaatcttgatgagtttttgcataaatcaagaagtgtcggtggaggcatttatttcacaccaattgttctgaattcagttttgttttaacactctttttttttttgtaactgaaaaatttgtgttttcttcttggttttcacacaagaattctagaagattgatagataaaatcaagaatgcttaattaacggtgacttttgacttttataaccttatagtctactgtgatttgaatttgtacatagaatggtcctctttatttacttatcaaaaaaaaaaaaaaaaatcaaaaaaggtgggccaaagaatgtttatttttcaaaattttgatttttaaggtggttccaaaatttggttcaaaattttcaaaacttattcagaaacttcctctgttcaaactcttgtcattttcctctataatatcattaaccccatctctcattatttattccagctagagagacttgcaataattgtaaaac

SEQ ID NO: 1589 - DNA, 351 bp, Arabidopsis thaliana
  Intron number 2 from transcript AT3G54810.2 (locus AT3G548 10) derived from phytozome v7.0 (chr-ID Chr3; pos 20297180 to 20297530)
ttccggttagttctacgccctcttcgtaacgtatgatttcaaacattaaaccacaagtttcgtgagtaataataaatgaaattttgtcattatgggtggcttttagttaagtcaagtttgtttttttcccgctcattatttgtcttacattgtttggttagttttatgctaacttacgcactctgctttgttctgtttttgcctttgttaccatatcacaaagtttctgtttttatagttaaatgaagtcttttttttttggcgcttaattgtttccctatctaacaatgtttctttgattggggtgaaattgcagtttgaggacattgttaaggtggaaagacctccaag

SEQ ID NO: 1590 - DNA, 281 bp, Arabidopsis thaliana
  Intron number 1 from transcript AT3G55050.2 (locus AT3G550 50) derived from phytozome v7.0 (chr-ID Chr3; pos 20402085 to 20402365 reverse strand)
ccctatttctttcatctaatcctcgatttcatcaggtatttcaaatcaattacccaatcaggttgatgggtcaaagttgaaacctttagattcatatgtggatggagttatgtaaagttttcttcttaatcaaaatttgtttctcccagatgcttgttatcagattgatgggttaaaagttaaaaaatttagtttcctatgttgaaaatttggagactttatccttttttcgattctagattactaaatgttttgtttttgtttgtgtggaatgcagatta

SEQ ID NO: 1591 - DNA, 942 bp, Arabidopsis thaliana
  Intron number 1 from transcript AT3G55080.2 (locus AT3G550 80) derived from phytozome v7.0 (chr-ID Chr3; pos 20414807 to 20415748 reverse strand)
tcgccgggaaactaacgttagagctccaaactcaggtttgatttgtgaaagattgagactttcgtgaaatttgtgaaatcaatgtgatggactgttcacagcttgattatctcaagtgttagaaaagttttatcatacctgagtgtggttccaagaatttttctaagttatgtatgtttctcctctactgatagcaattgataccaaagatgaaacctttatgttcttttagcttcttctatctatagttaaccaaacagactgttgattttgggagctaattgatgtaagaagatgttgtacagaacttttatgtctctcacaaaagaggatttacgatcatcttatccattttatatctaggcttcgttggacaataacttcttaccctggttagagcgaattgctggagcaaagataactaatactctttcgattgggaaatccacctatggcaggtgggcttgatgatgttttgaataagatgcaactttgcaagtatttttcaaaatccgtttttcgagtacctcggttttctgtttaccggcaattaaaatatggattgttagacacattttctctattcaataattctattcatagttccctttcaatgtaatgatcagattctttgttgataccttctgtggcagcttaatttttatatgacttgtcttgatgttctttaatatggttctgtcttgtcatcaatagttgaaacattgtacaactttgaatcatgttattttgtcttgtttagtaatctgattgttttccatctttatgcgattgtttaatgagtgattgtgagaataaccaatttcatttcctaccagaggctgtctcctggtgtgatgctttatctttaatgtcaaatacactaaccatgttaataactatatcaacttctgagcaggtcactgttcgcctccaaagttatct

SEQ ID NO: 1592 - DNA, 376 bp, Arabidopsis thaliana
  Intron number 1 from transcript AT3G55270.1 (locus AT3G552 70) derived from phytozome v7.0 (chr-ID Chr3; pos 20496225 to 20496600)
ctaactttgacggctctcttaatcttactcactccgtaagttccaaatctctctcctttactctcatatctatatcgtccgaacaaaacccaggagaattgcttcaccccctttttgggtttttaatcattttctcagattctcagtttctgtttccgtcttctagattctgggttcagtttctgttttgctcttattgaattttcttattcattttgtgtttcggagttattcatggtagctgaatttgttaattctgatgttgttttgcgttttcttcttttctagtttggctatgtcgtctttgatctgatgctgggttattctctttccctctgttttggtttcttttagggttttaagtcggaatagactg

SEQ ID NO: 1593 - DNA, 383 bp, Arabidopsis thaliana
  Intron number 1 from transcript AT3G55410.1 (locus AT3G554 10) derived from phytozome v7.0 (chr-ID Chr3; pos 20541456 to 20541838)
tcttctttctcttcttcgcctcctcctcctccaaggtaaagtattcagctttttcaaattcagtttcttcacaatcggaaataatgaagctttcttaatccaacattttctctttatccaacaacagatctattttttcctcatcagattcatagatttcgtactgttttttaaatccagattgtgtttaggtcaccgagttgaatcttaggtcgtattgatttgtagattttcctctttcgtactcttgttcttcgttttatccctcagaatatgatttgagaaaaaaaaagatctctttgatacttcatttcagttaggacgacattaacgtgtgtgtgtctgtttgtttgttgtgtgcagtgtagaacgacgattgttga

SEQ ID NO: 1594 - DNA, 1006 bp, Arabidopsis thaliana
  Intron number 2 from transcript AT3G55470.1 (locus AT3G554 70) derived from phytozome v7.0 (chr-ID Chr3; pos 20564552 to 20565557)
caaagggcaaacccgcaaaagcagcgttgctaaaggtaatttaacttgctagtttccttctttccatatttccaaatctctatcagcttaattcgggttatttcgtttgactttttttttcgttttatgcgagagagactatttctccaatttcatcattttcttttctatatacttggactttaggaataaaaagcccacatgctggtgttagttgatggttgtacataaagtaaataatagttgcaacttgcatccattggtatttcaactatcctcatagccattacatggtagcttaggctatactatttattcgcgttttgataacattcattatcttttatcagttataacattcatcaggtttttacgttctgatgatgcataagttatataaatgcatgttttaaaagtgtaacttgaaaataaaacaatcaattttccaaaaactagctaactattgttcgtgattattcggcaaaatttgttcatcccaactctcaaatgctttccgctacttttatcatttcactatttgtcattacactattttatattttgagacattttgtggtagcttgcaagtttgttttcatgtatatggtttaaatcttgaaaaatgttgtgtatggatagagctttcttctgaaagtagtcatctcatttagtgtgatattgtctggccaaccttatttttaactaatcaccaactaatacaccaaactactagctataagaaataatattttcatttcctacaaaaatgggtagtgaaatgtgaaaactactgtgatgtaaacaatcctcgctagacttggttaatgttttactgaagaaaatggtgttttagtgagatattgattgcacggctttaatcaaacggcttttgtctactttaccaataacggatcaaactggacaatgttcttttctcattatcatatttcatgtacaaacatcgtttatcaaattttcatcttttttgtttacttaaatgaagaag

SEQ ID NO: 1595 - DNA, 1006 bp, Arabidopsis thaliana; identical to SEQ ID NO: 1594
  Intron number 2 from transcript AT3G55470.2 (locus AT3G554 70) derived from phytozome v7.0 (chr-ID Chr3; pos 20564552 to 20565557)

SEQ ID NO: 1596 - DNA, 614 bp, Arabidopsis thaliana
  Intron number 1 from transcript AT3G55830.1 (locus AT3G558 30) derived from phytozome v7.0 (chr-ID Chr3; pos 20715278 to 20715891)
tcaatcgccgtcgcagatcggatctccggatcaaggtctgtacacacacacacgttctgaatcatctaccttactatatgagtctaaatttgatttggatctctaaatggtaacttttggtgaagaagactagattcttttttaggaaatgaaatttatggaaagtaaattttagataagtgcaattataactgcgattcgtttaaccttttttgtcttcattcatttcttaaattcataattaaactggagattctttggctttaccgatttggtatggtttgtgttgtttctcagctctatttataagcaaactgtgttcttaagctccttgctgttaatgaatctatgaatgcaaaagctacaatgattctgtgatttatatagacacttttgtatatcgaaaagcaaatgaattcataatctttgctatgttaagctggtgatatacggtacatgtaggtatgtgcaaaggttaggagttatggagtaaatgtaatttataattaagtagttgatcttttgcttttggtttgactgcataattttgtgctttattgtctaatttgatgaatttctttatcacatcctgcaggaaaggttatacacttctg

SEQ ID NO: 1597 - DNA, 838 bp, Arabidopsis thaliana
  Intron number 1 from transcript AT3G55960.1 (locus AT3G559 60) derived from phytozome v7.0 (chr-ID Chr3; pos 20761787 to 20762624 reverse strand)
gtgcacgcagccgttttcagaggcttaaggtatgtgttgaatcagtcaaagtctttttggaattagtttgattttgaaaagaaaattgctgcttgaagatatttgctctgtggaacttagaatctgtgaaggaagtctgattagggaggaacaagactcgaaatagatgaaatttgtttgctttctaacatctgcatagacaattctacacatatattactatcctgtggtagaattctactgctcaagcttataattcttaaccaaaacaagtgtttttaatcaataggaaagtggacttgaaattcgagtttgatctagttatctggtagtcaggtctctagttaagctcacaaggtgatcattaacgtagcagttgttgttgatggaactacttttattgatgagtttattgcttttcccattgtgacattcttataatcatgcatgataagcaatgctaggtgttactgaaagtagcgtatatgggtttgggaatgagaattctttgatttatagccttttgaatatcgtgtatcttcctgattgttactcgtcttatagcttacgtatgtttgacttgtgaaacattgttttgactgtatcctcatatatcactgacgtcgcaagccttgttttattagattaaggagcctttgattcttaatttggttcattgtctagcaaactaatttgtaacttagtgaccttactgagtctcaggagtatcctgcagatttatggtgtctggagtcaattagaatagtctagtagctattggtagttttaagagtagtctgagaactgaagatgtgtttgcaggtagttctagacttgg

SEQ ID NO: 1598 - DNA, 512 bp, Arabidopsis thaliana
  Intron number 2 from transcript AT3G56320.1 (locus AT3G563 20) derived from phytozome v7.0 (chr-ID Chr3; pos 20888673 to 20889184 reverse strand)
caaagaatctctggacaactggtctaaaaccgcaggtacgcctttcactacttaaacctctcaattttgtcaacaaaaaaaaatgattttggaagagacagagctgagacttctgagctaatagtcattttttcctaaggtataatcatcactcacgcaggatagtttagctgttttgttttgttttcctttataaatattcgattttgctctgagaagctaaacattagggtacctacctaacactgaattcactattggcatgctctgtttcatttttttatgtctcttgcttaggatgtaatctcactcactctctggattagcctcgattgttcttaatcaaatttgggagctctagttattagacaatcaacttttaccttgacttcatttttttctttttctctgtctaatgtgatgacaaaaaggccaatttgaaatattttgtaattctgtttgttctgttgtttgtagatatcataattatataaggggctcattgagttgtt

SEQ ID NO: 1599 - DNA, 364 bp, Arabidopsis thaliana
  Intron number 1 from transcript AT3G56450.1 (locus AT3G564 50) derived from phytozome v7.0 (chr-ID Chr3; pos 20930931 to 20931294)
gaaagcacgtgattcctataagcttgccaaatcatgtaatttccataaataataatcagccggccttgatttttgtttcatctgattgatttgtgatgatgatgaggaagaaaaggtgaaacttgagacttttgattgatctttggtttagcaattgtggtgatccttccatggtgttgtgagaagttgattttaggcctctttgatatgtgggaattataaattggatactcaacatttagattactcgataatgatggtttttggccttatagtaaagtcattgataagtatcttcttgcttatgtgtttgatttgtgattcttcaggggatcaagctggaatagcttatctaaaacttgcc

SEQ ID NO: 1600 - DNA, 679 bp, Arabidopsis thaliana
  Intron number 1 from transcript AT3G56580.1 (locus AT3G565 80) derived from phytozome v7.0 (chr-ID Chr3; pos 20961684 to 20962362)
tgaacaggtatgtaactgattgagctgctctttctgattaaccaagtaaattgttctcttgaatcttatcattttattttgtttcatttttcttgttggatttagatccttggatcaaatttgctcaaatgttgtggtaaagtctgtgcctttgattgtatttcggatattttctgtgtgttttactctgatattgattaggatttgtgtatttcgtattttttttttccattgaagcgttttctgtgatctggtttttgatcgatcttattcctcttgattaaccgaacgaaagatgttttgatttctgtagatctcttgcattgtactttcttcattgttcttaattcgattttctctccattgctggatcgcctgatggctcatttagagtttttttttctagctcaaatgtggttgaactatagagtttctgagttcattatttggtcattttttaattgagttggcttgattaaagaagaatttatttgttaatcagctagattagatttgaagattgtagtagattagtatgatgtgaatgttctaatctgggaataaagggtctagtgttgagggaaacatgagatttttcataattgggtgaaatatgtgttgtaaagtttggtcttttatttgcttaattatgacttgtggttccattgactcttgtagt

SEQ ID NO: 1601 - DNA, 834 bp, Arabidopsis thaliana
  Intron number 1 from transcript AT3G56580.3 (locus AT3G565 80) derived from phytozome v7.0 (chr-ID Chr3; pos 20961684 to 20962517)
tgaacaggtatgtaactgattgagctgctctttctgattaaccaagtaaattgttctcttgaatcttatcattttattttgtttcatttttcttgttggatttagatccttggatcaaatttgctcaaatgttgtggtaaagtctgtgcctttgattgtatttcggatattttctgtgtgttttactctgatattgattaggatttgtgtatttcgtattttttttttccattgaagcgttttctgtgatctggtttttgatcgatcttattcctcttgattaaccgaacgaaagatgttttgatttctgtagatctcttgcattgtactttcttcattgttcttaattcgattttctctccattgctggatcgcctgatggctcatttagagtttttttttctagctcaaatgtggttgaactatagagtttctgagttcattatttggtcattttttaattgagttggcttgattaaagaagaatttatttgttaatcagctagattagatttgaagattgtagtagattagtatgatgtgaatgttctaatctgggaataaagggtctagtgttgagggaaacatgagatttttcataattgggtgaaatatgtgttgtaaagtttggtcttttatttgcttaattatgacttgtggttccattgactcttgtagtatgaactaagctctgaggtaagcttgggaagtagggatatggccaaaatctctttggtttaccaacttagcaaaaaagttagcaggagttggtgatcagttctcctaccggcttttgcaggctaataactaatacctgactgtaaaatcttccaa

SEQ ID NO: 1602 - DNA, 525 bp, Arabidopsis thaliana
  Intron number 1 from transcript AT3G56800.1 (locus AT3G568 00) derived from phytozome v7.0 (chr-ID Chr3; pos 21035323 to 21035847 reverse strand)
gtggtacgttgttgtttttttctctctccctctcgcaatttcaaatgtttttgaatacataggattttgctactgttggatcttggtgtctagccataactgatttgatttctgttcttcttgttgattcaattgatctgtgtcgatgtagataattaacggatctgtaattcgtgatctctagactcgttccttgtttttcaatttttgttcgtttgtttcctggattggatttgaatcgaaatttggatgattgatgacttggagatttgccaatttgttatcgatttggatttaattttccatctgaattattttatctcactttagatttgagaagttaatgactagaaactgttaattgagaagtttgggatctagctaaaatgcttctctacagagaaacctgctttgagtttcgtaattgaagatatttgattgaattagatttacagagaagtgaatgatgaacaaattcttgatttgcttgtaggttgcattaccaccaaggagctgggtactgtg

SEQ ID NO: 1603 - DNA, 643 bp, Arabidopsis thaliana
  Intron number 1 from transcript AT3G57020.2 (locus AT3G570 20) derived from phytozome v7.0 (chr-ID Chr3; pos 21099412 to 21100054 reverse strand)
ggctgggttgattttgcctacacatctcctcacaggtttttatttaaaatatttacaacgtcttttgtcatcgtacatcgacacataatttatctaaaccaaataccaaataagttgatgaaaagtacccgagagatctgggaactcttgtgttgtgtagtaagaatattaataagttatgagagtaaagaacaaataatatgtttgtttctgttttccaagattttttgcagtgaatcagcctgagttttataatttgattttaaagtttgaatatctaaatattcttgtgcaaacattctgtggatccgtcccaattagttccaacgttttatattttatatctccttttttttttgcatattaacgaaaaagggaaacttaaatttattttgctatacaattcaatgaagaattccacactcataaggagatagatttgtgtcagccaaatccttgtggcttgtcaactggtcacctgatatgtattgtttatgtaggcttttctgaaaaaatcaaataagtaaattaactaatgatactttataaccttgttgtatatgaagagggaactgttcaaaaactgaagtagtgcctacttgtggaaggccattaggacttactttcgagaagaaaacgggag

SEQ ID NO: 1604 - DNA, 601 bp, Arabidopsis thaliana
  Intron number 1 from transcript AT3G57020.1 (locus AT3G570 20) derived from phytozome v7.0 (chr-ID Chr3; pos 21099454 to 21100054 reverse strand)
ggctgggttgattttgcctacacatctcctcacaggtttttatttaaaatatttacaacgtcttttgtcatcgtacatcgacacataatttatctaaaccaaataccaaataagttgatgaaaagtacccgagagatctgggaactcttgtgttgtgtagtaagaatattaataagttatgagagtaaagaacaaataatatgtttgtttctgttttccaagattttttgcagtgaatcagcctgagttttataatttgattttaaagtttgaatatctaaatattcttgtgcaaacattctgtggatccgtcccaattagttccaacgttttatattttatatctccttttttttttgcatattaacgaaaaagggaaacttaaatttattttgctatacaattcaatgaagaattccacactcataaggagatagatttgtgtcagccaaatccttgtggcttgtcaactggtcacctgatatgtattgtttatgtaggcttttctgaaaaaatcaaataagtaaattaactaatgatactttataaccttgttgtatatgaagagggaactgttcaaaaactgaagtagtgcctactt

SEQ ID NO: 1605 - DNA, 922 bp, Arabidopsis thaliana
  Intron number 1 from transcript AT3G58630.1 (locus AT3G586 30) derived from phytozome v7.0 (chr-ID Chr3; pos 21683960 to 21684881 reverse strand)
tggctccaaaggaccgacttcctccgcctccgccggtgagacctgaatcctttctctcgccgtatttcgtaatctgttcagaattctatgtctttctccattgtttagctgtgtaacagtgactatagcataagagtagaaacaaattttacctttttacttgtgatagtctctgtgccaacgacggctataataaacccaatcaaagtacaagaacaaattgatatcgcacagagatgatgaatctgaacaaaaataaactaattagtagcaagtattggtattcatggtaaggaggaggtcctggttacatttttctcctagatgttgttgctttgttacttgtgtttcttgtaattatagtctgagtgtggaaagtttttctacaatgactgatgtgagcattagttgggaagcagttcatgagctagaaacttgaatctgcttctgtttgttgttaagcatgagtgctttgtgaagtgttttgagtgtgatgcccagtaagttttgagtgtagagtagcctttttgttggttagttgattgagaagattgtgagtttacatgctaactgcttcgaaagttaggaaataatgggtatggatgtttgaaaagagaatgcatgatatgtggaaggatttttcggatgcatcaaccattagtttctgacatatagtctcaggagacaaaatttgatttttttttggatgcatcaaatctttcctgcaacttggctatggcattacacgacagacatttgtttctttcgttttcgcttggtccatatttctttacttgttagtcacctgctaatttgatgaattcctctttgcattacatgtttgaccactagaacaaattatcagcagcaggtctatgtatgaataataagtgaactttttctgtttatgcagctcttgatt

SEQ ID NO: 1606 - DNA, 749 bp, Arabidopsis thaliana
  Intron number 1 from transcript AT3G58640.2 (locus AT3G586 40) derived from phytozome v7.0 (chr-ID Chr3; pos 21692817 to 21693565 reverse strand)
cgtggatctgattacggtgattttacaaaaaccctttttgaacttttctcctcttttttttgttctctcgaattgtgattcatgtttgtggcactttgagctatgtattggatcgagcttaggtgtgtttctagatggtgtttgctttcgtatcggttttaagttatggtgggttctgtgttaggattgctttcgtgttgaaactgagtttctgggtagatcgcacttatgaactgttctattcgggagtaagtttatgtagaattgtggtatttagtacacgaggatactcatgggatctatgttggtttgctatattcagttaagatccttaagagattctctcgttgacttgagagtgagattggattatgagagtggaattctattgttcttgttgaaatgctgatggtttttcttatcgttaactcttattttccgcttcttgttttgtatttttggctgataatggatcattttatgcatccagtgagatgtttggtgttaaagcttagattgatcctttagaaaatatttgatgcagccatcgttgaagaggagaacgtttgaaatttcctctatttggcactgcactagttaggttgtgatgtggaaaaacaagttcaactagtttgtttcttcaatgtgtatctatgaattcattaaaatctccgccttctttgtttccattttttttatgaccatcgtagtttttaattaccattttcgtctctgtgaacgcagatcaa

SEQ ID NO: 1607 - DNA, 383 bp, Arabidopsis thaliana
  Intron number 1 from transcript AT3G58670.3 (locus AT3G586 70) derived from phytozome v7.0 (chr-ID Chr3; pos 21705433 to 21705815 reverse strand)
tttcaaatcgtttttttttttttttttttctgcttgtaatattcttcaatgaattgagagaatttgctgggcacagctcaattcaattcaattcaattcgatatatgattcagttttgcaaaataactgacctaaattctattcctggcaatacttttgcttcattgagtgagcccatttaggtagctgcagtgattttgaattcgatatgtaagaaaaaagattaatcattcacttgttagagttcgtcaaaaacactactttgtgagagactcagagctcctggatttgtaatatttgttttcagatgtgtttgtttagattatggagctctatatgaagttaaagttgttttcttttctctcctttcagggcagtgcttg

SEQ ID NO: 1608 - DNA, 596 bp, Arabidopsis thaliana
  Intron number 1 from transcript AT3G58670.1 (locus AT3G586 70) derived from phytozome v7.0 (chr-ID Chr3; pos 21705409 to 21706004 reverse strand)
gccgttcttcggattttcactcttctgctcgaaaggtctctcactcttctcttttttaatctattgaaattgaaacttcccttctcttctcttctcttctctgtagcactcctgcttctagtttagctgctcttcttcttctacttgctgcaacaactccaaatcatcatttctcttgttccagtatgttttcaaatcgtttttttttttttttttttctgcttgtaatattcttcaatgaattgagagaatttgctgggcacagctcaattcaattcaattcaattcgatatatgattcagttttgcaaaataactgacctaaattctattcctggcaatacttttgcttcattgagtgagcccatttaggtagctgcagtgattttgaattcgatatgtaagaaaaaagattaatcattcacttgttagagttcgtcaaaaacactactttgtgagagactcagagctcctggatttgtaatatttgttttcagatgtgtttgtttagattatggagctctatatgaagttaaagttgttttcttttctctcctttcagggcagtgcttgagaatcattgaagaaggtgatcgc

SEQ ID NO: 1609 - DNA, 448 bp, Arabidopsis thaliana
  Intron number 1 from transcript AT3G58670.2 (locus AT3G586 70) derived from phytozome v7.0 (chr-ID Chr3; pos 21705409 to 21705856 reverse strand)
tgcaacaactccaaatcatcatttctcttgttccagtatgttttcaaatcgtttttttttttttttttttctgcttgtaatattcttcaatgaattgagagaatttgctgggcacagctcaattcaattcaattcaattcgatatatgattcagttttgcaaaataactgacctaaattctattcctggcaatacttttgcttcattgagtgagcccatttaggtagctgcagtgattttgaattcgatatgtaagaaaaaagattaatcattcacttgttagagttcgtcaaaaacactactttgtgagagactcagagctcctggatttgtaatatttgttttcagatgtgtttgtttagattatggagctctatatgaagttaaagttgttttcttttctctcctttcagggcagtgcttgagaatcattgaagaaggtgatcgc

SEQ ID NO: 1610 - DNA, 472 bp, Arabidopsis thaliana
  Intron number 1 from transcript AT3G58680.1 (locus AT3G586 80) derived from phytozome v7.0 (chr-ID Chr3; pos 21707474 to 21707945)
tcgaagcggcgccgatattgagaccgttcgaaaatgtttgttttctttctttctctatctccgtctctctgatctacctttgtagcttaagttgtgggagaatatttctctggtttaggttaaatttggcgattgaatctagatgagttttattacgctgtgttttagtttccatgattagggttatttgccttcgtcgccgtcactggattattgtggttgtcttagaagagatctgtgttaggttttcgcctgttgtgattcgaatttcgtttgctgcagtaacagttcgtccgattttacttatggattcttgttcgtatcagattgatgtttctgttttgacatttgaatatgcctttatcattttttctttttcgtgaaatctcctttgttctatatgagtatttctagttgttgcaagtaatcatctaacgagatttgttgtttttgttattgctgggtttagtca

SEQ ID NO: 1611 - DNA, 717 bp, Arabidopsis thaliana
  Intron number 2 from transcript AT3G58710.1 (locus AT3G587 10) derived from phytozome v7.0 (chr-ID Chr3; pos 21715515 to 21716231)
ggacaaaaaccgatcaaaggctcgccttatcccaggtaaacagactctttttttaattaccgttgtgtcctttttgtcgttttaatcagcggcggcttagaaatgagaaagcgtagagtagccttgacggtggttgggctaacgtacgcatctcgtagagttttgttgaattacggacgcgtttgatatcgcgtgggtacacgcgccagctccttaattcttggggggagtttttgatgttgtgaacttgtaattaaggaacaattagagatgggtcatcactcactaattgaatttttctttttaactagtactagtattatatttttggataaccttgggggaagtgtgaaatattaaagtagcggtagatcttgatttctaagaaaaagccacaaaaggtaatgcgcacaaaaaggaaaagtattttacatatatatatatctacgtgattaacgtgccaatattataccattatctaacattttattcatttgatttcctggggttaattttagttttttctgtatcaaaaactaacaattacatctgttaaaaaagtttgaattatttgatcataaaatgttatgttcataactttgattatattttctaatgtatttttgctaaaagagtttaaagttaatcacttggagatgaaagttagtaactttagtggatcaatctcttttttcttctttgcaggggatattacag

SEQ ID NO: 1612 - DNA, 558 bp, Arabidopsis thaliana
  Intron number 1 from transcript AT3G58730.1 (locus AT3G587 30) derived from phytozome v7.0 (chr-ID Chr3; pos 21719281 to 21719838 reverse strand)
ttacttgttaagaattcaccttttgagaggcccaggtatgtcaatcccaaatctcactcttttcttctcttagtttggtttgaaacaattgaatctggtgggaaatttaggcgtgtatccatataacctgactgctcaattctgagtccaattgattaggtgtgttctgtgatctagatttcatcttctgggaaacgatctatcctaaagtcgtagactttgattcaattagaaaattcgtagactttgattcaatctgggaacaaaaaatggataatctgatgaatctctgtatggatcgttcgagataatgattgggtgcttggttcattagcctaagattttcctagtgaaacttaagaatctttgcgtgtttgttcaattataattagtaaaccagaatttacgagatttccatgttgatctctttcctcaatgatgcaagtattgtttcgcatcatcgaaaaatcatcttctgttgttggcttctgtcaatagagtaagtctgtttgtgtccttgtttaatcccatctctttcatttgctgtagttttgaaat

SEQ ID NO: 1613 - DNA, 491 bp, Arabidopsis thaliana
  Intron number 1 from transcript AT3G59340.1 (locus AT3G593 40) derived from phytozome v7.0 (chr-ID Chr3; pos 21931031 to 21931521 reverse strand)
acgtagtgtttccttggataggttgcttcgctaaggtatctgctggtactgtgatatcttttcttcttgtcatttttggcttttgatgtacttgctgactcctccttttcattccccttctttttttccttttggtaaatattttatttaagcattatgttttttttgtttaaactaatttatgtttcttaatttattggatcagtctatataacacggttataattcaaactaattatatttggtaacattttcatattagacaaatgtttgaaatcaaatacaaaaagtacaaactttaccttaattaaaactaagcttagttgaatggagggaaaagagaaggagaaaaagaaaagcttaaaaaatgtcaacggtaggtagtgacagcaacaacaaatcctttctgatctgccgtctgcgaatctcttattgtatttgaatgtctgtaatttatagattcaccgaagatctcagcttcttctgcaata

SEQ ID NO: 1614 - DNA, 271 bp, Arabidopsis thaliana
  Intron number 1 from transcript AT3G59640.1 (locus AT3G596 40) derived from phytozome v7.0 (chr-ID Chr3; pos 22028800 to 22029070)
aaactaatcctctctcgaattagggtttcgtcaaggtattacattatttcacacccttatcatcatcttctgatttctggtaatcttcttttgattagatcttcctatcgattggttcagtcctttcttattttcgaattcttgattggtttaccgtggttgctacgatttaaacctttaacatacctaaaagaacgtttttgtttttgctttttgttgttattgaagtttttttttttttttattgttgttgatgaagatcctggagttg

SEQ ID NO: 1615 - DNA, 482 bp, Arabidopsis thaliana
  Intron number 1 from transcript AT3G60540.1 (locus AT3G605 40) derived from phytozome v7.0 (chr-ID Chr3; pos 22375378 to 22375859 reverse strand)
gaattcttcttaatcagaaattgaagccgaatcaggtgaaattcttttactcgaatctcgtgaatctaagagacaattatgattcatctgatctcgcaatgtttgattgttttgcgatcgaagattctacagatgtaatgaatatcggatgcatagggtttgtaacatgctcgcatatatttgtctgatctagaattctagatgttgatttcgctagcgtaacatttggacttgtccgattatgacacgctttattgatctgcatgcccaatgttgcttcttttttcggttgtgatgatgaatcttgatttttggacaatatggatcagattatcaagaattattacactgttattaagccaaattgttcatagatttcatctttgatctctatggttttataaacatttgagattctacttcattctttcttaagtttgtgttgttattgacttagttgaaaaacaagaagtgaagcaaaa

SEQ ID NO: 1616 - DNA, 349 bp, Arabidopsis thaliana
  Intron number 1 from transcript AT3G60780.1 (locus AT3G607 80) derived from phytozome v7.0 (chr-ID Chr3; pos 22462720 to 22463068)
ctgcctctaacgcttacatccacaccgttagatcagtaagaatcctcctctaattcagatggcgcattttgtacatcatcttttgttttcttgttcatgtttgttcaccgtcaattcaacttgttgacctaaattgtattttgatcaaggaaatcttcaatatgtatatgaattacaatttttatagttcttataattaatattttcttcgctgtgaagtatatgtggtttttatttagtcgatcttgatgtatcatgtacatatatgaatttagaatcttgatgtaattatttctatatgtgtgtctttgaagtgtaaaagctacagagactcgagcgtggcggagtt

SEQ ID NO: 1617 - DNA, 986 bp, Arabidopsis thaliana
  Intron number 3 from transcript AT3G62860.1 (locus AT3G628 60) derived from phytozome v7.0 (chr-ID Chr3; pos 23240752 to 23241737 reverse strand)
agaggtatttaatgctcctctgccccaatacataatagtataaactaaaatattatgtcctctaattaacaaaacataatagtatatatatagtctaaatttgggtcaaacattattgaaataatgcatatactccatttgtatggtctgaccagagaaaaagcattaatgttgagtgttttgttatagcgacgtgctttagatagagtaattattgaatgagatgatttttttttgtggtgatccatgatttctgttttcgagcataataggcaatttattatgttccttcaatttacagaaactatgtatgtggcgtcgaccatatacatgttcattgaagatccctgatctcgccatctaatcgcggatcttgtgttaatgttttgttttatttttaagaactagatatattatattgaggaaaaaaatcagaggagattaattataagaatggaaaaagaatcttatagcaaaagttggtgttagttgcacttttgtctgcttcgtagctttcggcttagttgttgttatctttattttggggaaacgttacactatccttatcttcacatttttcgtatttttctgctctaatttatctaaatgccggtgtggccgagtttatctattcatggtaacagaaaaaactcggtggtaaattcatactattaattatgatatttaaaactagttgtggagttatggtacgtctaattatctcgaataatttatcaacgtgattgtgtgtacctaactagaaatgtaatactaagaaattgacagaatataagacaagagtccccacggtcacggatataagtattagttatgtttctcttttccttatcacaacgagaaactcgtgaaccgtaattgattgtgatctttgacaactaattcggcttaatcacattgtcgatacattgtctcaatgaaattcatcaaaagttgttgaataataaatttttaatgtttccaacaga

SEQ ID NO: 1618 - DNA, 788 bp, Arabidopsis thaliana
  Intron number 1 from transcript AT4G00335.3 (locus AT4G003 35) derived from phytozome v7.0 (chr-ID Chr4; pos 146021 t o 146808)
tcacgacaacatcaaattctccggcgacatctcaggttatcttcgtttactgctctcatcggttaattattccatctctttttttgtttcccggagtcggctttcgtgtactttttgtttttggtcttttcggcttcttcaattttagggttcgcgtactgtttagtgttgtttagtttctgatttagatgtgcttactgtgttcatgttgtcgtctattcttatgagaagatcttatggtagagttacatatcaatgatgttaccaattttgaaggttattgtgttgtgtttgattaaaattggctcaagtgtgaaatgcttttgctcgcgtcactgttttcattgcaacttgactgaatcctagaggttgttttagaatatagattcaagtttcagctattgatgggacattacaacagagcataaggaacattcccatacctttgtgtttcttatggataactttggcatcagatcaactttttcttttgtcattttgcttattaacactgtaataatcacttgttattgggatttctcaagtctgctttgattaatcttgtttcgtaatgttcttctcactattcactcttcccatacctttgtgtttcttatggatgactttgccatcagaccaacttttcttttgtcattttgcttactaacactgtaataatcactttttttttattggggtttcttaagagtacttttgattaatcttgttgcattcaagtaatcgttgttcagttcactcttttcctgcagtggcagtgcatctgtaaa

SEQ ID NO: 1619 - DNA, 788 bp, Arabidopsis thaliana; identical to SEQ ID NO: 1618
  Intron number 1 from transcript AT4G00335.2 (locus AT4G003 35) derived from phytozome v7.0 (chr-ID Chr4; pos 146021 t o 146808)

SEQ ID NO: 1620 - DNA, 620 bp, Arabidopsis thaliana
  Intron number 1 from transcript AT4G00830.1 (locus AT4G008 30) derived from phytozome v7.0 (chr-ID Chr4; pos 352162 t o 352781)
accaatttccccaattcgaaaacaaacacggtctggtatgccgagaaaattctccatttctacttttcttatacatttgttttggttgtttcatataaatacttctcatcttcttcgattttgttaccctcccccaaacaatataaaaaaaaaaggataaaccctagtttctttctcagactgtttcaagttcagatttttatttctgagcttaactggtgagtaatttgctttctggagagatgtgtgagttacgatctctaatttcattggttgcttcggttatggcttgattcttctctctgttatcaatttggatctggaatcatatatatacatacacaaaaactctgctctttttcaaagttttgatttttatctcatttgacgcttgtttcgtgatagcaatgaactacaattcttctgtatctctgccactaaaagaacctgaatttagtttgaaccatcctttcttctccacatttttttaaacgaaaaagagcagttctcatatcacccattataagcttttttttttggtgtatggtcctatagcatttttttaacagtgattacctgagcttcgtggttaaaaaagagtatggttattggatgaccag

SEQ ID NO: 1621 - DNA, 713 bp, Arabidopsis thaliana
  Intron number 1 from transcript AT4G01320.1 (locus AT4G013 20) derived from phytozome v7.0 (chr-ID Chr4; pos 545923 t o 546635)
gaaaccgtcgtgggtaagcttcaaaacctttttctgagacattttactatcctgtttcactcatcgtatttcgtttttgtttgggttttgctttctgtgttgtgtgtgttgagattccatgactcgtttgtttcatataccatcgtctctgcttctcgtttctaaattttgttcttttctaatagtgcgtaccttgatctgaggttttattactcctactagtttcttgtcttactcgtgcgtttgatttgatttgagcttatgtgatttcatcatctcttcctcggttttagaatgtacggagcttctctgttaaccaaaatctaggatttgggaagaaaagtcggagtcttttttttcctcattcccgattggaaattgagaatcttgaaatttttctttgttcaagtcatacagcttgaggttttgggttttcttgtcagggtattattatgttcgtgactgcaactagagttttctggagttttttgaaatgggttttgtgttgtggaaccgtatgtgaatgttgcatcaaaactctttcagtgctccaatgtttccatcagtagtcagcacaagagatctttttatatctggttgatcaaaaaagtagatgatgttattgaattttcagtgatggagtatctgttgttgtggcatttagagtagattcgtatttcatcttctgttttattctttttcttacaggtttt

SEQ ID NO: 1622 - DNA, 741 bp, Arabidopsis thaliana
  Intron number 1 from transcript AT4G01430.2 (locus AT4G014 30) derived from phytozome v7.0 (chr-ID Chr4; pos 585854 t o 586594)
ctaatcttggttccgttttcttatatttgggagaggtatgaacattctgattcttattcgtcaaaactcagattttgaaactatctttacatacattttgctagttaatgaagttctctggttatgttctcgtatttttatagggaatatatatatatgattcaattttcagacgtcgaaatttcaactacgtacctataaagttgtagtattattggtgtattctctcatgtatgtatgtatataagttttcattatatatatctaagtaatgaagtttgctctttaaatgagtttattataggaaaacaaggccacaactaacgttcatgcttttgtgcgaacatttcatcagcggattacttgggtttgtccttttcacttgttcctgttatatactctattacgcaatttcgcctttttcttctaaatgattttatttacttttaagaaaggagaaactgtcacgttatctcctattaatcacaagctttactttgtttcgttttttatgttagttttttttttaaatcacgcagggcaagtttgatgcaatttttctttttacttgggctttcgtacacgtcagcaactgtttcgatggctctagttagcatgttacctgctatcacctttgcgttagcccttattttccggtaatgcaactaatttaattagtaacatatatatatacatcaaaattttctcgttttttttataaatacttttgcaggatagaga

SEQ ID NO: 1623 - DNA, 813 bp, Arabidopsis thaliana
  Intron number 3 from transcript AT4G01720.1 (locus AT4G017 20) derived from phytozome v7.0 (chr-ID Chr4; pos 745873 t o 746685)
aggtacttgataaaatcataaaaatgataataaaatatatatcaacatttcggtttattaaaaaataaattgtatatttgtcttttttatgtggcaccgagattagcttaggttttagtgttcgatttatctggttttgaaaatttaaagtgatctattagttttgtttttctcgaaagcaattaaaattttaaaactatgtgtaatatgcgtaaataatggatgtagtttagttatgtaatgaattcataattttcatcttaaatgcccagattgaaagtcataagacgaataaatacgtgcagcttttatttgataaaatatgaagaagatgaaataaatagctagccaatgacttggtcaagaaaaaaatgtttcataacttaatattaaatggaaaatcaaatttcggactaagatatttcaaactagaaaaaaccttttgttttcagaagctacaaacgataagttatttgtttatagttaggtatgttcctgtatatgcatcatattttgtttgtccacaatctgtagatgcatcatatatgagtctttgccttagaattttaatagtttaatacgtccatatgtgaatgcatatgtggtaggttatcaaatgtctattattatgtgtgtgtttatatttattatcttgtctttgggtctatcggtactatatatattatgaggttacttgatcaaattaattaccgatactacggtatgattttgggtaaatttcaacgtctttttctttcaattttcttataaaactgacacatctttcttgcaaatttttgtttggcaaaaagg

SEQ ID NO: 1624 - DNA, 584 bp, Arabidopsis thaliana
  Intron number 1 from transcript AT4G02010.1 (locus AT4G020 10) derived from phytozome v7.0 (chr-ID Chr4; pos 881460 t o 882043)
tcgattttctcactcgcgagctcttctggtaaattctcgtttatctattagcttcttatactgtctcttccaagtgtagtgatctcgatttttaaggaattttgaaattggaggaaaaaaagttgtgatgtttcggatttctaattttgtctatgggacctatgtgatatctagttactttgtttctttatctgttaggtcactctgattttggttagtgaatatcaagtcacaatatagatttggaatgtagtttggatttgaacttatcgtgctcaagatttttaggtttatagtttctaaatatatggtacatgatctttagctctggacctatatgttagattatccaggctcaaaaaggcaaagtatgttggaagtgatttgggttttggaccatgtctttgtatattttcatgaatatagaatagtaggttgaattcattaggttgcttaaagacattctttcaaaattactcccgaatggttgcaatacctaatcacatggctagctttagttctgttcttgtcttagctctatctcactgtttttaacgatataacaatcccagattcacaaagag

SEQ ID NO: 1625 - DNA, 648 bp, Arabidopsis thaliana
  Intron number 1 from transcript AT4G02050.1 (locus AT4G020 50) derived from phytozome v7.0 (chr-ID Chr4; pos 900168 t o 900815 reverse strand)
caacaaatcgttacatcttccttcttctttctcctgtaagtcctcttcttttttttttaatctgttttctttcaacctatgacgaaaatcatcacacttgtcttgattcttcactttctgtctgaaaccaacttttttttttttttttactaggaaggattttgatttcttttttttccgaggtgttacttgttagaacgggataagatcgtaatctttttttttattatgaagatgacatttgaccaaaaaagtataaaacctctttttgtatttgttttcttatatagcattagtatattctgacaatattccaacgagcattgatgatttttgtggaaatagagatcaaagtaggaggaagacatgcaaaatcagtattaaatttttaatttgttatgtgaagataaggtcaagaaaatgacgtatttacttgttggaacttaattccaaacaattatgtaccaaacacgaatccatacgcaattatcacaaatctcaaagtggcaaaacttcacatttaaaattttcccaaaacctaaccaaattgaaatctatctaaccacgtgaagatgtaaatgtgtataaccctttttgtttcgttgtctctcagattctggaatttgagtaaaagcaagaaaaaaagtc

SEQ ID NO: 1626 - DNA, 511 bp, Arabidopsis thaliana
  Intron number 2 from transcript AT4G02075.1 (locus AT4G020 75) derived from phytozome v7.0 (chr-ID Chr4; pos 915652 t o 916162 reverse strand)
aaaaaggaaacacaacttgtgaaatctgtcttcaggtactttatttttcttgctttttgattatcaatttttccgatcatcattttttttttttttggtttcgaaatgatttgaaaaaaaagtatttatgtttaattttgtgtgatgtgcgcttcgctggattcaagataattaatatttttcttttgtctccaatttcttgaattgcttaatgcgtcactgtttcttccttgtttgttttttgtcgtcaaattattttcatatctataataataatgatacattagagaaaaacaaataaattttttgattgtcgcaatcacttgtgaacttattacggctctttttctgtttattagctttttttctttctaaattcagtgaacttaaaaattaaaattggaaaccaaagatgataattggtttttagaaataaaattataatgatagaaaaattaaattatgaaaatgaggaaactaataataatagaaaccatgcaggtgtataaag

SEQ ID NO: 1627 - DNA, 841 bp, Arabidopsis thaliana
  Intron number 2 from transcript AT4G02700.1 (locus AT4G027 00) derived from phytozome v7.0 (chr-ID Chr4; pos 1189842 to 1190682)
caaacctgccttggcctcttacggtacgtaacaatccaaacatttcagacataaacgtgaaatatcgatgtctattattggtttacatataatggaatcattattacgtactcaatttaaaacagtcgtggtagaaattaaatgaccgctagaatatgcatgtgtttgtatagtattaattgtatattttggtacaattctggttgttttctagtggtctactccctctgtcccataaagataaattttctaggaaaaatatttgtcccacaaagatagaagttttatatttccaatgcaaattttaaaactgttttcccgttttatccttactaaataattagataaatatttattattatttttaaagtatattaagaggttaaaattgtctttatacaatatttcttaaacaatgtgaaatttttaaaaaattcatcttagtgggacggagggaatatcattaattcattattaaaaagtgagaagggaacaatttttcggctgaaggtctgtgcatgctgttttgtttttcttagaaatagtaaaaatgtatattctatagtctatacaaaatagaaaacaagaagaaaacaaaaacatatagttgatgtgttccatgttcgattctgaggcaaatatgtcagaagatgataagattataaaatttagtcttaacatttacaaacaaatttcacgtgaacaaaactagcaaaataaacgttaaatcaatcaaacatacaaaacacatacgttatatagtaattatgagtaaaattgataaagagtttagtgaatgatattaggttagggttcgtggtggagatattgtcgcacgcgg

SEQ ID NO: 1628 - DNA, 570 bp, Arabidopsis thaliana
  Intron number 1 from transcript AT4G02725.1 (locus AT4G027 25) derived from phytozome v7.0 (chr-ID Chr4; pos 1206292 to 1206861)
gaatacgactctgtttgggacactaaaccctcttggtaaatctcatttaagttcccaacaattttatttcaagtagtttggatttggtcctaagacttatgaggaatcgtatttgttggttgtgaatatgggattatagcttagatagagtcttaagttcacttttaagtggaccaatccttaatctttattagcattttcagtgatttatgcctgcccaagaacttttttgaatcatatatgaagctatatatttattgatgctacttaaaacaagacttaccccattacagtttcatgattgtgtgttgtggtttagaagatagaaagaaaaagtttgaatcttttggttaggaagatagtgaagaaccaaaatacagattatgtaatggtaattgggttaagaagggtttaacatttcgacctcagcatctacagctttgaatatctattgatctggtgtgtatttgcaatcaagaactttacggttcttcttagacgttttcagggcctagtgttcttccgtatggttttgaataagcaactggctatgtttctcaggtgtcagcc

SEQ ID NO: 1629 - DNA, 876 bp, Arabidopsis thaliana
  Intron number 1 from transcript AT4G03180.1 (locus AT4G031 80) derived from phytozome v7.0 (chr-ID Chr4; pos 1403417 to 1404292)
atcggaaaataatcgctataacccttctttgatcagtaagagattcttctctctacccaacttgaaaaaaagtttcctttttgattgtaacttgtcatcctcttgcttcgaacttaagctagtactcgaggattaggaggaactatatcaagatttaagattaggctgatgttaagaatgctacgatgtgattattgactatgtttaccctgcttctctctacccaacttgaaaaaaagtttcctttttgattgtaacttctcatcctcttgcttcgaacgtaagctagtactcgatgattaggaggaactatattaagatttaagattaggctgatgttaagaataagaatgcttcgatgtggttattgattatgtttcctttggtgttaggcatcagaagagaactatttggagttcctttaatggtgtatagtttcacagtttgtgttttctaatcagattaggcttaagctagtactcgaggattaggaggaactataataagattaggctgatgttgaggatgctacgatgtggttattgactatgttaccctgcttctctccacccaacttgaaaaaaagtttcctttttgattgtaacttctcatcctcttgcttcaaacttaagctagtactcgatgattaggaggaactatattaagatttaagatcaggctgatgttaagaatgctacgatgtggttattgattatgtttcctttggtgttaggcatcagaagagaactatttggagttcctttaatggtgtatagtttcacagtttgtgttttctaatcagattaggcttgaagtaagattgaatgagtgttcttttgtgctcactttcagaaaagcaaaaagagttctacaaga

SEQ ID NO: 1630 - DNA, 489 bp, Arabidopsis thaliana
  Intron number 1 from transcript AT4G03200.2 (locus AT4G032 00) derived from phytozome v7.0 (chr-ID Chr4; pos 1408824 to 1409312)
agcaaggaagagagacgtgcccatcttcttatcaagttgtttactttatcctcttttgatcgttttaattactgcttgattagattccattaatgacttttagtttgtgaaactaatttggttccttttgttttcaaaatctcttttatatggaatcttgaagttggatacagtacctgtcactggtgagactttcaattgttttcttggatttgagtttgacttcttctttttactgaattggaggattaagagaatgaatgacagattcaaagactctggatctgttagtatcattactcttctctcctcataggtgtaactctaatgaaggatttaaggattttataaattgaaagtggaaagaagtcttatagcctaagaactaagtgttattgtttgaaatgttaggagtagagaagcagataatcttatattcctattttgaaatgtatgtttaagtaacagttaactcttttgtcaggtgcc

SEQ ID NO: 1631 - DNA, 311 bp, Arabidopsis thaliana
  Intron number 1 from transcript AT4G03298.1 (locus AT4G032 98) derived from phytozome v7.0 (chr-ID Chr4; pos 1446701 to 1447011)
accgatcgtatctctcttacattcctggcctcaaggttttttctcctctcatcattcattttgcactatttgatttttgtttttatcaccgttttactcatctgcttcttcgttttttctgtgaaatgtgtttttttttcttcgctcgtagaatagagaaagctttaaaagtttaaatccttaattttgttaaaattatatacatgtatgaatttttactagtgtataactagccctgcatagcctttaatgtgttttcgtaaacaaataaagcaggaaccaaagtccatcatatctaaagaaatacttga

SEQ ID NO: 1632 - DNA, 816 bp, Arabidopsis thaliana
  Intron number 1 from transcript AT4G03415.1 (locus AT4G034 15) derived from phytozome v7.0 (chr-ID Chr4; pos 1505658 to 1506473 reverse strand)
ttcttgatctccagaaacctctacacaaacaaaaggtgcgttcttttgcgttgaaatggctcatatctcaaatcgtttgtttctctttgtgggtttcttgttgttaccatgtttaaggcaaactgtctgatctgctcagacatttagttgtttttcctcttcatcactctgcgctagttttgtttccgaattcttttgagacaatattggtttagtttcttcttactcgattcacactttacgacattggattcctataaagtgatttacttttctctaaaaacggcaactttgttgcttaagaatctctctgttcttcaggatttgcattaacgtctctcgtttcctgaaaggaattgatgatttacgccagtagaatttgaatattgtctatgtggcagatgtaaagaacaagttacaaagagatattcacaagaatccgtctggattcatgtgtgaatagaaatatgagcaaactctgttcttgatctttgtgctttcttttcataaggattcatgttttgtgattcttgtaggtcctactttgattaatttaatcacagggattagtaaacaagtctcagaacatagattaataagatccccaatggtgataaacaatctcaagacagtctttttggtaatacatacctttattctattgctaagatcacatgctagaatttggtctttactacttcttgaggtttatttatctctgtgatcttattgaaactgctgttaaactatctacttaatcatttgtctctattgcttttaggtcatagtccatcgttgaccaagatttgaatccaa

SEQ ID NO: 1633 - DNA, 965 bp, Arabidopsis thaliana
  Intron number 1 from transcript AT4G03500.1 (locus AT4G035 00) derived from phytozome v7.0 (chr-ID Chr4; pos 1553456 to 1554420)
aagaacgagtctcggacatctgaagaaatcaggtaaatcggaggatgttaaattttcgtcgtacggaaagaactccattttaattttagtcttagacgttaagattttgggcccttgagaattttgagtgttttttatttgggccttttttttcttcaaagcattgctaaaaacgacggcgtattgacaagcatatgtgattaaaaaaatccaaaacttcacaatctagtttggcttatttatgattctatgttatgttaaatgtataaaaagcttatgtgtgcaactctccaacgagatacatcggaaagaatataaagggcggaggtgatcggttcaggcttcagactgtggagttattgggggtttgctagtagtgggcttttaggacccaatcatttataaagcccagttagttttccactagtacgttatcgtacaaggctaactccgtttagtcaattaatcgttttgttgttctatgcagcaaatccctgttaaaaatcgctcacgctttgcaacaatacgatgtgatgtcgtctgcaacatacttcgtcgtttcgtgttgtctttgtgtgaaattttttattgtgagactaattatttcagtaagccattgcatgctttatcaaattttcaagttgtattttaaaaaaattttagctagttggaataatgtaattagaaatcactcaatttccaagtagcctttcgtatacaacaaaaggtgcgtggagagattcaataatggcgctatcgattaaaattaaactggccataattttcttttcatattgacgaaaacagaaagggacgtgtagacattcctgaacctgagcttataagaattattatttcgtatcttttaatctacgtgctaagcaaattcagtggaaaagctacaaaactgtttttttttttcataaacagcaagctaggaatattttcaggagtgggattttcaa

SEQ ID NO: 1634 - DNA, 957 bp, Arabidopsis thaliana
  Intron number 1 from transcript AT4G03520.1 (locus AT4G035 20) derived from phytozome v7.0 (chr-ID Chr4; pos 1562890 to 1563846 reverse strand)
cgtcgtctgtgaagctcaggaaactactaccgatagtatgttttctcactattcctttttcgattttggttattaacttgtctttgattcgtgctcgttggtggattttgagaactgattattgatttgtgcgagggaaattagaagcaaggtgcttgaatttgtgttgttgttcttgttgtagcatttagtaatctgctaaaaacttgagattagttacagattagtgaatctggaggaggaagaagagtttctttaggagagtataccttttgagaaaattcttgctgaaaatgaggtttctgttagaggaacgattcatgccatttgcgtgaaatttgaagaaggttgctttttaggatcacttcttttttggggatattttacttgattaatgcaaagtctctctaacaaacctagaaattaggttgggtacctactcagatattttattggttggatcatacacattgtgacaagaaacagttatttggctcatgagagaagaatgttgctttttgtgctttagagtaaacatatcttgattctctataccagcagataacgattttggttatcactagcattgatattctacgattttagataggtaagtccttttccgtgataatgtgtttggtgagattagcagtattatctgctacaatgttaactcagtcattggtctctcctctctggtgaaaacataaagctttatccttcactggatctatcaaatttctattttgaaaaactttcacttctagatcatttttaggaaatatcatatagacttgctacaacatactgatctagctgaagatggataaacgggtcagctgtctctttgttttattcgtccaccttggctgatatattttgttttcattcatgattctaaaagctttggcaataaggtgttgatttgtgttattgatcctgcagttcaagtggtca

SEQ ID NO: 1635 - DNA, 622 bp, Arabidopsis thaliana
  Intron number 1 from transcript AT4G05000.1 (locus AT4G050 00) derived from phytozome v7.0 (chr-ID Chr4; pos 2563312 to 2563933)
ttttcatacgcaatcatctcttgacagaccttcgtgtaagtaacatctccatttgttgtctcatctttgaagaaatctgggattattgcttctagtgagtgagatataggaatctagtgaaaaattacttagcttcttcatagcttttgttccatgttgtctgctaaatgtgagattctattactgacttgtgagattagagttttaacttggctctgttggatgaagaaatctgattgctttaagcaagttatgggaagcttagtgaagaaattagcttcttgataggttagagatacttcgattctgttttttaattttcttcttagtttgagcttttgtggtaaactctcaaactcatattactgtgtttgggggtattagaattgagtctgttggatgaagaaagctgggattttgattacttctaatagatttagaaagctttagtgaagaactgttagcctcttgataggttatgagtttctttggacaattctagttgcttttcatttcttctcgatttgaagttttcttctattgagatattaggatcttgactttggtctgtgtggtcattgatacagaaaggaagagcttgtgcgtgtaccgttctcttctc

SEQ ID NO: 1636 - DNA, 859 bp, Arabidopsis thaliana
  Intron number 1 from transcript AT4G05000.2 (locus AT4G050 00) derived from phytozome v7.0 (chr-ID Chr4; pos 2563075 to 2563933)
atttttttttgctttcaccgttcataacttctcaggtcagttttcttcctctttcactttcaaattcgtatggtttacgaatcttcttcgctattttttattcagatattcccctccatatgttagatctcgaatttttctcgaatctcccataatttacttgaatttagggtttttgaatcgacggctcatcactaagttttgcttaactttgttgatccgtgtttttgttcatcgttttcatacgcaatcatctcttgacagaccttcgtgtaagtaacatctccatttgttgtctcatctttgaagaaatctgggattattgcttctagtgagtgagatataggaatctagtgaaaaattacttagcttcttcatagcttttgttccatgttgtctgctaaatgtgagattctattactgacttgtgagattagagttttaacttggctctgttggatgaagaaatctgattgctttaagcaagttatgggaagcttagtgaagaaattagcttcttgataggttagagatacttcgattctgttttttaattttcttcttagtttgagcttttgtggtaaactctcaaactcatattactgtgtttgggggtattagaattgagtctgttggatgaagaaagctgggattttgattacttctaatagatttagaaagctttagtgaagaactgttagcctcttgataggttatgagtttctttggacaattctagttgcttttcatttcttctcgatttgaagttttcttctattgagatattaggatcttgactttggtctgtgtggtcattgatacagaaaggaagagcttgtgcgtgtaccgttctcttctc

SEQ ID NO: 1637 - DNA, 471 bp, Arabidopsis thaliana
  Intron number 1 from transcript AT4G05590.2 (locus AT4G055 90) derived from phytozome v7.0 (chr-ID Chr4; pos 2907196 to 2907666)
agctctttggaatcatccagctggacctaagacaagtgagtcttcgatatccatgaatgtttttttcttcacttttgacttttcacacggtgagattgatcatagtatttttattattgaacaatcagtatttgtagaatttcatcttttgttcctcgatttgctttgtttcaaacctaattccaattcttgagtgactccgtaacagatccttcttagtttggttgatttttgtgtctctgaaaatggtttatcagtttatgcataagattcatattcggtttagatttgttaaagtttggtttagattagtttgcttaacatgctctgttttctccaatagactaatataagtttaatcaaacaagtgcatttggtagcttgatcaaacttgctacaaaaacctgaactgtaaaatcatttttgtatttgtcagttcatttttgggcgccgacgttcaagtggggtata

SEQ ID NO: 1638 - DNA, 582 bp, Arabidopsis thaliana
  Intron number 3 from transcript AT4G08150.1 (locus AT4G081 50) derived from phytozome v7.0 (chr-ID Chr4; pos 5149116 to 5149697 reverse strand)
gtgtcagagtcccattcacatcctcaacaatcctggtacatgtcatcaatctcatatacatacatatatgcacatgtaagaaatggctggagaaaacaaagtgtagtggcaaggtagggctaatgatggattgcataaattggcatgtttctttggttcatggtaaattgttgtaacattgagatattaaaaaaaaaaaaaatcatagtctacatacattttcaaatgttaattaagattataagataattaagataattgagatgcattattgttggaaagtatgtaagatacaaataggtgtgcatatttgttcttgttttccccattgtggaatccatccaaagatgggtggggcttatttttgttttttttcttttcactcggcccaaaagtactatcacaagaacttttggtgctgctcgtgaagatttatttgggacattatcttcttcgatttcgttatgctaaaacatcaaaatctctactcggattaattagtctaatcataaaggtagatgactagaatgttgttaaatgactaaaccatttaacttcatgaaatatattatgttgaagcag

SEQ ID NO: 1639 - DNA, 934 bp, Arabidopsis thaliana
  Intron number 1 from transcript AT4G08310.1 (locus AT4G083 10) derived from phytozome v7.0 (chr-ID Chr4; pos 5251080 to 5252013 reverse strand)
cagtcccgagtaacctacctcagagataaagcagagtaagaatcgttactttcttcatctctgttcgcttcgatttcacggaagttgaatttggcgaaacgaagaaatgataatttctaggtctgtaaattgagtggttcgaggagtattcattgtctatggttggctaggtttgtataagaattgtttggtgatgatgattaagagtttgattttgtggattaactaggttttatggtctgtgttgtttgttgaatttggtgaaatattgttgaaacgaagaaatgataacctaggtttgcgaattgagatgtttgagtagtattcattgtttatgcttggctaggtttgtataagattggtttggtgatgatttagagttggattctgtgggaaaactaggttttatggtttgtgatgtttgttgaatttggtgaaatattgttgaaacgaagaaagtgagaatctaggtctgtgaattgagatgtttgagtagcatttagtgtctatggtgtgctaggtttgtataagattgttttggtgatgatttagaattggattctgtgtagaaactaggttttgtagtctttgatgtttgttaaatttggcgaaaatagggttgaaacgaagaaaattaataatctaggtctgtaaattgcaatgtttgtgtagtattaactgtccatggtaggctaggcttgtataagattggtttggtgatgattcagagtttgattttgtggagatacgagggctgtaatggttccgtttcatttagtatatgagactaagatttgcatagaaaagaatgtttgtagggttaatggtttaaaggttttctgataattgcatagaaagatttatggaaagcagaatcatctggaatttgctttttgcagcaacttcacctttgaaggtgtgcggaggttgctgg

SEQ ID NO: 1640 - DNA, 807 bp, Arabidopsis thaliana
  Intron number 1 from transcript AT4G08980.4 (locus AT4G089 80) derived from phytozome v7.0 (chr-ID Chr4; pos 5758186 to 5758992)
gttttgtagattctctgatcagaattgtgtaaaaggtattctctttttttttacttgttgaagaattaaagtaagtaaataattgatttcttattggagggacccttttgttgtcatagaatttactctgctgcgtttttttttactgttgttgctttgttcttgttgtttggttgtatattgttgatgctctctctctctcgttaggtgaagtagatctctcttttctctttctctttctcctctctctctctttccttactcagcttttgtggtgaatattgaagaaagtttctctggtgaataagagtttgttcttatttttatgaatttgttctgttttcttgttgatagtttttgggtttgataaagttgtttcctttttacttcttttagtatctatctttccaattctagtaacttcactggttcttgagctctttcaactttttgtttcagatctctctgtgtttttttctgatctttctccagtggtagcttctgagttagtgattgtactttacttccatacttcttgttcttgctcatagattttagctgtggttttgtggagttttagctctcagtgattgttttagttttagttccttaaacatgttttgttcatatgggtttgttagatctttgagttttcttcatttctttattatctctcttggatcttgatacaaaagtatgaatctttagattgcttcaagaaaaaaagttttaaagactttaagagattcttagatacatagaatttgaagatcttgtattggtttttgtgaaacagatatttgttag

SEQ ID NO: 1641 - DNA, 406 bp, Arabidopsis thaliana
  Intron number 1 from transcript AT4G09510.2 (locus AT4G095 10) derived from phytozome v7.0 (chr-ID Chr4; pos 6023348 to 6023753 reverse strand)
gttacgagtttttaacacttccgtcgtcttctcaggtttggttcttctcatttatgttaaaccattatgtatggtaattctagaatgtagatctggttcgttctcatggatcttgattaatatgtttgtttaatccacgtattagcactaattttggattattatttggaactgttatcattagataagttttgaattatttgcttaagtaagtaaagaagataagagaaaataatatttattagtctgaacataatcttatcttaagataaacagaatttatttccaaaaaaataagtttttgttaaactaaacacaatttattaccagcaataaaaagattctgtttaatgttgttatcttaataactgatcttttgtctgttttttagttgttgttgttgttt

SEQ ID NO: 1642 - DNA, 589 bp, Arabidopsis thaliana
  Intron number 1 from transcript AT4G09570.1 (locus AT4G095 70) derived from phytozome v7.0 (chr-ID Chr4; pos 6050063 to 6050651)
tacagactttggtttgtctgtcttctacaagccaggttcgttgttgattcttctcttttgattggaatcttatggtttttgtctttgttggttggttcaaggaaatgttttgatttggtttcttgattcggatttgctgcttgagcattgttagggaaagattgaattttgttatatctggttttgacatttagttgatatatatggatgtgttgattgtgcaaggttttgttatatatgtaacatatgcttatggttatgaagcgatcttatcagattttattcgattcattgtctagattatgttgagaaatgtcttgtttggtgttgaaaatcggtttcatgatatgttatctgtagaatcatttgttgaatggtcatttccaatttgctgcttgagcattgttagagaaccaataattttctgtggctagatctttctgaatcttttcttgcaagatttacatagttttgttgtgttacttatgcttatgtaatgatgctatcagagctacattgtgtccgactaatttcagtgcttaacaaaattttcaattgtgtgggtttgcatcttcagggcagtatctgt

SEQ ID NO: 1643 - DNA, 414 bp, Arabidopsis thaliana
  Intron number 2 from transcript AT4G09820.1 (locus AT4G098 20) derived from phytozome v7.0 (chr-ID Chr4; pos 6182643 to 6183056)
tgcgtctctttctcttttcctcctccatctgggtaaacaactctctccctatactcaagtttctaaatttgttctttcttttttttccttctctaagtgaagacaaaaatagtattgtgtgttaaatgcgaatatcgaaaatattgtgttgacattaaagagaaactgaggaagttgagttactagaataagaaagaaatgagagttaatgaaacgtacacacactacattttcatgaacattattgcgaccgttgagattctcattgtttggtgattgattatctaaagtagaagcatgaatagatataacataaatgcataacaaaatgggttagttatgggtatacttcatgcttttctctatgtggtaaaaaaaaatcaaatataaatttgggaggtagtaatttgtagg

SEQ ID NO: 1644 - DNA, 853 bp, Arabidopsis thaliana
  Intron number 2 from transcript AT4G10730.1 (locus AT4G107 30) derived from phytozome v7.0 (chr-ID Chr4; pos 6613616 to 6614468 reverse strand)
agtctttggatctcgatcgctgcaatagtaatctggtttgttctaaatttgatctcttttagcttcagcatcgaatttgagtatgtgtattttgagttggggatttttgattttgggatacaaaattgagatcatgtgtagcttcactaaaaatcgaaactttgcttcgttgttgcaataaagctatcatcttttttgatgggcgatgaccaaattgtgttatcatcttctcattttgcgtttgcgtttctgttagcttcactaaaaatcgaaactttgcttcgttgtagcattaaagctatcatcttttttgatgggcttatgaccaaaattgtgttattatcttcccatttgcgtttgcgtttgtgttagcttcactaaaaatcgaaactttgcttcgttgtagcaataaagctgttatcttttttgatgggttatgaccaaattgtgttatcatcttcccattttgcgttagtgtttgtgttaacttcactaaagaatcgaaagtttgcttcgttgtagcaataaagctattatcttttttgatgggttgtgaccaaattgtgttatcatcttcccattttgcgtttgcggttgtgtttgtgttagcttcactaaagatcgaaactttgcttcgttgtagcaaaaaagctgttatcttttttgatgggttgtgaccaaattgttaccaccttcacattttgtgtttaggtttggttggtttaatcatttaagatcaaatgggattatgggagagttattagatctctctcttctttccctttttgtatttgtttcttgttcttgtgttttcgtttctgcgaatttaatgcattgttttggttattttagg

SEQ ID NO: 1645 - DNA, 839 bp, Arabidopsis thaliana
  Intron number 1 from transcript AT4G11020.1 (locus AT4G110 20) derived from phytozome v7.0 (chr-ID Chr4; pos 6734899 to 6735737 reverse strand)
gcctgaagaagtatagttctctttattttattttattttattttcttattattcgaggttttcaaacattttatattacaagaagaaaaaaaaggaatttctttttgggattatgctattgcctgtttttattttaccaacctttttccgagattttttttttttgcatatgagatcttgggtgtttgaaatgtggcattggtgtattaccacaaacaatttgttttccgtcgtaattttgtgtgtcatcataaataaagttcattgtttcgagtgaaatgttcgctttcatgttagttttctctcatgtgtaagttattaatatgttcatgttcttctctgtgtatcttttggcatttttacaaaaatgttaaaagaaacacaaatcgtccgatatcttacataaaagattatcataaaagttttaattaaaaaatgatgggtctaattagtaatacaaaactatacaaaatttagttgtaaaattttacgaaataatacataattatgtattgtaaaaaaatacatgaaagttgtataaaaagctgaaaataatattcttttgtaaagtctttaattaacgtttttgtgattagtaattgttaaagttatacaccttaatactacatcagtatagggctaccaatcaaagccgatttgtatacaactctttcctctgataatgacaccaaccaatctcaaacatgtccttctttgaaacttattttgatatcgttcgaggagaataatattttttatgttgacaagtctacacatgggttaacttttatattttaatatccatctcaataaggattctttgtggtagattgtagtga

SEQ ID NO: 1646 - DNA, 888 bp, Arabidopsis thaliana
  Intron number 1 from transcript AT4G11350.1 (locus AT4G113 50) derived from phytozome v7.0 (chr-ID Chr4; pos 6902555 to 6903442)
gtgttccattgactaaagagatcggttttcaccaagtaagtaaagttttgtttggatttggttatttttgtgaaatgggattttgcttagattggtttgattataaatgattttgggttagaatgatttaaaaaggtagtgaaataggcaaattgatgattagtttagtgtgtacgtaattgatattcatggtttactgatttcagtcgaattgatattttagttcaaagtcaaagattagggccaatggatttgtcaaaaactccttttaaggtttgttaatgagagctaaagctttaataggagcaagtaacagattaaggtaaacgctttctacagaaacctagactgtttaatggttcacattcgtttcagttttcgtaagtttggtagttgtgcgagtttattaacttaataattgacattaattagtttaagtatggagatccgagtttgtgccgcactactaatttgctacttaaaaccattttaaaacagccgaccaaaagtaaaaccattggaaataacaagaagcttcgtttgatgagagaaaacgtgaattgttgtcaactttggttgatgtttttaattaacaaaaaaaaaacctttggttgattttctttgttagtattttaaacgatttaaagagaaattaaagcagaataattagaacacgtggcgcttgagcagcgccagtctttgtcaatagttagattcctagatgtcggaataagacgcgtgtgtcagtttcaacctttaaaagtctttaaagacttgtgactctttttttactctacgcgcaatatagcgcgtgaaggtctacgctcctttcttcaaatttctttgattcaattgtgtgtgattttatttgtatgtagtacgacgttc

SEQ ID NO: 1647 - DNA, 541 bp, Arabidopsis thaliana
  Intron number 1 from transcript AT4G11450.1 (locus AT4G114 50) derived from phytozome v7.0 (chr-ID Chr4; pos 6961252 to 6961792 reverse strand)
gagatttacacactctgtttctcactgtaactcgggtatgttttgtttttttctcttatgtctctatctgtgtctcttattagatctctttttttctctaaatctttaaaaaataaaaattgattctttgcttaatgctatctgattcttttggtttgttgttcttctttgactgctattttgggttctttctgattttctagggttgttttgatacactctttactactaattgggttttttgtttgctctatcaaccttatatgagatctacattgtgtatgaatcaaaagatcattacttttgcatgtgtagtttgtgttttggaagcttaatttgaatccttttgaagcttttatgacattctattcattagatctactaatcactgattaaaactctaatctgttactatcattacaagaagttgtttagtaaattttcagagatttcattttagcatgtttcatctactaatcattgaaagtgtctttatttaggaggactaaactgttttcttgtattgtgtaatgttttacag

SEQ ID NO: 1648 - DNA, 343 bp, Arabidopsis thaliana
  Intron number 1 from transcript AT4G11630.1 (locus AT4G116 30) derived from phytozome v7.0 (chr-ID Chr4; pos 7019977 to 7020319)
caggcttttcctcttcagctatacctgtaagccactttcgttctctatcttggtttaacattgtcgaaatgtagaagaggtttggttggtaatggagatcttatatcaaatgggtttgaaaattgcaattagtgtagaaaaacgcaaactttgctcttgtgtggtagtaagagttatgtagatatagaagaaccagctttgacacaagttttatgatttcacaagttgttctactttatatgtttgggtcacagtgatatctatctagtatgttaatgtacattaggtttctacgtgtttacgatgttcttggaaatattttggcagaaacaaaactttacgt

SEQ ID NO: 1649 - DNA, 574 bp, Arabidopsis thaliana
  Intron number 1 from transcript AT4G11820.2 (locus AT4G118 20) derived from phytozome v7.0 (chr-ID Chr4; pos 7111300 to 7111873 reverse strand)
tggatatctatttccctcccacctgtgttcaacaggtaacaaaactccaagcttttttttttttattctctctgtttattattggagctattgcatttgatactctgtttttatcagagcatctttctgttttgtgtaccgttttaattctccatttttgacgtttggtttcataaatcttcaaactttatgagattttacgaacagggctttgagaatcaatccaagaaaatctcgttagattagacacacacacgaacacttgtttcattgtctctgtttttttgttctttcttctctgtaatggcggcggagttttgtatccgatgaagacagaaaatgctcaatttttaattttcatttaagaaacaaaaggatttttattaaatttctctattctcaaactcgagatctctgcatctgattgaaatgaggactttgaaaggttgaaagggtttttttttatactgagatttatcgtataagtctcaattggaaaaactgaaaaaggtacaattttgtgaatctgatcttgttgatcattttttggttatataggaagctttggaagcac

SEQ ID NO: 1650 - DNA, 536 bp, Arabidopsis thaliana
  Intron number 1 from transcript AT4G11830.2 (locus AT4G118 30) derived from phytozome v7.0 (chr-ID Chr4; pos 7120442 to 7120977 reverse strand)
gccactgctccctttgcgtctaggtttctattcgggtatgtattctctctctctctctgatttgcatttgtttgactttcactggatcgtggtggatataattattggattgattactagttttctgattttgttcgagaaattagggtttagaaattcataattgatcatcttctattgctcagttgaataagaaaggttgcagatttatagtttttatttgattggaatgtgtcacactaattcaaggctatgtcagttactagtaaaggtgaatattttgcgatccagtttgaaatgtagtttatcaatgaatagttttacaagctctgtttttattctaaatagatcttttgataggtttcattcatgtgtcttttcgatactctcggtgattagcacttcatagaggactagttggcatgatttgttgtgttacgacattgactacacgtttcagttataacctattatcaatgactcagattgtttatgttacagttctttcgagcctcgagtttcgtatcgtggtgttg

SEQ ID NO: 1651 - DNA, 562 bp, Arabidopsis thaliana
  Intron number 1 from transcript AT4G12600.1 (locus AT4G126 00) derived from phytozome v7.0 (chr-ID Chr4; pos 7453489 to 7454050)
ttcttcttcatcttcctcttcttgctgaagataaggtatttgaatttcttcttatcgtttcactttcttatgaatctcaattagtagtttctttggctcttgcaagttttactggattcacttgggtatcttcttcatatgataaaaagataagactttattggctattagactccagttttgagattgtgattgttgatgttcgtagtaatcacttaggtaatttagtttatgaatgtaggagacagattcaattaggatttttaggcattgagaagttcgtttgttctgtattaacgtagcttgtgtaatgagttaaatctgtgattcttggtcttaggattgacaatatcattactttagcttctgagtattatgctctgttgattcatgaatgtttagttgacagttcccattcaagttttttttttttggcctatttaaatttggctgcacaaacatatctttatttgtattcagcaaatctgtttcacaagcaacattctgattctgattcttttactaattagttgttctctctctggctttgaactattgcaga

SEQ ID NO: 1652 - DNA, 1003 bp, Arabidopsis thaliana
  Intron number 1 from transcript AT4G12780.2 (locus AT4G127 80) derived from phytozome v7.0 (chr-ID Chr4; pos 7512791 to 7513793)
gggtttggtcgcactagctctcctccatctaagcggtaatattcattcactagttgctttttctttatctgtggttactagttagggtcactcactgccatttaaatttgagagcttgcttgcgtgaaatgactctttgaattgtagagcttagagtatgaaatgtagcatttagtacttatggagaactgtttccttgtatgtagagctgtttgattccctggtttcgatatgttatttactatgtaccttcatctgtggttactggttagggtcattgctcttcaaattttagagcttgcttgcgtggcatgagtcatggctcttcaaacgtacataatgatgaagttgatattagtgattatggagcttggttggtcacagagcttggatattggttcttttatgaatactctctaaaacttgagtgagaaatctggaaaaaaaaactttagaaacttcaagattcatgtcattcatatgcacaatctcatttttgatctgtggctacggtcattgccttaataattagtttctcctagacctgtggttactagttagggttgctcctgtcaccttctctctttaaatttgagagcttgcttgtgtgaaatgactcaaagggtatagagcttagagacatcatgctttcataattgtagtgcctttatctctggctttgtagcatgcactctattcagtgtctttatatcctgacattgctcttcaaatttgtttccccagacctgtcttaagagcttgctcaagggtataaagcttagagccatcacgccttacataatcataatgcaatgtagcatgaactatatttattagtgcttcaatttgcttgcatactatacagatttctcttatgcgtagttttctaacttaatttcattttgatttttgttggtataggcataacttgtttaccaattgattgatactctactctttttgtgcaggacaacttcagagacaacaaatcaatccgagaaag

SEQ ID NO: 1653 - DNA, 752 bp, Arabidopsis thaliana
  Intron number 1 from transcript AT4G13010.1 (locus AT4G130 10) derived from phytozome v7.0 (chr-ID Chr4; pos 7600713 to 7601464)
acaactcttacggtggtggcgccgccggattagaggttttcatctctcttttctatatattcctctaaactactgtgttattgcgatttgattctctgtatttatcgataccgtctcgattttatttgtattcttctctctgccgatgcgttgattttttgataaacttagaagattttgttgcctcagatgttgaaaaatccaatgttttcatcaatttgatttggattgtaaaggctactagattacatgataaaacacaatcatgattgtaaatgattttcttcatttctgatgcttacgtagtcactagcggtttctatatggatctcgttgctctgggaatctatggaaaatttgagtacagagaacacgccttttaagctagataatgtgattgagattatgtacgaaatgagagaatgaagaaaagagacgatggtggtgagagtagctcacaaaagaggaattattagtgatagttttaaattatttctctgtttttgtcgattggattggattgcagagtccactagattgcatgatgcatctcatatgtgaagtgtctctgattaagtgattattttgtgaagttagtgttctcatgtgtgtattttttttctgattaaaaggtaacattatctgtttttgtagtgtttttttcttttttttttcttttgtgatgcattcctgtatgtgtattctgtactcttttgatgataaatacgtggttatctgaatatgttctcagc

SEQ ID NO: 1654 - DNA, 939 bp, Arabidopsis thaliana
  Intron number 3 from transcript AT4G13210.1 (locus AT4G132 10) derived from phytozome v7.0 (chr-ID Chr4; pos 7670426 to 7671364)
gtcgatatgtgagtctctcactattattatacatatataaaataaggaaaacaactttattagatatatttcgtattagtaacgttttagttagtcaaactagatgatgctttaactttactaaacctatgtgtagaccaagaaaaacattttctacatctatgtaaaaagttagttttgttcttctctatcagaactttttttaataagcattgtgatccacaaaatttaaagttatcaatatatatgactgaaatgtacttttatttcctcgttcttgttctgccaggaaacaaataaataaacatgtgaaaacacttctgacataaaaacagtagttttattgaataaaaccacaaaccgtgattcccatttatacctcactattttctgcttaagatccaccgacgacgcatttgtattaatatttacatacatcctctctgaagactgataattaaaaacattttttttcatttccggaattttttaatatcttctatatattaatttatatataacacttactttacaattacaattttcaattgtataaagtattatataaaaaatctgaatctggtacccatagtttttgcatttaattacggaattatggagaaatatgaccccaaattcctatatggatcgtatcccatgaacatgaaatatataattccttatacaagaaaaaattaaattacccacgtggggccacctcaccttgtcaaattaaattcagtgctttcttctatttgcattttcctgtctcctatattttgacttcttaaacagttgaagttgatatctacaatatcacaaacctcacgggttaattttatataatctataaactatgttctctttttgtaatatcattttattaactggaacatgcatgcaggagcatacgtaacagtacgtatcgtagaaagctag

SEQ ID NO: 1655 - DNA, 607 bp, Arabidopsis thaliana
  Intron number 1 from transcript AT4G13710.2 (locus AT4G137 10) derived from phytozome v7.0 (chr-ID Chr4; pos 7962622 to 7963228)
attttccggaacagtgaaatctctctctctaggtctttttctcttctcgaatcttccttttttctctttcgatgtttatttatcttctgtttcgttgtttttaagtctcctttttaagctgcattgttaatttctgtgaatgattttgagaattttccatctctgtttgttgaatctcgcttcacgattcatctttgtttttttcttcttagatttgctttctgtttatggatcttgaaattttaggactgttattgtgaaagatttcaattttaagctccagatttagaaataatactctgttttttcggtatttgatttttccaggaagctgaaaacagaggtgattcagagctcaaatagctcaacaatggcggcgataaggtaaaagggaacaaaacataacacgcgctttcaaccgctaggtttatcatttttaataaaaataaaagtggaaattgactaacgatcttagccgttgatctttactactgttcttttgtgagtgtactgaaatcacttgtccagatttcgtaataatactctgttttttcgttttttgattttactaggaagctgaaaacagaggagtttcagagcttaaaca

SEQ ID NO: 1656 - DNA, 492 bp, Arabidopsis thaliana
  Intron number 2 from transcript AT4G13710.2 (locus AT4G137 10) derived from phytozome v7.0 (chr-ID Chr4; pos 7963240 to 7963731)
gcggcgacaaggtaaaaaaagagaacaaaacttgattttcattttttttgccgccgctcacaatacatgaaacgcgcctttaactgctagggtttaatgtttatcctttttattttatagtattaaagataaaagtagaaaatgaactaacgatcctagccgttggattaagatcgtcggatccattttccgttaaaccaaacctttttgctcttttgattcctcgaatgtagcgttagaggtttgcattcatcgccgctcagtcacacatgctctgtctcttcactctttagaatattttttaattctaatattccacgtcaatagagttaatttgtacccgaggttaaattagtcaattcactctcttgcgtgtacagttatcgaaggttacttgcgttgtgatgtgaccacgtgtcataaagtttggttggttaattacgagtttatggttggtcgcgtcatttgtggtttttttgggtttcaggcttg

SEQ ID NO: 1657 - DNA, 987 bp, Arabidopsis thaliana
  Intron number 1 from transcript AT4G13840.1 (locus AT4G138 40) derived from phytozome v7.0 (chr-ID Chr4; pos 8014934 to 8015920 reverse strand)
cggaattgacgttctctcctttgatctacgttcaggtataatctgactacaccaattttatcttcttaatttagtttgctatattccttatatagttcacacatgcataatattgctcactgtctaaatatcatacacaaatttaatattggtactgagacaaatttgaatatacaaaagttctaaaaatggttatatatacatgatatggtattggtatgcattattcaatcttgaaccctgtaccaaaaagagaattattcaatctttaatatatatttgacagaaaaaaggacacaccatgttgatggggtctgatttatagagtcggaaaaaaggcaaattattagctaaactaggttagaaatctatattgggtttcacttgtctttcgaaccatatgccctaatcaagaaagacaaagaacatattaaacatttaatgcatgttcagtcacatcaaaatttaatacacgaaagatcctgttcgtacgattaacttgcatgaaaacacactgcctctgagtaggtgtaccaaaatttaataaaacattcggacttttcaatgttgtattgcgaactagattgggacagatttgttggacccaagtttgaaatatcttaccaaatggatcagtgacatcccaatatgcagatccaaaaaaacaagaaaaaaatataaaatgtggaagttaaaaaagtgatgtgtcaatactcaatagagtaactagtaaagtatctcaaacggtgacactagggaactatgctaaatgttctaatcttcggcttcagagtgatgtaccggcatatatatatatgcctataatctcttagttatcttaaaaaaaaccaagttggaaaatatatttttaatatattttggcagtttaatcaatttcaattactcggattgcaatcttagaaagggtttttgtcggtttgcaaaatttgtttaaaactgcttttaatatcggatttgtttccgcag

SEQ ID NO: 1658 - DNA, 895 bp, Arabidopsis thaliana
  Intron number 1 from transcript AT4G14100.1 (locus AT4G141 00) derived from phytozome v7.0 (chr-ID Chr4; pos 8121020 to 8121914)
acgagtcaaaatcgtgccgctccggtcagctcgaggttggtattttctgttcatgactctgttacagatctcagaatacggttaggctgtagaatagggaaccaaattcgaatttgggatttggttaactttgttaattgctttgtgtgaattcactgggaatgagagttagaaaaccagagattgctccaatttgaagcaacaatgaccttagttatagtgtctggtttataggatagtcattgtgtaaggtttgagtttttcattttgagtaggaaattgaaatatcttaggagagtaggagagttctcggttttgttaaagtcaggtgatttcacaaatcttcatttgatgaaaatggagctctctgcagatttagtctgaagttctctcttgtttcttactacttcactctcacttggtctttctttttaaaaaattccagtaatttgtagtatttccttgttaactgtagcaggcagggtgtacattttgattgttaccaatactctttgtgctttgcatcttatgggaagactgaagctacctaatcactctggtgactttgatatgctcgttaagtaacaatactttacaaaatccttaaccaggatcaggagattaggattcggtagtagtagggtacatgacctggtctggtctcttggaatacctttgcagagtagaaacttgtaggatcaacagatgattattcaagagggttcagtgagtgacttcacatgtttactaaggcttggtttttcgtttttatagtagcaagttcacttagattggtcctgtatgaacctggaatgcttttgtaaatagtaacttgctgaatattcttggaattttatgtcacataaggttggaatactgcgaccaaactggctag

SEQ ID NO: 1659 - DNA, 826 bp, Arabidopsis thaliana
  Intron number 1 from transcript AT4G14420.1 (locus AT4G144 20) derived from phytozome v7.0 (chr-ID Chr4; pos 8302851 to 8303676 reverse strand)
gcaagagtaagcaatttcctcttctttactcggtttagatctgtaagtaggatctgctttttctttatatctgagaaaattcaaaatctgggggctctttgtctctgttgtcttagagaagtgcacaaattatgaatcatggatttaggttttagctcgattatagctgagtgagtgagttcttggaggagaaagagaaatagaatgttggacagtgaaggaaaagtatggatcttgcttgctttgctggggttgaatttgatagataagatatctctggttagattttgtttctgattggtcaataactgtcgaacattgctatgttttcttctgttattacatcattctctaattttagcactttgttttttttaagttctttcttttattactcattaagtgggttgtcctgaagttgcgaagtttcttgttgagttggtctcgttggtagttggtagttggtggttggttatttaagcacatgattctaaagtcttgaaaccaagaaaatcttactaggtgctttgttatggttgttgtgaatcaatttgactcaaccaatgaactcatatattgaatgcctgtataaggagtttctcttctaatttcttgttttaagttacacaattcttctgacgttacaaatgtagtatctttatacgttgattgaagaaaactttctttgttccccttgactgtctgcttggtttagttgaaaagcattgctatttgagtctctacagagacagtttacctcacttttgttctttccctcactgattgaaagttccaatatttttaatgacttcattgttcaggttca

SEQ ID NO: 1660 - DNA, 362 bp, Arabidopsis thaliana
  Intron number 1 from transcript AT4G14570.1 (locus AT4G145 70) derived from phytozome v7.0 (chr-ID Chr4; pos 8362224 to 8362585)
tctactttcatcactccttcactcactcagtctccgtaagctcttcttcttcttctctcagtctctgtttttcaatccgaaaattcattactttgatggtgttaccacgaattgagaatcattgatggtattgctttgatgggtatcgtttatatgacagtttttaatccgaaagtttattactttgattggttttttgtttgttctgttttaacgaatttgaagccaatcatatctactaagaacttgattggtttagagttatggatgatgaatctgattaatggaattgttttgcaatcattagtgatttatgagatacttgtttcagttacaagaattggattcgaagatttgtagct

SEQ ID NO: 1661 - DNA, 489 bp, Arabidopsis thaliana
  Intron number 1 from transcript AT4G15090.1 (locus AT4G150 90) derived from phytozome v7.0 (chr-ID Chr4; pos 8614239 to 8614727)
ccctttgtctctctctgggtggccgagaaaatacagtaaaaagccctcaccaatccaaaagtttgacatttcctgaattttgtagtctcttcatttgaattctcaggttttctcttaagatacattaaagtctctgtcttttatgctgatactaatgaaagttcagttctttcactgaaattttagaaccagaacttttctactactagaagtatgttgtctctgactctcttagtttgagttctcaggtctccttctcttatttgtgtgaaattttactcttttttggctttagaaacagaacttttctactattagaagttatgttgttgaaagttcttcactttcatttgattccattgatttcatattgctttgtgtgtttcaagtttgatgtttttaggtagaagatgtcgcgctggttcttatgaagtttggttgtgacatttttcaggtgctaaggtggattatctagtagaaagatttcag

SEQ ID NO: 1662 - DNA, 802 bp, Arabidopsis thaliana
  Intron number 1 from transcript AT4G15610.1 (locus AT4G156 10) derived from phytozome v7.0 (chr-ID Chr4; pos 8909360 to 8910161)
cctgctgcagagttcaccaactcaccggctcttatgtaagttcatcctaataattcattaattaatattttcttttattttctcgaatttgattgatcatctttagtaaatgtgactaagggccagagttcatatgtgatttgtatatctcatatatagtcaaactaagtagacaatataattatgggttgttgtgttgtttggagaagtaatagaggttgttttatcaaacacgggtcttaaaccatatcttaatcctaacttagaagaagtcatgtcaaattaggatagtgtaatacaatgatcgcttgatcggtcacatgtatggaccattgaaaatctggtcagagcgtggattttttcatgtatacaaaaatatatatttaattttgagaaaccaagaggattttggtcatgtatatggaaaagaggatgtagtatcacgtaaatgtttaaacatatacttaacaagtaaaatttatacatacaaatcgccgatcttatatgaattgtttatttacgtgtgggagtagttggaatttcgaaacaaaggttgtggaaagtcaaaagtaagttggcgaactttagttaacgaaaaagactcaaaattatagtaaatgttcagtgataatgataaagcagcttctttctttcttttttgtcaacctattttaaaaaacatctttgtatcagatgatttaaatatcgtataaatcttttaatttatgtagtatttaattaactaaatccacttttttcgtttgctaatgtgtagatactttgtggtagcattatccgtggc

SEQ ID NO: 1663 - DNA, 451 bp, Arabidopsis thaliana
  Intron number 1 from transcript AT4G15930.1 (locus AT4G159 30) derived from phytozome v7.0 (chr-ID Chr4; pos 9036497 to 9036947)
caaaaggaagctatcgaaatcgccatctccgttagtctctcttactctctcttcgttgtttatccgattttgttgtgtacatttttcggatgtagggatttgttatcctgatcttgagtcttagggtatgagtgatactaactgttccctgggatttgtttttggaagtactcacttagttatctctggagttcgatttcaacttagtgttgttctctccaagtctcaatttgttgatctgaaggttattgtgtacggaactagatttgatttcctgtaaccttttccttgattaaacggtgtttttgaattgcctaatcaattggttcaactaagagtctggtgaattgtctatggagtgattatatgtgtactctgatagataaggatttgcattctgagatttgcttttgcaggcgtttgagaagtacagtgtggagaaggatatagc

SEQ ID NO: 1664 - DNA, 765 bp, Arabidopsis thaliana
  Intron number 2 from transcript AT4G15930.1 (locus AT4G159 30) derived from phytozome v7.0 (chr-ID Chr4; pos 9036984 to 9037748)
tgctacttggcattgcattgttggtcgcaactttggttagttccctcctctccttcgcttaatttctccttaaggtggcatttttcgatgaaaagttctcagttagggaatagtgatttcttagtaagtatatctagttttggacatgtgatcctctttggctcatttttgagttttgcttctgtgaatctttgaatctcgtctggttaatagtgaatcatttcaatggtttggtttcttctctgtcttaactagacttgctttggaaaaagttgttcttcttgggatgaatggtttttgtgcgcttagtgttggataaagttacgggtttagtccctgtgacattgacataagttcccaaactgcagataaataagatctcggtaccaatcaaactaggacactaggtattaatcctctgaagcaatttagtagcctgcaataggatgtgttgatcttgatcttataacctagttaccttcatggaatacattttgccttgttcaaatcttcttatgtacttcagtattgaatttactgtttctgtaagcatcactaagtaccactcccctagctccactgttcttgaatttaagatttctcttatctcaccaaaagtcgttgcggtttttagtcatgtgcataagatgatatctcaacagaagtgatacatctctgaaaccatactggcttctattattcatctgcagaatctttcacattcgaaacttattcaaccatattactcttttcttgcaggttctt

SEQ ID NO: 1665 - DNA, 625 bp, Arabidopsis thaliana
  Intron number 3 from transcript AT4G16770.1 (locus AT4G167 70) derived from phytozome v7.0 (chr-ID Chr4; pos 9435900 to 9436524 reverse strand)
gggtcaactttaccctaacaagtggcctcttgaaggtaaactctttgccaactctactatgtggactagatgagagcaaacaggaattctgtgatcatctagtcagtaaatcataatttttaaaagataaagaacttactcatgttaaattaacaacaattttttaaaaattttaaaataattatgagctatcttgaatccaaaacattttaaattcaaaactaacattagaaaattctaacgacttctcgaaagttatgaactataacactgaaaaaacaaaaatataagaaataaaataaaaaactatatatttagatgataagtttattaaagctataaatttttaaccgtatttcaccataactaaaaccaaactcgacatataagaaaaaattgaagagcatataaattaatcacaaaatcttaatgaagttgaagaaaatagtgagatatatgaaaatggtgataaaccctatttagcaaatagtaacaaaaccatttaggcctctaaacccattgtttctttcaaattatagttctttcttttgtttatgttgattatatatatataacttatgtgttatggatgtttacagagcttttgccgctttggaggccaacc

SEQ ID NO: 1666 - DNA, 519 bp, Arabidopsis thaliana
  Intron number 2 from transcript AT4G17070.1 (locus AT4G170 70) derived from phytozome v7.0 (chr-ID Chr4; pos 9596832 to 9597350 reverse strand)
tgtggacatctggacttatcttcggacaaggccaggtagtgatctatttaatacgtcttgaaaattaactccattgatcgaccaaagttcaaagttaatgcattttttccaaccgctggaaatagtaggtttcaatgagatattattaattataatttaattgtgttctcattttcctccaaacatttactattccatgaaaattactcagcctttggtattgatttgtctgtctgatcagatgatagtagctgctcagttttatcagatttcacaagatcatactttcagtttgttctcagtttcctacttttaaatctgcgaatttactgcgttggggtgatgttattttggtggagtgtaaccaaatcttatgtctctctgattttgttgtgatgatgctctggtttccttcttctcttgaaaactaatagtgttctcgatgatagtcatatttactgattagctatttggctactgttagggcattgttggttttgagacggaacacggcgtaat

SEQ ID NO: 1667 - DNA, 572 bp, Arabidopsis thaliana
  Intron number 1 from transcript AT4G18400.1 (locus AT4G184 00) derived from phytozome v7.0 (chr-ID Chr4; pos 10170558 to 10171129 reverse strand)
gtctactcctccggctacattcgatcctagtcgaagtaatatcttactttccccttttcttctgcaacatcaaattgatttctagggttttgctttctgggtttttctattatctcccttcaattagaatgatctttttaatcgtacccaaagctcgcattttttgtagttctaatcgaaaatccttggtcctgcataatcactaatttgactaagtgtagagaaagagcttctctttactttgctgagtgagagattatagttaaaactgattgtgaacattgattctgtttcttagtttcataaaaaaatcaaatgaagaagattcatggaagtttagtgattctcaatctgcattcttaaagcaactgtatagatagctatgaaggattatctttaagatgaaacattgatgtttaagatcatacttatgtttttgctctgatcatgattcaccagcttgctatttttacttctttcaatatctctgcagtgtgatttctctaaccaaatgctttgaattggttcttttgaaagtgattgggatcatcaaaaggaaagctttgattaag

SEQ ID NO: 1668 - DNA, 597 bp, Arabidopsis thaliana
  Intron number 1 from transcript AT4G18710.1 (locus AT4G187 10) derived from phytozome v7.0 (chr-ID Chr4; pos 10296484 to 10297080)
ataaggtaaagctgcttgtgttccttttgctgtcttttgaagaagaagatcctgttttttggtttttccacatttgacccttcaattagttgtcttgagattcctgttcttacagatgttttgtgataataaatctagtttagttagtactcttgaagttgaacggttttgagttctgggtttgtccaaagttttgagctttcgttaactttttgacttaccctgagatctctgagggttttgagttctgagcttagaattttctaagttagctctgttgggatgatccatgtctatatatctcgatctgtgattaatccagagtttatacaagctgctagatccataattgaacatagattagtccttgtttggtttgttatatgtatttgttttgtttaccattcttttggcgtgacaaaagtatatatttttagttttaactaaatcagattcactctgcgtaacggttattttgtaaccactcttttaggataaaagtttccttctttagacttttgattctcagacaagcattattcttttagcttttgataatggttttgtgctgatattaaagcttttctctttcaggag

SEQ ID NO: 1669 - DNA, 625 bp, Arabidopsis thaliana
  Intron number 1 from transcript AT4G18960.1 (locus AT4G189 60) derived from phytozome v7.0 (chr-ID Chr4; pos 10383322 to 10383946)
taaaactttcccctttgttcttctccccccaacaggtcaggctagtattttgttgttccccaatcctttcaaacattatcttcttcataatattactttgcttcacttcttttggtccttaaaccaaatttttgttcttctttagtttccttttttcccgttttgatttgattctttttatgttatttagagagaaacaagattcacaaattctctgatcttctttaactctttaaaacttttctttttcacactctagatttaaattatccctatggttacaaaacaattttgttcttagtttataacttgtgtattaccatcctttcttgattaactcttgttaggagaatatgaatgtaagatcaataaagttcttcaactttataattccttctataagatgtgtgtcggcaacagaattaaattaaatctttatagtttaactttaatctcaaccataattcaaaagaatagaaaacatgaagaatcttgagtcttttcaagaaaatcttgattggttttttgttggattcttgtaattctgtactaatcaaattttgccctaaacgtttttggctttggagcagcaatcacggcgtaccaatcggagctaggaggagat

SEQ ID NO: 1670 - DNA, 979 bp, Arabidopsis thaliana
  Intron number 1 from transcript AT4G19120.1 (locus AT4G191 20) derived from phytozome v7.0 (chr-ID Chr4; pos 10463036 to 10464014 reverse strand)
agaatttagaggacgcttactccaaagaatctagggtaaattctacgttcctttcgtctctataatcaaattatatatgcacagatcgagtttactgttttgttttccttcatgaagctcgacgaattttggtaaaaaccagatctggatttcgtaattttgctttctctgtttcgtattcttcatttgtcactgattcaaatagcatttgcttccgtataaacaaattctatcttaatctcctgtaagcaaatctgtggaataatctggataatctccagtatatagttttcgaatttggattcatttcgattttttcgctttgtgtatgtgcacaattccagattcattgtttttgattacattttgttgtttgtttggtgaaatttaagattaaagacgattccgtctctggcaagtaatgattaatgctaattctcttcatcttacactttttttttgaagtcctttatgctttttagctgtctctctgcaagctttttttttgggtacagatttgttttcagactttaaatgcgaaagtgaataagactttaaatagagattcattcatgtgtatgcatttattgttatttcatcgattcattgtttattgttctcgagttttgatggacaaatgtgagagcatgttatagcggtcgaatctgggtcccaaaacgccatgtgagattacattaaagcaacaatctattattgtcggcaatgttgtttgttccttttagatctcgattctatacatcctttgtttcctcaactttcgaaatactcatttgtcaaatagtaacacttggcccatcatttgtttattcaatgaattaaccaaataaagttctattttctaactttttcattaatggcagaagcttgtttgctgctcttgtctactgacttatttattcaatctcatgttgctaattttgtaggtgttaactttctaagaaaaggagtttgttaaaac

SEQ ID NO: 1671 - DNA, 626 bp, Arabidopsis thaliana
  Intron number 1 from transcript AT4G19210.1 (locus AT4G192 10) derived from phytozome v7.0 (chr-ID Chr4; pos 10501280 to 10501905)
tttcaatcttcttcttctactcttaagtatctcaggtactaatctcgatttctctatttctcgtccatggagatttagatttcaagtcagatgcttttcgatttgttacagatgtataatttttgtaatcgattgattcgcagcttggattgtattgagccatcgacataccttcaaaattcttataattgtattgaaagtgtttgaatttaatgtttttttttttctttctctcgattgttttgatttctgggcaagtgtcaacttttgtaacagattagtgacctttctctttatagatatgtggaagaatttggaatttacaaattcggttcaccatttttatctgaagcactgaatttgcgtttttcaagcttgagtgaatattatttcttggctcttaagattttgcatgtcaactattatttcatcattgttagcatcttgtggtgttcaagttattattttaaatattgtttgtgctactctatagttattccctatgttgttatttcgttcctttgccttagcgtgacatctttatttggtatatttgtatctgtgtgatttagtttcttcaggctgttaaactatagatttcatgtattttgtaggtctgttgagag

SEQ ID NO: 1672 - DNA, 621 bp, Arabidopsis thaliana
  Intron number 2 from transcript AT4G19370.1 (locus AT4G193 70) derived from phytozome v7.0 (chr-ID Chr4; pos 10566580 to 10567200 reverse strand)
cttactttacctacggttctattgctcctgtcctggtaaaatatttttcctcttctcttttttttttttaatctcatctaactgtaaccaagaatccccttaaccacctaccgatatatcttactgaattttgtattgggtaattttgaatcagtgagtaattcggtttacggtttagttttccggttttactaaaacttaaacctataaaaccatttgtattttggtttggctgtttagtttttgttttgtactaggttcggctgtagttgaaaaaataaaaccgaaatataaatatataagaagttcaccaatattatgtttatgcaataaaaaaatataacatctaaagaaaatatggactggtttgttaggtgacactaatgcaaagttcggtatcgtttcggttaatcaatttgttttggtttgattcgattttaaggttgagagttatatttcccatccctaagattctaaacatatcaggcgatgtatcatctaaagtataagaaagaaaatatctcttgagattagtttcctatattgataattctctgttcttgtttttccttacctatgtgatcaggtccaattttgtggtagtggtattgattttgagta

SEQ ID NO: 1673 - DNA, 956 bp, Arabidopsis thaliana
  Intron number 1 from transcript AT4G19450.1 (locus AT4G194 50) derived from phytozome v7.0 (chr-ID Chr4; pos 10606815 to 10607770)
tcatcactcatttcatctctttgccttatatcgtaacgtaaccaacttttctactttttctataaacaatatatatatatatatatatatttgttgagaatcactaatttggaataaaattgaataaaaattcagagaatggaataatctacaagttatcttcatttttgagatattgaaatataattcaagaaatccttcaaaaattaaaattgtcttcaaaatcaaaattagtttatttaagattgagtcttttttataataaggatttgatgcaattttatttctgtttgttaacagcttagatatgttgaaattgtgaccaatgagacgaaaaataatgttttgtatcttcagattgggtgatgtttgattggtagatagattgctagttcaatttttatttttgtcgatttctactttcttagttcttggtataggactatatgcaatatttcttagtttttctcttccatttatttggttggtggcaagtggcaacaacttacgagtcttccttttggcttgttctcacgtttttttaatctgcttcaattttcgaacatctgcaattaatttttataacatctattatgacgtcaaaagaattcgttttttcaataatattggtcccgttgcatataattcttattattcatatcaataagctaaattatgacaaccaggattttctgaaaggtctttttctgatgggtaagtgataatttagtggaagttatacatatgagcttttatttatagtttaatgttttttttttcgattatatgaatagttaattaataataagcttttggagtgaatattttgatcaaaatacaaaaacaattctgcattctttaagaattcgcaatttctgaagaaattttttatttaagttttggctagcttcttctgtgcaggtgtttctctgttgcttacttgctggtttaagtat

SEQ ID NO: 1674 - DNA, 791 bp, Arabidopsis thaliana
  Intron number 1 from transcript AT4G20260.4 (locus AT4G202 60) derived from phytozome v7.0 (chr-ID Chr4; pos 10940792 to 10941582)
cgaggagagatctctaaagagatttatcgtttcaagtaagtctctttatcaaactcttaatataaacaaatcaaaacatgaacacgtcgtgtcttcgtttcgattctagatacgattttttagttcatgtgaatgaactctgttttattactactagggttgttcaatatttttccgagaattaccagaggaacaaagttagtgattatattgatgcagagtatgaagtaattatatacataaatcatgttttgttctcaagcatctacgttgaaatatatataagaagtttttttttggtgaaaaaatatgtatgagaagttcatctttcataatagtgaaacaactctctttcataccaaaaaaaaaatttgaaaaaaaattagtgaaactctctttgtccgattaggttaggtttggactcagaatcaaaatacgattagcataacaaattttttggcatggcaattattgtctgcaggtaaaatataccaatagaaacatatttttaggagtagttaagattatgattgaagaaatactattacgataagcataaaattttcttttgctgttcttggtttttgtcgttttatagaacattgaatatgtacttttgttttttttcaccagtagatatgtactatacacacataagtaacatgggtagtttatatagagagagatttgatttttcgtatatttcttttgttgaaaataaatatgtgtaaaatttattgtttattaatttgacagatttgttcacgttgagaagtttaatttagattaaa

SEQ ID NO: 1675 - DNA, 608 bp, Arabidopsis thaliana
  Intron number 4 from transcript AT4G20260.4 (locus AT4G202 60) derived from phytozome v7.0 (chr-ID Chr4; pos 10942263 to 10942870)
tgtgcagaagtacctcgaggagctagtcaaaattggtaaagattcaattacgctttgtcatgtgtctattttaaaatatcccgacaacaatatatgcttgtcttatatatttatcgttttttgtcttatatatcaaatatttgctggcaaaatttttggattcttatcatgtcctatattcttatacgcatgttatatctctagtttataagtcatgcatatatctttcatatagtataatcaaagttatttagcttgtatattggagtatttattatttttctatgaacatattatatcattctcattcaactagacgtaagtttcattcgtcatattcactcactttttgtttatggtctataatagtggttctctatggcttatttatttatatgatcttgcctaagaaaattggcacattcaaaaacctcaaactattgtggatcaaacttcatcatctttttcagaagacgtctagagattgtattggatcactgtttcttttgcatgatttataattagatgaacgttgtactcatctatgtctcaaattatgaaatgtttattcagaattccccggatcaaaagcggtgagtgaggcttcg

SEQ ID NO: 1676 - DNA, 801 bp, Arabidopsis thaliana
  Intron number 1 from transcript AT4G20260.3 (locus AT4G202 60) derived from phytozome v7.0 (chr-ID Chr4; pos 10940792 to 10941592)
cgaggagagatctctaaagagatttatcgtttcaagtaagtctctttatcaaactcttaatataaacaaatcaaaacatgaacacgtcgtgtcttcgtttcgattctagatacgattttttagttcatgtgaatgaactctgttttattactactagggttgttcaatatttttccgagaattaccagaggaacaaagttagtgattatattgatgcagagtatgaagtaattatatacataaatcatgttttgttctcaagcatctacgttgaaatatatataagaagtttttttttggtgaaaaaatatgtatgagaagttcatctttcataatagtgaaacaactctctttcataccaaaaaaaaaatttgaaaaaaaattagtgaaactctctttgtccgattaggttaggtttggactcagaatcaaaatacgattagcataacaaattttttggcatggcaattattgtctgcaggtaaaatataccaatagaaacatatttttaggagtagttaagattatgattgaagaaatactattacgataagcataaaattttcttttgctgttcttggtttttgtcgttttatagaacattgaatatgtacttttgttttttttcaccagtagatatgtactatacacacataagtaacatgggtagtttatatagagagagatttgatttttcgtatatttcttttgttgaaaataaatatgtgtaaaatttattgtttattaatttgacagatttgttcacgttgagaagtttaatttagattaaacaacaaaaag

SEQ ID NO: 1677 - DNA, 801 bp, Arabidopsis thaliana; identical to SEQ ID NO: 1676
  Intron number 1 from transcript AT4G20260.1 (locus AT4G202 60) derived from phytozome v7.0 (chr-ID Chr4; pos 10940792 to 10941592)

SEQ ID NO: 1678 - DNA, 912 bp, Arabidopsis thaliana
  Intron number 1 from transcript AT4G21060.1 (locus AT4G210 60) derived from phytozome v7.0 (chr-ID Chr4; pos 11240889 to 11241800)
aagacatctcatcaacatgtttattcacctaattcttcttattcctcttcgtctatttcggtttctatttccggatctagcagctctaagaattttcgaagctctttttctgtcttcgaaaactaagatctacgtactaatgttgtattttttaatgatcgggtcgatatttttgtatgcacccgtttatattatatagttcagacctttttatttttatttaaaaggtctgattaataatacatgttatacacttataccttttggttatcgtttgtaattttcgatcgaaaccccgttttaataaggatgtgtagttttgaagatacttagttcgaaatagtaaaaatggaatgttttgcacattttcataacaaacaaatatgtatgtttaaaagttttatttttatttaattattcattcctaacatttaacaaaatctttatagataagaatatgtaattttggagataaataacagagaaatcaacgactttaaaaacccttgattcgttgttcttagtgagacttttgactaaatttatacacatgtgaatattgttaagaatagagagaccatttggtggtttttaaaatttaaaaaatgaaaaaaggttccttccgatttctcaattcatctcctgagtgggtttttctcctctgttttatttctctaatagccctagattcaaggagataaaactgctcaaatcaggtggagatttgctctgcttcattggttttttgttttgtttgagttagtgactttatctatttcttcttcgccaaaagacgagatttttaaaacaaatttcgtctttttcaaattctcgtgtcaaattgagacatttgggttgctttgattggatttcgtagactctattgatcttcagatcgtgtcgagatttagc

SEQ ID NO: 1679 - DNA, 953 bp, Arabidopsis thaliana
  Intron number 1 from transcript AT4G21720.1 (locus AT4G217 20) derived from phytozome v7.0 (chr-ID Chr4; pos 11542602 to 11543554)
cacgaataagtactcagcatttacgcagcttccatgtatgtaatatctggactcttaatttgtgtgaatcggattcgtttttgagttttgatgttcgtggtccgttgttttttgatggtttagttttcgatgatgatgataagaatctgttgttggagctgatagattgggttctgatttggattggtgattgatttcttgattcaaaagtcaatttagtcttccgagtgtttcttctttttgttgttgtttggaattgaaattgggatctgtaaattggattgttgattgatttcttgattcataaaccctaattatttgttggtgcactctacttcattacgattatactaaacattttggtcaagaatcgcttctttggttagattggtccagagacaacttatagttgtagttgcaagtatttaagaacatccatcttgactcgtaattgaataatgtagattgaagaatcggcaacatttatattgattacaagtaagggagattatgcagagttcttagagcttttctatcatgtaattaagaaaatggttaaattagtaggagaaagtggaagataataagttgtagtttatgaactgaaagaaatttaaagggagagagtcaaagtaacggtatcaaagatgcttctgtatccatgttgcttctatgaactattgacatatatgtatgcttaagctagttaaagggcttggtttggctgtttctgtctttctgatgaaagcttttcattctctgatctctgaatttcattcatgggcacaaaagctagctgaacttatgcttggtatgacattttttccatagcaatctgggttttttttcagctttagcatcagtgtttatcctccatgttgttgtatgacattttttccatagcactaatgtaattcctgaatctgtgtagggagagtattctgcaaaaaggg

SEQ ID NO: 1680 - DNA, 719 bp, Arabidopsis thaliana
  Intron number 1 from transcript AT4G21750.1 (locus AT4G217 50) derived from phytozome v7.0 (chr-ID Chr4; pos 11556155 to 11556873)
tcaacaaagtttatatcgatttggcactctaaaatgtaagtagaaccaaatgaatcttgtattttatgtacgttaataaaaaattagggtttcctagacgacaatctcgtcatccgtttcttctttgtctacctctgcgttttcttgtagatccgatgatgtgctcagtcttgtgactttcaagattgattttatcgttattgtttgaagatatgtggtttgattattttctcaacacattgtgtccttttagcgctttacttcagtttctctctaattttcataatattattattgaacattatgcttaattattcatccgaatattcgtgtcccattttttaaattgaatttcaggataacttgtattttatatgcaacgaggttatgtcacgtagtgggtgcatttatattcataccctttttgataagatgaatgcatatgcttatataagcgtataggtataaataaccatcaaaaatagagaaaaagaccaatattttgcttttcggttacttatgaaatgtgaaaaagaccatataaatatatctattaaagggaagtatagtttcataaaatcttgaggattacattccataaaccaagattaccttccgtttttgctttgatcctcttcttatcaaatatataaacatgaccatttgatctttcattttggatagtgggatatacaggcagaagaaaatcgagataaatc

SEQ ID NO: 1681 - DNA, 708 bp, Arabidopsis thaliana
  Intron number 2 from transcript AT4G21926.1 (locus AT4G219 26) derived from phytozome v7.0 (chr-ID Chr4; pos 11639036 to 11639743 reverse strand)
tgtgtgtgtgaatatatatacactaaaggtgaataggtattgctttttgtgtgtggttttactcagttatgttcggtaagatcagaagaagatgtcatagtccacgtaaaagaaccatttagataacgacgcactactattttgtatttctttcagcattttagacgagagctagtaacttcagacttattttttcccattctaaaagtaatttcaatcatatacaatgtgatgtcttacttgccgacgtaccatcatgcattctaacaacatttctacagtagcttcaatatagatttgtgagacacacgatgattaattttgataagtaaggaattttatatcaaatctatattaatccatatagtccgtgaaacttctgatattcttgtcatttaaaaccctcattcacagtattgaagtataactaaaatcatggtaccatttagagatttgtgcacgtcctagtatgtacaatagtcgttaagcttagccaagcatacgtgaaatatatgaatggcaaatgctttgagtttacatgaaaaaaagatttgaaatgagaaactatagtttattcccccgaatttagtttttggtatttttgtatgtatccgaaagagatggtgcagattcgacaaaattacataaacatataattggcttatttcattctctgtagctgaaggtggggtctatatatatctccgc

SEQ ID NO: 1682 - DNA, 1004 bp, Arabidopsis thaliana
  Intron number 2 from transcript AT4G22010.1 (locus AT4G220 10) derived from phytozome v7.0 (chr-ID Chr4; pos 11663751 to 11664754)
ttcaattacttgaaagagccttttctcatttcttggtaagttctttcacatatctttactttttttgccgtattatgtgttgccgagaagttgaatattcttggatagaaagcaataaagattgaagattaggataagatcttaacttttaatttttgtgaattttgtttttgttttttgttgtccaaaagaatgcagctttcggacaaatgtgctttgagtaaatctcatctcacacattatcaatacttgcatatttatgtattagtctacaagagaaagaaatgatacatctcttccaaagaacaatactttttcatgaataaaacaaaaattgagatcgttaacttttctcgttgattgtaatgctattcaaaacgtaatatttgcttgtttaatagaagatttaaagcaactaaagtacttcattaattaacaacaattttattttgtttgtagttagctaataaaaagtatagtaaacttataacaatgaaaaggtctcaactcaaacgaacaaaaatagtttttactctgtagggattaagtaacttttattttgtcatttgggacttaaaatcagaaaatctagcattctagtgtttcaagtaaaatagattttgttacaaaaaaatgaaaaataattttcttgttttatttcatttgagaatgtcaatttctttttctcattgagagccataaaagctttttcttacacccgacatgattggctgtcaaacatacaatacataatatcataatatagatatgccataagaaaattaaaatattccacttgatccatccaaactagtcacatgcgatgacacatgtgagctttaagtgtcagtgggaaacaaaaggcagtcattcaaattaacttttacgtcccggatctatttgaatatccgtagttaaccccatactcttaattcgatcaaacatacccctaatctttaaagactttttcttcttaggaacggagtgcaacagaggaagaactc

SEQ ID NO: 1683 - DNA, 863 bp, Arabidopsis thaliana
  Intron number 1 from transcript AT4G22270.1 (locus AT4G222 70) derived from phytozome v7.0 (chr-ID Chr4; pos 11773775 to 11774637)
acaaagttagaatcgaatacgaagctgaaattcaggtcagcgtctctattaattacaaattgattatcaaaaaatttcttgatttgaggttaaagagatattgcaaacgtaaaattcaaaaaaaaaaaaaaaacagaaactttaccaaaccatttatgtgacaaagacgacaaactgacaaaatattagttaattaatttctgagtctcgttttttattccagaatttagtaaacccaataataatcatttactaattttattttcaaaagttttggtctatattaattactccttactaatttcagttgataaataaattattttttaaaaaggacttgaaactatcaacattagcaatctttgttattatttctttaaaaaaaggcttgaagttattgaaataatcaataagtatctgaaaaaacgtcactcaacagttaccaattttttatttctgaccgacaattttttttgttttagatagtgaaattttcttcttttaacattcatttgtttgttaattaaacaatttaaatccaataataaaatacttttaaataggcttgaaatttttgaaatattcagtaagtatttaaaaataatcagtcaacagttaacaattttttaatttctggccgacattttctgttgtgatttttttttttaattaaacaaaagaaaaaatccgacctgccggaatcgaaccagcgacctaaagattatctgtcaaagactacagtcttccgctctaccaactgagctaaggtcggatgttgtttacttctgctagaagttaactataattactaaaactgttttgctctgttttcttgattgatacagagatcactaaaacggcta

SEQ ID NO: 1684 - DNA, 547 bp, Arabidopsis thaliana
  Intron number 1 from transcript AT4G22780.1 (locus AT4G227 80) derived from phytozome v7.0 (chr-ID Chr4; pos 11970353 to 11970899 reverse strand)
cccaggtatttttccttaaaatatttttatttctttttatcttataattttttgtatgtaaacgattatcatcttctatgaacaacaaacaaaatcttgatccgaatcatcagatttttgtttttcttgtaataatcgtcaaaacatgatttttgataatattttcaaaacatgggttctcttcaaagaaaattttatgccttttttctttgtttgttttatgtttaaccaaattaatttttcacgaaattgaaatttaatcatcataagatgggtttgctataacagttaaggttttaaagaattttcttgaataaaaataaaatctccaatttttatggaaggaatcgtcatatgatatcctggctttaccgtcatctaatagtataataaacagtaaaaatcacaagtcaattttattgacaatttcaatcgatttatttttaaatttatttgatttggttgtttgattcatacacacacaacacaagagtgagttttaaaaggatcactgtctgtttggtcacttgcagggtcgtaattgaca

SEQ ID NO: 1685 - DNA, 658 bp, Arabidopsis thaliana
  Intron number 1 from transcript AT4G22910.1 (locus AT4G229 10) derived from phytozome v7.0 (chr-ID Chr4; pos 12013206 to 12013863)
aagctcccaggaaagtgccgcgatcgccgtataaggtgacgatttttgattctggggttgatacattgtttagattttggtgttttgatcattgaatctggatcatgtcttgtgttttttaagtgggttgtgtgcattgtgtggaattgattgtttttttcttcgatgggtttttgtgtaatgtctgtagatttgggggttggggagcttagattcttgatctcgttgactttagatctttggtttcgataatgcatgaaacaatttgtgatctttgtgatgttttggtctctgagggtctagaatttgagtctgaggttatgtgatcttagatgaaactattattgaagaatgcttgttgttttactgttcttagtgttgttgtatatttagaaaaggttaaatcttgttactgggtttgggtaatttgtttgtgggcaatgttgctacatctgataacagaggttttgagtagtctttactagtgtagagtgatctagatgatgaagaatgtttgttgtttactgtttttcgatagtttttagtgtggttgtaaatgtgcaaagcctgatgttgttattggattttggatattttgtttataggcaatgttgctacagatgataacagaggcttctttctgttgtttaggtattgg

SEQ ID NO: 1686 - DNA, 795 bp, Arabidopsis thaliana
  Intron number 1 from transcript AT4G23490.1 (locus AT4G234 90) derived from phytozome v7.0 (chr-ID Chr4; pos 12252281 to 12253075 reverse strand)
gtgttccactcactaaagaactcggatttcaccaggtaaagaacttgactcgtgttggtcaaatttttgttggacatttgttgattttgggcagaattggtagtaatttctggtgttgtaagaatggaattatagatttcttgaggtcttaattaagtgggaattgatgatgttgagtctagaaaacttaagtttgttagctttgattgtttttttgtttagtgtaagtataagcaagtttgatggttggtggcaaaataggtgtttttaatgattttgtgacatgggtattgaaagtgttgatctttggaattggaatttactcaacaaagtttaagactttaagagttttgtttctagttttagaaggaatgacttgtagtaccaaactttcaaagtttgaagctttattagaagtaaaagcattcaatgtttttaatgatcttctgagaaagctttggtttaaaatctgaagctggtggtccgttcatgacttcaatttcgtctcttagctttgttctgttttttgtttggatgctattttgccaaaatttcctgtggtttggtaccgacaaatgggcgcgtgagtagctcaatgtcccttcatttacttgcgaatttgctaattgtaatgagtgggacccgcttttctgtttttaacaaattaaatgactcgttcctctcattgtttctacgcgccatgtgagcgactgatatacacgttccttctttcatcttgtgttctgtttctttgtttcagtacgacgtttacgggaacctctttggccttctcgc

SEQ ID NO: 1687 - DNA, 436 bp, Arabidopsis thaliana
  Intron number 1 from transcript AT4G23630.1 (locus AT4G236 30) derived from phytozome v7.0 (chr-ID Chr4; pos 12317156 to 12317591)
tacaaggtaattgtctgagttattcgaaacacaatacatcggtttgagcatttttgtgtacttcattatttatggaccataacttgaggtttcagtttgtttccgagcatctttttgtaatgggcccatgagagaactgatactgggcttgatcagattgatgtccattatttgtgctttattgggctccactctttctcactctcacattttttacaaggttttctcttcttttttttacacctattttcacttttctatgtgttttgttttacacctattattatatttttctttgcctattatcgttattttctttgccgactatcatttttttctagacgttatatactgttttagaatattacgtttattataatattaagaatttgtttgattgtgtccttttttgacgcagacagaaagaacgtgacgc

SEQ ID NO: 1688 - DNA, 698 bp, Arabidopsis thaliana
  Intron number 1 from transcript AT4G23660.1 (locus AT4G236 60) derived from phytozome v7.0 (chr-ID Chr4; pos 12330221 to 12330918 reverse strand)
tggtaagtttatcttcgcctttgagtaatgtagctgagaatcaagacatttcacttttgagattcattataatccatccgaaagaatagctgagggaaagaaagactgcatgtttatatagtttcctttcgtcccaaaggatggtttatgttaagtcagattacattaaatttagttttatgtgataaagttatgtgttttcctggttggtttggctgtgatgttttctgactaacttgctcttgaagcttgataaaagaatttatgtctgtttattattgttagactacatacatatcagtggagaagtttggagtagttcttgcagtctgctatttctctgttacttttttcagttatcaaatccataatgatcttcccaagagctcataggcaattaggtagtatgatcttgagctgaggtttttgatagcatgggagagtggttaaggattggcagaaatcaggattggataatgctataaacctgagttttctttgattttatatatgttacagtactatagttccactgggtttcttactcaggaatctgtttggaagtctttagatattataacgatgttccatgtttcgtcatggatctagttccagagctatgtaaatagatcgatactctgaatctccatcattgttgtataggtcgattgcgttggctgctgatcctggaagccttc

SEQ ID NO: 1689 - DNA, 975 bp, Arabidopsis thaliana
  Intron number 1 from transcript AT4G23990.1 (locus AT4G239 90) derived from phytozome v7.0 (chr-ID Chr4; pos 12457116 to 12458090)
aagctgaaaatatcaaggtgcgtattattctactaatcacttataattaggaatgtttttttttttatcgaatgttaaaattgtcattcattttggttacgttgaatagtggggaataacatgtttaataaaaaaatttggacaaaaaaacatttatatttttcgtggaaggagtaattaataatgacaaataaaaaataaaatgagtacaaaactacaaacagaaaaaataattatttgctaaatcaatggggagcgattgttgtgttgaagaagtcacttcagaaccttatcgtatctcttttcgacgatagtggcaatcttgttcttttatgacctaatactttggaagactgtgactcgtcgtagtgacctacaacaatttctcccaaaaatatatacgactataggagtattagtaatctaaatgatagaagtttttctttgtttgaattttcagttatccatgattgcgcataagtaaagtaaacttgaattggatatttcctgcccaccattactgtaagcatttccttgatatatcatcaattatgaattaaatattaaacagtaattttaaagttgaacctctaaaacaaaatggaaagacttgttcagaaaaaaaaaagatattttatggcaaaactggttgacatatccatagaaaatggagagactgaccaaatattgtcaatttcaataaaatatctctatgataaaaaggacaaattggtcgtctaaaaaaatagtaaaagtaaaaagtgtatgagaactcaatagtacactaaaatttagtaatacttctatgttattattacatgtagtaaacaaagttgtcacaagtagtaagatattttcaaccagtgttataaataaatcgtaataaactatacaagagagctgtcaaaaaaaaaaaactatacaagagaaaaataaataaattgtgtggtgtataattgtttcaccgtgtaacag

SEQ ID NO: 1690 - DNA, 751 bp, Arabidopsis thaliana
  Intron number 1 from transcript AT4G24200.1 (locus AT4G242 00) derived from phytozome v7.0 (chr-ID Chr4; pos 12559930 to 12560680 reverse strand)
cttgacctagggtttcgtcttccttgtgcttcgtggtgagttctatattcctctctctctttttacaatgatgaatagctctgaaattcgcctagggtttattagtggtattcatttggtcatctgtcttcaattttttaatcactttttgaattgatctttggaatcttattcattgaattggcttaatctcatattatttgtcgtatagttctccacatgtgttgaattttgctagttttttcttcttctcaattttagggttttgatcctggacctgggatttggttggcatgatttttaaatagatgtactctatagtttctgagattgggagattttacaatttttgttgtcctttgtctgtaccatcaatttgaaagtcgctgtattcctgttaatatcagtcacggtcactagaaggtatagtgtagttgtcctgcatattgtagttatttgtttttggtactatgccaaatgtaaattcatatttcttcgacaatggagtgatcttggattccttgcatatgaattgggtctctctaagccatggtgaactcgatttcatattcaaaatattttgaacagtttgattgtgtttttttttgtacttgtcacagtaggttaatgacataaagtttgtcttgttctgtttttgttttgtttctcaggagtttttcgaatgggagaaagaacctttttgctttctaaccgtgttctatatttttggagttgtcataagtaaagcagt

SEQ ID NO: 1691 - DNA, 649 bp, Arabidopsis thaliana
  Intron number 1 from transcript AT4G24740.1 (locus AT4G247 40) derived from phytozome v7.0 (chr-ID Chr4; pos 12756923 to 12757571 reverse strand)
tgttgcctcaggcaaccaaggtataaattctcttcacctcgttatttatgattccaatttgagtttttgtgtttgattcctttgaaaatttgatttttatttaaaatttaggatcggtttaatttttgtgttgattcttctggatctgcagttttctcaatgtttttgtttttgtcaattattcaatttgaagaaaccaaattctgtatgattaggtgaagtttgtgattgaattaggtggtgttttagatctatttaaatttggtctgtccttgaaatattttagatgttcagtgttgttaggttcaatttctgtggtatgttttgtttttagtatttgtttgtagatggtgaaccaaatttgatctgatgcatgatttgtgaattttgagctgagcaagattttgtgttggctgattcgcctttccctctccaattctataagttaaagataatcgtgacttcgtgattttttctgaagaacaatagataatagatgcacgttgaatacaaaaaaagttgtttggatttggatttacccttaaggttttaagatagtaaatgactctgaacgagtcggcgtagaaggatagtggcaggttttcatctgtctgttatggtacatgaatatgtgtaggctcaggtagga

SEQ ID NO: 1692 - DNA, 1022 bp, Arabidopsis thaliana
  Intron number 1 from transcript AT4G24740.2 (locus AT4G247 40) derived from phytozome v7.0 (chr-ID Chr4; pos 12756550 to 12757571 reverse strand)
tgttgcctcaggcaaccaaggtataaattctcttcacctcgttatttatgattccaatttgagtttttgtgtttgattcctttgaaaatttgatttttatttaaaatttaggatcggtttaatttttgtgttgattcttctggatctgcagttttctcaatgtttttgtttttgtcaattattcaatttgaagaaaccaaattctgtatgattaggtgaagtttgtgattgaattaggtggtgttttagatctatttaaatttggtctgtccttgaaatattttagatgttcagtgttgttaggttcaatttctgtggtatgttttgtttttagtatttgtttgtagatggtgaaccaaatttgatctgatgcatgatttgtgaattttgagctgagcaagattttgtgttggctgattcgcctttccctctccaattctataagttaaagataatcgtgacttcgtgattttttctgaagaacaatagataatagatgcacgttgaatacaaaaaaagttgtttggatttggatttacccttaaggttttaagatagtaaatgactctgaacgagtcggcgtagaaggatagtggcaggttttcatctgtctgttatggtacatgaatatgtgtaggctcaggtaggaatgttttgtgggcaagagattggaaatatatcaagctttgcatcttccggagctccttcagacaatagtagctctctttgtgttaagggtgtggctcgaaatggttctcccccatggcgagaagatgataaggatggacattacatatttgaactgggagatgacttaactccacgctgtaatcccacttttctattaccaaaaaactgttttgataaaatcctgaagataccttttaaatttctctagatttttttgtcaatggctttgaacaaactctaggtgttgtggtggaccttgtgtatattgttttgatttcagtattctgatttctctatgctcttcttgttttgcagataaaatttatagcaaa

SEQ ID NO: 1693 - DNA, 525 bp, Arabidopsis thaliana
  Intron number 1 from transcript AT4G25500.1 (locus AT4G255 00) derived from phytozome v7.0 (chr-ID Chr4; pos 13024643 to 13025167)
tccacgcgactacgcctgccaaaatcattctacaggtaaattgatgcagtttattcactctctatatcgtcgtggttctcatctccttcttccttcttttttttttggttggtgaaaagtagaacaagagaattggtccatctcgttttttataagttgaatctcatcagagccttctttgtttttctggtatgaaagattcatgctttcgtggattgttctcgttttctctatcttgtgaatgatattcagatctaactgtagttagattagatctgttgcattgtacttttgattctaatactgtctagttcagttcctagatttaactgatttggagctcgaatagatgagtttcaagtcctaatttactgcaaaacaattcgatttagtgtgagggctctagtttttagtgttaaaagttttcatcttggtgacaaattagttgtgatattcgtgtttaaattatcatttaaggaagtctcatgaatcttttttactattgtggttgtctatacaggaagc

SEQ ID NO: 1694 - DNA, 806 bp, Arabidopsis thaliana
  Intron number 2 from transcript AT4G25500.1 (locus AT4G255 00) derived from phytozome v7.0 (chr-ID Chr4; pos 13025267 to 13026072)
aaagctggtgagccttttttttctttctttctttcttctgcctcttactactctgtctttgtggttaacctgaatgaattataataagcagtattgttatccactaagtacaatgaaaaagcgaaattcaaatgcatttcatgaaatccactctcgtcttcattccatccacgagaaggctctggtggactatctccctttggaaggagtactaaacattgaccacattcacctggccacctgatgcagcctgcttgaactttggaaagtacttcagaggaataagatttttagaaaaaaaattagtgtaaaaccgcattttctttgacgcaggatgtgtttgataatcttgggacgcctatactcacacctggccatgaatggaccatagggaaatccatctcttatccctcaaaatcagtcactttccatccgcattagcactgccatcttaattgcatttcattcctcatcactttgcacacttggacatgcctctgcaatggagaaggctctctattttcattcatatccccgtctgacttccacattttcagttgttccttgacatattaattccataatgcaaggtctgtaactgcttcactggtcatttggagtttttttaaggttctaggaatgttcaaaatttaatatgttctaggagttaagttaggcgttgaaggagggaggacagtgttcgtgtatgttgaaggttcttaatctggtccacttcctcactgttaatgtactcagatctttgcttttggctttttcttttttctccagggtttgcttttgtatac

SEQ ID NO: 1695 - DNA, 521 bp, Arabidopsis thaliana
  Intron number 1 from transcript AT4G25550.1 (locus AT4G255 50) derived from phytozome v7.0 (chr-ID Chr4; pos 13048630 to 13049150)
aaaatcaagtacgattcctctttccttctttctcttttttgttttcttcttatagctactgctggagaagatgcctgagaattgaaaaccctagaaatctccaggcttttacattcttagatcatgatctcgatgttttctaaatgcttatctgctttctcgctgctgctgaatttactagcttctccttaaaggaataatcttttggccattttacacaactttaaggtttcaaaactacaacttggtggtacatatattgttagaacaacttcttccaacgatctgtgttttttttttgtgaacaaagaacagctataggctatttaaatttccagtgaatgatttgattagggaacagatatagctactgtatatgttatacaatactttagttttgcaagtaaagtctcatgctttttacatggatacatgaagtctggaatttgatagctcttacttaagacattctggagtctgattatctctttcttgttttcttaatggggtgttgcagctat

SEQ ID NO: 1696 - DNA, 719 bp, Arabidopsis thaliana
  Intron number 2 from transcript AT4G25550.1 (locus AT4G255 50) derived from phytozome v7.0 (chr-ID Chr4; pos 13049166 to 13049884)
aggactagcgttgaagggattctactggtatgataattttcgatctgctctacttgttatccaactcttctgtagttttctctgtgttgtttaactgcccactgtcttaaaatcggtggtacagttatgtggttcaagacttgagtggccatactgtcatatacataatgccactgaagtgtcactttatttgtacttaatcgtagcgttctctgtaaatatgtgttctctacccaatgtatcatttaaaacttggcagagatatagatctgtgtgatattttgattgaagtcatctacttccttttctagttgccatctccaacacaattttgtactgattgggtaaccttatattacgaagaagctcgaatcacataagtggattaatctgaccttaatatatagtcacaagctttatggatccaatgaacttaacctgcacttaataagagtcataaaagtgaagggtgccatttattgatgcatcttattgttccgtttctttcattgtttgtatgcaccattgcccttccaagctttaatattttcccatggagtatcatatgcttcaaataatttgcgtttgagtctagcaattactaccacctaatttgatttgattttagtgatatctctctaacctaagattcttcttaataccttatgctgcttaacatattaggtgcaagaacacaaccatcctcatatacttctgct

SEQ ID NO: 1697 - DNA, 570 bp, Arabidopsis thaliana
  Intron number 1 from transcript AT4G25620.1 (locus AT4G256 20) derived from phytozome v7.0 (chr-ID Chr4; pos 13068666 to 13069235 reverse strand)
ccgctgagtctagaacacaaccgtcgtcggttcaggtacttctatgagctcttttttttttttctgagtgaaaatgtttttattttggttctttttttttttttttaaagatcagtgttgttgctttgatttgccgacgtttctgacggtgtatcgtgattgtagttttgattgctcagagacatggtttttataagtaaaagtgagaatttcgtgatgtttttgatgtttgatctgtttttgcaagtgttacgtaacgaaattaaacaaagttttaagagatttttgcgttacttattagttatgctcatttacctgttattgctttacttaactaggattaaagagtttttgacgaaagtagaaatataagaagattcgagatttgaacttattttaaatgtctattatttatcagcagcaccagagtaggtgtggtttcagcaagatttaaacttcttgataaagctataagccattgaatctttagctgatcactaatcttgtttttattatgtcctttgaatttcaaaagaaaaaaaggggaagctggtggagcttgtactggtg

SEQ ID NO: 1698 - DNA, 637 bp, Arabidopsis thaliana
  Intron number 1 from transcript AT4G25680.1 (locus AT4G256 80) derived from phytozome v7.0 (chr-ID Chr4; pos 13088525 to 13089161)
tcggtcttggcggtatattccacagcgctattcaggtactactcttcgtctatattctatgaatctacatttatgtacaattatcgatgatgtctaagcttggttttggtctactttatgtagatttggtttttgtttctgtgtatgtatgtggaaattaagaagttgacggcatgatacttttcttttgatatgtgaggctttagtttaatggtttatggtcctaaaggtctggagctgaagtctctcttttgctcaggatcttgtgtttcctagtacttttggtaactttccatatgataatgattgcgatatattgaccaagtgctctctggagacttgttaaatccaatgatggcttacgtttacttctgtgatctttgacctgggcaaatataattgcatataccactttcccatttgagtcgtgacaatttggtgtattccaacaaaactaccagaatttaggttttcaagttagtgctaatcattctatgttcttaggtctgtatatctatgcaatatcatttgattattcttgttcatggttttgttatttttttgtgtcttgtagatgactattgattcgcagggaagagtgattgaatagaatattttatgacctttgtgcaggtat

SEQ ID NO: 1699 - DNA, 914 bp, Arabidopsis thaliana
  Intron number 3 from transcript AT4G25980.1 (locus AT4G259 80) derived from phytozome v7.0 (chr-ID Chr4; pos 13190207 to 13191120)
aggactcaacgccaaagacctcgtgcttctcagtggtatgtatctcttcttcttcttcgtcttctctctcattcatgtttgtttggtggtttcgaatctctcaaagtttttggttcgaagttcaagttatatgattttcaattcccggatccatgatacgtttcgcatgtttcgtccgtttcctctcttcttcgtgtgttagtgtcacgtgcgttaggaaattctggtagaccaatacaagaaaacattattggaattttttccagctaagccagcagtgtttctttgtgcagaaaaataatttcgtgaaatttaaaattttaaacttgtgagaattttcttctaacgataacaaattatccaatatttacctatacgttgcgaaacttaaagaatcgttcgtaataaaaaaaaatcaggctttttgggtcaactttaggcatttatacaaatgttttgatgttctgtcatcttaaccactaaatctggtatagcacagaaatgttgattcaccccgaaaatgggcctgttacacgatcggcaattaatctgataaaacgtcataaatatctaacggccccattctatagagtattgatttttttttatttttattttcatcaaaaaccaatactgatctcgatacgatcgtgaaattatcaactttcacgtgtgactaaacaaagacgaaaccatcaacatgctgagtctaagccagtagtgatcatgcattttgaacctggtccggctcagtttgcgtcatttttttatttagtttacatttcaagtttcaatatgagaaaactttgacaaaaaaaattgtcactagttttaagaatttaagagatctaaacctgagtggtctactttccgtatcagctgctcacactatcggaacaacggcctgcttcttc

SEQ ID NO: 1700 - DNA, 430 bp, Arabidopsis thaliana
  Intron number 1 from transcript AT4G26370.2 (locus AT4G263 70) derived from phytozome v7.0 (chr-ID Chr4; pos 13335445 to 13335874 reverse strand)
ttaagcagtcctcgagccgcacgcgagctcgctctgtaagcttcgttttctcactttaagcgtttctgaaatcgtaatcgtttcgttgatttgaaaaaaattggaaattttagctgcaaatgaaaattcgcctttactagaattggaaacgattcagtcatctatgcggcttggtgtgacaagaataagtctcaacttagtgttccattgtctgggttttaaggtttaacctaaaaccctaaacccagaaccttgcctcactcaacagtcaatttttctcgagggtagaagtattaagccattagttctctctttttacttgatttcagccaaaaaattgaactttgatatgattatctcctatcaatatgaatgatgtatctaccctctctgatcatgttgctggatgatattgacagtgtaatacttt

SEQ ID NO: 1701 - DNA, 540 bp, Arabidopsis thaliana
  Intron number 1 from transcript AT4G26410.1 (locus AT4G264 10) derived from phytozome v7.0 (chr-ID Chr4; pos 13346968 to 13347507)
gtgaaaattctacctctcagttccgctctatacaggttagttaatctctcttttgttcaccaaacaatttttgcgaatcgagattgtttaccaaaaaacattttcaggatttcaaaccatggatatggtggaatttagtatctcgtaagctataatttctagaaatgagctcgattcagaacagatatttctccaattagcagttttatgtattgaatggtgctagtttttgttcatatgggtaaaatcttgttgaatcataccattataacttattggcaatgatcttagtctcttcctgggttctgattctgcttcaaatggttgtttagaagactgtaatgtatcgctgaggcattcttgattattctctaaacaatgtttttatatgatatcagatattcatgtagcttaatgatgtgtgatatggagtagaccctatctggctgaaatcacagttccattagatgtatgtatatgtcttcgtcttctctcatacaatcttacatttgattctgaaattgcaggatttcattccac

SEQ ID NO: 1702 - DNA, 716 bp, Arabidopsis thaliana
  Intron number 1 from transcript AT4G26480.1 (locus AT4G264 80) derived from phytozome v7.0 (chr-ID Chr4; pos 13374934 to 13375649 reverse strand)
cgatcacagccttctttcctcgttgagcaagagaagtaattatatcaatctctatgtttttcgctttgtcttatagttgacttgtttcttgatctctgttatactgatttggatctcaaagtcttaatttttatcgcaaatcttaaaactttttttttgtttttcgtatcgtatttttcatttctggttctggtttctcatactgagatctatgctttctacttctgatgcccccgtcgattttcaaatatatatggatgagttcttacctacctaccactgcaaattaagctccttttgagctcaatatacttcaattgtggattggtttctataaaatatccaacttttaaatttcaaaacaatttatctaaatctatcaacttagtttgtgtttgtatcgacagggtaatggattgttagtgccacaggtgttataaaatcgtatgttgtgttcatttcgtgtttgttgacttgtgttcatgaagctatgaattctccactctgcctagatgctgatgtttggagacggatttgctaaatgaatttgaatacattaatctactgacattcatattccgcttattaaacgtgattattaagtgaaaatgagtggatcttcttgtatgctcaaggtcatactaatctggataatctgcaatttctcttcttttttttcaggtatctttctgagttacttgcagagcgtcacaagc

SEQ ID NO: 1703 - DNA, 738 bp, Arabidopsis thaliana
  Intron number 1 from transcript AT4G26610.1 (locus AT4G266 10) derived from phytozome v7.0 (chr-ID Chr4; pos 13424761 to 13425498)
caagatctttcaatccaaaagctatatacattaaggtaacgatttatgaagtatttctcctcaatttcatttcttttgtttctacgagtctgcatagatccagaagagctttgcttgattgttcttactttcctgagatctgtttaaacttagcaaaaaaaaaaagtctactttgcatgaaatgtgtgattagggtttatgctaattttggttaattggagaatcagagagtgttccctgatgtggaagtagtgaattactttgggttgagtaaatgtatgtctctcaattgattgtcaacgagatttgagctcgagatccgtaaccaagttgagctaaagcttctttctttcgacttgttctctatatgaaaattattttttctttgactcagttatttttcttaatttgatttctttgagctcgatcttatgattcatactgcaatgattgagttgtggcatcagctctgatggtatcttctgtttttaaaaaatagcaactttttagtgtttttctgctcagctctatgttaaaggatgtttcttcattacggggagaaatgaatgagagctcttgtttattgatcttcccatgattctagttctaaacgagccttctgttatctgaatttgaagtgttttaagcttttttattctaataagccgtcttcttctctgacgctatgttttgctcactgcagagctcaggtcactatctgacgggatccgtgacaat

SEQ ID NO: 1704 - DNA, 374 bp, Arabidopsis thaliana
  Intron number 1 from transcript AT4G27500.1 (locus AT4G275 00) derived from phytozome v7.0 (chr-ID Chr4; pos 13743240 to 13743613)
tcttccttcttctctcttcagatctccatttcacggtatccttctctcttccccttgtctctattgacttttatttgctttgatttttatcgatcgtctctgatcttttgctaatttaacttgtttccgtttgttttgaatttactctctcctgatctttggcatgtattttgaatctgctgttcttagttttttatttgatcttgttctcgtctgtcttaatattgaataattgactagttttatttacagatctttgcattatagatcccttcaagtgcgattttaatcgtagattagttttggatccgttatattggactgatgtttttgatgtattttttggtattaggatcaatcctgtgtttgaaaca

SEQ ID NO: 1705 - DNA, 715 bp, Arabidopsis thaliana
  Intron number 1 from transcript AT4G27610.2 (locus AT4G276 10) derived from phytozome v7.0 (chr-ID Chr4; pos 13787371 to 13788085 reverse strand)
aggttttttaaagagtcctttatactctccctgtttttgggtgcttcgctcgctcactgatttttgattcgtcggaaaatctattttcgagctcggatttatgtaattccttattctccttctgattgcgattgttgtgttcattaagggttgttgggatatcgattaacggcccctatcgaaaaaaataagggttgttattattttcatttcgcttcatgttcaaggcaagtatctatctcttcttcttgcttttgtagttttagaatctaaatcccatggcatcaacgtttcgattactctttcagggaactccatttttcttgcatttgctttttttgaggtagagtctgtgctcctatatgattccatggattcgtcgtatactttctcaactgagaatgtttgacttagagaatcttccatttttttttttgtctttctcttttcagtgttactatcattttagatcttttttttgtttttccttctctggttgactgtgtttgaggtaatgctcaaaacgtgattctttgtgctcattatcttttcatattctagtttctggaatctttctgggtattaagcatttgatgattttaaaattgtatatttgttgattttattgagttgacaccaggtttcttgttgacatatgcccaattcattctgatcgttgatgatgattgattcttgtatccgttcaatgtaggtt

SEQ ID NO: 1706 - DNA, 383 bp, Arabidopsis thaliana
  Intron number 2 from transcript AT4G27630.2 (locus AT4G276 30) derived from phytozome v7.0 (chr-ID Chr4; pos 13796160 to 13796542 reverse strand)
cttcgtaacactggtaagccttttccttgctatcgatgttcttcatctttccttttcttttcaggcttcctaggaattattaaaatggtttgtatgttatatgatggacgatctattgctttatcaatttatcttttagaaatagtatgaggcctgataattgacattctgttacattttgggattaaatttatttgctgatgaatatgtataagcaatttttcattgccttatggcgttaatccttccttctttcgtttttttgattaaacatcgtagcaccacatgttacagaaatttgatttggctgttgttaatttttatatttacctaaaaccatcatttcaggtgtaagaagagagcgtgctgctgttggggccttg

SEQ ID NO: 1707 - DNA, 667 bp, Arabidopsis thaliana
  Intron number 1 from transcript AT4G27690.2 (locus AT4G276 90) derived from phytozome v7.0 (chr-ID Chr4; pos 13823657 to 13824323)
ttgattcaattacgctcttaacatcagcttggaaggtaactactggtctcgcaattgtgttgtagttctgggtctcagtttttctcactggctcgctcgtactcttgatttctatcgaaccgagtcctgttcttattcactgaagcattacgtctgattcagaaatttattagctttggatttggttatttgtttcatgaattgggaactagggtttgcttctattttcgcatttctcctagctgttacagctctagcttttgaccgtatgcattcagtgtaatgaaatcgaaaaagctgctgattttgttcctttgttgaatggaacaggttatttgtgattgagatctagtcttcttataatggtaaagtgatcttcttactatggatttgcctttctttgctttgtgcttccattgtaaatgcttatagctttttgagttcaatctcacagaattatcttcttggagccttcaagcccgcctgcaacatctccatcactttttctgatggcaaaaatcgtaaacaggtatctctcttttgtgccaaatgccaatgattacaatcgctgctaccaaatttattggcctagatcattacttgtgatcaagtcacgttttggattttcatttcttctatttaatcgccattgtttcgataggttccc

SEQ ID NO: 1708 - DNA, 487 bp, Arabidopsis thaliana
  Intron number 3 from transcript AT4G27745.1 (locus AT4G277 45) derived from phytozome v7.0 (chr-ID Chr4; pos 13840600 to 13841086)
atatcatctctaaggcttttcaggtgaatcaccttgatcatttcttttgttttgtttgtgtcccatatgattgatgtagaaaattaagtggagaatcgatgtaagactagctgcagctgagcttagaatctaagaaaacctgtgactttattgtctttcctgatcaacgatcgatgctactgatcatgattcagttttcctactaagttacatgttggtgttagagtcaaatcaaaacttgaaagttgatccttggaaatggaaacaaaacataagacacaaagtagcctttgactcaaattgttacaaatcacaaaagtagtcattctttgagtatgcttgtggtaggttgtggactcaattcaaaatcttatgttagacagcccggcttttgtgtttcttgattgtgaataccaaattcttaatcacggttcttcattaccacttaccagggaagaactgggcgagccttcctgttctcccacgc

SEQ ID NO: 1709 - DNA, 640 bp, Arabidopsis thaliana
  Intron number 1 from transcript AT4G28270.1 (locus AT4G282 70) derived from phytozome v7.0 (chr-ID Chr4; pos 14008196 to 14008835 reverse strand)
aagagatccatcggtacttacaatctttccaaagagtacgtttcttttttctggaatcatcactcttattatatattgttgcgtgtgtctatctaaaggcatcgaattagtagtagatctgcaccgtttttgagttgctacgcaagaagatgattgttttcgatataccatgtcattttttaaaggatcataatatcacttgtttgtttaatcaaccactcctttgtctttaattatttagctttttttcttaaacaataacgtgctttgggattaagtgaaaacagagcaaagcgtcggaaacagaaagtgattaggtcaagtcttcgtaacttcaacttgttaaagaatatgatccttacttttttgcgtctaatcttcttcttttttttttttggttagtgtaagttttaaattcaagatcgatcatgctaagtatatacacaacaattctgttataatctatattgatcttcatattttgatgatatttcttgtttctatgaagtatcattgattttataaatctctaattggaattagactttagtatttactatttacttatttaggtgaaatctcattaaataaacaacgactggtcaagtgaatggttgtttgtcttgtatgttttagtaaa

SEQ ID NO: 1710 - DNA, 704 bp, Arabidopsis thaliana
  Intron number 1 from transcript AT4G28370.1 (locus AT4G283 70) derived from phytozome v7.0 (chr-ID Chr4; pos 14035144 to 14035847)
gagtgacgaggtatgtgtgtgtgtttttactttattgatgattgttcgaaagtttcttcatttcgatgtttcccagaaacatatttttatgttttgttcgtaattttgatgtgcctttccaactaagaattcgagcagtttgctgtcaaatgttttttttattgacttgtttctgctcatgatttgctgaacgagaactggtcataattgatgattttttttctaagtctgagattttctgagtttcgaagaaaatggaccatattgaatgaaaatcccggagtagagcagctctgatctaagttttatcttttgatttgattgagcaaagctgaaaatgtatataaactatttacattagctcgattgagctcatcggtatctaagctttgttctgccggcgaatactttgagatgaataagaatgaatctgtcgttagtagtgtggtgtgatgagactacaataatggagtctaaggtacatagagaccggttagttgttacagaagtagaacgcgtgatagtggggaatcttcgatgacattttacagtttgggtttgtagctagtgacttttaagtagactgtgcaaagggaactcatgtacgttagactgaccaggcaatgtttgggtaatggtttaatacgtgaggtctttgtgatcttgcagtggctctttggtaggaaacaagaagctgaagttgg

SEQ ID NO: 1711 - DNA, 543 bp, Arabidopsis thaliana
  Intron number 1 from transcript AT4G28480.1 (locus AT4G284 80) derived from phytozome v7.0 (chr-ID Chr4; pos 14073440 to 14073982)
aggctaagttcaagcagatctctgaggcctacgatgtatgtgtttgattcctccactgcttttgctttattgaaatcgtccctaaagttttgatttttatttctattgagaaattttcattcccttgatactgtcggtggtcacgaacttgtttctgatttttgatatgagatgcaattagtctgatttcacgatttgatgttgtgttggttcgtggggtttttagatttcgtgtccctgagtaattcgaatcatagtatatagtaaaagatgattgctttatatttgggcaagctaggttatctccaaagctcttaatttgtgctttctttgctgatcttctgagtcatgatttatccgttttcttaactctgtgattgattattgagaacctcttaggcactctgtacttgtcaatgtgtagcttaggattatgaggaacatactaagattgtttgatttgactcaggcttttatgaggctaatgttggtttttgttgtgagatgattaggttcttagcgatcctcaaaagagagctgtat

SEQ ID NO: 1712 - DNA, 418 bp, Arabidopsis thaliana
  Intron number 1 from transcript AT4G28510.1 (locus AT4G285 10) derived from phytozome v7.0 (chr-ID Chr4; pos 14086373 to 14086790 reverse strand)
tttcctctctctgcgacttgaagcaaagtttccaggtacgattctcgccattttgattatgtattttgtgtaatgggttggtattgatcgattcctttcgaaaattttagtgaagacgtgaatttcggaggtgggtgagagttttctgctcggattttgctaattactcgttgttactgttttgattaggaagtattttgcgcagcttagcatgagcgttcgttaaattttctatctttactggctttgtgtgctgaatctgacttgattttgttactttgactgtttttgatgttttcatgatgaagttgcataattgagtagatgtgagtctggattttgagtgtatgtttgtgtagtttttccaccacacatgggttttgattaatcatgtattgggattgtttcagaaaaagag

SEQ ID NO: 1713 - DNA, 914 bp, Arabidopsis thaliana
  Intron number 1 from transcript AT4G28760.1 (locus AT4G287 60) derived from phytozome v7.0 (chr-ID Chr4; pos 14207726 to 14208639)
ctactctagctaagctcagctcttaactgttacaggtctctctctctctctctctctctcttcccccgagtaaaaaagccacaaaatgtctgaatcatttagctctgatctcactttccgatgctttttacctattttctcgtttcgatttctttgtttgcttttcactgttcttacttcaattagattctgatccctctttttaccctttctctctctctctttctctgcttttgcttttactgtttccttacaattgtgattgtattgagctaattttggtcggattcatttactcttctctttgtcaatttgcttgtttttgttaaagatgtgacatttattactaaaggtttcttctttttgggggaaacaaatttgagttcatagatagacttactagaggagtgttgtatcactgatgctggaatctggttaatgtaggcagatccacagtgcctgttgattgtttcttcctatcatcaatctcggaatttgagggggtcttattattaagggtgagtcaattttgatttgtaattttcacaaggagtttgtgttcagacttcagagcataaaaagtgactggcttgattgtgataggtcatgtgaaaaaatggtaactggttcatcttatcttttgttcagtcactataaagtgtccctctgattacagaatcttattctcctttctttttttccttacaaagttcttgttttgttatgcttgtcctgttcctctttgctgctagaaatattctcttcttctactctctcttcacttttcctggatcttttaggtttaaattttgaagcttgcagagctggaaagtttcttcattaggaatctttgcttgttagtttcgtgtcacctcagataataactaaatagctgtgaaactgcagggaccata

SEQ ID NO: 1714 - DNA, 511 bp, Arabidopsis thaliana
  Intron number 1 from transcript AT4G29430.1 (locus AT4G294 30) derived from phytozome v7.0 (chr-ID Chr4; pos 14472560 to 14473070)
aaggagaaaggtgaaatttttctcccttttgttttctaattggttcttgatgcttacccatttatcatttttgggatcggaagctcatcaattctcatggacactagatttagtagtattttagaagctgcaattagttcgtgagattgttgggcttacttacttgtgaagctacaacatttgaaagtttgaaacttgaaacaaagtttaatgttttttgcttccaagtttatgtttttgcttttatgatgctatcagtggtctgagttgctttgttctacttatgtatatatatacctgttgattcatattaaggatggttagataattcttctgctaaatggatttttttttgggtaatgttgctagatagcgatttcaaatggttattatagttgtaagtagctttacatgttacagattgtttgatggaatcagcttttccttagtgtgttttaactttacaaaatggtaatgttaaatgtaggttatatcaagaactttcaagtgt

SEQ ID NO: 1715 - DNA, 119 bp, Arabidopsis thaliana
  Intron number 3 from transcript AT4G29510.1 (locus AT4G295 10) derived from phytozome v7.0 (chr-ID Chr4; pos 14492353 to 14492471)
tctacgctgtatgtcttcaatctttcagtctcttttttaataatcataagtaagaagaatctttttcaattttgactgatttgattgaggatgtttcttaataggttgagtgttctcaa

SEQ ID NO: 1716 - DNA, 915 bp, Arabidopsis thaliana
  Intron number 2 from transcript AT4G29735.1 (locus AT4G297 35) derived from phytozome v7.0 (chr-ID Chr4; pos 14563180 to 14564094 reverse strand)
gcgattggtctcgtcattaccgctatcttcttcatgtaagctaataattgatctgatctctagatcttcgaaattgccccttcttgttctcaatttatattacttgatgtcagattagtgaaacagttcctgatagattcgatctacctatgatttatcttgattttcataaagcttgattagtgtgtgatagtcatgactaggttctgaactatgaatcgtgtgaggctctcctcttgtttgttcactgtgtatgaagcttgaccaacattgttactgcttatatatatggtttggtcacaatgctttctcaattgctattctctagagataggtcttctaaagctcctgaagctacatgttcatcactttcatgatctctttgctagattaatctgttgaaatatgtgcctttcttattactaaagtttctgggtaaaaagtaagaaagtcatgggactcatctagtaaccttttggaaatgtgtgagctctatatactatcatgatataaagactcaaaatttatcaatgataaggtgatagtctatggaaatggaatcagtactctaatagtttcactgaatatgacaaaatgactgattatcgatttagttaagatacaagaaagttagatttgtatgattttcatttaagcgtggagcatttacctttcaaagggtggcaagttttaggagatatgattcggtttgttaaagtaatgtgcgtctgggctacgagagcatgtgggttagcctcgagtcaaaactttaagatagacttgaaccattcattttagcttctttgtaataaggtcatattggactcttttggtattcattgtgctggtttagattcattcagcccaacaaggagtgatcaaaacttaccctgtcataacatttgtgttgcagct

SEQ ID NO: 1717 - DNA, 1007 bp, Arabidopsis thaliana
  Intron number 1 from transcript AT4G29790.1 (locus AT4G297 90) derived from phytozome v7.0 (chr-ID Chr4; pos 14583138 to 14584144)
gtaatttcccttttgccgcgattttggattacaaggtacgaggtttttgatttctcatcttcaatgattgaagtttgatctgggttctagaattctaattctgtgtgttgccctttgttttattcggcttattgaagatgcttgacttcgttttatgaagttcgtatcttttttgattcagttctcttctagggttttcttgtgttagagctctgaattttggtaatttttttggtaatgaagtttgattatggtggaaacacgaattttcaggagaagggttagttcaattttatacttttgcttggaaaagtaatatgtttgaagttggacatttagtttcataattagtcggcaatgcagataagctgtgaagaagacatttaaaggaattatctttcgttcttttcgaattgaatatggtgttggggttggtttaggtattttgtttggattggtgattcttcaacacatttcacctggatcttagttagagaaagaaaggacagttccatgttagacttgtttgtgtagttcagttgccacttgactagaacttctccttttttttgtacattagctaaatgggtagattcattttgtttccttatttgttgaagctcttttattgggttggttagttgcttcgttttagatgaaaattatatgcggtgttatatggctctgagcatgtttccggaagttgctggcttaatgaagcaaatacatgcgaagattatgtgaagaacctaaagtactctgaaaccaaatttatacttatattctagtgtttctatttatgtatagattttaaaatttttatgtttttttttggttttaagacttggttagtgcaaatggaatggttcattatcttggttgtttttatgtatactcttgtttctattgcaatgtcattctcgtggtcaatgtttgttgctaaggttttgattccatttgtcacttttgcaggtgaaataatttgacagctgaggatttaagcattt

SEQ ID NO: 1718 - DNA, 853 bp, Arabidopsis thaliana
  Intron number 3 from transcript AT4G30470.1 (locus AT4G304 70) derived from phytozome v7.0 (chr-ID Chr4; pos 14894915 to 14895767)
gttggagtgaccaagacttctgtcgcagcaagaaggtttctaatttttctttatttatttattttggttattaaatattaatcctcattagtttaagtgaaatttaaaattttggggaataaattggacccacaatttaaatattataagctggattggaataactaattatttcctgacatcttatttaatgtagctagctcatattattatttattatacatataaaaaaggaagccagttctataaattttgaattttgaaacactatataaggaattattttgtggtatttttttaatagtcaaatgttggtcttcatcaaatgtatcatcacattatctcgaatcattttattggacgacatagaaaattcgtaaggggtcaggttaattgaatatattcatttccatgactcttaaatacattgtacaactcttgattcggttatagttgccttttggaaatttaaagggcatatattttaaatttttttccttcatgttttgaataattagatacagatgatttagtagtagtgtcttttatgactatcacttagattagacggtgacatgttttttttttgatataattatgattgtcattactggacttagctaactttatgcaacaaattattcggagacaatattaacgtgtatagctgtctgtcatcaaacggaacagtcaacaaaacgaaatcgaagactattcctttacttttttgttgctgcaatttttaggaatttcattaccctctctttttgtttgttactactatttactgtagtagtattagtacaagctcaaactcacgtgctaacaaactgtatgtggatgcagttgtggc

SEQ ID NO: 1719 - DNA, 212 bp, Arabidopsis thaliana
  Intron number 1 from transcript AT4G31300.1 (locus AT4G313 00) derived from phytozome v7.0 (chr-ID Chr4; pos 15188995 to 15189206)
tgtcgtcctcggagccgactcacgtaccagcaccggtgagatttccccccttctctacttttctagggttttagttcctcttcgttgggtttgtatttgagttttgttttcgtttcaatcggaacaaagaataatcctaatcgattgttctatttgggtaatttagagaaagctgttaaatttgggatctgttgtaaattactcgcgcaggt

SEQ ID NO: 1720 - DNA, 780 bp, Arabidopsis thaliana
  Intron number 1 from transcript AT4G31450.1 (locus AT4G314 50) derived from phytozome v7.0 (chr-ID Chr4; pos 15257978 to 15258757 reverse strand)
caatttccaggaacaagattggacgaaagctaaaggtaatcatcgaacaaaataaacagcttaacttctaaaaatcttcctttatcatggaatttttttttatgttttgagacaaattgactttttttttgtgtttgtgatgttttggaaatgaatgatgttactgttcttgattctgaatcgatttttaagttgtaactctcttttgtttagaccaggtaacaaaaaatgaaaacatgttctgtttttgtttctctccaatcacttgtgtatagagagacacatgtattattgttgagaattgtttctcttcatgttcaagaaatttgattgttttattagttccttgtcaagatgattctttattgagaagtgattataggcatcctttggatcatcatcttatgaaaggtttcatttttatttgaaccatcacagatgataagcttttagctatagacttttgtgattgaagcactttaagtttggctgttgattgttaagatcgttattacaagagtttcataacaacaatgttttcttctaatgaatacttttatgtctggtgcaaaggttttgaatttgcaggttttcgcagtttagtctcagagagtatgaatatgtattgatcttttgctcgttgttttctttcagtctctgatctgtttttcctgtgtttttttttattctttggcgaacttttaagtcccaatgaatagttttggttaactaaaataaggaatatttttgttacaggtattgcatccatttaaaaagttc

SEQ ID NO: 1721 - DNA, 317 bp, Arabidopsis thaliana
  Intron number 1 from transcript AT4G31510.1 (locus AT4G315 10) derived from phytozome v7.0 (chr-ID Chr4; pos 15276690 to 15277006 reverse strand)
tttagttcatctttggaagattctcttccgattaagtacgtttctttattaattatcttctaattattctgttatctacacctgaatatattcgatcgatttattttattacaagaataaagtaaatcattagattctcttatgttcttgggtttgattttattgatgaatctgtaagatgttgaaattgtttcttacttattagattctcagtttaaatgttattactacatgttgtgtttttgtttagtcatgtggtttaggttttggtttttgttacaggagaggattatcaaaccattacatagggaaatcga

SEQ ID NO: 1722 - DNA, 403 bp, Arabidopsis thaliana
  Intron number 1 from transcript AT4G32130.1 (locus AT4G321 30) derived from phytozome v7.0 (chr-ID Chr4; pos 15522024 to 15522426 reverse strand)
ttcttctttgcttccactcttccgatctcatctgggtaatcaatcctctatctccacaaatcctctatagagcttgttgacatagagctttaattttcattcagtcgttgcttttcgtagctgcgatatctttttagcattaccctctaagtcttccctcgtagtttagtgatcttgatatcgttatctccaagttttggggtttgataataatttgtgcaacgttgatttcaatttgatctacttgtttgacgaatttactactttagctgcttatacatcccaaggatattattaaattcttgtctttgattgaattcagctgttcaattcattctttccttttcttatctgtttggttttttcaggtctgaggatagttacacgatcacgggtagagtga

SEQ ID NO: 1723 - DNA, 585 bp, Arabidopsis thaliana
  Intron number 2 from transcript AT4G32250.3 (locus AT4G322 50) derived from phytozome v7.0 (chr-ID Chr4; pos 15572529 to 15573113 reverse strand)
taatccgtcgaaattgctcttttctctccctcattgtcggttactttctttgacccttctcttatgcttcgtaagctgtgatttttttctctggtttcattgcaactctagttcaatttcagtttgatttcttcgcttaaatattttgttctatgagatctgagagttgtctttattgttggcttatttcaatcaaaacattggctggttaactttgattgactcatgattgattctatctagcattaattggttttctttgtatttggttactgttacttgttcttctacttctccacgattctacttctccacgatactgtctctgtcccttgttcgtatcgctaacttattcccatagtgggcacgtctctggtttctgacttttctcttcaattccatgtattgcgttttaccatgatgtttagtttcggaatcatttcttgctttctctatctgcttgtaagaatagttaacaagtgagaggaaagtcctttttgttgcttaaatagtttgatttctgttgttgagtttatgcgatatcccaactggtgaaactgtgtttattggttcagacagagataa

SEQ ID NO: 1724 - DNA, 393 bp, Arabidopsis thaliana
  Intron number 1 from transcript AT4G32340.1 (locus AT4G323 40) derived from phytozome v7.0 (chr-ID Chr4; pos 15613451 to 15613843 reverse strand)
tccttctctctaactacgctcgtttcctcaaagaggtttgttttaatctcctctgtttttcaagataagggtttttaattatacttgctaatttgggaaacttttattttactcttttgacaaaacccacgtgatactttatatagagacaaactcagacaagttaaaactaagtacgtattattgctattaaagaagtcgagctttgttcttgattttaggtttttgattggttgaatctactaattcatgtattaacattttggaaacgtaaatttatagatttcatccattaacagtttttcagaagaagttaatgtgtataaaaaaaaaaaggacattgaggagatattattaaatttaacatgtcttaatttgtgaaggtgaaaggag

SEQ ID NO: 1725 - DNA, 516 bp, Arabidopsis thaliana
  Intron number 1 from transcript AT4G32440.1 (locus AT4G324 40) derived from phytozome v7.0 (chr-ID Chr4; pos 15656779 to 15657294)
cgggagttcaaagtctcattcagacattccagaaggtgatctcttgtttcagtttttctccctttttgttgattgtttcaatattggtgttttatccttcgatctctatgaaagttgtttcaattggatcgagattcttcgctgtttattgattttacgatacccttttcaatcgtttggaagtttttttggtttgtcctaattcgaattattcttgctgtctgaagaatctgtttggaagtaaatttggattaatcttgcttagcttgtatctcctgtgattgatcgcgattacgttggttcttctttctgtttacgcataattttactgattcatctaaattttgttgcggctttcttatgatctgtgttccagagtttgtggattattacatcaaactatatgtttttagagttgtttgttttattaagaatgtatgatcttctgctttggatgtttgctcacatatggatatttctcttttgcaggtattctagtcgactgagtaaacaatc

SEQ ID NO: 1726 - DNA, 777 bp, Arabidopsis thaliana
  Intron number 1 from transcript AT4G32810.1 (locus AT4G328 10) derived from phytozome v7.0 (chr-ID Chr4; pos 15828628 to 15829404)
aacttactgtccaaggaaagatacccacttggctggtttgtctttttatcatttttctatattgctccaaatatataacttatagctatattcgtggaaattttatacaaatatgtatcgtgcacactaaacacactcacactggcacatgcatatgtatataatacaagacaaaccccattcatcatgcattatttatagttattctatatattacgtatacatttttctttccttatacatgatttcattactaagaaagagtaagagctatttgtccaaaaaaaaaaaaaaaaaagaaagaaagagtaagagcttaggttagtacaccatgttcgtatttatatatcaatatatgcagtgagaatcagaagaaatagagaacaaaggttcagattttaataaagaagatatgctagtttccaaaaagatatatatgcacatatatattattagtctaggttatatatgttctattatttctacaagttttgttttctctattatttttacaagactacaagttctaaactggtcataggcatggttggtacttctacaagttgtactcttgaccattgcaatctaaaatcagcatacaatcatgtttcataaaatacaccaacaatcatgtaccaaaaaatctattttttttagtttttgataaattaataatatttttactaaaacaaaactccataaacaaaatcatcaaaatttttaaaaaaagaagtaaaaatgagacaagaaaactaatgatttaaaatgacatgcaga

SEQ ID NO: 1727 - DNA, 457 bp, Arabidopsis thaliana
  Intron number 1 from transcript AT4G32930.1 (locus AT4G329 30) derived from phytozome v7.0 (chr-ID Chr4; pos 15898945 to 15899401)
gctgcgacgattccaacttcccttacctcttcaaggttacccgttaccctcccttttcgcaccagttttatgctttggttcctctcttttgatttccttggtttcgttttagctgggtacgattgattggattccttagctaggctcatgttgagaaataagtgacttccatggatctgaggctcattaaagcttcttagggtcttcatttcgccttgcgaattagaattctatggaattgagtctgacagaatggtattattaagtgactatctagggttgtgagaaacaaaaactcttagggcttatgtttctgcaagtgttcaagatcaaatgtattactgctcctgcttattcttgcttgttgtgtatgcgattaaaagtcgtttagtattctcccttcacatatatcagtacgaaatattaacagaaatgttttttcttgctattagttgaa

SEQ ID NO: 1728 - DNA, 603 bp, Arabidopsis thaliana
  Intron number 1 from transcript AT4G33000.3 (locus AT4G330 00) derived from phytozome v7.0 (chr-ID Chr4; pos 15924362 to 15924964)
gaccaaataatattttagcattgaaaatttctactgtatatgtattttcaaaattacattcaatgataggatagtgacaaatattaatctgaaaatataacattgtctattgttttatttctaagttgaatgtaattttgaaaatacatatacgtagaaaataatattttagccaataaaaactaaaaagctctatatttattcttgttcttttttttcttcttcaccaatatatatgtttaccagtttagccattccataatatattattttgtttaaaaaaaaaaaaaaaatcaaatggggaccaccaaggacggtacattcatttgattttagagaatggttcaaatgacggatatattagcgtgacattttgataaactgaaaaaataataagtgaagcagaatcaaagttgccacttagtccggaagactgtgattgtgattttgaatgaactcatggaacaagtttcctctgtaaatttttctcactactttgatttctcatttcttctctgattttgtctttttgtaatgttcttgttcttgttttgttttggtgaaacagagatcaagctctctcactgtcggagagcaattctg

SEQ ID NO: 1729 - DNA, 576 bp, Arabidopsis thaliana
  Intron number 2 from transcript AT4G33110.2 (locus AT4G331 10) derived from phytozome v7.0 (chr-ID Chr4; pos 15973800 to 15974375 reverse strand)
caactctccgatctcctccgttttgttgactgtaagtgtcactgacacatatataattaaaagctcgtttttcttttcttttcaacatctagatttaatttatttatattttagactagattttgttaattttgctttggtgttattgagtgattattatgacgattttgaaacaatctggtgtgtgtgtgttgcaagttgttacacgtacttcgcttgtggggcttcgtccgcaaacaactaacatgacggctttagcgccgcacaatattaatttttgttgatgtttgagtttttgagtaaaaatgaaatgtgaaacaaaaagtagtttagatattgttgttgagagatccacgaaaacaaaatttcttcttcttttaatatatttgtataattttaaaaaatttacattggatcattggatctcccgtctctaagcctataagactaattcaaatgaaaaattataaacatttgtaaaattagaacattttatagtttgtcacattatagaaatttgcaaaatgtaacgagtatctcttatgaatgatgttctatacttcagctataaagaag

SEQ ID NO: 1730 - DNA, 390 bp, Arabidopsis thaliana
  Intron number 1 from transcript AT4G33150.1 (locus AT4G331 50) derived from phytozome v7.0 (chr-ID Chr4; pos 15991070 to 15991459 reverse strand)
atcaaactcatcaggtacgttttgattccttcttccataattttcccatcttgaggaatgcaaatttggagagcgctttagctaaatcactgccttcattttttcactttggatttaataatttgcgttcctctcttcctctctgctctgttctgttctgttctgttctgatttgagttttcaattaatcgctcgagcaaaagctatttctcaactcgttaaatttctgttcccagtttgttcgattttcaacagtttcacattaaagtttgggtttttgatgtttggttgatgaaactcgaaatatgaaatgtttgtgaatctattccagggtgtttaaaataagggtttgttgttcatctgcagagattatatgtttttacatgaaag

SEQ ID NO: 1731 - DNA, 597 bp, Arabidopsis thaliana
  Intron number 1 from transcript AT4G33410.1 (locus AT4G334 10) derived from phytozome v7.0 (chr-ID Chr4; pos 16080965 to 16081561)
accactgtctctcctccgtcgttagggtttctcaggtgacacactccgcttctcttcttttccgtcttgatctaatttttccgtcaattggtttctgcaatctctacgtttcttctctttcaccttagatattgcttgattcccacattaattgttgctgagaagtataattaatttcttgatcgaatttaccagttctcaaagttttgtgtccgttgagtacaacaaattcctcgaaattgagtcattgattgaaataccaacttaatttttgatttctgggtttgttattaaaatgtagacacacacttggataactgagtttccttaacttcaatctggttataaacaattttaaatttaccctttttcttaaagaactcaactttagcttgaggtctgaatttttgtgccaaacatgtacttagtagcttagtaaccatgtcttgtgaactattatctttcttgatgtcccttgttctgtaaagttcgtaaaaacttaatctttttggttttaaggtggcttacatgaggtttgttggtgtgattttttattttacaggttcacatctgttggaaacttattgcaactcctaa

SEQ ID NO: 1732 - DNA, 823 bp, Arabidopsis thaliana
  Intron number 1 from transcript AT4G33440.1 (locus AT4G334 40) derived from phytozome v7.0 (chr-ID Chr4; pos 16092408 to 16093230)
ttctcgaacgcggcgctctcattttgggatccaaggttatatcaaagttttgaattctttaacacattgataaagtttactttttttttgctttgtttgttgttgattggttctgaacagtagtagtattaagagaattcaattagttgttgattgctctgtgagaatccaaaatttgggtttgtgattgctttttgatttgtgggttcataaagttttgttggtaaacactatattcatttcgctaatcacggtcagtggttaaaatggacccaccattgtttgatacagcaaaaaagctgttatttttgagtggggatagtctctagtagtgcgaaatctggatttgcatatcaaaagtcagtgttttgcatgaattttgtattaacacttgttaatttcggattgacttgttcaatgaatgttcttgtgatgtctcgatagtagctgtaacaaaaaaaaagtcaagtggaagaaaccatttttatatgatcatattccaagaaaggagttagatgtatagacaacttttgtctgaagcatgttcatgtacgaactagatctatcagattacttgtgttgtctcctaatttagtattaaattattactgagtttttttgctgtcaagtttgattctgattaaaagtttgtctgctagtgtttgagcacattttcatgtgtcgatgtaaactcaaaagtcatctgtacttatatagatactttggaacgctgttttttttaattcttacattcttaattttacgttgtaagtacaatattgatatttttgtctggaattatggtttgataggacctagacga

SEQ ID NO: 1733 - DNA, 756 bp, Arabidopsis thaliana
  Intron number 4 from transcript AT4G34150.1 (locus AT4G341 50) derived from phytozome v7.0 (chr-ID Chr4; pos 16355654 to 16356409)
gactgtacctggactttgcagagtaaaactgggaggtaattacattggctttactagtttttgttccttttccattaagtatcatgtttggtaatctcgattattgcatggttcacatttgtctagctgattttggtgcaactttttgatgtggtttctactatatagtgcttgaatatatagtttcgccagttgctttgctttgctttgctttgttcttgtcatttacttacagtgctgacatggttttgctcactgatcagagtcgttatgtgtgtttttgtgtcctaaattgttaatctgtgtgaactacttgttcgaatgttctgtttctacattgagcacactcacaattgatgtagcattttgattaggtttctctggaacttatgaaagataactagacattttgacataaatggagcttctattgtctgttgttaggttacctcagtaaagagatgtgaagttgcgtttaaacattgtagcatcaaattagaatttcttaaaactggtctcttgaggtattccatttttgtttttgaaaaagagaaagttatgtgttttttaatccatggctatgtgttttgttttcttaaattcctggaaaatcggttacaatgtgccaagattttggtagcttgtcctcagcgattgctccttgtaaaagattacttttttgattaaaagccttgtgaaaaacatcaacctttctgtcttgtagattcgctggagaagtacaactcctactgcatt

SEQ ID NO: 1734 - DNA, 848 bp, Arabidopsis thaliana
  Intron number 1 from transcript AT4G34290.1 (locus AT4G342 90) derived from phytozome v7.0 (chr-ID Chr4; pos 16411193 to 16412040)
accttcaagtacttctttctctctttttttactctctctgaaatgctttatgtgctctaatttggttttggttgtggaaattttttaagtctcttgtggtgatttctcattagggtaagttttttggtgtttcagagtagttgtggtttttggtagacaaaagtaaagtgggttgtttgaattgcttatgggtttagatggagagcttctaagaaatggataaggttgtcttgtggtgtcttgttatgcacagttgaatctggagtttctttactgtttagtttagactgaaacaggttcttgtgattagtcgtcatgttacttaccgtatttgtttctttcatgtttgttataataaacttttgaaggattcaacggattgtgagattgaatttggggttttgaacttcttttgatatgactggttaattgcttcaaattattttatcattgttgtgatgataaactttagtggatatgttttggtaatgacttttgatgttctttgatcattgtacttgaccaatgtattacctatgcatttggcattatactagtccctgtgtaatgactctttgtgctgtgtaatggaaacaaatgtagacatgtccatactggggtttgaccttaagacgttagtttgtacttttttctcatgttgtaatctactcttacttgttctgtatagattcttaagtgttcattgtgctaaaatttcaacaaaagaaacattttttatgacaatagtaatgtatatcttttatctatctgtgtggaatttgtgggctaactgaataatgtttcttctcccaggacccacaaaacaagagggatatactctgcgacga

SEQ ID NO: 1735 - DNA, 687 bp, Arabidopsis thaliana
  Intron number 1 from transcript AT4G34400.1 (locus AT4G344 00) derived from phytozome v7.0 (chr-ID Chr4; pos 16445378 to 16446064)
ctgttttcgtctcccatttcagctcagagttcgtaagattttctctcgaggtttcttctttcaggtttatctgttcatgagcaaacgattcttgaactgggtagattctcttagcctagtggtttctttgaactatgtctgatggtttttatgaaacaaacactgtgtttatctgcatttagcttcctctatagattttgctttttctgtttctagggttttgctcttattcctaccctttggtttcctttttctgactaaagatttaaactttctgtatgaatcagcttaatttatggacttaacactggatatgtttggttactggaactaaatttcatcaaagtataaagtagttttgctcagattttgttttctttttctgttgatgaatagaaacatttgttctgcttctaaatgctgaaagatataaaattttgagactggatgctttgattttgtctggttctggaaagttgactcttttaactgtccctacgcttttggttgaaaccaaatcttgttgtgtgtggaaagcctctttaatgactctctccgacttaccttaaagttatcttgttttttttgtgtctttacttatctattgagtgtttggcttataagttaaacaatttttctgtgaaatgagcaggtgatcccagtttcctactacgatcacattccaca

SEQ ID NO: 1736 - DNA, 804 bp, Arabidopsis thaliana
  Intron number 3 from transcript AT4G34480.1 (locus AT4G344 80) derived from phytozome v7.0 (chr-ID Chr4; pos 16482301 to 16483104 reverse strand)
ctcaggtacattaatcaattaatttgtgttcggtaactaactaaatttctctaacaaaagttgctagtctctggttatgaatttggtggactattttatatctaaatgatttcaaagtagacgttaaaagcatagttgatctaggtcggttagtttctagtaatttattgttgttgacacaaaaatatgagaataataatagttggctgtattcacgtggacgaatctatagtttgaactttaggttattatatgttattttcaaaatttctttgcactagattgtagcaaggaacttgttctgtctctactttttcatttagaaggaatctatattcttattatatatagtacaaaagacagttggtcacgtatgtgtctgaattacactttctttcacatacacaatctataaagtataaattctgcttaatactatttggtacttgtaatacttatttttaaattcattcgatgttaatgttaataattatcttctcagggaataagtatgcgtgagatgacatgtcactcgtttactcattgtctgacagactggattcgcactagttatttttagacgtttcttgaaacatttgttttgtttgtttgcattagtcatcattaattccacgtaagcagcgtcgacttaaatcaataaaacaaacgaaaaaaaatggtgacgtttcagtttcaggtcgtatttataagttttcgtaacaaagcagtagtggaagtctttgttcattgtcgttgcttgcagcacaagttacagtgtctgagttttcattatctactaggttg

SEQ ID NO: 1737 - DNA, 604 bp, Arabidopsis thaliana
  Intron number 2 from transcript AT4G34580.1 (locus AT4G345 80) derived from phytozome v7.0 (chr-ID Chr4; pos 16515769 to 16516372)
cttcggtaaaaaaattattttccctattcaatctctttattttcttaccttattcacaaagttatttcgagaccgtagtattcttataagtcaataagattaaaaattttgaaacctgatttgttagtttggactagactataacccgagagaaaattaggtcaaagattatagatatctgaccatattcaacaaataaactgccatatgtattattttaaagataagaagttttcagcgataaagttaaatatttcatatttttctgattaatctcatatacagatatatgcatacataaactttttcaaatattttaaaaatcaaatcttatttttaaattcagaccaaaaggatttatggaaagaaaataatcgaagcgaagaaagatttgtcaacactttatttcctaacatcatttaatacaatttgaacattttataaaattaactatgaagaaaatgaaaagaaaaaccttagtctgttcaaaaagaaaaaaacttggtatatcaaataatattgaatttcatcaagaagatttatattttcgtattgatgaacataaacagatttttgagagcaagaaagtttgacattgagaaag

SEQ ID NO: 1738 - DNA, 796 bp, Arabidopsis thaliana
  Intron number 2 from transcript AT4G34700.1 (locus AT4G347 00) derived from phytozome v7.0 (chr-ID Chr4; pos 16557149 to 16557944)
tggtttgttctcttctcctttcattttgcatacctctctctttgccttgtttcattgttgattgttaaaatgtttgataatccgtagaaatggaaattgatattgttttgtttcatttaatttggtagagagactttagagatatgatgagcataatcatctaagtgtgtgtggatgagaaaattggggacttttgttgtggaaacacctctactggattttctcttgctaagttgtttaggttcttcgctattataaaaaaaaagtgaataggtaggagatatgggaaatagaattgctgttcaatgatttgtgtgttgagtttgcatattccactcattatcattccaatattgaattcaagtaaaggatgtacctttttaaactggagttgaaaatcatattatgaaattcttttttcaactactgccacaatgtacattgagtctctcatctttggttgtctcttgatatggtccttttgtaggagaattcaaagttagtaggatttaagcttttagagcattgttaagctagatccaaaacatagaaaataagagtgaaatgaaatagctaatgaaagctttttatagtgcaaaggaaataaaattattagtctttagattgttaacaggaacaaattcattttagatttgatatttcataagggaaagaaggagagatgcaatcctcatcttgctaagaaacctgattacatgggcttatgaacttgtatttggtcattcttgggctttatcaatgctctaatacctttgattggggtatttgtaggagg

SEQ ID NO: 1739 - DNA, 418 bp, Arabidopsis thaliana
  Intron number 1 from transcript AT4G34890.1 (locus AT4G348 90) derived from phytozome v7.0 (chr-ID Chr4; pos 16624461 to 16624878 reverse strand)
acacttctcgaatatctcagaggtgcgtatcaacttctttgattaatatccaattgctggggatgatttcaagtactcaaacaagtttaattttcaattcaattttgaactgatactctctatgaagattctgttttttggattcctagtttcttactctagtatgttaaagaaaaaggcttatgtttgacttatagattctggattctaaaaaaatcgagattatgtttgatccactgttcttttgtttttttagaccactgtctttatttgagtaagattatgctccaattgctagattcgcttggggacaaaaaatgacttgcagagatcaatctttttttctaaacgatcatgaagtagtttctaacttacagatgtttcttgtagatttaggattgaccggtacaaagctggg

SEQ ID NO: 1740 - DNA, 510 bp, Arabidopsis thaliana
  Intron number 1 from transcript AT4G34960.1 (locus AT4G349 60) derived from phytozome v7.0 (chr-ID Chr4; pos 16648929 to 16649438)
ttttcctcgtcttcgcgctcttcaacaccggaaaagtaagcttttttctccgacccgttttcatcttatttgtcacattttcatgtggatctcaaattcttgtgtttcttcagaagatctgattctcttgaacccttttgtggagttactttctgagtagtgtttttttggatttggttattagtagtagtttcactttgattcaaatcaacattttatctccaagtacattaaagtgtttaagtgagtatcacacacattataagctccatggcaaatgcttgtcagattcttcttatgatggttttgaactttgggttattgtaccagaataacattgttgaacttgggttagctttctattttccgggtctgacatattattgttaggtttctctttgttgaatttatggttgcttggttagtgagaaggtttaatagaggagcagcagaatgtgatatgccttgtgtatgtttgcgcctgatttacttcctctcttgatacttagg

SEQ ID NO: 1741 - DNA, 376 bp, Arabidopsis thaliana
  Intron number 1 from transcript AT4G35530.1 (locus AT4G355 30) derived from phytozome v7.0 (chr-ID Chr4; pos 16872731 to 16873106 reverse strand)
tactttttgcttggaaaggtaattatgctcttagagaaaatttggttgttgccgtttgttattttgatgtgaatctgcttgacatttgagtgattctgatgcattgcttagaacaagtgttgctagtacatatcatgagaaaggcataccattttgtttcttaggattggtgatggagtatagtttgatattttcattctgttgtgagcattatgttaatacatgacaaggtttgtataaaagcacttttctttttttgtgttactttacaagcttgttttgttgttgttccatttgtttcttcttcacttaagttgaaagggataattcacatgaaacaggacaatccagctagaactctttcttggggctgcct

SEQ ID NO: 1742 - DNA, 685 bp, Arabidopsis thaliana
  Intron number 1 from transcript AT4G35560.1 (locus AT4G355 60) derived from phytozome v7.0 (chr-ID Chr4; pos 16881566 to 16882250)
tcgtgaagaagttggtcgagatagcagccaagaaggtacacaacgatccgataatatgatttcttctttctaatcttcttcggctattgggtttatgagagattcagtgaacaatgatggttcaaaagtgtgattcgattcgaaatcctttaagtttacctaaatcgatgttagatccatttcttagaataatatttgtttttttctcccctgtgtcttattattttatagattcacagaattaatgtaacattaggatatgatttgattgattaatttttgtcggattattacacggatctattacttgtgaatgtgactgtgatgactctgtgtcggttcctggttagcccagatgtttaatccagtttgattagaaaaaaaaagtaatgatgacgtaagacgaattttgttgccaacgcatgtttcgtgtcctaaattttgaaatgttcaattaaaattcgcatccataatgctgtctatttatatttctaatcaccaattatcttttgacttttgtacttgtccatatagacattaagaccaaaaccggccggtttagtatcgtccaaccgaaccggccactctatttctaattttctagccagaacaaaatcttcaaagtcttaccatttcctccaatgttgtagcctggaggaagttcatcagaaggactgagagctaa

SEQ ID NO: 1743 - DNA, 669 bp, Arabidopsis thaliana
  Intron number 1 from transcript AT4G36010.2 (locus AT4G360 10) derived from phytozome v7.0 (chr-ID Chr4; pos 17039579 to 17040247 reverse strand)
tacgtcatcactttctgtccttctcctaacccaaggtaaaaaaatttctatttccattattcaccaaaaagtacaaaaatcgagttagaatttttttcaaaaaaattggtatattttttgctaattagaaaaggttggttccgatgatctgatcaaatcatattgaaaaaggaaaaaagtttggttctgattcctttagaagaagtccggtttcgatttttttatcacattcaaaagtttgataatgttggttggagatgaattattcacctttttgttttgtttgtgtaacgttttgaatttgaggtcaatcaccgaataaaaatcatggaacatactttttcataatggtccgtgttcttttgtcaatttgtgaaatcatatgacaagacgacattcacattttcacccgttggcataattatatcaaccaaaataaatgaaaatagaaaaaatatctaatgttctctgttgtatgcatttagatttttattcattcaaacgtcggtgaaccgtggtccaacacggctcttttgttcacattgcaaaatagttcaaatatattttatagaaaacgttactttaataaattggtgatactaaaatttgttttcttgtgtaatttgtctttcagtgtgaagagtgcaacgaagggagtccaacccgtag

SEQ ID NO: 1744 - DNA, 465 bp, Arabidopsis thaliana
  Intron number 2 from transcript AT4G37080.3 (locus AT4G370 80) derived from phytozome v7.0 (chr-ID Chr4; pos 17473774 to 17474238)
acactactcatcatcaagtagctttctttttctctctctctcatatcactttttccacttttattaactcaattttgattgcttttctctttggggaaatctttcttggtggattatgcttagtctctgataaaaagtttgttcctttagattgataaaaattggatttcagatatttcttaagattcttggcttcaacattggactatttaccaaccgtatctttgcttttttgttttgttttctgaataatagttattccatagtgatggtcacagtgaaagtgatcgatactcaattcttatcctcattctggaagtgtgtgttgttttccactatcaaaggctcacaactattgtttctttattattagctccagttctgtttccttcattctgtttgtgagtgtgtttttttggtctatatgagtaatgatgtttcgtggtattctgaaatctgcaaagg

SEQ ID NO: 1745 - DNA, 779 bp, Arabidopsis thaliana
  Intron number 1 from transcript AT4G37230.1 (locus AT4G372 30) derived from phytozome v7.0 (chr-ID Chr4; pos 17516594 to 17517372)
attcacccaaggccacgttggaaataaatctgatcgtaaaacacaacatctgcagattattatcaataaaaattcagaaatcaataaaattcactctgaaaacgcagaaaatctaaggtaaattcataacgaccttttgaatttctagtgtcgaagctgtattgaagaagaagaagaagattccgaagctaacaaaggagaagacgagagtggattgattgctcctctctcctctctgatgatattcgtgcttctacactcacagagatacactgtttattattgttttcaatatatgagaggaggagcttccctactatttttagttttttagccaatgagagagctccacttcataccccacttttaccaatcgtgcgatttcacagccactctcacccatgtcgcgttgagcgcgtgtctacgatttctaaaggggttattaatccacaaaatttatgcctttttgaatccacgcacctcgttcttaaaaacccatcgcgtgtcttatttgttttggttttcttctctaaaccaaattaaaccgaaccgagatcaatttgaatttcgaaaccaatgtaaacccatcgctgtgaaaacaaaaagctcggccacaaaaatggagacgacacaacttggaagagaaatcaactcgaaatagccaagagaatgttcgtaaaccccctcaaatccgatgcttcctttgattccaacctccaaaagcccatctgctcaaatccgaggagtattacaaggtacctctatagaatatcaaggct

SEQ ID NO: 1746 - DNA, 576 bp, Arabidopsis thaliana
  Intron number 2 from transcript AT4G37440.1 (locus AT4G374 40) derived from phytozome v7.0 (chr-ID Chr4; pos 17602005 to 17602580)
agacttcacttcctctttgggtgaggtaagctctttcctcacgcttcttatttagtcttttatcttaatggtttccatgaaggtttgttgtgtgtttaaccaatagcagaatgagaaaaaaatgtcctcttgcttaatttggttttgtagagattttgatggttttggtagcttgtgtacttttactttttaattgaacactatcagttccatctctatgttgctggattcttaaaagactgaaatttaggagttacttgggttcctgtactaatgagaaaaacgtctgtagcttaatttggtgttgtagattttcatggatttggtagccttgtttactgttacttattattgaacactatcagttccatctatgtgttgtttgattgattctgaaaggacttaaatttgtgtgttactttactacgacttagctagctgcgtctttgatttatctccttttaaggaagtcaggagaagaattgctctatatcgtgaatggtatgcggtaattattatggtttgttcctttttatggcagaaaaaggaagctgactgatcattggaggaggtttg

SEQ ID NO: 1747 - DNA, 353 bp, Arabidopsis thaliana
  Intron number 1 from transcript AT4G37580.1 (locus AT4G375 80) derived from phytozome v7.0 (chr-ID Chr4; pos 17659091 to 17659443)
ctggtaataacatgtttcacaatcttttatcttcttttacttgtatgtctcttcaaaaactctgtttgttttttgaacctagaagtagaaaacatagaacaccaacttctcaacctttggttaatccaaaaaacccattttccataaacaattaaagttcggttctttttttggtatcatttctatttttttccgattcttgataagatcaaaagactcatcatttatattattttttgcaaccaaatgatacccgagtaactataactaataaagtttcctctttattataaaaggttaaaaacatataataacggaaaatttaaattatgggactgtaacaggtggctgag

SEQ ID NO: 1748 - DNA, 713 bp, Arabidopsis thaliana
  Intron number 1 from transcript AT4G37608.1 (locus AT4G376 08) derived from phytozome v7.0 (chr-ID Chr4; pos 17669036 to 17669748)
gattagtccgtcctgaaagatcttttcgttttcaggtaagattctccgatccaatttataaactttattttacagagtttgttgtgtttattccctggataattagggttctaaaattctgtctttgagggtgaaaaaccttgaattggattagatctttagtgggtttgttctgtttattgcaaaagtatcgttgaaataggtggattgtgattgaagagaggttttaggttttgcgcactaagtgctcgatgaattgtctaagtcaggtgttccttttcctagaaccgctttattttgcttttctttttttcgaaactaaaaactttttgtgtcttgtccttcttgttctctaactatttggatttttctctgtctctttaatctttcttctctctgtaaagttttttcgtcctttgagattcatcaagagatacgctttttgtggcagtaaatagtcttcttttttgatatttagtgttgaattgtgttatctgattcttgtttaacactgtgttttgtagagttaagaagtgaatttgaatgtccagattttgaatctctgatctatttgtatgtatgattgtgcccaagtcaaatattatcaatgtggacagtggaggagtataatcttgttagaaagaagaaagtcttatgttgggagattttagttataagttattgtgtcgctgatcagattttacttttagtta

SEQ ID NO: 1749 - DNA, 346 bp, Arabidopsis thaliana
  Intron number 1 from transcript AT4G37910.1 (locus AT4G379 10) derived from phytozome v7.0 (chr-ID Chr4; pos 17827703 to 17828048 reverse strand)
gcttccgtatctgcgtttaaatccgtatgtatctttcccttcattttcatttttacttgagaaatcacgtttcttcggatctgaaatcgttaacacttaataggattgaaattacccatcggttgaatctgggttattatgttgtacttgaattgatttaggggtttcgatctaggtttcttaaagttccgtactttatgttttttctttctttgaattcatcagtgaagcaatctaattttgttccttgttgatttgataataattcactgagggtttttgaatggttcaaatttggattgaagctttacactgttagtattcttcactctgcaggtttccgcaa

SEQ ID NO: 1750 - DNA, 689 bp, Arabidopsis thaliana
  Intron number 1 from transcript AT4G38580.1 (locus AT4G385 80) derived from phytozome v7.0 (chr-ID Chr4; pos 18034642 to 18035330)
gtcacaagattaaaaagcgcaaacagttgcaggtactttccctcttccttttcttatcttagcagattcagctgataacttagatcttggtttgcaaaaaaacaaacataataattcgttgaaaagttatgatgaatgagtctagtagaaactagcttcgatggttactaggaaagtttgagtgttacttagtagatctcgtatattatagttccataaatagactgccattagcaagtttattattgtggttttggctggctaatttgtgttacctttcttacttcagatcttttttaatatctctgtgtttttttatctgaagaagtatatccaaattgttacatgatataagtgggattttatttgaagcagtttttgttttgagttaatgttccttcctaacgccgaccgaatagattcttttaatctgaaatataagttgatacagccatctgttagattttacaccgggatttgtattcttctcgctgtcaggaatactatataaaatcattaatttccggggaaaccaaccacgttaatttttctcactagtcatgatgatatggttaaagtctttcaattgtggacatttactattcttcttagatatttttaaagtaggctaattttgtcgttttgtgtcgactgcttgatgaggatagacggtggagattaaagtgaaa

SEQ ID NO: 1751 - DNA, 427 bp, Arabidopsis thaliana
  Intron number 1 from transcript AT4G38960.2 (locus AT4G389 60) derived from phytozome v7.0 (chr-ID Chr4; pos 18161664 to 18162090)
aaaaagtaacttctctcccaaaaaagcttcctttttttctttaactctcctctctatctattggttgtgctctgatgggttcgtcaaagatcaagtctttgttatctctgtctgggaattctcagttgatttggacctgagttgatctggcttttcgataactttgagctaaagaaataagatttttgagatttggtttctagattcttaggctcttcacatgagattagatatttcgaagtgtagtgaatccgtcaaaagagttcaaatagttgaaacctcttctctcatttggtggattaagatggttcagttgatgaatttacatgtttgattacatgagtgtttgttgctgcggtttcaatgattctactctgtcatgtacattgcagggaacgttttgtctccagagtttgcatttagtagt

SEQ ID NO: 1752 - DNA, 636 bp, Arabidopsis thaliana
  Intron number 1 from transcript AT4G38960.1 (locus AT4G389 60) derived from phytozome v7.0 (chr-ID Chr4; pos 18161664 to 18162299)
aaaaagtaacttctctcccaaaaaagcttcctttttttctttaactctcctctctatctattggttgtgctctgatgggttcgtcaaagatcaagtctttgttatctctgtctgggaattctcagttgatttggacctgagttgatctggcttttcgataactttgagctaaagaaataagatttttgagatttggtttctagattcttaggctcttcacatgagattagatatttcgaagtgtagtgaatccgtcaaaagagttcaaatagttgaaacctcttctctcatttggtggattaagatggttcagttgatgaatttacatgtttgattacatgagtgtttgttgctgcggtttcaatgattctactctgtcatgtacattgcagggaacgttttgtctccagagtttgcatttagtagtattaacttctggagaagaaaataatcgattttctgctctttgcgcttaatccttacttcagttagatgactcttaagggtaacactttatagtccttctcgagtcattggttcatccttctctactgcaatagctcttagtagttttcggattttgatcggaaatggattacttcaaagctttgtaatgttttcttctttcaggttcat

SEQ ID NO: 1753 - DNA, 1022 bp, Arabidopsis thaliana
  Intron number 1 from transcript AT4G39010.1 (locus AT4G390 10) derived from phytozome v7.0 (chr-ID Chr4; pos 18177693 to 18178714 reverse strand)
ccgtttcacagctacctaaccggatcttcgtccaggttagtgtggttttaatttgccaattcaatttcgtaactgtttttttttatgccggtgagtggcatttttagtgaatacgaaactatggggaagggtaaattggggaattaaaataacacagagattgaggaaactgaatcgtttgagttgccaagagatgaaacgaacccgtgaagtgggtgtttgtttttggactctcaagagtctctctgcatttaccttttttgtcgttgcgtcacactttttttggccctttctattttcctatatattcttttctttctacgaaattatcaatacacatcaatatcaatttaattagttattgttaatgacaaagtccagtacgtaacatacgtataacatcgaatgaatcatttaggaaataacaattgactaggaactttataagttggcaacgtaaatgtcaatttaattttggtcttattttgtgtgtgtcccgtactttgtagtaaatacaaagatgaccaaccattagttttagttgcagggttttttcgtttgtttttatgtttatttttttaaaaaaactacaacaataaattttgttgacttaaattcagcaataaatggataatgataattcaatagtacacctctaaaataaattagtgaatgggttatgaaattatcaacattgattcaatggtcgtttgcatcataattaataaattatgatcatttaataattattagagttgagatacgatgatagagacttctttctttcagaatcgttcaattctctttgttccaatattagaaaaatcaaacatcagatatgatgttgatgttgttaggtgcatttcttattttattcattgataatttcatatcttgatttatatattgttttatttagagggcttgaatatttaatatttttgaaaactaactaaggtaggaaaaaaataaacgaacttgtgataggtaggtgatccgatagcagatcataattgctggga

SEQ ID NO: 1754 - DNA, 977 bp, Arabidopsis thaliana
  Intron number 2 from transcript AT4G39300.2 (locus AT4G393 00) derived from phytozome v7.0 (chr-ID Chr4; pos 18287195 to 18288171)
tgctgattcctcttgttggagcttgctttctcagggtatcttttttcctctatttttttgctgttttcttgcaaattatccttaaatttgttgtctttttggtgggttgattctgttttctgctttatctgttgtgcatttggaaagtttttgagaataagattgaaacaggagatcaatttcttagtaagcttgaatctctcttatgaaatgggatcacaactcttaaaaagatagcaagtattagatgatattcttgaatagcagcataattgtggcaagagatttttcattagtctacactcgttggattcaaagtttttttttttagctcaaacaatactgattagatgtgaaactggatgatatctgtgaaagatatgttttttaagtgtacaaaagattgtggcttcactagatatagtttcgactgggacaaagcctgataaagatcaaaactttgaagaaaggaactgttacttctcttatacaatcatgtcttgttgagatatatgtctagttggtcttagattatttagttgctccttctgatttttctaaaactttgcttctttctctgacttgtggttcttctacttaatgcgataggacttgcaacgcctttgtgaccccggtctgctggatcgatataaggcggaaataatcaatatattacaatgaatgaacaagaatagtgtttttttttctagttcgaactctatcgtcaatgtattgttgtgtggttcacaaggacttgttgtttcaaacttcttgcaatctatctattcgatatttggatccacacattttggggcctttttccttcactaaagtcagcatttgctttcttttgttcatgcacattgtaacgaggaacctctgcatttttcaatttctgaatcttgttcactgatcctcttcccatttctctcatctctttagaactgggagttcctcggtgacaccatcattagctt

SEQ ID NO: 1755 - DNA, 644 bp, Arabidopsis thaliana
  Intron number 2 from transcript AT4G39300.1 (locus AT4G393 00) derived from phytozome v7.0 (chr-ID Chr4; pos 18287195 to 18287838)
tgctgattcctcttgttggagcttgctttctcagggtatcttttttcctctatttttttgctgttttcttgcaaattatccttaaatttgttgtctttttggtgggttgattctgttttctgctttatctgttgtgcatttggaaagtttttgagaataagattgaaacaggagatcaatttcttagtaagcttgaatctctcttatgaaatgggatcacaactcttaaaaagatagcaagtattagatgatattcttgaatagcagcataattgtggcaagagatttttcattagtctacactcgttggattcaaagtttttttttttagctcaaacaatactgattagatgtgaaactggatgatatctgtgaaagatatgttttttaagtgtacaaaagattgtggcttcactagatatagtttcgactgggacaaagcctgataaagatcaaaactttgaagaaaggaactgttacttctcttatacaatcatgtcttgttgagatatatgtctagttggtcttagattatttagttgctccttctgatttttctaaaactttgcttctttctctgacttgtggttcttctacttaatgcgataggacttgcaacgcctttgtgaccccggtctgctgga

SEQ ID NO: 1756 - DNA, 766 bp, Arabidopsis thaliana
  Intron number 1 from transcript AT4G39380.1 (locus AT4G393 80) derived from phytozome v7.0 (chr-ID Chr4; pos 18311875 to 18312640 reverse strand)
gatcttcctctgcttgctccgtctgctctcgtttagtaagcttttcccctcgcgtcctagactagatcagtgatatttaaccgtttacaatctctctcagagactttgaattttgcgatttctttgcttatctcttgacttttctccaccgatcgtttatctgttgcttgattggagaatttctgctctaggttgtatatctaagagtgatttctggtctcaatttgaatttattcatgactgattgatttttcatgctatggattttgtttttttcgttcggatgaatcatctaggtttggaagtttggctcgatttctagggttccgatcagcatgagtctgagatttgttttttgaattttcgtaaaatcttccgaacaacttaataattggactatagctgtgtttatttatgtcaaatccgaatctaattagtctctctaagtttcattcggttttgattaagtcgagattggaaaagcgcttgagtttctgggtttagatctggatattgaaattttgttttatatttctgcgactgtaattgtgtttgattaacaagtatgagtttatttgtagattaattgggcttgtttttaagtttcgttcggttgcggatgaatctagatatgtgagacacttggatttctagggtttgaatctgtgtttggaggttttgctataaatctctgtgaaatagtatggagaaaagaatattttgactcttgagttttgataccgaatttttgtttttctttttcaga

SEQ ID NO: 1757 - DNA, 545 bp, Arabidopsis thaliana
  Intron number 1 from transcript AT4G39640.1 (locus AT4G396 40) derived from phytozome v7.0 (chr-ID Chr4; pos 18400063 to 18400607)
tttgttgtcgtcaagaacgatacgtccctataaatgtaagttattttgtttctctaaattcagaaatatcccacctaaaaattcgactgtttggtatttttagtaacaagcttcatgaataatattggagattttcttggataaattattgattttcatctaagttattccaagtttatgaatttcccactcatcatatttagaagaactttgattttttttcttgggtggcttttgggtcaaaacaaaagaatgataaagtctcattattattttgagcttttgttcatgtactgtgtggtcaaagacagtaacataaagtctttgttggctttgagttttagcgtatacgcgtaagactggttttaacattttcaatagttgactaatctctattttcaattttgttttcgggaaagttcgaggattcttcaaaatttattgtttatatgaatctgtttctgtttaaacgttgaacatcattttctttttgtgtttatcctctgtgattaatctctttgtttgtttctctatcaatagtagca

SEQ ID NO: 1758 - DNA, 407 bp, Arabidopsis thaliana
  Intron number 1 from transcript AT4G39890.1 (locus AT4G398 90) derived from phytozome v7.0 (chr-ID Chr4; pos 18506206 to 18506612)
acaaattcgacaccacgtaccaggtatttacacagattcctttcacttgttttgtttattcatttaaattcttctctgcgacaacaagtttcttttgttttcgtttttttattgtttgatctgattcattatttcctatattacgattgttcagacgatttcatctcatattggtcctagattacgtcgctgatatcactctggtttttcttcaatgcatttgtttgatcactctgctctctgtttttttggttgatttatcaatctcttcttcttattatgatcaagatcgatgatgctaagcactgttgcttctttgctttcttagttagtcattaagcctttatttgtgttctctctgactctctgcagcctaccattggaatcgattttctatcgaaaacaat

SEQ ID NO: 1759 - DNA, 466 bp, Arabidopsis thaliana
  Intron number 1 from transcript AT5G01030.1 (locus AT5G010 30) derived from phytozome v7.0 (chr-ID Chr5; pos 10172 to 10637)
ggtatgtttcttttctcctctatattcgttttcttttccgagaacacaagtagtgtctagtgaggcttgctttgatttggtgaataagaaaggttaggattagagcagcttaaatttagggtttttcgagcttgaatgctgtttcctctattactttatcggttgtgaaactgtacgacatttgtttcgaaatctttgctaataaaggtttcatttttcattttttttgtcaagagttggaattgaattagtcttttctacattgtggtcaataatatccgagtctctcgtgatttagtttatgcataaatctgagagtgtgtacgtaatcatagtgaaagtttctttatttattgctatatttgtttaatggagataagtttcattgcttcttctttgtagatcaataatggctacaagaattgagtttagagatattctgtagcagggctaaagaacatcagag

SEQ ID NO: 1760 - DNA, 409 bp, Arabidopsis thaliana
  Intron number 1 from transcript AT5G01030.2 (locus AT5G010 30) derived from phytozome v7.0 (chr-ID Chr5; pos 10172 to 10580)
ggtatgtttcttttctcctctatattcgttttcttttccgagaacacaagtagtgtctagtgaggcttgctttgatttggtgaataagaaaggttaggattagagcagcttaaatttagggtttttcgagcttgaatgctgtttcctctattactttatcggttgtgaaactgtacgacatttgtttcgaaatctttgctaataaaggtttcatttttcattttttttgtcaagagttggaattgaattagtcttttctacattgtggtcaataatatccgagtctctcgtgatttagtttatgcataaatctgagagtgtgtacgtaatcatagtgaaagtttctttatttattgctatatttgtttaatggagataagtttcattgcttcttctttgtagatcaata

SEQ ID NO: 1761 - DNA, 540 bp, Arabidopsis thaliana
  Intron number 1 from transcript AT5G01100.1 (locus AT5G011 00) derived from phytozome v7.0 (chr-ID Chr5; pos 36691 to 37230 reverse strand)
attcctttcaagtcctcgttccaaaaactacatcggtaagtaaaaaatttctcaagaacagagtcaacaagagttgtttttttcttcttctttcaaacaaaaccgaagaaccatgtttagattctgttcatgtcgacaaaaaattcggagctgaatcttatcaaaagtaacaaaaaagtgatatatttttttatttcgtatttttcatattagtggattagtgttcgtgaaaggaattttctcaagttcgttagaaaatatataattgattttatatttgtaaatacaaagtcatgagtggatctctgctccattcgccactgaattttctagcggttgacttcatttatttaattacaactaatccaatatttattcttagcctaaccacaatcagaacagcttgtaaacactaatttgtttgttggcccattgggcttttttattcgttagcaaattgttgttcttgtggactaattttgcttttgtcacatgtttccaacagatcccagagatttggaatcaaccggaggttgggaa

SEQ ID NO: 1762 - DNA, 256 bp, Arabidopsis thaliana
  Intron number 2 from transcript AT5G01460.1 (locus AT5G014 60) derived from phytozome v7.0 (chr-ID Chr5; pos 187321 t o 187576)
tgttgtttgtgctctggttcttggaattttatacggttagttgttactgtttggtttcttttgtagattttgagcttcattttcttcctggtttgaggaaaattactgagattatgttggagtggtgattgaaccaatagtgggattgtgaaaagggtggtcttctgatgttcttcttatttgcattagtgatttataatgtaattctacaaatgtattaggagtcattgggaaggtggacttctctgtaaggcac

SEQ ID NO: 1763 - DNA, 497 bp, Arabidopsis thaliana
  Intron number 1 from transcript AT5G02020.1 (locus AT5G020 20) derived from phytozome v7.0 (chr-ID Chr5; pos 387316 t o 387812 reverse strand)
gtattctcggatccatttttcctcctccttctaaggtaattaaagcttcgatctttttctttcttttctcgaattcaattttgttttaacaattttcataacctctgtttccatttcgatttcgatcgatttttaattgggataaaaattgggatttttgaggaattagggttttcaaaacgaaacgatgattaatctgatttgattgttgtttttcaatttcgtgtttcagatttttgaattgttgtgagttttgtttgttttttggaaataatggatttttgaaaaaggagatttttaaattatggaagaccccacaagccccaaattaaagaataagaccactgaagatgaaggagactttcatgattcgtgtcttggagaacaagcttctcttcgttaagaagaatttgatactattcttctcgatttagaaatttcaggggtttgttcttgtttcaggttttgggaagagaatctgtgcgacaagagactgt

SEQ ID NO: 1764 - DNA, 686 bp, Arabidopsis thaliana
  Intron number 1 from transcript AT5G02840.1 (locus AT5G028 40) derived from phytozome v7.0 (chr-ID Chr5; pos 648953 t o 649638)
ggagaacacgacaagtttctggaagctcttcaattgtaattttaccgcgctctttttttcttccaccagctatttgattgactgattctttgtgtttcgagctctaatttatagctgaattttgcgtaatttcgcgtaatttctacttaatttgcttaatcagatcgaagtttggttatgtggtagatcatctggagttttgcgtatgcaattggattttgcagaagcaacaatgtcttctttgatttgttaggttggattgtatattcgatagatcagaatttatattaatcgctgatgaatgtttcttctcataaaaccgaagtatggtttaagcttatcttaggttgccaaaatgattgagtagaggacttggcatctggtttctgcataaatagtggtattttgcagaagtcgtatctttctttattaaaaatgtttaacatgagaactgaaaaaacttactacaagtcagcttttagagctatgcatgaaaccaatttccaactacagtcctaaactacaattcagattttggtaatggttcgttacttccacatattacattgctcttttgtgtgtgtgaaaggcttctctctcttttagaaaaaagaatcttactttgtcctgacaattttctcgtgtccttaggtttgatcgtgactggaaaaagatagaagattttg

SEQ ID NO: 1765 - DNA, 495 bp, Arabidopsis thaliana
  Intron number 1 from transcript AT5G02880.1 (locus AT5G028 80) derived from phytozome v7.0 (chr-ID Chr5; pos 662146 t o 662640)
tcgttaccgattgggtcaatctggtgaaactcaaggtgtgtgtgattatgagttattttttttgtttcccttgatttttaatgcgatcatgatcgtttttttttcttctgttttgtgttgttctaagttgatcgtaatttctatttcgaatctgttatcgattgttatataatttgtttcctctgttttattgttcgttctcgatagtgaagtctctgtgtgtgtgtttgttttgattttatttttgaaattgatcgtctttgtctgtgtctgtgtagattctggtgagtaataatggtgtttctaagaattgccaaaaaaaaaacctaatttttgtttttgtttatttccactgattttgtggttagtgattgactcttagttgtactttcttatattttttttttttttgtatgttgatgtataaagacttgaactttgatcatttgcttggttacaggttgagatcagataatttaattggaagattttagg

SEQ ID NO: 1766 - DNA, 563 bp, Arabidopsis thaliana
  Intron number 1 from transcript AT5G03280.1 (locus AT5G032 80) derived from phytozome v7.0 (chr-ID Chr5; pos 787586 t o 788148)
gcgatttcgaaggtgacttctttcaaaaaccctaatcctctgtttttttttttattttgctggggggctttgtacggactttcatgggtttttgtagcttttccctcggcttttgcgcaaatgagactttctgggttttttttccagctttttataatttcatcaggtggatcgaattcgtagtttcagcttagatctctctccctcttcattatctggactttccagacttggagttcttcgggattgttttcggtttctgggttttgttttaattgcgagatttaagcttttttcttttttactactgtacttggtttgtggttgaccttttttttccttgaagatctgaatgcgtagatcatacgggatctttgcatttttgttgcttttcgtcagcgttacgattcttttagcttcagtttagttgaaatttgtattttttttgagcttatcttctttttgttgctgcttcatactaagatcaattattgatttgtaatactactgtatctgaagattttcaccataaaaaaaaaattcaggtctgaagctgatttcga

SEQ ID NO: 1767 - DNA, 804 bp, Arabidopsis thaliana
  Intron number 3 from transcript AT5G03345.1 (locus AT5G033 45) derived from phytozome v7.0 (chr-ID Chr5; pos 814618 t o 815421)
aaaacaggtttgtgatcatgtttctctcgaactctctgttttgcatcagtgttaatcaatctgaattcatgttatctagtgagtgtttttactattgaatttttctctgttcgtactttgttgaacttggtgtagagttactacgggtcttatagaagcatcttctggctagatttggttcaattattcagtttaatcatgggtgtttctagtgaatatgttttcttttgactgagaaggtttacggatgtgttgttaatcaattgattcaaagaacttgtgctctagagatgtttcgagggtctagttttgatgtctctttaactctctgttgtgcatcagtgtttatcaatctgaaacatggaaatttggtagttattatatttcccgatgattgaatgaccaccaaagactcatgtttattgataagaaactgtcgtctagagatgttctaggtcaaacattgatgtttctttaatactttgtgcagctaaggttttctaaaatgcaggacattcaaagggacattttctagtttatatttggtccagttacgattatgggtttcaagagctttaaccagttctgctcctggctaattcaatcagtttatatttgtttcattggctctttagacccactttggttccttctatgtcgcagcctctcccctacctttttgtacattaggttcttgaattggttttgagtttggcttttgctagataaagtgaatatctcctgttaactggtttctttcaaaaaatttgcagggcggtgtttttaccagataattcggatttc

SEQ ID NO: 1768 - DNA, 453 bp, Arabidopsis thaliana
  Intron number 1 from transcript AT5G03570.2 (locus AT5G035 70) derived from phytozome v7.0 (chr-ID Chr5; pos 903797 t o 904249)
acgttttttttttttttttttttttggtcatcatattcatgaagtttagttttacgaaaaattgaaaatcgaactcaaattctagatttctttgcgtcaagaaatttagaagtaatcagagacttaatcaatttttgaactagacgttcaaaacatggagaatatttcacaaacgaaaataccttttttggacggatcagaaattgtcatatctcagatttgtaatttgtttcaagaagattaattatcttttaaggtttttcaaatttttagttttttcaaaaaatttaaacattaatttaagttactaataattaggggaaagaaaatattataattaggaaatataatattataattaggaaatatatgtcaaaaaaaaaaaaatctaaaaatcaatttttatttagataataagataataaataaattcttgtaatataaacgcaaaac

SEQ ID NO: 1769 - DNA, 749 bp, Arabidopsis thaliana
  Intron number 1 from transcript AT5G03570.1 (locus AT5G035 70) derived from phytozome v7.0 (chr-ID Chr5; pos 903756 t o 904504)
aaacccgtccctgtgccaggtgagttttgtagatattcatgacgttttttttttttttttttttttggtcatcatattcatgaagtttagttttacgaaaaattgaaaatcgaactcaaattctagatttctttgcgtcaagaaatttagaagtaatcagagacttaatcaatttttgaactagacgttcaaaacatggagaatatttcacaaacgaaaataccttttttggacggatcagaaattgtcatatctcagatttgtaatttgtttcaagaagattaattatcttttaaggtttttcaaatttttagttttttcaaaaaatttaaacattaatttaagttactaataattaggggaaagaaaatattataattaggaaatataatattataattaggaaatatatgtcaaaaaaaaaaaaatctaaaaatcaatttttatttagataataagataataaataaattcttgtaatataaacgcaaaacctcagaaaataaaattctgcaaaattttatcatgtaatgcatactctctaattttcttaatcctttttttgatacagtttatatgttttcttcattattcatctcatccatgtgatcatgtcttactagctgcttgcacccattgaattgcaaaatctagagaagccagggatatgcaatgaacactgaattagctttgatcgatgtttccgattttcagattcaattgatattcagaggaaagaatcaaagtag

SEQ ID NO: 1770 - DNA, 556 bp, Arabidopsis thaliana
  Intron number 1 from transcript AT5G03990.1 (locus AT5G039 90) derived from phytozome v7.0 (chr-ID Chr5; pos 1076032 to 1076587)
acgcaatcatcatcaaagccacctcttggtatgatctctgttctctcctctctgttttttttctttcttaaatttgtgattttgagttgttcaattatgtataacctttcgtcgcttgcaaatcgagttccttgatgtgtttctcattgggttttcctcttttgtgttcttaattagggtttgtgttcgttaagcaatgttcggtcttttaatctcttctatgtattttaggttagtgaaattagagaatttgtaatactaattgactctatctttgttaggtttgtgagttttttttaatcttaatttacttatgtttccttctatatactaattcctgcatgtacagtagaaatatatgaactttaatctcttctatgtattttaggttaatgaacttttgattcttaaccctctgattcttgacaagtttattgtttgtagcttttgcttgatctgtaagttattcttcatcctgtgatcagaatttctaactcttggattcttatgtttttttgcagctaattgcaagatctctgttccagcgtgggagaag

SEQ ID NO: 1771 - DNA, 482 bp, Arabidopsis thaliana
  Intron number 1 from transcript AT5G04490.1 (locus AT5G044 90) derived from phytozome v7.0 (chr-ID Chr5; pos 1280129 to 1280610)
tcgagagtctcaccaagcgaaacgtcattcaacaggtctcttaataatcgttttagttatccacacaatttctccgtttacaattccagttttattcgaacaccactatatgttgaaagaagtttctcaagttgtgtttgcagtagtactcattagaaacaatgataagcctaggaaattttgttgtgaattagttttttcattctgaatttttataagaattggtaacaccttagtaagcagtataccactttatcatgaccaatcggtaaagcggacaagaacaaagtggtccaaaaatatttaccgctttatatgttaccacttttcctaacctcccttttaactatccgtaatcgcctaccgctaaaaacatataccgttcctttgtgttaacaaagtaagaaaaggaagaaacaataactttgattgttttatggtgagcagagtttgagcagaaagcttgtgcatatactctcagg

SEQ ID NO: 1772 - DNA, 720 bp, Arabidopsis thaliana
  Intron number 1 from transcript AT5G04750.2 (locus AT5G047 50) derived from phytozome v7.0 (chr-ID Chr5; pos 1372337 to 1373056)
gtgctcagcgaagaggaacgcgcgaaagagagcatgtatatccaggttcttcttcatcgtcgactttttctaactcttgatttatgtatcgatgctataatagtttgtttagccgctgttgcttatttggattcaatgtttggttgtcgaaattttgcttcaagttagcgaatactggtaaaaatctgatctcaggaaatcaatcaaattatatgaaatatcgtttgggaaattgcgttagcattgatttttaagcttatgagatacactgataaagatccgaggcttattcttatcataagacttgaatccaattgttgtctatcaaattgtaaagtcgtcttttgataataaatggtcaaatagtgtgtggatgagtttttcaaggcgtattagttcatacagatggaaaataattgaagtaaatgttgtctgtgtgaatctgtgatccaacttacgcctctacgaaaagtatttgttgtagaaaggggaagaactgtgtgttgttgacattgttgttaagcaatctctatagctttttgtgttcctttttgatttgaggttgacctcatagttacagtttaaacacaattttatagcttcgttgcatctcacttgcattactcaggctcagaatatttggctatgactattgaaattaatgaaggaagctatttctcttcacgcacttataagaaaccgatctttttgttgtagaaa

SEQ ID NO: 1773 - DNA, 684 bp, Arabidopsis thaliana
  Intron number 1 from transcript AT5G04750.1 (locus AT5G047 50) derived from phytozome v7.0 (chr-ID Chr5; pos 1372373 to 1373056)
tatatccaggttcttcttcatcgtcgactttttctaactcttgatttatgtatcgatgctataatagtttgtttagccgctgttgcttatttggattcaatgtttggttgtcgaaattttgcttcaagttagcgaatactggtaaaaatctgatctcaggaaatcaatcaaattatatgaaatatcgtttgggaaattgcgttagcattgatttttaagcttatgagatacactgataaagatccgaggcttattcttatcataagacttgaatccaattgttgtctatcaaattgtaaagtcgtcttttgataataaatggtcaaatagtgtgtggatgagtttttcaaggcgtattagttcatacagatggaaaataattgaagtaaatgttgtctgtgtgaatctgtgatccaacttacgcctctacgaaaagtatttgttgtagaaaggggaagaactgtgtgttgttgacattgttgttaagcaatctctatagctttttgtgttcctttttgatttgaggttgacctcatagttacagtttaaacacaattttatagcttcgttgcatctcacttgcattactcaggctcagaatatttggctatgactattgaaattaatgaaggaagctatttctcttcacgcacttataagaaaccgatctttttgttgtagaaa

SEQ ID NO: 1774 - DNA, 474 bp, Arabidopsis thaliana
  Intron number 1 from transcript AT5G05010.1 (locus AT5G050 10) derived from phytozome v7.0 (chr-ID Chr5; pos 1476644 to 1477117)
aactggtgatttcatctccttcgatcactcccaaggtatcgtcttgttctctcgctcttcgccttcactgatggtgatgattttcgttttcctttgaatgaatgttctctctggctacatttctgtggatctccattattaagaattttctcctccttctaaatttcgcgatcctgtttcatgaatttgatccgcttgtgttgattttgattctacagttatgtttttcgattatgagcctctgatgctcgtagatccgctggatctgcgatgaattctttttatattttcgattcgctagtctagtttcgtttggattcgtgtattcgagatctcttcctctattacgtgatttatgatcctgaagatcaaatcccgtttgtttcttctgatctcgctctaactggatttactctaacattggttctttgtatttcagattcgcattacctttcttataatcgccgagattgt

SEQ ID NO: 1775 - DNA, 433 bp, Arabidopsis thaliana
  Intron number 1 from transcript AT5G05010.2 (locus AT5G050 10) derived from phytozome v7.0 (chr-ID Chr5; pos 1476685 to 1477117)
tcgtcttgttctctcgctcttcgccttcactggtgatgattttcgttttcctttgaatgaatgttctctctggctacatttctgtggatctccattattaagaattttctcctccttctaaatttcgcgatcctgtttcatgaatttgatccgcttgtgttgattttgattctacagttatgtttttcgattatgagcctctgatgctcgtagatccgctggatctgcgatgaattctttttatattttcgattcgctagtctagtttcgtttggattcgtgtattcgagatctcttcctctattacgtgatttatgatcctgaagatcaaatcccgtttgtttcttctgatctcgctctaactggatttactctaacattggttctttgtatttcagattcgcattacctttcttataatcgccgagattgt

SEQ ID NO: 1776 - DNA, 552 bp, Arabidopsis thaliana
  Intron number 3 from transcript AT5G05340.1 (locus AT5G053 40) derived from phytozome v7.0 (chr-ID Chr5; pos 1579499 to 1580050 reverse strand)
gttgctctctctggttcgtttcatttctcctctatcttaacccaattcctatttattatatacgcaactatatatgttttatagattatggttgattgcaaatttcaaaacatcgattactattacattgctaaaacattgggacgacagagaaattttcttaatctgtgattaattatctttaatttaagaatatttcttattcgttcaccatatttgtttaactaaaagaaacatagaaagaaatatttcaaaaggaccaagagtcaacagagtcgacacaaaataatataatttgattatgttgtttgttttttgtcgactttacttttgtttccttgtgaatttgttttttcaacacatttttgtaacgcaccaccgacttttctgttttttcttcccaaaattacgtaatcatatttttcccaaagttacgtaatcatataaatgactgttaacaaataaacaagtcaactattaaactaatcattcaaattatttttggttttgtttacaggcgcacacacgatcggacaatcccgttgcacgaac

SEQ ID NO: 1777 - DNA, 711 bp, Arabidopsis thaliana
  Intron number 1 from transcript AT5G05370.1 (locus AT5G053 70) derived from phytozome v7.0 (chr-ID Chr5; pos 1591024 to 1591734 reverse strand)
attctcctcgtcgctcctgtcgtcggaacctactcgtacgtttttctctttctctcggtctaggcaattaacaaacagatttgatgtatcaatcatgtggacttcgatctgatgattatgatgttcaacaatctgattgttatgcgaagtttgtagattcaattaggctatagttttattggatatgacagcaaaaattgttttagggcaattgttctgtgacaaattcgcatagattggtgtcgatttcgatgctcatgtttctgctggaccaatactataggaactaatatgcagaatgatagaagtagctagcttgacaacattataagatagggatagtgaattcatgatgatgatgatgataaaaagatagccattaactatcaaaacgtttctgttacttctgagttctgattgttgaaaaaattgttgagctagtagtgttttagcttgatgatgctcttttacttgaaacagatgagtttatgtgattcattgaatttagatatttgcgcaaggggttaaattatattcacctgccctatctttgattatcattactctcatagcaattattcaggatactttagatgactagatgaagaattgtttttgtacgttgacattcattttgtcactatcgagtctcaattgttataattgtttccaatactctctgaaccttttctctttcaaatgaacgcaggt

SEQ ID NO: 1778 - DNA, 492 bp, Arabidopsis thaliana
  Intron number 1 from transcript AT5G06240.1 (locus AT5G062 40) derived from phytozome v7.0 (chr-ID Chr5; pos 1888483 to 1888974)
aacgccgcaaattgacttggcacgagcgattcctcgtgagctttccttcactctctcttcctcttttttatttgaattttccggtagttttctattgagaggatctggggaatcaaaattttctttcaaggacaaacaaagttcgcattttttcgtgctctgattttcttgtgctctatttagtttttttgtccaatttagagtgaatgtgttctcgattaggtctttaatcagcagatgtttgagatgatacagaatctggaagtgtgtgatttcatttatgtatattgtggaatatctgaaacacaaatgtgacaattctctagtttgagcaaaaaggttcgtcctttctagaagaagtctgtaattccacgtctcactattttcagagtaattggtgttttcttctctacttgatagtaaatttagtgctaatcactgggtgaaatattcatggttgtgattaggtgttgaaggaagcttcaaggcttt

SEQ ID NO: 1779 - DNA, 536 bp, Arabidopsis thaliana
  Intron number 2 from transcript AT5G06265.1 (locus AT5G062 65) derived from phytozome v7.0 (chr-ID Chr5; pos 1906732 to 1907267)
atatccctcaaggcaaagaatctgtacaagtaaaggtttgttttttattgattttggtggaattaaaattgttgtgtatatgaacctaaggaaggagttgggttcttaaactgacacttacttgtccaatgctttttctgtgacgcattccgtttttagtgacttgcttagtttctttagatgttaaaacaaagtccctcacttagcactctaaatctgattgcttcttcatgtttcttgtcaaaacctttgtgaaatgattgttgctgaaaacgtgttcagttttgtgtattgttgagtatagtcttaggaaagcaaaagaagctagtttctaatttcatcccatcactttgattcttccaagtgatgcattcgcagaaacaaaaagcatacctaatctgaaatcttgccctattagttaactttactaagcaatttgattgcctaaggatacgcttcattgtatgatctaatgatgatatgaatgtctatttgtggcagaaaattctatttcaagaaaagaaaattcagaagtt

SEQ ID NO: 1780 - DNA, 387 bp, Arabidopsis thaliana
  Intron number 2 from transcript AT5G06265.3 (locus AT5G062 65) derived from phytozome v7.0 (chr-ID Chr5; pos 1906209 to 1906595)
taatcgtctttgttcttatcgaatctatagttctggtctgaatttttttggtgatttttatttgtcctgctctgttttatgactttgttgctaagctcgtttgtcatgtttaatttggagcactgaattgttcttctggatttgttattaatttggaaccatggaagcagaaatcttcaggaatcttcttggcttgactcataaataaaaaataaggttttggaatgtgaaagtttaatcctttcctacacttcttgtaaatagaatgttcaaagattactttgtgatttggatccttttctacacttgttagtttgtgattttgagttgtggtatttggtgttttgttatgtagcagatcaaataaaagaccactttacctgcaaa

SEQ ID NO: 1781 - DNA, 462 bp, Arabidopsis thaliana
  Intron number 1 from transcript AT5G07790.1 (locus AT5G077 90) derived from phytozome v7.0 (chr-ID Chr5; pos 2483604 to 2484065)
cttcggattgaaaaaaactgttccttttcctaaaggtagatcctttcactcgttttgatttctgggtttcttcatcggcagattttttgttctgtttctttctttaaatactcatttaaaatctatactttctttcattactatgttcttctaggaatctagctcaaagtttcatcttttgcttccttcttggtctttaatgcttacaatgtcttgttttcttcttctttttttggcaatcaacaatgtcttgttttaaagcttggtttttcttttaaaccacttatgatttttctgcctacaaaatgttgttaatagtctttgagatcttatcttaaatctcatctttttacatttgcatattttgtttgtatagagaagcagatttgatgatgcattgtggggtttacttttttattttattttaatgatattctttcttggtgcagagtgtgaaagtga

SEQ ID NO: 1782 - DNA, 752 bp, Arabidopsis thaliana
  Intron number 1 from transcript AT5G07790.2 (locus AT5G077 90) derived from phytozome v7.0 (chr-ID Chr5; pos 2483314 to 2484065)
ttgtttcgcttcttctgtaagatttctgtaagttagttccctcagaaaattctccattctccattttcctgcaatccaatatctttatctccaaagataatggcccagcagatctcagatatatagaagatccctcttcttttggtccactttcccttgtttacattttcccgagaaaacaaaaagaaagcttttttgcttttttttctttcttctctgctttcccagctttcaagcttctgaagtaaaagaacgaagctttgtgttaaaatctcagaattttgattattcttcggattgaaaaaaactgttccttttcctaaaggtagatcctttcactcgttttgatttctgggtttcttcatcggcagattttttgttctgtttctttctttaaatactcatttaaaatctatactttctttcattactatgttcttctaggaatctagctcaaagtttcatcttttgcttccttcttggtctttaatgcttacaatgtcttgttttcttcttctttttttggcaatcaacaatgtcttgttttaaagcttggtttttcttttaaaccacttatgatttttctgcctacaaaatgttgttaatagtctttgagatcttatcttaaatctcatctttttacatttgcatattttgtttgtatagagaagcagatttgatgatgcattgtggggtttacttttttattttattttaatgatattctttcttggtgcagagtgtgaaagtga

SEQ ID NO: 1783 - DNA, 567 bp, Arabidopsis thaliana
  Intron number 1 from transcript AT5G07920.1 (locus AT5G079 20) derived from phytozome v7.0 (chr-ID Chr5; pos 2528588 to 2529154 reverse strand)
atcatctcttctacttctccctctcgcttcttcaggttagtttttttatttatttgttggtgtaatttacattggatcttcgtggacagagagaaagctgcagtttttgcccctttttttttaataggagatttttggaactttgtgatctgagtttatttttcactagagctcgagttttttttttttttttgtttattaaagtcgaagcttaaaggttttgttttgcctcttatagtattgttggaaatgagcagagtaagttttcatcaatatgtatcaaacttaggaacttgagagcaaggtttcattttgattttaagaatgtgttgtccaagcatgattacgattgtttgattgaagtctgaatccgaggaagaaaatgaccaaacaattaattttcttgtagtaaatttgtttttgtttacattgttcagggcctttgtaatttgggctgcagtgtttcttatgaaaacgattgtttctatcgtgttatgcggttggatgacatgtttttttttcttactgtcagggaagaagagtttgtttttctttagttgaattgtg

SEQ ID NO: 1784 - DNA, 278 bp, Arabidopsis thaliana
  Intron number 1 from transcript AT5G08020.1 (locus AT5G080 20) derived from phytozome v7.0 (chr-ID Chr5; pos 2572200 to 2572477)
gtcgtggatcttaagcctgctggaaatcgatatacgtaagtttcgatcttgattttgtgtgcatcgatctgggttcttctgatatgtttagaaccaaacttgttatagaatagggtttgagatctgggtattgttagaattttgccaagtctcagtttttttttttttttttttttttgggatctagtttcaggtctgtgttagctttaatcaaattcaatattaactggtcgatgaagtatcttgacatgtgatttgggttctcaggtttagtgcca

SEQ ID NO: 1785 - DNA, 582 bp, Arabidopsis thaliana
  Intron number 1 from transcript AT5G08040.1 (locus AT5G080 40) derived from phytozome v7.0 (chr-ID Chr5; pos 2577415 to 2577996 reverse strand)
ggcggtgaacgtaaccttcatacattctctctttcgtttaattccgacttgattgtctattgaatatcgaagtctcgattctcttgtatgtttcatgattagattctgggctttcggctgaatttaatgagttgtacagcgattttgaattacggtttaggatttacaaattgattcaattgagcgtacaatgtgattcttttgtctttcttatgaaattgtgtgttcgaatgggaattgaatttaatgagttcgttttgggtttcagaatttaacgtaggattgattttctctcctatgcttcgataggccaaatcagatgaccttatcttatctctgtgtcttcttcttatgaaattgtgtgttcgaatgggaatgttgggtctcttagaggtttagggtttatcaatcacaagttaagttcatgcctttgaagtatttggatgttcgaatgggaatttggggatgttgggtctcttagagatttagggtttattatagttcatgcctttgaagtatttggatcgaaatctgtctcatacgaattccttttggttgcagaaacttctgcgagcacttggt

SEQ ID NO: 1786 - DNA, 250 bp, Arabidopsis thaliana
  Intron number 1 from transcript AT5G08130.3 (locus AT5G081 30) derived from phytozome v7.0 (chr-ID Chr5; pos 2609320 to 2609569 reverse strand)
ggagcttcctcaacctcgtcccttcaaaacccaaggtaaacaccattatcagatattattgttaccaattcctttattttattttaaaacagagtgtttagtttctacaagattcataattttaaatttatgtatttttttgaattttgatatatatattaagaagaatttcgcacagggagaaaaccaacacatgattttttatcgctctgcagtcattcaaccgtccacccagatccaaagccaacac

SEQ ID NO: 1787 - DNA, 468 bp, Arabidopsis thaliana
  Intron number 1 from transcript AT5G08290.1 (locus AT5G082 90) derived from phytozome v7.0 (chr-ID Chr5; pos 2666160 to 2666627)
caggtctgtcaaacgtttcttcctctcttatctttatatttcgatcttgagcttgattatatgtttttgattcgatttgtagttcatagctctcgatttggatcctttcgtactggaaaattgcgatactttgtggtgattgtttgaaaattgtgttccttagctcagaactgatgaaattagggtttcactcaaaaaaatcctagttgttggagttggttactatgtagaaggttttgaatgtgtccgttttagtgtccatttctgtgatttatgcttcgttttgttcttgcgaatttggtgatcttggaatattccggatatgttgtgttgattgtttgaaactttagccattcgtgtgatctttattatcttggaactgattaaaattttagggcttcacttacaattgattctagtattcagtttctggtttctgttttgattcgaagtttttgatttttgtag

SEQ ID NO: 1788 - DNA, 633 bp, Arabidopsis thaliana
  Intron number 2 from transcript AT5G08320.1 (locus AT5G083 20) derived from phytozome v7.0 (chr-ID Chr5; pos 2677726 to 2678358)
gcttgtttcaccactgtctgcttagagtgtcagaggtattttcctctctcaacatcagaacttggtgttttatcttcatacgattgttatatcccatccaggctttgctttctcaatgttgctagggctccattgttcaatcctcaccaatgtgtttgctaatatattgatagtaacttgctagattctggaatgttgacttgattatgagattcttgacaattgttacaggctctaggtttttgttaggaatgacaatcttggtagaatccaaaccagttatatgacttgattaacgagaaaaatttctactctcagtccaattcccaatcccaaaacccataggtaaatccagaactaccttttctagctgctagctctgtagctaactaactcaaagattgctgatacaactactatccactacacaccgcctaggctattacaacactcatgcgatagactaatataaggactttatcacaatggatttctttctttcctcttcaatccgatgatattgttttgtttatgacttgatccctttgcacttctttgaacttggttttagtattataaactgcggaaccaaattaagacaatctgagtaaaacttttgcaggcacgagcagt

SEQ ID NO: 1789 - DNA, 731 bp, Arabidopsis thaliana
  Intron number 1 from transcript AT5G08750.1 (locus AT5G087 50) derived from phytozome v7.0 (chr-ID Chr5; pos 2852158 to 2852888)
gtgtatcaatcgatctctacccagattctccggaggtacttattattgattcgttttagctcaaagttcgtttaatttctgtcaaaaatttggcatgcgtttgatcttgcttcttacaatgacagatctttttcttccttcttttgctttgttctgtaaagttagatcaatcatgttttagttttctgttttgagtttatcatgttttaaggcagtgtaactcatgaatgagagcaacccttttgtgaaagtgacgattttgttgtcttatgagttttaaaagtctttaatttattcatcagtgggagtttggtggaatccttgtttgaagctttttaattgagttaatggtgtcttcttctacattattgatatcttttccgttacaatctactaataaaaatgtaatttttttgattcgcagacatcttttctttgtgatgtcttgaaagcttttttagtggttattctcatgatctgataggttggtttgatcttattaatttatatattgttgttacgtcttattcgcttcttgttagacatttcttcttacttgtgtgatgcagaaagactctttgatgcttctttaagcttgactctttttcttgtctatcttttgcttcccctgttttcttgtgttttctcttcaataacggttttgagattatgctgaacctggtggtttcgtatgttttttaaatgcaggagctttgagtcttgtcgtatag

SEQ ID NO: 1790 - DNA, 731 bp, Arabidopsis thaliana; identical to SEQ ID NO: 1789
  Intron number 1 from transcript AT5G08750.2 (locus AT5G087 50) derived from phytozome v7.0 (chr-ID Chr5; pos 2852158 to 2852888)

SEQ ID NO: 1791 - DNA, 581 bp, Arabidopsis thaliana
  Intron number 1 from transcript AT5G09810.1 (locus AT5G098 10) derived from phytozome v7.0 (chr-ID Chr5; pos 3052228 to 3052808)
ctcgaatcttctgtatcatcttcttcttcttcaaggtgagtctctagatccgttcgcttgattttgctgctcgttagtcgttattgttgattctctatgccgatttcgctagatctgtttagcatgcgttgtggttttatgagaaaatctttgttttgggggttgcttgttatgtgattcgatccgtgcttgttggatcgatctgagctaattcttaaggtttatgtgttagatctatggagtttgaggattcttctcgcttctgtcgatctctcgctgttatttttgtttttttcagtgaagtgaagttgtttagttcgaaatgacttcgtgtatgctcgattgatctggttttaatcttcgatctgttaggtgttgatgtttacaagtgaattctagtgttttctctttgagatctgtgaagtttgaacctagttttctcaataatcaacatatgaagcgatgtttgagtttcaataaacgctgctaatcttcgaaactaagttgtgatctgattcgtgtttacttcatgagcttatccaattcatttcggtttcattttactttttttttagtgaaaa

SEQ ID NO: 1792 - DNA, 399 bp, Arabidopsis thaliana
  Intron number 1 from transcript AT5G10020.2 (locus AT5G100 20) derived from phytozome v7.0 (chr-ID Chr5; pos 3134269 to 3134667)
cgagattgttgacttagagaataaccagatcagtgagttaccgcattttggatcacagccgagtttgagaatattgaagcttgctcgtaacgagttgttcggtttagtacctcaagagttgttgcagagttcgattcctttgctagagctagatctaagtcgaaacggttttacaggttaattcaaatcttacaacttttctcttcttgctacttttagggtatacaggaatagaattattgaactttatgtcattgagcattgatttgactggtttcatggtcttgactagacacttgtgtcacattgtctgaagctgttgtataaatgtatattaaaggagtttcttttggttcaaatgcaggatcaattagtgaaatcaattcatcaacgttaact

SEQ ID NO: 1793 - DNA, 525 bp, Arabidopsis thaliana
  Intron number 1 from transcript AT5G10510.2 (locus AT5G105 10) derived from phytozome v7.0 (chr-ID Chr5; pos 3316101 to 3316625)
ttcctcctctccttatctcctcgataatttctgtacccttttctttcttcttctctctccaaccaaattttctcttctttttttctttgtacgacacatacgaatgattgtggtctcaacagtacatgctcgtgtaactaaagcctctctgattgagtactaaccgacttcgtagcttatcctctataaccgagttatgcttaactcagcctccctcgtgttttctctctgactttgtctctttcccaagagaggcaaacccaaaaaaaaaaacaaaatctaatttttatatcttctcgtgatctctcttctttgatttttcgatattttcgttgttgttaatcttctgggtatctaaatccatgtactttctccgtcatgaaactcaaagtattaatctttttctcgttttccttcattttcccggaaaataacttgttcttggtgatgaagaactaatgatgatgttttttgtttttgtttttcaaaggttggtcaaaccaaaaacctcaggagtttttcaaa

SEQ ID NO: 1794 - DNA, 380 bp, Arabidopsis thaliana
  Intron number 1 from transcript AT5G11520.1 (locus AT5G115 20) derived from phytozome v7.0 (chr-ID Chr5; pos 3687191 to 3687570 reverse strand)
atcttgttcaagctccagaggatcctattcttggggtaccttcttcttcttcgattatgttttgtgtgtctatatcattctcaaacatattggacgatacttttggatatgtgtatcatacgcattggatccgttattgattggtgggaattcacgatctctcgataaaatgacatgatgttttatgaaatgggataagatttgatgtttatgcttctgaatttggttcgtttgattagtaattcatttttttttcaccaaattttcagctctgagatgaattatgatgattagtgtggttatgtcagtgattctgatatttgtttttcacaaaaaaatgaataggtgacagttgcatacaacaaagatcctagcccagt

SEQ ID NO: 1795 - DNA, 950 bp, Arabidopsis thaliana
  Intron number 1 from transcript AT5G11530.1 (locus AT5G115 30) derived from phytozome v7.0 (chr-ID Chr5; pos 3696131 to 3697080)
cttttaatccctaatttctggtcggattaacccaggtgcgttgtttccgacatgaatctcagatgtgtttcgatttaaggtttgagctaaggtttgatcttgttgggttgagatttggtctgacttgtagctgacttcgtgtcttttaagcttcactgttcatttatacgtctatcttcctcggaaactcttgatgttcttactttttttttttttttttttttttggggtttcgtcttcacggactattcacgtgcggatagatctgacccgtattaattggtgggtcttggttaatctttgttaatcacatacggttaatttaagtggtttattatcttttaattttgttctaattttgattttaaaccctaaattacgctgattaataatttgacctttcttgggttttgtaattccgaaattatattgaatctggtccgatcttcttttttcttttgctggtcatgtagataaggttacagctttggggtttctcgtctgtctgaaaaaccctaattttaggtcgtctaagtttaggtttacttacatgttaattgttaaatgtataaaattcacttgcacgattaattttttgttatattagcgtaattgaattgagatgctagtatagaatttcattcttgattttatgtagaccttagggtttaatttttttttatttgccgtgtaattgtgaagtttgatgttggttatgaatgttattttatgtgggatattcatgtgaaatgctttaacactatgttatagattagttatatttattgcttgaataaatttagagttatatttggtgtcgtatatatggaaagttaagatttatgtcttgatatacaacaataatgtgatcattaagcacaattatacgatgtgttatataacttgttttgatgtgttgcttttgtagctctagttgcggagagagtata

SEQ ID NO: 1796 - DNA, 853 bp, Arabidopsis thaliana
  Intron number 1 from transcript AT5G11790.1 (locus AT5G117 90) derived from phytozome v7.0 (chr-ID Chr5; pos 3799718 to 3800570)
gaggcattgtctcttggaggacaggtatgtttttttctggtcttttatagtgagtttaaggagattctgttttggtttactaagaaattacgggaagaagaagaagataggataaattgtatttgttgatttttgtttttggttactgcattcttcgagctgctttgttcctgttaatcattgttttgattacgagaagtagtttttaggaatcgtttgttactaaaacaatgctgggaaatgttcatgttgctagagctgacattagaatatcatgttttggtgtcggttatatatatccaaaattacgacttgtgttgtcgataacccaattcgttttgttttttttgggattttgtatgttctgagttttttctgttgggttctaatgtcttccctcaattcatggtttagttgacaccttaatttggaacatgtgtatttgatccaattcttgttctattggatcacaactcacaagtgaatatataactcttggattttccaaattcgtttttgcattgttctaaggttctcaagagttttttttcttctttctataatgaggttttgggttccactgttaatggttaaattccctttttgtttgaccatgacttatttgctggttaatgcgtatatgattttatggcaaagtttggtactttttaagttgctcactaatcaatttatttttctcatattggaattaatgtttctaggtgtggtcctaatctatatgcattgttcttaccttttcatttatttcatagagaatttagttactgacttaaattcttctactattgttgttgttgttgttgttggtaggaacaccttgtggagactactt

SEQ ID NO: 1797 - DNA, 427 bp, Arabidopsis thaliana
  Intron number 2 from transcript AT5G12080.3 (locus AT5G120 80) derived from phytozome v7.0 (chr-ID Chr5; pos 3900941 to 3901367 reverse strand)
aagaagaagatttttctttggatttttcactactggtaagctcggttcctccctcttttgactgtaatttttaaattcggttttttttttggtgtttttctgaagaagttctgattattttatttgtgaagtttggatctttcttacagatttagtaggattaaagaatgttgttgtctgtagttaatcttcctctgtaaatctatatgctttgttacaaatctatgcttcaggaatctagggtttatattccactttgtttactttaataaaatatagtttcttaaaccctttttgtctgatgaatcaaaatctaattactttatttgaatcaagctaaaataaattggtactttaacatccccacagtgttcttctataatcttgattttttggaaattttccagaggcattgttgtgaaattgg

SEQ ID NO: 1798 - DNA, 330 bp, Arabidopsis thaliana
  Intron number 1 from transcript AT5G12080.3 (locus AT5G120 80) derived from phytozome v7.0 (chr-ID Chr5; pos 3901386 to 3901715 reverse strand)
tttttttgttcatgtaagatctttttctctctttcctctttccatgtttatgttttctattatttagttggcttttggtattttgttggtttctgggtttaagccatttttttcccaccgcctctgcagctctgcttttttagctgctattttttttttttgcttttggtatgtataatcggatttcttctttatcatttatcaaatgtttgaattcttccatctctcataattcttaagtggtcgtggtgtgtactatctcctaagctctctgttttttttttgtttgttcattggctatatttcaggtcttcttcttcttcttcaaga

SEQ ID NO: 1799 - DNA, 513 bp, Arabidopsis thaliana
  Intron number 1 from transcript AT5G12120.1 (locus AT5G121 20) derived from phytozome v7.0 (chr-ID Chr5; pos 3918089 to 3918601 reverse strand)
cgcttctccgtcaacgactccgatcaacctaccaggttcatctttctctctcccgtcccgtcagtgatctattacttcgatttggtttcttcttccaaatctcgcatttcctttttcgccttttaggtttccttgattcgttcgaatttcgtccctctatagctcaaatatggtttcttcttcttgttatggatttgatttcaactgctaatgctttctttgtcgccgcgaatttgcgttttcaccttattcgattcagaattgatctccggagattgttgtatcgtctttgattttctgattcgttcttgcaatggatccattacgtttgtgatatcaacgatgtagtagtaataatagtcgtctctgtggaaatctatgttgaagaatctccatctttgacattggagctcaaatcaccattgatattagatatagatgttaagagaagattattgtgtttacttatctcatttttttgtgaaaactgtaggataactttgtgttgagaag

SEQ ID NO: 1800 - DNA, 685 bp, Arabidopsis thaliana
  Intron number 1 from transcript AT5G12850.1 (locus AT5G128 50) derived from phytozome v7.0 (chr-ID Chr5; pos 4056383 to 4057067)
cttacccgatcgcttgattcggactgtgatctttggtaagctttacgtattagatttgctgaagaacttcagtttcaaatgattcttttgatttagtttatcaatctgaaatatatttctgggtgattgagattttaagtcaaaatagttttgagatttcgattgtggttgactgttcattgacttcttcttttttatttatcaatttgtttctaattaatatggtttttaaggttagttggttatattgaatcgtctcttcttaaagttgtttatctgatttggttggtaggaatttttttctgagtagaagaatgtttagctgaacgatactgaatctgatgcttcttagatttagttttcttctgtgttaattcatttcagaaaagtttattagatccgtttaattctttgagtcttcttttggtaaatcttctgactttcgttgtcaaattctaattactttgtttccttattttctggtcaagtttttattattataatcatttatcaattcaatagctttccttaattgctgattttgattgaccaatattttttatgatatacctcttctctacattgcaagaagcatacgttattggttgatttcattacccaagtaacgttttttatcttttggttgattgtttcagatcttttttcttctccagtgccgtgaagg

SEQ ID NO: 1801 - DNA, 540 bp, Arabidopsis thaliana
  Intron number 4 from transcript AT5G13220.1 (locus AT5G132 20) derived from phytozome v7.0 (chr-ID Chr5; pos 4219958 to 4220497)
tcactgcaacgttttctcgagaagcgcaaggagaggtaatgattcttcaacaatccaaggatttttacccccaaataattaaagaaaggtttttatttttctctctctcgaccttttttttactataagttatttaagatagtaattatgggtcctgcctcttttactctcacatacaacttaagattcaactagttttgttcaacaacgcacatgcttatacgtagatagataatggagatcagtagtaatatcggtatacgtaggttactattgtaatggaacttttaaaaagcgcgttgactttgagtctttgactctagttctgtttgctacaccgacaagttatatttttcaaaatgatgagaaaacgaggagaaacaccggaaaaaaatttgaacttttacttttatcagaccatacggccaaagaaagatctgtatattatataagttatcacaaaacgcggtttcacattttctttttcgtcttgttgtgtttgcagattagtatcaacatctccttactatccgacatcgg

SEQ ID NO: 1802 - DNA, 832 bp, Arabidopsis thaliana
  Intron number 1 from transcript AT5G13440.1 (locus AT5G134 40) derived from phytozome v7.0 (chr-ID Chr5; pos 4309045 to 4309876 reverse strand)
atctttcaattcttaccaccggagcgttataagaggtctgccgatctacaactctttctgtctctcgattgattttcatttctggtgttatccattgaatgattcataaatttttaaaagtcacctcttttgggcttgtataagtccggaaatgattgagattcctagtttcgtatctgcgagatgatctatgggaattaagtcatctgttttgaattcttatgatgtgtattagagcttgatgtaccatttcgtctcattcttctccttgctggaatagtgattgatcggatatgaattgaccagctttgagataatccttttttgatgagataatcgattttgacatgtagtttattcattattatggaaatggatgttttatcgtctttgggcacatcatataagatacttgcatcagtaaacgaatctggaattccatatctttaaccaaaagggctatgtttgcaatcttatcttaggagttttcttatgttttaagcatttatgatcattgaagttccttccttggatcttgcgttagatagattagtttagttttcactgaatttgatatcatggtagaaaattgtttggatgacaccttctgttatctcttggaatccgtttttataatcttatgttattctatgcattaatgttaaatgtttgctagtgttattcctttcttctgtgttatctcttgaaaatatttttgcttaatacttggtgttgttgaacacttgaccaagtataaagtttgcccttgatgtgaaatattaatgtttcatgctattttcaggttttgcttctcaagtcattactcagggaa

SEQ ID NO: 1803 - DNA, 501 bp, Arabidopsis thaliana
  Intron number 1 from transcript AT5G13490.1 (locus AT5G134 90) derived from phytozome v7.0 (chr-ID Chr5; pos 4335533 to 4336033)
ctccctcaatttcgcattgccatcgattttcttaggtaattctggttactctgagatctctatcgctttaaatctcgttgtttatctctgttcttcatttgattctattgatctgcttcacagtcttatatatcatcaacaaggtaaaatgattcgtttcgtcttgatgatctcatggtttctctgcgtaatcctagattgaatgtagtgtagatctcgtgtggagtgtgaatgtatcgagatcctggattattcggctctgttactcttattttccgccattaagttacactgttgtatggatctgtttaacctaaattttctgcgtctgaatgtgttcatggtttagtttctgattgcatcgtttctacatgtagcctctcttatgcttaatggtggataagtgttctattccactggagatgcacaattgcttttactgcactttatagcatattccatttcttacactacgggttgtttaattttgtagaggttaaa

SEQ ID NO: 1804 - DNA, 797 bp, Arabidopsis thaliana
  Intron number 1 from transcript AT5G13890.1 (locus AT5G138 90) derived from phytozome v7.0 (chr-ID Chr5; pos 4479145 to 4479941 reverse strand)
gaaaccttatcaaatcctatcgctttgccttttttgtaagctctcagtcactcttttggaacttgttgctgctttgacaagtctttatcccattttgtttgttcaatatataatgttcaatcctcgtatagatgaaagatggtgatgacttgcttaatagaagaatgatggtatagtccttgttgattgagaatagcatggttaattgtcactttagctgatgtttatgttccatttggtttctggaaatgttgtttccatcatgttacatttataagtttgtcttggttatcacaaactcagcctgccctgtggtggtgaaagacaaagatgatgatatggatgaagataaaactttcagattgcacaagagaatatgaaaaagtattaacacaagccttatagcttggcaatctcatgtcaaataaggaaaagaagaggaacccaaggtatgtttctcatctaccttctttgacatgggactgcctaagctaaaggcttgccatgttatcacatccttctttcatttcgtcgcaaccactttatccttatcatcttctttgtctttcaccgcagtctgagttagctttaacgaaaaaacaaagatatgttgaaatgaattcaaacattggttgcaatttaagatgttacagactttggtactcttgttaattacttgaaaagatacatgttataatgctaacaataggtttgatttgtttgttgaggtagatgttgattgattattaactcaaaactaaactaacagtgagatttgcatttggaagcctaacgac

SEQ ID NO: 1805 - DNA, 797 bp, Arabidopsis thaliana; identical to SEQ ID NO: 1804
  Intron number 1 from transcript AT5G13890.3 (locus AT5G138 90) derived from phytozome v7.0 (chr-ID Chr5; pos 4479145 to 4479941 reverse strand)

SEQ ID NO: 1806 - DNA, 332 bp, Arabidopsis thaliana
  Intron number 1 from transcript AT5G14120.1 (locus AT5G141 20) derived from phytozome v7.0 (chr-ID Chr5; pos 4556643 to 4556974)
ggctgtgagtatttgaattctctgtctctttgatttatatgtggtcctttaaattcatatgtttttgggtactgagaaaaatttggagactttctattcaaatctgcttttagataatctctgagaaagtttgcttttaaggttgtttgtttactaataatcacgtcgctatcaaaactgttactggattccacttttttcttcttaatctcttgttctgctttagttgaaatcgttctgtttctggcatttcttatgataatgtagtggattagcttgtttaattttttgtatgctgatacaagttgtttttgtatgctttttgttttcag

SEQ ID NO: 1807 - DNA, 651 bp, Arabidopsis thaliana
  Intron number 1 from transcript AT5G14390.1 (locus AT5G143 90) derived from phytozome v7.0 (chr-ID Chr5; pos 4638625 to 4639275 reverse strand)
gggtatgttaaagttttagtccttttctctctaagatagctctgatgatgatgattagctcttctgctctgaaattgtgttctgttttgtatctggatttgatcaaagtcatagactttttttaatggctatttagaaattttttatctggtcccttgtgggttttggtattaatggtgttttgctaagtgaaaacgaatgaatttggagtttttctttctttttctggagatttgtttattcttcttggtttcttttgatacactgtttgattgttcttttgtgttattatgatttttctctgtatcgagtttttgctgatcaagcttttggttgaaacatttatatacatttacttgtttttgagtctattgttcattgtcttttcccaaattttgatttgttgtcttcttgtgtgtttctctctggatagtggatacaacttggttgcgttaagatgcttaaactctttctatgtctcagattgtgtggaaactttaattagctcacaataatctttatgaaccaatgcatctctcaacttcagatccttgagaacattaaaaaccaaaacaacttcatagcttcttgattcagctctataaatgttgcttctctgcttttgtatttgtaggtacgattactccgggt

SEQ ID NO: 1808 - DNA, 208 bp, Arabidopsis thaliana
  Intron number 5 from transcript AT5G14710.1 (locus AT5G147 10) derived from phytozome v7.0 (chr-ID Chr5; pos 4747408 to 4747615)
acagcaactgctcgaagactcattgaacacataaggtctctctttcaccttcaaattcttgaatctttgcttcttctcctccatttctttgtttttctattgtctgattaagatggaacactagaaagtgatcaaactgttataatttatgcaatctcttttgaattcttcagttctattgttccctcgaagcctctggttctctcac

SEQ ID NO: 1809 - DNA, 822 bp, Arabidopsis thaliana
  Intron number 1 from transcript AT5G14740.1 (locus AT5G147 40) derived from phytozome v7.0 (chr-ID Chr5; pos 4758309 to 4759130)
cgactctccaatctgcttcaaaagccacaaaacaggtaaaacagatatagagacacaaagtgatggtctttatttagataaggttagcaagaaaatcaaagatataagtatagccttcgcttggtgataggatcttatccactatataatccacacccatcaatcccttctacatctccaccacttgtttttttttttggttttttttttgccttttttggtttaatccgagaaaatttcaactttcgatcaatattttccctacgtttggaccaattttgataatagctttagcggctatacagaacattagtgtgatacactcaaacgaaaaaatgataagaccgaaatagtttccttttaacttgttgatatgataccatttgagtcataataattataatctagaggtactttcttgtacaaatatgtgaaatgttttgcatatattaatgtttgaaatattagacttagtaaatccgttttgttaatatcagaagttagtatgaggattaactggatgttactaagcaaccccgacaatttgattccttgttctgactcaaaaaccttatacacctttaaaattttattttaccaaattgccaagtttactgttttacgtaaatattaatgatcgagataaaagttttaagagaagttctttattccaccacaagaaaagaaagacacttttctatatatgcacctcacctttcgttttcattatcttctttcaaagggtatttaattttacaatattactagctattactcttgtttgtagtataaatatccttctcttcgtccctctcatcgcct

SEQ ID NO: 1810 - DNA, 699 bp, Arabidopsis thaliana
  Intron number 1 from transcript AT5G14780.1 (locus AT5G147 80) derived from phytozome v7.0 (chr-ID Chr5; pos 4777095 to 4777793)
cttcttcgggttacttcgctcgacgtcagtttaatgtaataattctttcgatctctctcctttttcacgattaaggttctaagttggtgatatttatagtttctcagagttttgtgtggtgatttcgcttgattttactgtttgcggttggtaacgtttccgattgtgtgtgggatagatgtttttggatctttggccttatgattttgaggatatgcaaattttggttttgtagaacctattttgattttgttgtgatatgatcagactgactgtgcatgactgaaacgtgtgactaaaattaggaaagcacaactgtcgtttctgattaggccagctaaagtttccataatggaacccaactactacatggtgtctctttttgtaataactaaacggcacgatgtttgatatgggcttctaaacgggcctgtaaacgtttgggcgttgtatatagtttcaaaacagaacagattagtgtcttactgtaagatgttgtctctttcagtgtaatgggaagacgcactttttgatgatttttcagagttttaggtagttcttacatgcgtcggatcttttcttgttcttatatatgtattcatgtttctttgaatcgggtatatgttaaaatttaaatagccttttgaacttgcttatgaaacaggcatcttctggtgatagcaaaaagattgtaggagt

SEQ ID NO: 1811 - DNA, 183 bp, Arabidopsis thaliana
  Intron number 2 from transcript AT5G14780.1 (locus AT5G147 80) derived from phytozome v7.0 (chr-ID Chr5; pos 4777913 to 4778095)
acaaggaaggccctgattgcggtaagtattttccaatctaacaagtacttgaagagattcaaaatctttaattctgtttttctatagcacaaactataaatatgaatgcaagcctccttttgattcaactcttatttattaatggcagaacttgagaaacatatcccggatcttcacgtccta

SEQ ID NO: 1812 - DNA, 768 bp, Arabidopsis thaliana
  Intron number 1 from transcript AT5G15440.1 (locus AT5G154 40) derived from phytozome v7.0 (chr-ID Chr5; pos 5012356 to 5013123)
ctgcaatttgctgaagtattcacagttttgttctggtaaagttcatctctttactcttttttaagatctttgtgtgttctagtttgtggcgtttttctgtatgtgatgactagagatgggttttcaggaaaaggatttagtgttcagatttcactggattttcaataagagtcttgttcgtgatgtcgttttatagatctgagttacattgtgggtgttgcctttgaaggtcttgagctactttgacttcattttgattgatcttagataatgatgatggaaagaaaatgaattcagagtcattactggtccctgcgttttgcttgataagaagtaatatcaagagatcattcaatcatctgaagtttctctttttctcttagcatcattttctgctgataagagacttcatagtagtgactgagactttgtgttttgtgaaatgtgggtaaaggatgctttttgtgttaatttcggtgcgtcttattgattgtttcgccatcaatctagctttgctcaattcttcttttcccacaagctctctctggttcagtttctctgtacgttttggatgttatggggcttgttttgaatatggtttagtgggttgtctcatttcttgtggagtctgtatcacgtcgtgatgcttattatgtttatgcccaataattctgtggatttagaaactgtttgcttatgaatctcaagtttagtgtggtattagggaactgatggatctcaatttctctctttttagttggaagctct

SEQ ID NO: 1813 - DNA, 834 bp, Arabidopsis thaliana
  Intron number 1 from transcript AT5G15490.1 (locus AT5G154 90) derived from phytozome v7.0 (chr-ID Chr5; pos 5029315 to 5030148 reverse strand)
gctagaaccagagcctacctagctcgcaccttaaggtatcatcaaattctagcttctctctttcttaatccgtgtcacgatccagttttgtgtttaatcgcgatccgatctcgggctttatctcctgtttcgatttggatctactttggttggtttaattttcatatagatttggtttttgaatgtttgtgtgtttattaaccttcttctgtgattatattgagagttaacaattttctgcattcaggctcgatctgtgtcggtgatccgtagaaaattcacgtaatttcatttctcattttacgttattcccaattcctgaaccgggttctgttgcatgtaccagatctgagattttgatttgaatttcttgcagtatgtgtatatttttcgttgaatttcggattgttaagcatgatcatgagtatatgatctctgaattggttgcttcacctaacatttgggtcatgtttacgttaacgtattctctgtgtatccttttactcttacgaaaccggatctgagtttttgaaaattgttaaagtttagtttttgcttattgtagattctccttttgaatgcttttaactttattttgcatatcaatttcttctctacaatgcttgaattgttggatctgatttgttgagttgagtcaaaaaatttccttctacggtgctgctagatacaataattcctatctcttgttctgattcaaaataaagcataaacttttgtgcactcatttatggtattggttacagagagatttgaagtttgacgttaaacttttttttttttttttcacaggaggtgattcagtttacaagcaaa

SEQ ID NO: 1814 - DNA, 631 bp, Arabidopsis thaliana
  Intron number 1 from transcript AT5G15640.1 (locus AT5G156 40) derived from phytozome v7.0 (chr-ID Chr5; pos 5087617 to 5088247)
gcatcttttggtcagacggagattaactgggacaagtacgttcttcattttcctcctcaatttccatcgattgatccgcttgttttctagttttgattgattctctgtggcgttgttgttattagtccgaactttgtttattgttgtttcgatccagtttttgtgattctgtgattggtttcttcggtggatttatcgacatgaaatggatatcgctcgttgttttgacggaatcatttcgtggaggtaattgaagatttccgaatttattggaaagaatctggttctcgggctcctgagaagctcgatttcagaaattgatttggtgcagaagatttgttcgctagtgttaatcaaatctttgtttaggtaaaagatctagtaggcatttggatagttttagtgttccttattcttacggtataatctgaggtcctacgtctaaggtttttggaaatgtgtgatgagtagggccaaaacaaacttgaaaccattacaaatttggttgtaagatttccgagaggtacctgaagaatcatacaacaaataatatcttcatactagctctaattatttttgctctctctccttcttttatcttgcagacttgacaaaaggaggttctacatta

SEQ ID NO: 1815 - DNA, 372 bp, Arabidopsis thaliana
  Intron number 1 from transcript AT5G16140.1 (locus AT5G161 40) derived from phytozome v7.0 (chr-ID Chr5; pos 5271518 to 5271889 reverse strand)
ccgaaattgtttcgaaaaatcctgaagaagaagaggtaagctattttccttctcacttatccttcttctactgaaaatttataacataatataaaccacaaatacatttttgtgtaatccttgtagctcattgctaatctctgattctccagaaattttgctgagtcctctgttcgattacacttcaattattttttatctgcgctgtatctctgttaatgggtttcattaagttttgattctcagttgttatatgatttcgaatttcattatatcctgaaaagcttttatctttatgtatattccaagtattgaatctcaaagtttctagtcatttcaatttcaataggtctttgaatcaacaacagttcc

SEQ ID NO: 1816 - DNA, 445 bp, Arabidopsis thaliana
  Intron number 1 from transcript AT5G16780.1 (locus AT5G167 80) derived from phytozome v7.0 (chr-ID Chr5; pos 5521567 to 5522011 reverse strand)
tattcagtactttccattgaaggtttgatctagaggtaattcgaatcggaatttgatcaacctttgttttctttgatatttcgtttcagatgtttgcttcttcttttttccgatgaatttcgaatcgcttgaccttgttccgttttccgtttatcctccaaagtctgaatatgtttatagctagctagattcaggatttgattttaccttatttccccaataataatgaaatccttcttaggttagggtttttgtgtttttgtgttttgtcactagttttgaaaccgaaaattgtcatcaagtgtgcaagtactttgtcagagtaatgccaatataatagttttgttattctcatcttgctcggctgtagttttgctaccattgtaattgttgttactgagtaactcctttttctgtggttaggtcttgactaaagttcttgaaa

SEQ ID NO: 1817 - DNA, 572 bp, Arabidopsis thaliana
  Intron number 1 from transcript AT5G16880.3 (locus AT5G168 80) derived from phytozome v7.0 (chr-ID Chr5; pos 5549077 to 5549648)
cttcgagcttctcatctctttgttcaatctcaaaggtagaaattcgcgttaatttacttgtgatttcgctgttttttggttactgtttccgtgttgatcgatctagttctgggtttttcgatcatatgaaatgttattttccttattagggtttttgttgaccaaaacgaatttttctattttctttcgaattttgatcttcgaatatcgaattcggtttttctcagcaaaccctaattacattcatccgtaaaaaactgtttaatttctggttaaaccagtttccttgagcaaattttgttggatcgagaagaatatttgtatgatcgaagagatcgtatctgaaaacctggtttaaccgggtttgaacctttttgtgtatttgattttgtatgaatctctgcagaattcgtaggtgtatattattgattgttagtatttcctttcgtgctcgttattgtttagtatcattgaaggatacttgaacaagttgatgtttcagctgctttctggtttgttctgtatgtacaattccaggttcttgctgtttttcatttacaggtttttgagta

SEQ ID NO: 1818 - DNA, 581 bp, Arabidopsis thaliana
  Intron number 1 from transcript AT5G16880.2 (locus AT5G168 80) derived from phytozome v7.0 (chr-ID Chr5; pos 5549077 to 5549657)
cttcgagcttctcatctctttgttcaatctcaaaggtagaaattcgcgttaatttacttgtgatttcgctgttttttggttactgtttccgtgttgatcgatctagttctgggtttttcgatcatatgaaatgttattttccttattagggtttttgttgaccaaaacgaatttttctattttctttcgaattttgatcttcgaatatcgaattcggtttttctcagcaaaccctaattacattcatccgtaaaaaactgtttaatttctggttaaaccagtttccttgagcaaattttgttggatcgagaagaatatttgtatgatcgaagagatcgtatctgaaaacctggtttaaccgggtttgaacctttttgtgtatttgattttgtatgaatctctgcagaattcgtaggtgtatattattgattgttagtatttcctttcgtgctcgttattgtttagtatcattgaaggatacttgaacaagttgatgtttcagctgctttctggtttgttctgtatgtacaattccaggttcttgctgtttttcatttacaggtttttgagtatcagcaaag

SEQ ID NO: 1819 - DNA, 286 bp, Arabidopsis thaliana
  Intron number 2 from transcript AT5G16990.1 (locus AT5G169 90) derived from phytozome v7.0 (chr-ID Chr5; pos 5582815 to 5583100 reverse strand)
ttccattatcctactatactggacttctcggtatgttaatctatgccttgctccttgttttgtaagtggaaaatgtggaatcacttggtaattttagacagagatcatgaagttgaatgtcataaccatgtataatagttttgaatgatgaaaccggtgtgtgggaaatggaattagttatgtcgagttttaaacttcaatgtagaagactagagtttcgaacgtttggtttgttgatatgttcaatatattctctcctgattggttttctctgttcttgacaggt

SEQ ID NO: 1820 - DNA, 371 bp, Arabidopsis thaliana
  Intron number 1 from transcript AT5G17690.1 (locus AT5G176 90) derived from phytozome v7.0 (chr-ID Chr5; pos 5828842 to 5829212 reverse strand)
aaattgaagctattcgtcgtaagagagttcgaaaagtaagctccttttttcgtcttcactcagcaaatgtggtttgtttttgttaaccataattagttgaggttttaggttttctaggtttaagataagtatcaaacgtaggttacacattggtgtgagaaagtggctgctttagtagttagtaatcatcgtaacagagtagtttataacgaaccaaagttttgattctgtggttgttatatgttgtaggaagaaaatgatctttaatgtttgatatcttcttggatttgattgattgaatgattctgattctgcattttggtactgtttttttttttgtatttgtagggcaaggttcagtatctaattaa

SEQ ID NO: 1821 - DNA, 597 bp, Arabidopsis thaliana
  Intron number 1 from transcript AT5G17820.1 (locus AT5G178 20) derived from phytozome v7.0 (chr-ID Chr5; pos 5889322 to 5889918 reverse strand)
catttccacgactgtttcgttaaggtaaggatctaatatatattgttcaacttttccaacaaagtcatgttgctcaaagcggcttaactattatagtttgtaatttcaatcaattttttgaattttcttacataccttgtatttaaaaatgataataatatatattatgaataataagttttataatattttcttattatcaatcatatattaaaatttgacaatacgagtttcttttcaaggtgttcaatatttagttgaatatgtgatattttagatttatctgaaaaatgtttgtgtgctagctagactggtccaaaaataatggaggtgcaaagtgaatttaaatgttattatccttctaaaattttcaattttcaatttaaataggatattaatatattactattattttttattttaagtaggatatatttaatcacaaactaaacaaaaattgtaaatatatgaaatgatctaaaatagtaatgattggtcttaagcgaattttcatatcattttgtctatatcatcttattttaatatttttatgttcggatagggctgtgacgcttctctcctcattgattcaaccaa

SEQ ID NO: 1822 - DNA, 700 bp, Arabidopsis thaliana
  Intron number 1 from transcript AT5G18130.1 (locus AT5G181 30) derived from phytozome v7.0 (chr-ID Chr5; pos 5996352 to 5997051)
ataataaggtaaaaaatttaaaatatgattcttgttagaagtcacttagttaaggaaaattaatttttatgatacgaaatacactaattttgataactgatatatctgattagttctactagtttagttagatgggtgtgtaatctcacatttgacttatgccgtcttaatcagatagcattaattttaaaattggttcccttttttttttttatcaagcaaattggctcctaatgcacgaaaacatgtcactcatttgagattttgatctaacagggtaaatcaagacaaattagctattaagtttggtttgcttccctaattgttgttaaagttagatctcaacttatacatattcctgtttgattgattgaatagtaaagttgtttgtgtctttgatacaacgaaagtgataaggatgcgtttggcggtgtggcctattacgtgtcttagtgaacaatcaataattgtagagaagattcttattttgtctttgtacgttttgtgtttatcttttcttgcgtcaccctcacactttgaaccaaaacacgtttatataataacgtcattgttccttgcatatcaataatagctagagccgcctagagatgtttgggaccgagttagccattattgatatatagatttatgattcaaagtcgttgatgtgtgattggttttaaactcgttattgcagcgg

SEQ ID NO: 1823 - DNA, 372 bp, Arabidopsis thaliana
  Intron number 1 from transcript AT5G18420.3 (locus AT5G184 20) derived from phytozome v7.0 (chr-ID Chr5; pos 6108804 to 6109175 reverse strand)
ttgcaggcatgctttgttcctcttcttactcttttttgaactttctctcgatgcttggcttcgtgtttgtgtgggagagtagcgagttttaggggtttttggattgtttcactcgaaatgatttgatttgaatctagggttttctttcgaggtttggtttcgtgtctgctgaaatggtctcttctgtgctgtatattgaattcgttgatgaaatctagtgttaagagtgttcttctactgattgtatacacaggggacaattcgaaagtgatgataacaaatacttttgaggcgtgtttacatttgataaccatttctaatttctttgcggaactaattgaatgaagttttgttccatttcaggatcagcag

SEQ ID NO: 1824 - DNA, 372 bp, Arabidopsis thaliana; identical to SEQ ID NO: 1823
  Intron number 1 from transcript AT5G18420.1 (locus AT5G184 20) derived from phytozome v7.0 (chr-ID Chr5; pos 6108804 to 6109175 reverse strand)

SEQ ID NO: 1825 - DNA, 627 bp, Arabidopsis thaliana
  Intron number 2 from transcript AT5G18500.2 (locus AT5G185 00) derived from phytozome v7.0 (chr-ID Chr5; pos 6138636 to 6139262)
cgctctgaaatcccctaaatttttgggcccatcaggttggttcttctctcacttatgaaccctagtttctaattgtaagttcaattcttgaatttctctagactctgttttttgggtgtttatcagacaatgcgacggatttttgtgtgttctgaatagtttctattgtcggtagatattttttagttttcttcagctgtagttttctttccagcgtagtgtttagctggcgtttggtctgagaactgaatattctggcagctggcaattcttgggacttaggtacaaatacaatgttggttttgttgaatctgatttttcttagtccttttttgttcaatttcttgtctttttgcttgttcctttccaattttgacttcttaagagagaggctatgtgcattttctttatgggtttggttagatttctatgtttgagtagctcaaatctaatatttggtataagctttgtgtttctggtttgttttgattactttgattcaggtcttgaaatgattcttctcgaacttctttttttcttgtttaagcagcaaaagttatggtttatacaagagttttgagtttaaaattctctgccttttcaggtgaataaagcggaggtcagaag

SEQ ID NO: 1826 - DNA, 482 bp, Arabidopsis thaliana
  Intron number 1 from transcript AT5G19400.2 (locus AT5G194 00) derived from phytozome v7.0 (chr-ID Chr5; pos 6540094 to 6540575)
tcgcatagcccatccccgcagatctgttaattccggttagatttcttccctttattcctaatttcgagaatttggttgttttcttcttatctcgtcgttttttttttcttcaaaattaaaaatcttgggaatagggtttcttttgtatgcttgccctttttgaattcgatcctgattctgctttgatttcgcttctcgtcttgcgggtaatagtttatgattgatgattataggcaaaacgattctgatatgaagggtctttgtgattcatgtgttcttttactcttttgaaatcggcgtttgatcactggtgcaatcgttttgattttatgtcaatggtctttattccaattcaagggtttgacttgtctctgttctttagtataaagctccaaacactttagacgattttagctcggctgttttattactttgttttagatgataaggttttggctttcttatcttattgcaggttacat

SEQ ID NO: 1827 - DNA, 555 bp, Arabidopsis thaliana
  Intron number 5 from transcript AT5G19420.2 (locus AT5G194 20) derived from phytozome v7.0 (chr-ID Chr5; pos 6551519 to 6552073 reverse strand)
tttccaggatcatctctgggcagcgcactgtaagttttgacatccgtagacatgtcatttaatctttccttaagctggctattaaatgttcagaataagttcgttagactagtattatccatttttcgatgcgtttatatggttggatatctgataagagtatcttcttctggttgtgtctgagctctactgtcatgattgtgagtaggatggcctcctaatgtgatctgaattgttgtttatgatttttccaagtggtgtatgttatgcacaaggctcttttcttagagtcgttttatcaacataaactcaaatgaagattacgtgcttatgctatgtttgattggattcatcattttttttcatttcacttcagcgtggcaggtcaatcttgatttgactttgcatgtttcatgcatcatttgcatgagccagtttccatagtcgtaggttgcatatttggaccttgcatatctagtgtgatattctgacaagtcttgcaatggtgtttctcttgcagcctatttttcagagatatccacgtcctgagaagga

SEQ ID NO: 1828 - DNA, 787 bp, Arabidopsis thaliana
  Intron number 1 from transcript AT5G19860.1 (locus AT5G198 60) derived from phytozome v7.0 (chr-ID Chr5; pos 6714569 to 6715355 reverse strand)
gaagagttttctcgaggtaaagattagatctttgcgtttttggggccgtaaatttggttgatatgattgaagatatttctgggctttaagggttcttgaggatttataggagatactgatagattctggaatctctgagtttctgggttcaagttgcactgaccattgttggatttgtagattgtttcttcatttcattaggcattgattatgggtaaatgcgtgggtacatataatatatatctgttgaatgcaatttacacattgactgaggaacaacatgaacatggcagctttctcaaaattgaaccacagaaggcttaaaagcaaagtctttggagaatcagactaagcttgagaaagggttgaaatttatctatctaagacttgtgaaaagaaactgtatttaatgctttcacattgctggtttttgagggacatacatcattgaaagttgaaactgatagtagcagagttttttcctctgtttggttctcttttgttcttttagttcgtagtgatagcttaatgcgtagctgagaaaagtggaatgctgtttgtttataatactaaagtaggtcattctgcatttcttgcaatgtcagttgtacaagcctctagcaaatgttttccgatctttgatggtttttgtctggttcttgaaatggtcattgccttagatcctttcaaaccagccaactcgcgaaagtgattcaggctggtttgtagggaattggtggtacctgcaattaacagaagcttttgtttttctcagaaagggcaagga

SEQ ID NO: 1829 - DNA, 660 bp, Arabidopsis thaliana
  Intron number 4 from transcript AT5G20060.2 (locus AT5G200 60) derived from phytozome v7.0 (chr-ID Chr5; pos 6777408 to 6778067)
aataagtttatttggtggttttccctccacagcttgtaagtatatttgctacataggattcgcctttcatttgtttaagcggaatctattcctaatgtaaataggcagataggttaaagtgaatagattaaatttaatcatgttcatgcagaagaatttgccatgggccaattattcaacaattatggttttgaaattcgtaagctagtaagcaaagtagtcaatcaagtggttggggataagctcactattagagatcaaattcttttacacgtctgtagctttgtaggaagctcatcttagcttttagtttagagtagtaaacaacacatcattggttcggctccacatcactagaccaaagaaacattcttctgttcttgctaaaatttgggaatttctatgcaaaaattaatcttctgctatgctacataagggacaaggttgttcagtcaacaatatagtttacctttaaccgaaaaatagactttacttctctccttggaggcaatatttggtacaacagatagagccttctttacctttctttatatagacactatcatcagacttgtgcacaaatgtctattactatgagtagggaagtattttttttgagaaaagatttgatgagttgctactgaatttatgtagggtttg

SEQ ID NO: 1830 - DNA, 588 bp, Arabidopsis thaliana
  Intron number 1 from transcript AT5G20060.1 (locus AT5G200 60) derived from phytozome v7.0 (chr-ID Chr5; pos 6776182 to 6776769)
tccttagacttctccgtcgattaacccttgccgaggtactgtctcaggtctcagcttagatatttattctatgcgatttttccaatttctttagcatctgctctgtaatgtatcattctggtttcgttttgcaattttgtattcaaagacaacacgactttggtatctgggttttcgtgaatccttgtaactttttgtcgatcgatcgagcactttgtttcttttcctgcacaatgtctgaacggactaaatattttaaggtttttgctctcttggagctttattgttgttttcggatttcgtctgggaatttctcaacgttatccgtctgatgaatagaatagttcgaattgggaacgaagggatgttgtttttacttcttaatgttatctcactttgaagttcttaagaattttagatttgaactttgaagaatgtggtatttgttttctgttatgtccatggattcatcatccatgttgttaaaaatgctacaatctcacctgatttaatcaatgtggtgtgaatgatttatgtatttgttttcctgcagggtcattttttttttcttgaattttttcaccaagt

SEQ ID NO: 1831 - DNA, 460 bp, Arabidopsis thaliana
  Intron number 1 from transcript AT5G20900.1 (locus AT5G209 00) derived from phytozome v7.0 (chr-ID Chr5; pos 7090973 to 7091432)
accggatctgttgagaaatcgattaacgaagttaggtatgagctgtgtttactgttgatttcacatgtttttatctgtttctctctttgctttgagtttagtacttaaaattgtatcttgtttctgataaggaagatcagcatttcgatctggttactttagtttctatttagggaaagtcatatttctcaatggaaccaatttgttttttggctggaacaattggattcttaacaaacttgtgtttttcaaagtcctttaatgcatacataagttttcatgtgaatttgattaatagaacttcaccgttaacatgtgaaattggagagactggattcatatgtggagagttttcttaatgttgcatcaataagtccatctttatagtgtcggtcacaagtttaatagatcttctgctattgaaggtccacggagattcaaaccgctgagccaacggttc

SEQ ID NO: 1832 - DNA, 796 bp, Arabidopsis thaliana
  Intron number 1 from transcript AT5G21274.1 (locus AT5G212 74) derived from phytozome v7.0 (chr-ID Chr5; pos 7215082 to 7215877 reverse strand)
gtggtatgtttctttcccagatctttgcgttttttccccgatgattactccgtccgtatacgagttctggaatttgtttgacagatttatgatcttcttcagttttctgtatgattcgtgtttgtttcacttgtgaacgatctagcttttggctaattcgatagcgattcatgactcacgctgtgttttgttcttgttctggttcagtctcgtgatgcagcaatgaaatgttttgggaaatttatccatatgttgagattttgagtagtttaattgttgaaaaaaggattgatgttgtagatatcaggaatgtattctgctttgattggtgaaaaacttgcaaaattctgttgtgcattattggcctttgcacggtgagatgtgggttcaatagaacgaagtggctagggttttgattctggctttgataccatgtaaagagatttggagaagaatattgtgtctttttaatacacatgattctagatttgctagtacacacacataaggaaagacggaataaacacagaatatttcttttaccctaacactttaggtaggacttggaagagtgattatttttagtttgtatgaatggagtttctttgttaacttagtaggactttgttgaatgaaaaaaaatcattctcttttttacttaccagatcttcatcagtcgaaataagaaatacaatggcttttgtttgttgactgtggatataagtctgtctctaaaagcttattatacctgaatctggttgcaggttgtatcaccaccaaggagctcggaaccgtg

SEQ ID NO: 1833 - DNA, 437 bp, Arabidopsis thaliana
  Intron number 1 from transcript AT5G22640.1 (locus AT5G226 40) derived from phytozome v7.0 (chr-ID Chr5; pos 7530069 to 7530505)
gaagctcgtaatgcctcacatttcccttttttcttctctttggttttggtgtcttgtttctgtgagtttggtgtttgcaagttgtgatttttaggttttgggtttacaggctttggtgttttgttaccgtgagatgctttctaaatctagtgactttcttagtttgttgtgttctataagctgcagattgaattttccatgaagtttgggttgaaactttgtattctaaatagagtttgaattatggaaatgaaggaaatggcaatgcaggttggatgatagggcattagaaactttcttgtgactaagttttatgatcttcgtcatctgtttgggttgcttagtgatgaatactttcgtctagattcagtagcttcgtatctcactattttctctctcttttgttttgggctaaaggtacgaaggcacagtttggg

SEQ ID NO: 1834 - DNA, 775 bp, Arabidopsis thaliana
  Intron number 1 from transcript AT5G22770.1 (locus AT5G227 70) derived from phytozome v7.0 (chr-ID Chr5; pos 7587131 to 7587905 reverse strand)
agaaggttactctcaattctctccattctattttctatgttttgattctcattagagaggtaattcagtgtcgagtatccgctgaggttttggtttattagagatattggagatttatccttcgcagttgcaatgccaatgcaatcgaatgttagagctattaggttgattagggagttagataagaatgtagatgaaacaaagatacagtcactggtcacatgccgagtggatagttttggagcttgtagtttcttactttatcggattgaggcaataaattttgatttaacaccaattgtgaaaatagataggcagtataatgttgccgttgtatagctagctcaaatccttgtagattagcaattattctaccttttgaaacatcactactattgctttcaacttggaatttcattactgaatatatgatgacatttaggaactagaagaaaagaatggtctggcagtaaattcggttatgtagtgatggtctaagaaattaaatcatggtcacggaaaattttgaatagctcattacgaagtagattaagctttgttgctgtaagaacttctggagtgaaattcttgttccatcttacacgtagcagagctgtagcaggcctgtagtggatccatgtgtttccagttggaccaacattaaacttattctttttcggggttcatgttagaaatgaattaatcaagaactctttgattacttgacattctgttttatttttgcaggttttgacaccatataaaaagaagaaat

SEQ ID NO: 1835 - DNA, 654 bp, Arabidopsis thaliana
  Intron number 1 from transcript AT5G22875.2 (locus AT5G228 75) derived from phytozome v7.0 (chr-ID Chr5; pos 7650647 to 7651300)
attcactgagtcgactcgacctcctcatatcccaagtgagatcttcttattgtttatccgtttggttcgtgattataaattttaaatcttgcaagatgttctcatacagttatcgctacagatttcgttcgaattgtttggttgaaatgtttggattatggattcaggacccttgattttgctctttacttgattaagaacatctcgacggattctaattggttttcttattgtataaatgtagtttttgtcgaataatactggatttagggcttttcgtgtataaaaactgttacttttggcacatcacctgtgagatcaatttaaaaaaccattgaggttctgatctatatctgattctcacttatgtcttgatttcaccatctgatattgatcagtttatctggaactgatgttgtaaaccatgtcttgtctgtgaaaaaacaagctctgtgttatgtatctaaatgttgacacatgaatttcagtgtttcacaatgtcataattcttgttttgttacctatatgctattaggtgttagcgtctgagttcaaatgatcattttataacccttatgatgtgacactgattccaattttgattttggtttctctctagatttttttgtttgggttacaaagccaaaacgagag

SEQ ID NO: 1836 - DNA, 1007 bp, Arabidopsis thaliana
  Intron number 1 from transcript AT5G23210.2 (locus AT5G232 10) derived from phytozome v7.0 (chr-ID Chr5; pos 7811640 to 7812646)
aaacgtatgtggttagtagttatcatcatcaccatcatgatgagttttggttgtgattggttaaactttaaagtaattttggaagcttgtaatgattccacatgcttgttagttgttacatgatcctatatatgctagcttttattctcttgtagactcatttgctatatatttaaatttacaatccacatatctcaacgttccatcatgctttgcttttagatggttttttcttttagatgtttatggtttcttacacattgttaatagaaaaatactttatttttaagtcattttattcataaagagctaaacaacgtaaaaatccaaattttgatgaaaatagtcataaaacaataaaatctttgatagattattgtaagtctttttgttcagcataacacgcttggaaaatattttggtgaaagattaaagataattagtttggtggaagattaaccatatgcttatattttattacatattaattgaattcatatgcatgtgatggatattaaaattattacctccacatatttaggctttaataggctcccgtgggctcattgcgccctttactttaatatgaaggcacagtaattattgacacaaaagttatgcatctatctattatcatcatatcaagaaaagtcaattccatgaaacttaaacggtccttcggtccataattcattatgattccaaacattacacatggtccatgcacgtatatgcacgccctaaaagttttctcaagtttgtttttattcgtgtgtttcttgataaaggcaagtttatcattataagcaacaaaacccttaaattaaatggaccctatgcaataatagtgaataaaaagtaacataatgtagagtcaaattaaaggagtaggcctatatcacctaagtttaaatttggtggtacttccaaataatgtacatagtaaaatgtatttagttatagtatattgagatttcaatggtgaaaaatgtgaatataggaccggg

SEQ ID NO: 1837 - DNA, 359 bp, Arabidopsis thaliana
  Intron number 1 from transcript AT5G23535.1 (locus AT5G235 35) derived from phytozome v7.0 (chr-ID Chr5; pos 7935512 to 7935870)
ttcctcttcctcgatctctcgattaattctcagaggcaagcttcttctattagaccaaacttgttttcgcatcctaattgtcaatttcggcgatatcatttctaatcatcaattttctcccttttcgaattagatcggaattatgtataaattttttggttgcgtatctttgacgtgaaaaaaccctaatttaggtggctttccgcagttgaaaaccctcgaaattggccctgccattttcaatttctttgatttggattcttcatgctttccgtttctcgttgttttttttgttagaagaaagacgtgaatttgttgtgatgtaatttttaggattattctcaaagagagtagcagct

SEQ ID NO: 1838 - DNA, 773 bp, Arabidopsis thaliana
  Intron number 1 from transcript AT5G24140.1 (locus AT5G241 40) derived from phytozome v7.0 (chr-ID Chr5; pos 8166716 to 8167488 reverse strand)
ctttagctaaggtatatcttttgcataagttggtcggtaagaaattaagatccgctgaattcagtggtcgcgcggtaaagatgattaattagagttcaaattttgtcgatgttctgaatcctacatagctgattacactagaattttggtagtttttttatgtgttttgcgtagcttcgttaatcaaaggcgatacttctttttgtgttgcattggctaattagtatggttcaggggggtgtaataattatcaaacttcaaataggttgaattatcttaaccgttgtaatgagtttagagatagatctttaaccgttatcagatagtcaatgaaaaaagttatgtcaataaaaaagttatttatcaaaactagtgctcgatcttcattggtacgaatataatgaaataaattaaagcaatgaacatggtaaaaagtgtttcttaaaaaatgtgggtccaacattaaatttataaaagaattggtagcaggctgattttttttttttaaacattaaaaatataaaaagtagataaaatggaaaaaaaaatttttaaaaaaatatatgaaaaatagatttcaagatgggttgtcaacactttatttttttcttcatcaaaaaaaaggaagagaaaaatatggatgcaagcaaaaacaaaatctgataatttgcattataagtattagttttgacgattatttacagaaatgttgttttctatatattccctattagttactcaatatgtgaaattaacttgaatgcggatgcagg

SEQ ID NO: 1839 - DNA, 813 bp, Arabidopsis thaliana
  Intron number 1 from transcript AT5G24310.1 (locus AT5G243 10) derived from phytozome v7.0 (chr-ID Chr5; pos 8273808 to 8274620)
ctagaggctttgtggagtgagaagaagagtctcaggttagtttcttgtattcttctgtgtattctcattatctgtttttttgttctcattcgtcttgtctgcaaaattcagttcacaaaggttgagactttacacgacttggttctctttaaaaccgttttgaggtcataattggtaaacatttgaattgggttttaagagctctgtttatatagtagaagaagttggaacctttcaatgttcttgattaagggttttaggttgaatgtttatagggtttgattttggatgactagtccctttttagattatttacttgaaatggccctttgtctctgtttatatgctatggaacaaaatttgcaattcttgatctcggttggttggaaaatgctaattctttaatcttttatttgtagattttgttaattctttgttgtcttaaaaatagtattgttgaagattcagacaaaaatgtgtttttgtttcagatcaaattgtctggtttctttagagctgtggattctacttcttgtctgtttgttattctttattaagatttagttggcgtgttgttgtttaccttaaacatccacagaatcatatactctttggtttaaattccttaaaatggatttaaaacactctagaccaatattagttgctttagtttcattttgctagcagcttgaaattttcgagtattcttacaaataccatcgctgaagatttgactatttgttttcttcattcttgtttgatcatttcatttccacagtgaaaacagaaagcagcatttgagattccactgtt

SEQ ID NO: 1840 - DNA, 844 bp, Arabidopsis thaliana
  Intron number 1 from transcript AT5G24600.1 (locus AT5G246 00) derived from phytozome v7.0 (chr-ID Chr5; pos 8422340 to 8423183 reverse strand)
gaggtctatctttttactattttttaatcatatttatttgcttttggttataaaaatgcatatgtagatttgttttttctagtcaaatatatatgattgatctctctacttaattttacatgagttatatgatcatttttttcctggaaaatgcaaaattattttagctcatttggttttatattttgagggttgttggagatgataactaaggagaatcttgtttatataaattgcttatagtgttgatttacacataacgataaagatgaattaattgaataagaagtgataaatgataagtgtatgcatgtgtagagattttcctgggaaagaaaatactgacaacagtttcaggtccttttgtattggattggaggatgtgaggttgagattctatctcactatgtgcatatataaagtttagtatatggtttatatataaatatgagtataattctaagtataatcatcatgcatgcacctcataaattgatactaatattgaaagttgaaacagtatcaagttgtttttctttcttcttttgctcagattttttcttttctatgtgaacataattatgttaaagttctttacgttaatgcaagattttgaacatttccttactaaatgaatccgcaagtgtgaaagctaacaacactcaaaagatgctttgcatttttgggaaacttttttttgaaaaaaatgtttataattacattatttcctccaccaatttttttcactttttgttggatttgagatttcttgtactaacttatgttccgttaacaactattgtaaacaggactcatccaaaaacggcgttttagcggttcaaac

SEQ ID NO: 1841 - DNA, 362 bp, Arabidopsis thaliana
  Intron number 1 from transcript AT5G24840.1 (locus AT5G248 40) derived from phytozome v7.0 (chr-ID Chr5; pos 8534653 to 8535014 reverse strand)
cgagattattgattttcaagtggagattgaatcaggtaaatcctctcgaaatctcacttagtctatttcttgtgttcgtattgtatcatataactatgaattcatgcctttagtttttctcatagccatacttgctctctatcttctcagtgaacagagactttagagaattagggtttacggtttaggcatttactgggttttgcagaagtggtcttagtttattcaaagttcgtttctttcacaaagtttaagctagattattagatctcagatgaatcaaatacgtatttgttattcgtaagactctgttttgattatgtcactcactgttattgttacctttgtgtggtttagtgata

SEQ ID NO: 1842 - DNA, 647 bp, Arabidopsis thaliana
  Intron number 1 from transcript AT5G25120.1 (locus AT5G251 20) derived from phytozome v7.0 (chr-ID Chr5; pos 8662204 to 8662850)
tctaattcttcggacacaaagcataagacttgaaggtaatcctacagaaatatcaaatattacatattctcaattattattttttaaacacaaagtgttctttacttgttcgaatgttgcatgtctcttgaccgtgaaaagaaatttaggattcttcattacgacagagtgatgattttttttgttttgccaaaaacgacagagtgatgatgctttggtggttttattttatggggttctatatttttcatctattggtgattgattacaaaaacttttaagactttagataatatatttttgttgagtctttaaaatccaattttcttgaatcaaacttaacacattcatagccctaaaaaatcttctaaaatttctcgtggcccatgtgtttggtttagtagtttttttcctttttaaagtcaaaattactggaacaaacattttaacatcagaatttattgtcacactcataactaatgaacaccacactttttttttggggttaaatgatccactaagcttgctagttataaacttatagtatttcttttaggattgtaaaatataaattgttgcattcgtcttcttttcaaccataaactaatttgctttgtataaacttatccttttgtgtaggaagcaaa

SEQ ID NO: 1843 - DNA, 637 bp, Arabidopsis thaliana
  Intron number 1 from transcript AT5G26667.1 (locus AT5G266 67) derived from phytozome v7.0 (chr-ID Chr5; pos 9276022 to 9276658)
tgaccaaattctctccgtgtttccttctgcttcaggttcgcgtttctctcaatgtctcttttaaagtttcttaaaatctgtctgaaaattacctgtgaatctcagaaaacatgtgttcttgtctttgattcatgtcattatcccaatgcttgatcttacatttcgtctaatctttagttagatcttagattcgttctccagctaattctgggtattgatggatccaatttgattttataaaaaaacttgatgaaatttgtttcctttgttcattgttcttcttacatcggatctgattatggatttttgatctacatgtttagcatttagatctgtaattgattttggtcgaatttggtaaagatcacatttttacgattgaatttttccaaagttttcgttttttttttgtcggatctgatctatatacgttttgttactgttgttatatatgcttagcatttttagatctgtgcttgatgttaatgaaatgtttctattgagaatggttgagaagttagagcaaagatcatgttcttatactcaatgtatagtttttacactaagatcattgccttaactaattggttaattgattcttcttcataggtgatattttaacaaagttcttagtaca

SEQ ID NO: 1844 - DNA, 501 bp, Arabidopsis thaliana
  Intron number 3 from transcript AT5G26770.3 (locus AT5G267 70) derived from phytozome v7.0 (chr-ID Chr5; pos 9408838 to 9409338 reverse strand)
gtgagcttgtagcttcaacttctgctgctgaaaaggtttgtttattctctcagaacccttttcatcttataatatagtatgacttaaaagacttccaaatttgatattgttgtctgaaaagtttggggctttgagtagtgttggtactgaaaagtgatcatcatagcttggtaatcaatggcccttttagatcttgattaaagtagatgaagctgagtgtggaaaaagaatctcaaatttattataattaatgtccaatgaagcttgaccttttcaaaaagagttccttgaatggttttggaatgctaactgggtcaatgaagatgaaaatgggtctctagattggcctgaaaagttatattttcatgaaatgctagaattgagaatcattgaggtaattagtgaatggattatttcatacattcattcattctaagaacgttttgatcttgttttgggaaaacagtttctagaagaagtggacgatctgagatcacagct

SEQ ID NO: 1845 - DNA, 216 bp, Arabidopsis thaliana
  Intron number 1 from transcript AT5G26770.3 (locus AT5G267 70) derived from phytozome v7.0 (chr-ID Chr5; pos 9409759 to 9409974 reverse strand)
tttctgttaaactcgtaaagtctcaatctttacgatttgttcttaaaaattctttcatttaaagttcttaaattggtcaacagtgtttatttttcctccaagtttgttaataatttaagatttccccacatgcattgaatatttgtcttttcttcttctttcttccatttcaaagttgtgagatttgattcgatgcttatgcagattcacaatttt

SEQ ID NO: 1846 - DNA, 313 bp, Arabidopsis thaliana
  Intron number 1 from transcript AT5G26910.3 (locus AT5G269 10) derived from phytozome v7.0 (chr-ID Chr5; pos 9469535 to 9469847 reverse strand)
tcataagttaaagttgaggtctttgtaacctttaggtaaatttgggttcatgtgtgatctgatttctttgaatttcttaaaccgattcaagttttggtctttcacagctctcttctgtattatcctgtggtggtggtctcttctgaatgtgaattcaaattaacctgtcttaatctccatttagttcagctagaagttgggttaatttattgaggtttatgcaatttttggtccggtttgttttggaatcaagattatttttcgctgcatcttgcagtccaggacagtgattcagtgattgtgttatctgtag

SEQ ID NO: 1847 - DNA, 718 bp, Arabidopsis thaliana
  Intron number 1 from transcript AT5G26940.4 (locus AT5G269 40) derived from phytozome v7.0 (chr-ID Chr5; pos 9480670 to 9481387)
cagtcttgtttcgagtttgattcacacaaggcaagtatcttctcctctccgattcattttctccttctgggtcatttcgattctctgtaattaaagacaaagttcgtctctttttaggtctcctcgttgaaaaaaactcagattttgtttgattcccttcttcatttctgcaattcctcacttgttttcgaattaaaatcaaaaattcgtttcttttgaatttgacttatcgttttctttaccctgtttgatttgtctggatgcttacacaattaggtgaaagttatgatttttattgcttcctagatttctaaaccaaggaaaagatttgaaattcaaagtctctgtaacgatttcaaaatctgttttatttatgtttctgtttggaatataagaattgtttcctctgccttgctttcttctctcttatgctgagattatagagtatgttgtgttctattgtctttgtagcttgttcccttctatatctgtatagaaaagaactcaaattttgagtcaaagattaaattttccatagggttttgaagaaattttgtaatgatgttgtgaaactactcgtctttaggatcagaagggaactatagaaatgaaactgttaagaagttgtatccactgtgggtttatatgtgcctagttctaattttcattctctggatctacagattggaatagaggagacattgtctctttgattctt

SEQ ID NO: 1848 - DNA, 636 bp, Arabidopsis thaliana
  Intron number 1 from transcript AT5G26940.1 (locus AT5G269 40) derived from phytozome v7.0 (chr-ID Chr5; pos 9480752 to 9481387)
ctctgtaattaaagacaaagttcgtctctttttaggtctcctcgttgaaaaaaactcagattttgtttgattcccttcttcatttctgcaattcctcacttgttttcgaattaaaatcaaaaattcgtttcttttgaatttgacttatcgttttctttaccctgtttgatttgtctggatgcttacacaattaggtgaaagttatgatttttattgcttcctagatttctaaaccaaggaaaagatttgaaattcaaagtctctgtaacgatttcaaaatctgttttatttatgtttctgtttggaatataagaattgtttcctctgccttgctttcttctctcttatgctgagattatagagtatgttgtgttctattgtctttgtagcttgttcccttctatatctgtatagaaaagaactcaaattttgagtcaaagattaaattttccatagggttttgaagaaattttgtaatgatgttgtgaaactactcgtctttaggatcagaagggaactatagaaatgaaactgttaagaagttgtatccactgtgggtttatatgtgcctagttctaattttcattctctggatctacagattggaatagaggagacattgtctctttgattctt

SEQ ID NO: 1849 - DNA, 652 bp, Arabidopsis thaliana
  Intron number 1 from transcript AT5G26940.3 (locus AT5G269 40) derived from phytozome v7.0 (chr-ID Chr5; pos 9480736 to 9481387)
ctgggtcatttcgattctctgtaattaaagacaaagttcgtctctttttaggtctcctcgttgaaaaaaactcagattttgtttgattcccttcttcatttctgcaattcctcacttgttttcgaattaaaatcaaaaattcgtttcttttgaatttgacttatcgttttctttaccctgtttgatttgtctggatgcttacacaattaggtgaaagttatgatttttattgcttcctagatttctaaaccaaggaaaagatttgaaattcaaagtctctgtaacgatttcaaaatctgttttatttatgtttctgtttggaatataagaattgtttcctctgccttgctttcttctctcttatgctgagattatagagtatgttgtgttctattgtctttgtagcttgttcccttctatatctgtatagaaaagaactcaaattttgagtcaaagattaaattttccatagggttttgaagaaattttgtaatgatgttgtgaaactactcgtctttaggatcagaagggaactatagaaatgaaactgttaagaagttgtatccactgtgggtttatatgtgcctagttctaattttcattctctggatctacagattggaatagaggagacattgtctctttgattctt

SEQ ID NO: 1850 - DNA, 411 bp, Arabidopsis thaliana
  Intron number 1 from transcript AT5G27450.3 (locus AT5G274 50) derived from phytozome v7.0 (chr-ID Chr5; pos 9690640 to 9691050)
tcttctaggtttctttctttctcagcaatttccaggtacgctgtttctgtctattcaatttctgcttttctgttgaattcgcattgccggaggtaagaaaatgaagtcaatgagaagaaaagaacgatttttttttttaattcccaacttgtgttcgatctctgagcagctcttatctgatacaaccatttttttggatataatatctaaatttgtagtctttagtttaattcagatcccaattataataatgcccttttgatctgatccacattgcgtatcaaaggctattattattttattcccagagttcaattatttagttggtagaatctctctgtgttgttgtgaatctgtctgtttatgtaaatcaattcaaaaggttgtgacttttgtgtttgacttaggaaa

SEQ ID NO: 1851 - DNA, 624 bp, Arabidopsis thaliana
  Intron number 2 from transcript AT5G27770.1 (locus AT5G277 70) derived from phytozome v7.0 (chr-ID Chr5; pos 9836380 to 9837003)
gtcaattctccaagaggtatcttaaaacttaaaacctaattctctgatattgcctttacttgtgtctagatttgtggctttgatatttaggtatagttttgggaatggttctgtttatcttgttggtaacgtttgaatatagaatcttgaaaccgttgtgtttgtaatgtttttgtttatcttgttggttggtggttggtacaatgttgaataatagatcatcttgttggttggtacagtgttgaatttatcttatagagttacttataggtatgttgtttgattctgattttagagtgtctctgagtgtaattctttgttgcttatgttaatcttgttggttgatacaatgttgaatgttgaatcttgaatagtttttggtaatgcttatgatgatcttgttggttaatacagtgttgaatgtggaatcttgagtagttttagtaatgtttttgtttattttgttggttgttacaatgttgaatgtggaatcttcttgagtttatcttgttgagttaagtataggatgttgtttgattctgttgttagactgtttttgagtgtgattctttgtttatgtctgtgacaggtatcttaagtacttgacaaagaagtacttgaaga

SEQ ID NO: 1852 - DNA, 663 bp, Arabidopsis thaliana
  Intron number 1 from transcript AT5G27820.1 (locus AT5G278 20) derived from phytozome v7.0 (chr-ID Chr5; pos 9859921 to 9860583)
gttccatcttccaacattttactcagcagcttcaggtacgccattatcttccacagaatgagttttttttctggttgttaaacttttggatttaatccgttgagagttgaaaatgaagaggttttagttttatcttctctgattggcttaatcttcgttttcctggaaatgtaattgaagaacttagatacaatcgattctagcttgatatgaagattctctggtatttgagtgtatgtttgtggtttaatcacaaattgatgtccaccaggtgtttgctgaaatgtctgaaagaagtaaaatgctgcttggttttgatttaggatcttgattcctattggtttggttttattaaaccaggagtgtgagtgtcacattgctaataagggtttctctgaaactacttactcgcaaagatttggctttagatgggatggtcatttctcgatataatgttatattgaccattggaggtgtctctgcttatgtgttctttctgtattcaacgttgcataattcaattctgattacatcatttactgattccaagtttgaatatttcctcatgggctgttgttgatgcgtagtgtaagttgagtttttttcttagttctgtgaaagccatgtacatgttttaaaagggtgttatgctttgtttctcag

SEQ ID NO: 1853 - DNA, 812 bp, Arabidopsis thaliana
  Intron number 1 from transcript AT5G27930.2 (locus AT5G279 30) derived from phytozome v7.0 (chr-ID Chr5; pos 9960256 to 9961067 reverse strand)
ttctcgagcgtttatccttacgtgccatttcaaaggtctaaatctttctctctctttatacatgtaagaagaatatgattggtctgtgacaagatctaaatgaaagctgaagagaaacctttcttgggttctgtcttttttcctttctacttctgaatccaagtaaaccaaggtttttagttcttgatataaaaagtaaaaaaaaaattgtgtaaaattggtcgtcactttttcacttcgggtgatatgaagatttttgctcctttgtctcaaatttagaaatttttatcttatcaaacttatttttgaagcaaatctatggagattaagagtgtttgcttcttttagccttttaggtgttcatattaatatatagtattaagcaacaacatgctgagaaagttctcattttttttgtttcttgttagttttccctgaaaaagcaaaagagaagaatcttggaatcttgcaacttgttttacatttccttattaagaaatatctctagatgtgttttctttaaacagaaactctctttcccttcaagtcaaaatcatgtacatcaaagataaatcttagaagcttgtttcaatggaattccatgtcagacttatgaatattccacttgaagttcaatttttgttgttgtttttcaaagtgtctagattctcaacactatgactcatcttcttacttttaagatttaacctctgttttatgatctccttgtagcactatcaaagtttctaaagaagttttggtttcttgttttttaaggatcatctgaagcttaaggagaaagtttctcgttg

SEQ ID NO: 1854 - DNA, 523 bp, Arabidopsis thaliana
  Intron number 1 from transcript AT5G28300.1 (locus AT5G283 00) derived from phytozome v7.0 (chr-ID Chr5; pos 10294219 to 10294741 reverse strand)
tggttccctgaattcacttgggagcatacttcaaggtaatacatatcacacacatatataaatatacttctttatatatgcatcaacacatttatatttttcttcatatgcatatggacatgaacattagtatttattttataagagtacatttacaacaattacaattatcatgttactcaatttgatttgatagactagagatctttttcttttgaataagcattttttgggatatttaattttgatgttaacaaatgattggccattaataactatttatatttatacataattgacatttttgtgccattttaatgcatttttaaaaataaactaacgatgaaattgtaagatatcaatacatatatgtgtatattattggtagaagtgtgtatatatatatatatgtatattcgtatatatatatatatgtatattcgtattattaatgacgttatgtcgtttatgaaattatgatgttgtagaaagttggcagaagttggttttaagaggagtccac

SEQ ID NO: 1855 - DNA, 816 bp, Arabidopsis thaliana
  Intron number 2 from transcript AT5G28310.1 (locus AT5G283 10) derived from phytozome v7.0 (chr-ID Chr5; pos 10300729 to 10301544 reverse strand)
atcgacgttttccgtcgcatctctgctaccagtcggttagttatgcaacggttttggccactcaaaggagattatcccctcggttccaaggtttgcaacataacttgcgaaaaaatcaaattagcaacaaatattccattaattgtaaatgattccctctaatttgcagttgggaagaatgttggataattccaacttacttgaggggcaagttatctccttgtagaagatgctagaagagatacaagaaaggaaattcaagaaaggaaatcaagagaaaaagaaatacaaataatgtccagttggataagatttgtaagtattcctattcacaataggcaaaggaggtgtttggttctagtatatatatgatctctatgaagaagaagaagataacacaagagagcaaaagcatccaagaggatcaaagagagagctcaagatgtgagtcatcaagagagatctcaagagagatctcatgagagtcgagagagacctcatgagataaacatgagagtcaagagagacctcatgagagatatacttaggggtagctaagttctatatagagagactatggagagttgttccataagacctaaagagagatagacttaggggtagctaagttctatataaagaggctatggagagttgttccataagacctaagtaagaggctttggagagatgttccaaagacctaagttcttgagagagatttatttttaagaagtttctaaatcaatatatagaaaagtcgttctttatatctttcaagttcttgtattgttggactactttgtgaatcagtca

SEQ ID NO: 1856 - DNA, 754 bp, Arabidopsis thaliana
  Intron number 3 from transcript AT5G28380.1 (locus AT5G283 80) derived from phytozome v7.0 (chr-ID Chr5; pos 10339637 to 10340390 reverse strand)
atacaggctgcagagccaaaaagtggaagtttagtgtaagagtgaaagacacaatgcttacctctataaaaatgggtacatccgttatgtgttggaatattgagagaaaagcaaaaacagagtaagagacatttgtctcagagacatttgtctcttttcttgtaaagaagacaagaacaaaactttgttttattaaaaatgaaacttgttgttttactcgactagatacacacacttatgtacaggtcttaggtacataaccgaccaaactaaacattgtgactgttgaaactaagataaactgcccaaactaaagttacgactcttacaaccaccttttgctataacatagaaacttaataatcaaataacatattaccaaactcaattataaactaacattatgcttaactctctcataaacaggccctaatatatacccctgaattttccatgcaaataagatattacagattgtgtgcgtccgaaatccaaacacaagccgaacagagtggtgtatttgattctcaatctgcagcaagatgatggcttatatacagtagatcaaacacaaagtgtatgcttctaggggtcttgtttattattggacattggagagtcgttcattcttaagtattccctggcaaaggtactaatatttcatctctgttactgctgatgtttcagaagattgatctggaggcgatataatacgacagacttattaagggaccaaccaagcaatcattcgttg

SEQ ID NO: 1857 - DNA, 574 bp, Arabidopsis thaliana
  Intron number 1 from transcript AT5G32470.1 (locus AT5G324 70) derived from phytozome v7.0 (chr-ID Chr5; pos 12087674 to 12088247 reverse strand)
ttcatttccttaaggcctttgctcacgcgtaagttctcttctcggatacttagtttctctatgaatttcctgatttgaggataaaatgatgcttgatactttgttatagaagttgattttgatcctttaaatttcaaagtgaagatgaatgtagatagataatgttagagactggaatgattttaaagattctatagactctaggttcccttggaatgattttaaagattctataaggctgtttctcgcttcatatttagtttggttgttcatgtctgccaaatgattttattacctaactattccttgacataggatatgattcttattcacaatgagatttgttttggtggtctgggaagctgctctcatttagtgccacgttatcatttcgtctttagcagttgatcaaatgatttgattttgttacaatggatgtgagaaattttttttgtttagcttatcagtgataagatatgaagaaatggttaaaatttgtataaacttttcaattaaaggctttcatagtttttctggttttctttataaacattgtgcttctgcgattttaggt

SEQ ID NO: 1858 - DNA, 441 bp, Arabidopsis thaliana
  Intron number 1 from transcript AT5G35910.1 (locus AT5G359 10) derived from phytozome v7.0 (chr-ID Chr5; pos 14034281 to 14034721 reverse strand)
catcctttggttagtgttttgtgttttttagagttatctgtttagttgttgtggaataatatggtttgaactttggatagagttagactttatttgaaaattggcttggtttagtgaggatgctaccagtatagtgtagaatgagaatttctatttgaatgtagtgaagttattcttaagaacctgccctgtactgccaatagtgttgtattttggttagcattatctgtgttcttaacagccacattaagactctagtgtctgtaagcttaccgtattgtattgatgaaaaggtggcttgggaaaagatctgtttttaactttcttagggttatgttttggctgtcagtatttggccttttcttggcatttttctctctttttatacgtttattatactatgcaggagaaattttcagtgcttgacttcgttgacaaaga

SEQ ID NO: 1859 - DNA, 865 bp, Arabidopsis thaliana
  Intron number 2 from transcript AT5G37720.2 (locus AT5G377 20) derived from phytozome v7.0 (chr-ID Chr5; pos 14982957 to 14983821 reverse strand)
ctcgtccatcatctttcaccattaacaaggcaagctcaaaatctgggatcttctatgtgtatgatttggaaatctgagtttctgtgaagcatttacttcatcatactatatctaaacgatgggagaagcaggttttcctgtccatgcggaaagccttacttctgatgatagtttgacattctttagcattgagaacatcgcctaggaacatgcttctttctagttcatggagatgttttcatttaggaatgcctcttacccctgcagtttcagtgtactttgtggtttatgttgttaattgtgaggactttggcagacaagttattggttgcttttgcgacagtacttagaacctgaggagcttcagtaagatgaagatcaaaatttgttcttccagtacaattagacatgttgtgcatttccgtcacacagtttcaaatcctcaaaagatgtgtggtgttgtagtaaatatagtgacttaccctcctaacccctacacagtcttaactgtatcatgcatgaagttattgatgaacgtcctgctgcatttggaatttcttcagcatgctatgagcgtcggtttttcttttatcatcatagccttggtacaaagaatttgttttggaaccggagcatagtcggtcaaactcattgttcctccatttcatttggttttctcattgggtggttcttgactactcggtggagctctttgctttgactgggtttccctcttccaggcatatgggtggtcacttctttggaattgtttttcattgacgctgtttttgaagttcgacagacatcttgtactgaaatgattctgttctattgaatagcctgtccgtagggtcaggagcttgcc

SEQ ID NO: 1860 - DNA, 517 bp, Arabidopsis thaliana
  Intron number 1 from transcript AT5G37720.2 (locus AT5G377 20) derived from phytozome v7.0 (chr-ID Chr5; pos 14983994 to 14984510 reverse strand)
tctctctctcgttcggattctcatctcttcttctggtaatttcttcttcttcttcttctatcttcttgcgaaccattcgtgctcttgaaccatcttacttgattaatttcgttctattctcatctgcttgcacgcaattattagttttcgtttcaataactatgactaggttaatataggatatagatctagggtttcaatcgatgttatgtttgatttgagaactatagatttccctcgtaagtgatctagggtttatctgattagctctcaatctgattggattgatttgtttctcatgagcctttgtgtttttctacactgggtagctctaaaattgcaattttgattgaaatttattgtttgggtcattaagctagtgcttgtttgagttagaagataagccagttttatgattatgatatgtttttcttgttcatgtttttggtggtaactaaacactccttctctaatttatgcaggtttcagattgagtcttgttactgtgtttcataag

SEQ ID NO: 1861 - DNA, 500 bp, Arabidopsis thaliana
  Intron number 1 from transcript AT5G38480.1 (locus AT5G384 80) derived from phytozome v7.0 (chr-ID Chr5; pos 15409777 to 15410276)
aatcagatcttctcttcaatcgaaaaaaaagaaaggtaaatctctctctctctaatcatcgttcgtttcgtagtttcttcttctacgtgtagatctgatctttgattgtatgtttctggagatctcgatctcatcgattctctgttcttatcactgattcagtgtgtttgatatctaaatccgatttgtgtgtaggatgttaaaatttaggtttcggttttgtttctgcttttgaacgattttgctctagattcgttatccgtgaagaacatagacgagtatgtagatcttacttcggattcgcgttgaagaattttctctagattcgtcacctatgaagaagattcattgtgttcttaatctagatgattaggttattgtttcgactcatttgtttatgcctattttctctatgttcttaatcggtgaagaaatgtatcaatgtgtgtatgttttgggttctgattttgtaggatttgctctagattgttgaatcgaag

SEQ ID NO: 1862 - DNA, 257 bp, Arabidopsis thaliana
  Intron number 1 from transcript AT5G38590.1 (locus AT5G385 90) derived from phytozome v7.0 (chr-ID Chr5; pos 15453456 to 15453712 reverse strand)
gatatcttctgatctcctacttcctcttgtacactgtaaggaaatgctatgtagtgctaatttctagggttcttattaatcttttgattctgttttctcactggtagtttctaggggtttgatccgttcctgtgtgtccaacattcgactctaagattaagaagaatccttatggtgttgttttcttttgattctcttcattttcaggggaagacaagattcgggtatctgtaacagtaacttgaatctggtaagat

SEQ ID NO: 1863 - DNA, 242 bp, Arabidopsis thaliana
  Intron number 1 from transcript AT5G38590.2 (locus AT5G385 90) derived from phytozome v7.0 (chr-ID Chr5; pos 15453471 to 15453712 reverse strand)
gatatcttctgatctcctacttcctcttgtacactgtaaggaaatgctatgtagtgctaatttctagggttcttattaatcttttgattctgttttctcactggtagtttctaggggtttgatccgttcctgtgtgtccaacattcgactctaagattaagaagaatccttatggtgttgttttcttttgattctcttcattttcaggggaagacaagattcgggtatctgtaacagtaact

SEQ ID NO: 1864 - DNA, 414 bp, Arabidopsis thaliana
  Intron number 1 from transcript AT5G39040.1 (locus AT5G390 40) derived from phytozome v7.0 (chr-ID Chr5; pos 15625712 to 15626125)
gtagtagctacagagatcctctgttgcagaatcaggtctgtttcattaaccattcttgtgtcttactctcatgtctgatgattcttgcttgtaaattttcgttatcgatgtaaagtttcgacctttactcagaaacttgagggaatttatcagaaatttcttatttaagaagaattgtggtgtcatgtgacttgaaattacttgtttaattcgaagagtctggttagtttttgaagcatagagttctcatttgacatgtaatcatttgattcgaactactggattgttacaacagaagaaatgttcttaaagtttgattcttgattcttgattttgccaatttatgagttttctaattgttagtttgtttattctgtctacgttaccgtattcaggaggataaaccgaaagcga

SEQ ID NO: 1865 - DNA, 351 bp, Arabidopsis thaliana
  Intron number 1 from transcript AT5G39850.1 (locus AT5G398 50) derived from phytozome v7.0 (chr-ID Chr5; pos 15950056 to 15950406)
gttaacgtcagattctaccgaaactgtaagctctcttccctcaatcttctattttcgaaactagtttcttccctcatgcatgctgaatttagattaatactctgttttttttctcgaattttacttactaaagtctgattttgatcatctgtgtattattattatgttttcatgttataggatatggtttacatttagggtattgtaatttatctgttgtggaatttaactctactctgtttttatgtgtgaaaattagggtttttgtctggtactctgttttgttattaccttgttctgtttcgttatcgtatgatgtttttaaagatttgatttttatttgttttgaag

SEQ ID NO: 1866 - DNA, 584 bp, Arabidopsis thaliana
  Intron number 2 from transcript AT5G40370.1 (locus AT5G403 70) derived from phytozome v7.0 (chr-ID Chr5; pos 16148132 to 16148715 reverse strand)
agctaagttcaaggccgttgagctcgacaccgaaagtaaatttcgccgattttttcatcatgaattcgtttcatttgctgtgttgataacgtttttggaatggtatacttgttgttctattgcttgtttacggtgattcgagtttaggattttgtttgatccaaggatagtgttttgttctggaacccatcatcgaaaatttctctgtttttgatgtttttggaaactttgaattgttctcttacttgtgtatcgaggtttggattttgtttattgatccaagtaaaggtttcgttttgtagaaagttcgctggagttccatgtgtagatttttttggtccaagcgtaggatttgtttgtcaacacatagttgaaaatttctttgttttctatagggcctcatgatcatgtggttttatcttccacaagtcaaaaagtttcagaaagcatatgatcattaccctaagcagttattgatccaagtatatgagtttttgcatttattcagagttgtagataaaatccagactcaagcattgttctgctatttttgaataattaaatggtgttgtttaatacaggtg

SEQ ID NO: 1867 - DNA, 381 bp, Arabidopsis thaliana
  Intron number 2 from transcript AT5G40810.1 (locus AT5G408 10) derived from phytozome v7.0 (chr-ID Chr5; pos 16340225 to 16340605)
agcttcttagaaggaaacttcattcccaatcagtcgtgagctttttccctgttacatctttttgattttctgctgtagcttaggatctgtttgaagatagaatcatatgatttgttttggttctgtctacaccttcattgctctgagagattgtccttgaagaattgtaactggaattgttgtggcgttggagattttgggatataagaaacttagacttattgatttgtgcttcgagagtatgattaatattcgatttcttttcagaaaaagtagtcttttgatttgttgagcatacaccttcttgtgtcttggcctttttttttgttttcttactgttgttctgtattatctaccaccataggcaactccggtattgtc

SEQ ID NO: 1868 - DNA, 597 bp, Arabidopsis thaliana
  Intron number 1 from transcript AT5G40840.3 (locus AT5G408 40) derived from phytozome v7.0 (chr-ID Chr5; pos 16363037 to 16363633 reverse strand)
tcaagtcaaagctactcatattccttcttccgttggtttgtctttctcctccttcacattcttcttcttcttctctctgttctagttagagatttttctccggcgattggaaaagtgattgtttgagtgaaactttgcagctttagtggattttttagctggaatagaattttagggtttcgtttgtatccattggcagcgttaattagagatcactgttgattttgttggggtctttcaatgttacttgtttatgttcatcagttgtttgacaaaatgcctgagtgaacctcagagattgagttcagtgatttattttaagtctgaatagtatcgaatccttagtagtatcaatctgccttttctcatataaacttaaatctaaacatttcatcttactcacttagtatcagaaagctgctggtcaacgcttagtttgcttgatctctaaagtacttgtatcctcgagaaagatggactttttttctacaacatttgacattttcagtattttttactttaatgacgtttctgatgtgtaattcttcgggggttttttttttggatgcacagatcaaatcttgcaaaaagagttag

SEQ ID NO: 1869 - DNA, 577 bp, Arabidopsis thaliana
  Intron number 1 from transcript AT5G41110.1 (locus AT5G411 10) derived from phytozome v7.0 (chr-ID Chr5; pos 16451752 to 16452328)
taattgattgctccatcggtgcgtttgatgatcgattattctcgttttctttgattttggtgttgctctgatgatgatgatgatgatgagattatctcttgatttgattttatatgatcacacaaaatgttctctcctgtgcgatctctcgttcagctcgaaaccttttggttgatcttcaattttaggcggaatttgtggttttgtgtgcttagagatgtttgcttgaatcttatacactgagagcctgtgagaatcattttggtttatatatataaacatctctttacttcttttgaatcacatcatctgtttgttaatctgtgcattattgaagcttatgtactatgttcttcattgattctttagcttaagattggtcctagtttatatgatcatgatctgtttcatcatttttgttacttctacaaattttgttgtggacttgtagtagtgatgcagctcaataatctgctagctaagttttttggaatgtgttggatatgttgttgattcttcttctccatttttgttcatttcaggagactatcagctctgttttctctatcctcaacat

SEQ ID NO: 1870 - DNA, 737 bp, Arabidopsis thaliana
  Intron number 1 from transcript AT5G41350.1 (locus AT5G413 50) derived from phytozome v7.0 (chr-ID Chr5; pos 16543155 to 16543891 reverse strand)
gacaaaacaaaaaaagcttcccccaagaacaaaaagtaaaattctctctatgattttgagatttttaattcctcttctctgattcaatctcgagaagatgatcggttcttctttggtgtttgttcttgctagtgatcgcttttctttaggttttgagcttgatttttgtgtgaaattctgtgggttttttttttactgttttgatccgtatttctcctatgtgtttatgctagattctgagaattctgatgtttattgttgcttttataagtttcggtttagggttttacggattagcttgctcttaatggagctttggttctttttgtggattcattgtttgtgttggagttaaattctgagtagaattgttttaagtttttggggtttagtgtaaaactgatttgaatttattgcaattgtgtgtagatggtgctaaagagaatgagaattgtaggagattcacataggcttgtagtcgcaacactgttgtctcgattttaatggttgatgtttattgtatctttgattattgagagtgaatttgaactgttagtagctgaattgttttattgttgctactagcatgatgagtctgatcagactttagtagacagctcaaactgatatcgaaaacgataaagcttgtttgagtttcttgcatatagatgataaatattctcctactgatctcagaatgtaatttgtttcttcacatatcttgtaggttagcatag

SEQ ID NO: 1871 - DNA, 748 bp, Arabidopsis thaliana
  Intron number 1 from transcript AT5G41460.1 (locus AT5G414 60) derived from phytozome v7.0 (chr-ID Chr5; pos 16590555 to 16591302 reverse strand)
gtgttccactcactaaagaactcggttttcaccaggtcagtaattatcacttttattttatgtttttactataatcttattagtaaagaaatattctcatagattcgtatgaatctagttaaattaagttggttaattaactgtaaaacatgttcagattattaatattactttcttttacaccaaacacaatctgtaaatgaaaattctatgattttctaactaaataacatattttgattgattaatacgaatctttgtgttttgtttcagttggttaattagtagtaagtagttttaactacaactagattttatttgatcattgtatttaatgctttttagttaatgtgtattcaatgagtttatcgagattataaattaaattgttccccgggttttttgataataaaaagttacacgcttttggttaaaaatccattgcattataaaattcaattatgatacaatgccacgtcactggaccacaatgttgccgtacgttatattgttgccggagtaaggtacacgtcgtcacggtgtcaggccgtttctttaaagagttgtcacgcatttaacggcgcgtgcgtctcacgtgacactctccttgtttgttggtgatttgttcattgattacagaaccaatcgtcggtacctaccaataaccggtcggtttggtaactcttctcaaattaaattttgaaccgttccatattaattggtgctgtcttttgtgtatttcagtacg

SEQ ID NO: 1872 - DNA, 952 bp, Arabidopsis thaliana
  Intron number 1 from transcript AT5G41570.1 (locus AT5G415 70) derived from phytozome v7.0 (chr-ID Chr5; pos 16624563 to 16625514)
ctcatcccaggtacttttacctatatagttgtattaattaagagtatttataattttattcgtgaatctatgacatcatattaaaattgatttccaaatattggatcgaccaaaaactttcgtggctacaaaacattaggttagcttaacaaccagtacgatctagtcttgtgtttaacattaaactgatatatgtagaaaatgtatcttttagttgcaaaaataccatagtttttaggtttagctagtaatagttatataacgaaatcaatcccttactaaagcctataacgaaatctgtcgtacgtacttttcgaaaatttatgatgtgatgataattttcgaaaacaaagcatgagaatagatgtgatttttaaaaaaggattatcctatagttttcttttctgataatttgattatcctataatatagttaattattgtgcaattatataatcttagaaacatgtataaacctgatatagggattctctttatgtgctaccacatccgagtatgaaattgtttggaaagggatgatttactcaaatatgtataatgtatccatcaatattctggtcaagaaaatgatcttaattagttctagatcagtataaaatatatagtttcttatgggcttatggctcatatatatatgaaaacttcatccagatgaaaagtaatttaatttgcttccttgttttttattcctttttgctagggaatcaaaagcagagataaatccaattctacttcattttatatgatatttacgttcttagcaaaaaatagaaaaaaaaaatagtttcatgagacttcatagaaattaaaatcagtcttgcatagacacccaaaacttctacttatttttcatatgaattataaaaaaaaatttgaagaattaatagatgaaactattaatcttgtgtcacaaaatgcaggagctattacag

SEQ ID NO: 1873 - DNA, 432 bp, Arabidopsis thaliana
  Intron number 1 from transcript AT5G41610.1 (locus AT5G416 10) derived from phytozome v7.0 (chr-ID Chr5; pos 16641172 to 16641603 reverse strand)
tctagtgagatcagaatcacttgcgaattcttcaggtactctcttgttgtttcgtttaatctcttcacaatgccttgatttctagggtataattatggtttttgaccagacaatttaaggtttttctcgagaattgtagtttttttgtatatatttattcttgtgtaattgggatcgtatcttggtgcaactctctatatgcatgtatgtgttatagtggaatcttctctgttaaaaaataatcttttgagaatctaagaatttatataaacttggagtactattttgatttggattatgattcttaattggattctaagaatataagaattctaaagatcgaagctttttttgtttatcaacataaagatcgaagcttgattgttttttttaataggggttttgaagaagtttctctactcttctgggacg

SEQ ID NO: 1874 - DNA, 751 bp, Arabidopsis thaliana
  Intron number 2 from transcript AT5G42000.1 (locus AT5G420 00) derived from phytozome v7.0 (chr-ID Chr5; pos 16799827 to 16800577)
aatcgcaaatttctcaccgttgttcctgttgtcttgtaagttccttctctcatatctcattaggattttgttttgcatcatcatctcttgttgatcttgttcagtatcgaaaaattgaatgccttaccttattttctatgattgtttctgtatttggtgtaatttttgcttaagttatgttttagagatacattgatcttcgtttccctacctacttgttctttatcttattgtagctcattttacatctggttatatagagatgctagtcaatgagcttaattacaattctattcctaggtgaagtggttgttttgacaatttgatttgcaattattactacacagaatacattttgacatgacaatcagatacacaagagtcaagacactaccgttcttctcattttgatttctgtttgttgactagtgcttcaaatctgttcactgattagggttggacctaagtttcctactatgattaaactcgcttgattattaaggtcttttagctagtgctcaagagccttggatttagatttagatttagacattcgtacaagacataaggtctgttatgagtttgctgaatctctcttaaaagaagcactactagattatgtgtagtggaatacctcaattgtgttgtgtgtgacgaatatgtaatcaatgattggatctttgtgacataaaagtctgaccaaactttgtatgtaggtacttgatagcctctcacacaacagactatcagc

SEQ ID NO: 1875 - DNA, 462 bp, Arabidopsis thaliana
  Intron number 1 from transcript AT5G42240.1 (locus AT5G422 40) derived from phytozome v7.0 (chr-ID Chr5; pos 16888255 to 16888716)
ggttgtgatattcttttccaatttcgtaattttaggtaccttttgctcttgttgctcttgtagattttgtttaatgggtatctcaaagattcatgctttacttgttaaatttctgggtttgggttcttataaccaattagctgatttttgaactgttttagaacttagatcttactcttagaggatagagacataaagaatctccattgtttgatatatcacttacgttgtcttcttgtctcattgattcgagcattgtagtcttttagttgccaaatgcaattgtgaaaatgtacaaaactgttcttgtttcatatctgcagtaaaattgtttttggtatttggtgttctgtagatttctcttgtttatgtctttcatgtttgtttaaattgggtttataaatgttttgtggataattcatttgacataataatgggtatgtttcagaaaagctgtagaag

SEQ ID NO: 1876 - DNA, 1047 bp, Arabidopsis thaliana
  Intron number 1 from transcript AT5G42300.1 (locus AT5G423 00) derived from phytozome v7.0 (chr-ID Chr5; pos 16912588 to 16913634 reverse strand)
ggtcttgagctttactacaactaggttttacatctttcttattgtttgcgattacgattgattatctttcggtttttgtggtatgtgatttgtttgagtatggagctttatttttggcttaagattttgatttttctgaagattttgcggaattgagatgttgttgttagttgtggaccctgtgattgcagaatttggagatttaattggaattttggaaccttgaaaagccattgttattaaaaactgaagcttgttattgtttgattttgtagtaagtaaacccttaaggagaatccaaacctttaattataatgttttggaatagcctagttgctaaaccttaagagacgccataagtgaatagctgaccaatgtgtttccttaaagtttttggtttttcagaaactttagcaaattcagaggttgtagttagttgcagacctgtgaaaagtagaactctaaagctttagttggacccatcaaaatccattgttatacaaaattgaagcttttaaggattttgattttgttccacagtatcctaagcatagatagatatgttgaggctcctttagtacaaagaagatatgattgctcgtaatgaaatagattggttggttaaaaagattctctattatcattcttcttccactgaaatgtgttttgatctttcctaatcgtttgtgtaatgagaaggtcttagaaagacatggaacctttgcttcctcccattgagacacccccttgtctctattggaacatgattgataactctgaataagttgctattaatactgaacagtaaagtcgccaaacattccattcaattgttttatataataaataactcacatggtaacttgaggtagacaatatgcagttttccaatgaacctctgacatgtctattttcatgatcgtttgcgcattgtcctaatctgattatgattctattcttcgattggtatacacgagcttcattgtttatttgctttttctatctggtccaggccaatcgaaggagctaagctgaaggagtgttgtt

SEQ ID NO: 1877 - DNA, 812 bp, Arabidopsis thaliana
  Intron number 1 from transcript AT5G42520.2 (locus AT5G425 20) derived from phytozome v7.0 (chr-ID Chr5; pos 17000392 to 17001203)
tatctctccggcgggttctctctctacttcccccggtaaacttcgcttactcttccaccatcttctttctctcttcgccgccccttttcatttcacttttttctccaagttcttaccaagcttctaagctcatttcctattaatcgaagctcgtttgaagtaattagggcttggctgaatcctaattgctgaattaagttactcgatttgattccaaatggctaaatcctaattttgatgagctttgcctgtttctatcgacattagagttggagaatttttggattgtttctttcttttggatagtgtatcgaaccagattttgtggttttagagttcttattgatcatcatgagtaggcgattttgtgttttgtgttttcccaaattagcttttgatgattatcactatgactataatcgatgatactgtgtttcttttagctgagtttgatatctcacagagtttatgtgtattggttagaatcgattgattgatgtgcaaatcctgaaacaaaatggtaccatttcgatattaatgttgctatttttagtcatctgagtttgagtgtttttgttgaaagtttttcagaaaatactcatagatggacaaacaattgtttgctttgtctctgctgaatcatattctggaactcaagtatagattttttttttgcttcatagtcgtttatgtatgttcactaatactagcaatgctttggtgattggctattttgcttcatagtagtttatttatgaaatggtcttttttgacactgtttaatgattggctatgtgcaggaggattaaaag

SEQ ID NO: 1878 - DNA, 659 bp, Arabidopsis thaliana
  Intron number 3 from transcript AT5G42770.1 (locus AT5G427 70) derived from phytozome v7.0 (chr-ID Chr5; pos 17152570 to 17153228)
ctgaagagttggttttggctttagctgaggcaaaggtaacttcattagtcatctgcaataaaatggttgcttttatggttcatgtttctttttgttaatcttgtcatcacaggctgatgctattgtgtcaaaactacaaattagtgaatgtgaagatgaggaacaaccgagagtcttgattgcatcggatacagtatgtagtttttggtttagctaattactagtaaagtctccatctactatcaccaagttccattttatgttcttgggaatgcatcatcatcttctttggaaatatacactcttacgtcgtaatagctctgatttgtcctgcaccagaagttgctttatgggttttatctctttagggtcctctatatcttactctgaagctagtatttgtcattctttaggtcttgatctactcttgtttattctgtgaaatttaagtctttatgctctgcctacatgatttgatatcgcatgttttgtagctccgcctacaattatcatttctgcttccaccagtgtttttattaactggagggacctgtttcatgcatatatcttttattaagccaaaggtgttttatatagcatttgctcttcatcagtctcattgataaaccggcataattttttcccaggctgaagcaatc

SEQ ID NO: 1879 - DNA, 730 bp, Arabidopsis thaliana
  Intron number 1 from transcript AT5G43060.1 (locus AT5G430 60) derived from phytozome v7.0 (chr-ID Chr5; pos 17270931 to 17271660 reverse strand)
ttaaagatcaaggaagctgtggtaagaataaattctttttcttttgattttattcatttttaaaatttaacaaaaaaaaacattattagatttcgaatctggaaaaatccctcaaatcctgattattttacggatgggtcagttttttctttagaattgaaatgggtttctatgaaaattatcgaaaaagtagtaaaaactgcgaaaattcttggattgtttcataaatactccaagaaacttttgataaataattcagagatatcttgaaacttttgtctggggaatgatgagtttggtctgaaatgttgacttttacttttaggtgtacgtttcgaaaaacaaagattttgaatttttatggagatgaataattatggttaataaatcttgagaaagacacaaacttctgatgatattttgtgtttatgcatcaaaacaaaatgttgaattttaggtgcacgtttcggggagctaatattttggttaaatctgagaaaattgatgatattttgggcctttatggaccatggtctttaaactttaaagttggtagtgggacaatatggacccattacaagatttgttttttgtcaagaatttaaatgaatggtggggacgatgatttggtatgtgttagtgtttagattgtgacaatttgattgataataacaactaatcttcttgttgtttagggagttgttgggcattctcaactattggagcagtg

SEQ ID NO: 1880 - DNA, 804 bp, Arabidopsis thaliana
  Intron number 1 from transcript AT5G43310.4 (locus AT5G433 10) derived from phytozome v7.0 (chr-ID Chr5; pos 17384560 to 17385363 reverse strand)
tcagttgcttttcagctcactcccactcgaacccggtaagttaaatttcgtgtaaactcttgttttcgtcagctttagagaagcctgatatggtaattgatcctaaatgttaaatctttctgtgaaattgttctatggaagtcgaaagattgcattgttatgttcattgataagacataaaaattgttagaagtgttaaactttgtgtgacttgttagagaaattggttttatggaagtcgaaagattgcatttttatgttcatttaaaagattaaatattgttaaagtgataaattttgtgttagttttgtgagaaattggttctatggaagttaaaagattgcatttttgggtttcctaataagatcaaaagttgttataatgttaatatttgtgttagttttctgagaaattggttctatggaagttgaaagattgcattttttgggttcattaataagatcaaaagtcgttgaaaattgtaggtttcttaccaaacttgcaacgaaaaatttaagtgtttttctttgcattgattaattaggtaggtaacagctaatgtaaaataatttctctcttgtattgtataaactcttgtattcgtgagctttatttacttaagcagaaaattgttgttaacttttgtgaagaactgttcaatgcaaatagaaagactgtatctttatgttcattgataggttcaaaagtcactgaattttgttgtttgtgtaccatattactatggaaaatttaatgtctttttctttgtggttcttacaggtgtgatttgttggtaacagcta

SEQ ID NO: 1881 - DNA, 524 bp, Arabidopsis thaliana
  Intron number 1 from transcript AT5G43560.2 (locus AT5G435 60) derived from phytozome v7.0 (chr-ID Chr5; pos 17500519 to 17501042)
aacgatctccaagctctttcttcaatcatctccaggtttgcttcgatctacacggcgtcgtttacacgtctccttcaaatctttcttccttacttctccgatttcaatttcgtgccgttttttttttgagttttccgatcgctgatttcttcaaatatttatcgaattttttttcaatgttttctgtttgtaaattctctgtaattcaattaattgaatcgaataattttgtctctcttgcatttcctcagctccagcttttgtttttattagtttctaagattgctttttgtttttagggtttattctcaattcttatatagtttttgaggtttttggtgtattgatttgattcatgtgagtgagtgattgatttagaatctttgttgagctgtgactgtgatttagatttgattcacttcagctataattctttgttttgatgatgattatgataaattcgtaattttgagcttatttgaattcattaactaatttagtatgatgaaatcttaatcagggga

SEQ ID NO: 1882 - DNA, 692 bp, Arabidopsis thaliana
  Intron number 1 from transcript AT5G43830.1 (locus AT5G438 30) derived from phytozome v7.0 (chr-ID Chr5; pos 17623380 to 17624071 reverse strand)
tactctcttgataatcctgatcctcgtgttcctaggtcaatttcaagtcctcttctctttgattatatgcttgatctagtcaaatctttgttgtttctttgatttctaagtagtagattttgaatctccgatgttttcggtttcgattttgtttatttctggaatcttcttgatttgatctgcgataatgttggatatattcgctattttgctgcagatttacttggattgactttatttggcttgcgatctaggatttatggtttttggcttgcttgtgttggtactatagcttgatgatgatgatgatgaacagtaacggtagattttacaaactacattagatgatgatgagataacagtagctagtgatttttggtagaatctgggattagagattctacagctccactagatgatgatgatgatgataatgttattgttctacaaagtagattagatgatgatgataatgttattgttctacaaagtagattagatgatgatgatgatattattgtgagctattggaggaatacggaactacagagtctatttaactctatttttcatcgatagaagatgattgaaaagatctacactggattagagtaatctgtggctcttgattttgtatatttggtaatgtgatttggtttctattgaatttgacagattatttgctgtggtgg

SEQ ID NO: 1883 - DNA, 786 bp, Arabidopsis thaliana
  Intron number 1 from transcript AT5G43860.1 (locus AT5G438 60) derived from phytozome v7.0 (chr-ID Chr5; pos 17630739 to 17631524)
gcttcatcctcatcgctcctcaggttcaatttcaatttccaatcattacattagttcaggaactaattagccactgaaattcttgtttagttttagattcctatgtgtattagtaatttagtatagaaattattttttggggggtcaaactagtgtatagtttttgtttaattagtaaaatgttatgagttatttttatggaaatggtactatcggaattgttaaatccagtgtatagtttttgtttagggatttagtattagtgtagagtttagaaaaatgtaaattcgctacaatctcgttccattccattttgtgcaaatattgcatgtgactgactacttggtcctttgaggtttagtgtgaatgttcatgaatatgtaggtccatgtattaagatattctagttgaatccaaaaaaatcataataaatacatatacattgatttgttaggacttataggatttaggatttaggatttaaccaagatgtatctataattcagctggatgcatggaacacattatgccacgtttaaattagttatttttctgaaacttttcttttattattgtttggctcttataagaaccttagacaagaagaaaagtaagaacaaaaatgcatatcaatgggtccacttgatgtgtttatcctgtttttgtctctagagtctctcgaatttctaatatcaaatgttaacattttattttatatggttgtaaatcaaatttcttggctatgtgatattataacagttatatagtatcgccggaccagacaca

SEQ ID NO: 1884 - DNA, 1007 bp, Arabidopsis thaliana
  Intron number 1 from transcript AT5G44390.1 (locus AT5G443 90) derived from phytozome v7.0 (chr-ID Chr5; pos 17883432 to 17884438 reverse strand)
gaagctggtgctaccgttggtgagctttactacaggtaatatataagtcgtttgattgttatatatgatacttttttctatacaagtatcaactttccaaattatggagtgaggtttatccgtttttgcgtattttaattgatttggaaatctaaccaaaatcttgtgattagattactggtttattactaaaatattgtgctacaagtttaatgattcttaaatactatttaaatttttttgttacttcaatatttcatttcacattgaaaatttagataaacatttagtttatttttttctcaaatttttataaatgttgtgttcagatttgaattttaacacatttagaagaaaaaaattgagttaaattatacaaaaccttacatttaagggtgaactatattattttgaaaagttatctagagactaattaaattagatccacatgtagagcaaactttgtggtccgcatgaattagatccacatgtttcaaagtcaatgaatttaacaaagattcaagcccaactgaaactagtagagcaagagttcagtggtctctagcctatggcaatttaaaaagaaataaaactcttacaaaagagtttgtggcgaaaagtttcaatattttcatttttcagatacgtatttttaggtaactacttttaaaattctaaaaataggtccaaccgttcaaactttatatatttcgcacattaaaaagtccaaaaaagtttgttcgtactaaggttttcaattatattggaccggtcttgtgtaaatttcttaatcacttggactacacaaatcgtaacacaatctataagcttttcagttttccacaaacgccaaacgaatatttgctttgtttaaaacgttaagggttgtggatcatttgaaaacatttatactaaatgcaacaaaacaataacaacaaaagtgaactatgtttcagtattgaatatttggtttgttgacttcagaattgcagagaagagcaagtttc

SEQ ID NO: 1885 - DNA, 943 bp, Arabidopsis thaliana
  Intron number 1 from transcript AT5G44565.1 (locus AT5G445 65) derived from phytozome v7.0 (chr-ID Chr5; pos 17951681 to 17952623)
tttgccctctgatagtgaacaactctcaataactggttagtgtttcatcagtttcaacaaacacacacatacatacatgaatactgaacatagaatagctgaggatacacacatatacagatccatgtatgttatgtaaataattaatttctatgttttaattgtttgatagatgtactctacacatttgaatttcaaaaactatattcatgagttccagataaaggaaattgacagagttcatgaaatattctaaattacaaaaagagaagtctcatgaatgacataatagacttcttcaattgtacaaatacattgggtttgtcgatattatttcatctttatataatttgatcattatcttaaagtccataaaacactttctactagatgaccaaaacgacctattctgttaatctataaaaaagccgagacatattttaattacatagaaaaataatttattattattataaaataacttataatttttcaaatataaaatttaattaacattaattttattattaatatccatgaatgtatatctggccatttgaaattgaagtcagtaaacgtttttgtgtcaacaattaggtaaaagaaaatgtaaaagtttagatcttacaaaacatatacttagcttatagtatttatctagattttgataaatgaactcgggttaaaaaaagacatatattttgttgatccataaaatataattacaaccaatcaatattattgtgactttttgtttttgttcttttgacagctataatgtgtgatctataaaaccatccggtctataaaaccatccggtctataaaatttgactgtatatcaataatgttatatctgtctacctaaataaagaataaatatctttgttagtttcacaaaaagaaagaataaatatctttaagactaaaatgaagggaggaga

SEQ ID NO: 1886 - DNA, 610 bp, Arabidopsis thaliana
  Intron number 1 from transcript AT5G44568.1 (locus AT5G445 68) derived from phytozome v7.0 (chr-ID Chr5; pos 17961466 to 17962075 reverse strand)
tcaagttggagtcgcccaggccaaacgtctccaacgtaactatttaacactacctctcttacttttgtattgagtttgtgtgtctattaaaaacgagctacattccacatccacatatagtaatactgttataatttggtttggagttttagtttggttttattctcaacatctaaggttgcagaacacataatgtttttccatggtatcacgttatttttatgtggacatctattttatcgaatataattatttatcttttatctaagtttgatttattgtattagtattgatagtgttaaatagtattatatcaatgtactagactaccaaccgaatatttattttattattttttaaataataatgtattacattgttaatttgttacatttatttttgtcctttttcctttctaatagcagctctagcaattatcatttccctaattacgtattttttaaaagtaattaccttgtttatactctctatacatagttttctgttgtagttttaatcatatttattgtttgaagaaattaatcatacaatttgtggtacatacatattgttagaaaggaacaaattgcgtttggattgcgttcctctt

SEQ ID NO: 1887 - DNA, 824 bp, Arabidopsis thaliana
  Intron number 1 from transcript AT5G44720.2 (locus AT5G447 20) derived from phytozome v7.0 (chr-ID Chr5; pos 18043145 to 18043968)
aatctctgttcctcaggctaccgttactcatactggtaaaaactaagaacaatcttcttcttcttcttctactcctcttagtttgacttctgagaattgaaaaaaggtccttttaaaaaaattggtatgagaaagattcccttttgatcattcttgattttctgagattttgattataagatatgggttttgtttgatttagggaaagtcaacaaattttccgagaaagtgaacaaattgtctcagaaattgctattaatagggtaaaatgagagtgaacacttaaagtctccacttttatgttggcatgaacatttagatttttcactctcattgttacgggatcgatgatactagaaagggtcttgctttattagtttattggttggaaaatgaacaaattatctggaaattgttcttgtttgattggatggaaagtgaacaatttctgggaagatgatattatttgggtataatgagagtgaccactaaagtttttctctttttttttttgttggcatgaagactacagtttcactctcatttctgtttctttatatgttaagggttcgaagatagcagaaaagggtcttgtttgattgatagaattgtgaacaaagtttccgagaaagtgaacacaatgctaatatatagggctaaattttgataagaaacgggagagtttcatgtgtgttaaaattaagatggtggaatgtttgactatgaagttgtcttggtgtttgatctaatggataattccatgggtttaatctatggaaactgatgtaggttttcagtgggaccggtattggttagttgttaac

SEQ ID NO: 1888 - DNA, 977 bp, Arabidopsis thaliana
  Intron number 1 from transcript AT5G44800.1 (locus AT5G448 00) derived from phytozome v7.0 (chr-ID Chr5; pos 18092246 to 18093222 reverse strand)
taacaactttattccgatttcagattcccagatttgtaagctgctttctcctttctgggtatttcctctttttgtatttgcttatgtaatttcgatgatttatcttacttggtgaggggttttgatgcttgtgtaatgttaatgctgtttaattaaggactgatttagtgtgattcggtttaattgagtttctttgggggggaattgggtttatctccaatgaagctttatgtttagtgccaatgtgtgttgtttagctcttttctctattgatttgtgtgtgaaattatgtttgtttgagtttcattaccaatggctgtctttacttgaatctcagtgattcatgaattctaccatctgtcgttgattatttcagttatataggatcattgatctatgttttagaactagtgtattattgccttagagaacacctgattttgaagtagaggaatgtagtttgcagtagaggaatgtaattaagtatgaatttaatggaagtattcgtaaggagtgagggaacgaatcgtttattataaaagctgtgttaagattagattacttactaggtttgtgtctcatctttaattaagacttttgattacggatggtgaggcttctaacgttataccaccatttttaggggtgacatcatttagtttcttagcttctatagcttatatgcttggatgacgctgtttgatttcatatcggtttaaaagtgaatgaaattgtggttatggccttatggtttggtacactgtgctttgtccgatgctgcatcattgatttgagttatacttcatttaatcttatcaatttttctgttcagtatttctgagcatgtgtacaatttaagtatttaactacctcactgttgtttcagtgtctcttgatcttagattatggtttacattactcgttttttgtttacaattttagtgtagagacagagttttttgaaggccagtattctt

SEQ ID NO: 1889 - DNA, 442 bp, Arabidopsis thaliana
  Intron number 1 from transcript AT5G45020.1 (locus AT5G450 20) derived from phytozome v7.0 (chr-ID Chr5; pos 18168764 to 18169205)
attcgacgccaaatacataacatcgtcgtcaacaggttttgtctcttatcttcttctctgcatgaatcatgttcttgttagacattttctgagttctgggtttgattttggcccaatgatccataaatgttgaaaatcatatttgaaggctatgaattatgaacattttattttaacctttttctagctctaatgagataattaagtaaaaccctactcgaaatttctgaactttttgatgctttgattcgtttcctgtgatcctttacctagagaaaattgagattgattatgtgacaagtgaccatctataagaaatctctcaaagttttcaactttactcactctattgaggtgaaaaagaaaaattgtgcattctgaaatttttattcttttcgtttgtcatgtgaattttcgtgtttgattttttattagtagcaaa

SEQ ID NO: 1890 - DNA, 439 bp, Arabidopsis thaliana
  Intron number 1 from transcript AT5G45020.2 (locus AT5G450 20) derived from phytozome v7.0 (chr-ID Chr5; pos 18168767 to 18169205)
cgacgccaaatacataacatcgtcgtcaacaggttttgtctcttatcttcttctctgcatgaatcatgttcttgttagacattttctgagttctgggtttgattttggcccaatgatccataaatgttgaaaatcatatttgaaggctatgaattatgaacattttattttaacctttttctagctctaatgagataattaagtaaaaccctactcgaaatttctgaactttttgatgctttgattcgtttcctgtgatcctttacctagagaaaattgagattgattatgtgacaagtgaccatctataagaaatctctcaaagttttcaactttactcactctattgaggtgaaaaagaaaaattgtgcattctgaaatttttattcttttcgtttgtcatgtgaattttcgtgtttgattttttattagtagcaaa

SEQ ID NO: 1891 - DNA, 422 bp, Arabidopsis thaliana
  Intron number 1 from transcript AT5G45030.2 (locus AT5G450 30) derived from phytozome v7.0 (chr-ID Chr5; pos 18172545 to 18172966)
agaaagatcccaacactactgatcggttagtacttctttcttctctgtctaataagcccccaaatttcccaagatttttcttttgattttgattagtaactccattgtttcactcaatttctttagctcttttcatgtttccttttctgggtttatcacaattttcaatcttgctcattattttccaataaagctctaacctttaagatacataagctaatttgtgttcttgagactttggtattagtccctctggtttgatgattattttcttaatgttgcttgcttcagtctgtttatatttagattaagtttatttgatgagctctcttcttgtttatgtactttcaaattttagtctttttaaaactaatgtacatgattcagttttagtataggttggtgattgtgtatcttcatta

SEQ ID NO: 1892 - DNA, 433 bp, Arabidopsis thaliana
  Intron number 1 from transcript AT5G45030.1 (locus AT5G450 30) derived from phytozome v7.0 (chr-ID Chr5; pos 18172545 to 18172977)
agaaagatcccaacactactgatcggttagtacttctttcttctctgtctaataagcccccaaatttcccaagatttttcttttgattttgattagtaactccattgtttcactcaatttctttagctcttttcatgtttccttttctgggtttatcacaattttcaatcttgctcattattttccaataaagctctaacctttaagatacataagctaatttgtgttcttgagactttggtattagtccctctggtttgatgattattttcttaatgttgcttgcttcagtctgtttatatttagattaagtttatttgatgagctctcttcttgtttatgtactttcaaattttagtctttttaaaactaatgtacatgattcagttttagtataggttggtgattgtgtatcttcattagtagaaggtta

SEQ ID NO: 1893 - DNA, 838 bp, Arabidopsis thaliana
  Intron number 1 from transcript AT5G45350.1 (locus AT5G453 50) derived from phytozome v7.0 (chr-ID Chr5; pos 18382855 to 18383692 reverse strand)
aatttcgtttcgacatatttcgcgattcgtctaaggtaaaaaaaaactcatctttttttcttttagatcgttaatttttgatcagcgattcgctcttctgatctgtgttctttaagcttgtcttctctcttgattcgatctgctgaaaacctagaaatttttgatttttttgtttgttttgctccatgtgtatgggtatatttacgattttaacaaaacaaaaatatgaattgaggttttttatttagcgaattgggttttaattgttcacattcgtttggctctctcgaggtgagtgataaagtatagaactttcttatgcttaggatcttaaattcgagttctttgatttacctgtcatgtgttattgattgatctcatttatattgtgtctgcttgatgtttaaagcttggtgtatgcaatttgattgggtttactggagattgatctgtgacctaatcaatgagtgataacattgctggttcatctgatttctcatctggtgtgtctgctcgattccctgaagaaagtttgaaactcaggcttggtttgtgcagtttgattgatttatctcattacttgactctggtgtacttgattctttgatgaaagcttgaagttaatgtttggtttgtgcaatatgattgggattaactgcatttgatctctgaccaaaatcagtgattaattacattgcttggttatctcattacttgagtttggtgttcctgcatgatcccctgagcttgaagttcatgcttggtttgtccaattgtgacctaaattgatgttttcttgtggtatcttttcgtaggttttgttactgattgagaaaac

SEQ ID NO: 1894 - DNA, 642 bp, Arabidopsis thaliana
  Intron number 3 from transcript AT5G45650.1 (locus AT5G456 50) derived from phytozome v7.0 (chr-ID Chr5; pos 18517411 to 18518052 reverse strand)
gaatcatcgtcggtgttctcgacagtggtaagttaagctgtctctactaattattgttttctgtttgttaaaaaatagaaaataggttttttttttgagtttctgactttctgttggaatattctaaactaaataaccataacctttttattaaattatgtaaataaatatattttttttggctaatgcgtttttttccgttaatgaaattaggataagatgaatggaaaaaataaaactgtgtaactcatgtaaacttttgtgttatcctttcatttgaattttcctctgtcttctgtttccttcacgcacacacataatagcgccgagataatagccataagattagtttaatgttaaaataatatattgttggattctgagaataatgagtgtttctttttgatgaaaacgtacaccaaacttaaatggacctaactccaacgttgatagttgaattattacgtgactagagaaaaagagttgcgttatggtcaagaattcaaggttgaaggaactttttgtagtactaatttatcttttggaatcgttaggttcatctcattattatattaatccgtcattattgagataatgatttgtttaaaataataggtgtgtggccagaatcaaagagtttca

SEQ ID NO: 1895 - DNA, 746 bp, Arabidopsis thaliana
  Intron number 1 from transcript AT5G46410.2 (locus AT5G464 10) derived from phytozome v7.0 (chr-ID Chr5; pos 18825205 to 18825950)
acgaaacagctctcttcttctctcctctctctcaggtccgtcttcttcccccaaatttgatcgcttccttcctcttcttctttgtcttcacctggaaatttcgtttttttcttattacattttttgttttttgttttcttctgtgttgtttgactttcgatttctgattctgtggttgtttatgctttgattttgttggatttgttagaaaaactttccatttcatctgggttttgaaaaagtttcctttttttttttttttggatttgtgctggttttgtgacttttgttctcagcttcgtttatttgtggtgagtttatgtttgaattttgattctatcgaaatttcgtttttgtgtgctaatttgttttatttctctctaatttcgcataacgatgacttgattttttgttagtgtatctttgatttggagttggaattttacttttggtagagaaatgtaagtttgaatagagagaactatttgtgaattataattaggttttttatgtgttaaggttctgggtttagctatttctgataggttgacttgtggtttgtttgtcttctcgattttgtctccatgatccgagattccatgtccatgctgtgtagattctgatctcctttttggattttggattttggattttgggtttgaagtattaaaatgattgatcgtgatgggctctgtttttttttttttgcagcatcttctgctggtttggtctttcactaaagtctc

SEQ ID NO: 1896 - DNA, 164 bp, Arabidopsis thaliana
  Intron number 2 from transcript AT5G46410.2 (locus AT5G464 10) derived from phytozome v7.0 (chr-ID Chr5; pos 18826158 to 18826321)
agaaacagcaccctggtaatgatttttctttgttttaagtattgtgttctcaaattgttgatttagataatctgagtttgttgtgtcatcaatcattttttggtttcttctctctgatgattgtgtcagtttcttcagggttggatactttttctcgggagagt

SEQ ID NO: 1897 - DNA, 173 bp, Arabidopsis thaliana
  Intron number 2 from transcript AT5G46410.1 (locus AT5G464 10) derived from phytozome v7.0 (chr-ID Chr5; pos 18826158 to 18826330)
agaaacagcaccctggtaatgatttttctttgttttaagtattgtgttctcaaattgttgatttagataatctgagtttgttgtgtcatcaatcattttttggtttcttctctctgatgattgtgtcagtttcttcagggttggatactttttctcgggagagtgaaactaat

SEQ ID NO: 1898 - DNA, 641 bp, Arabidopsis thaliana
  Intron number 1 from transcript AT5G46700.1 (locus AT5G467 00) derived from phytozome v7.0 (chr-ID Chr5; pos 18951513 to 18952153)
ctcatcttgatcccattcaagtaagtatcctcttcccattttattcaaatacattttcaatttttctctgttgttttgttgcttgtaattgttaattagtttttgcattaagtttgttaattagtggaagaaaattagggtgtaaaatgaatatgagaaagtatggggtgaaaatttaatggctatgaaaagaaaaggggtggtaatgaaatgtagatagaattggtgctttgcttgttaggtttgtcgcttaaaagactcagaaatatattcttttgattagaaaaaaaagctgaaaattcagttgaagattattacatcgagttcaaatttagggtgtaaattgaatagataaaaagtacagggggaaatcgaatggccatgaaaagaacaggtggattggtaatgaaattataaattagaaatgattcttagcttattataggctttgtgggaaccaaaaactggaaaagtttaaccttttaataaaataatataaaacgtcccaactttctagattcttccactatgtgcacttaatcagtcacgccgaactacttttttggccccaatattttatattatttaaatttaaccccatttctttactttcagtctggttgctgcaagcccccaacaaa

SEQ ID NO: 1899 - DNA, 817 bp, Arabidopsis thaliana
  Intron number 1 from transcript AT5G47560.1 (locus AT5G475 60) derived from phytozome v7.0 (chr-ID Chr5; pos 19289119 to 19289935 reverse strand)
aacactacaacatccatcgccggcttgcccttaacgttagtctttcctttatctctttatcttcttcttcttcttcttcttttttctacataatttattcaatatttgattctttccgattgtgtgcgggtccacgggtgaattaattacaaaatatgatcgttaaataggtggattgcttcaattgaatccctacttataaaattaaacattacaatgtgtagtggtccatgttttatacgtggtgatgccagattatatgtttttccttccccatacatttttttccccacacacatttatttcgttttaattcttcttcaataatttgtgtgttcaaagtctaatgataacttgatcatttaaagttaagttattaacatacaaagagtcctttatttcaattttttaaacaaaatctttttcatatgcattttattttattttatttgtatcatagatgagatgtcatttcatgaggccctaggccaatccataattccatttatatgacaacccaaaaaaaaagatgagagacacgtaaacactatgtttctccagcaaaagcaatgatagtgagtatgatttaatttgtgcaagtgcgggctccaataattagctcacaagtcacaactataatcattgtttacttttatcatgtttttaaactataattaatcgtacgagagatatcctatgattaagagaaaactcaccagtcaccacgtatctaattatgataagctaataccataacttaatggataatctaattcttgaagataacgttggtgttctgcgtggagccgctaaacgc

SEQ ID NO: 1900 - DNA, 331 bp, Arabidopsis thaliana
  Intron number 1 from transcript AT5G47590.1 (locus AT5G475 90) derived from phytozome v7.0 (chr-ID Chr5; pos 19298736 to 19299066 reverse strand)
tcaagaattcctaaagttcgaggtatctcttttcacgagctactagatttcccaagaacaacattgttctaatttttctcggaaaatatgtgttttttctagaaagttgtctcaatttgtttacttgtgaagtgttaacatgaacttggtacaaagatttacagtttttttactgtgcatgattcatgaaaatgaagcagatcgagttagttccatctttgataagtgtcttcctttgttctctgtatacttttcttcatcaagttttgatctttgtttacttattattattacagaggggttctacgcgacgaacaatcagtttcagaaa

SEQ ID NO: 1901 - DNA, 763 bp, Arabidopsis thaliana
  Intron number 1 from transcript AT5G48000.1 (locus AT5G480 00) derived from phytozome v7.0 (chr-ID Chr5; pos 19446974 to 19447736 reverse strand)
tgcggatcgggctctgataccatattagagtgtgagcttctaacctaaaatctctcttttttttttttcgaagtatactatacatgttaacgtaaataagtatattggcgtgtctgcactctgcaaaaaacatatattatcttctgtttttttttttttctttttgcaattacaaaaggtgtttacaaccttcttcatgaaactattttatattgaaactatatagtatcatgaaaaaggtcatcagacaattaatttataaaacattttgaaaatgaagaggtaacaactagcaagaggttccagtacttaccaagttttaaaactttaattatttgtcatttgaataatgatttgtcaaaagtggggtgctatgtgtcaaattcttgtgagacacaacttttcttcatagaatatattgtagaactaatatatattgagtaacactatcctgaagaaatatattaaccaagaaatgtataggttataagagaagtgtacttgatattcggaaaaaaaaaaaaccaaaaactaggtataatttgaggtaaatacaaaaactaggtctaagttgaggtgaaaaaaaacttaagaaggtctagtataaagttatttgtaagtatgactttctctatttaatccaaaggtaggttaagcagtcgttgaatgttttttgtttgttatattgagttgtttgtttgtaatgactttctctatttaatccataggtaggttaagattattcaaacttcaaaggcaaaac

SEQ ID NO: 1902 - DNA, 497 bp, Arabidopsis thaliana
  Intron number 1 from transcript AT5G48250.1 (locus AT5G482 50) derived from phytozome v7.0 (chr-ID Chr5; pos 19563127 to 19563623 reverse strand)
ctctgcttcagaagatacttgacgatctctcctacgtgagctctttaaaacccttgtcttgttattttagtgagggttgctttgattctcaatcctttttgactgatcttgaaatggatcttctttcacttctctcggatttgtaataagaaatctataattttttagctcacttctctgattggtacatgttgatctgaaatttgaagtctttctgcgatgttaattggtttctctgatgtctcttttgattggtctttgatttagaacagtctcatccataggaagttacaatctttgaggaagagatgtttaaaaagattggacttttatctaattctggacttgctttcgataccaagtttcaagcttttgttagttgtttaatgtattgtggtaagtttttttccttctaagattatgatataagggactaaccaaaatggtttgattctttgttagtgaaaggagcttgctttcttcagtgtgacggttga

SEQ ID NO: 1903 - DNA, 1032 bp, Arabidopsis thaliana
  Intron number 1 from transcript AT5G48880.1 (locus AT5G488 80) derived from phytozome v7.0 (chr-ID Chr5; pos 19816776 to 19817807 reverse strand)
ctattggaactcttactagctcattcatccgtcgggtaactttcttgacctctctccatcttatcttttacgagtcttaaagactttacttatctaagaaaatccgttttagtctctcaaaattgatttattagatggtatattctagtcacaacaactattttttggacgagaattttacaaaataattgaaggatacttaactctttcttactaaacaaaacaacttaaatctatatccgatatgaattcttgtgggtaaagaatacaaatcatgtatattatctggatatccaaattattcactaaaattttataaattatctcaaattcttctaaatttgtaaattactcaaattatcaaaatcactaatacccaaaatgagaagaaacatttattgcttaaaagttagattcttcccacgtggcccggtttagttatagttgccgacgattaatttccggtcacatttttaacggcgtgagtttgtatgtggcgtaaaacatgtcaaaatgcgatattttcgtaacgacgttaacttatacaaatacgacaagacaaggttttggcaacgaggccaatcagaccagacttgtgagaactgagaacgatcgatcaaaaatctctcccacgataaaaatgaggaccctgaagctcattgtacttaacgtcttcccctttccagaaaaatcaaccaaacccatttcagtttccccggaaagtttttgtctttcaatcaccattagaattcagctgcaacacaagtgtttgcaacagagagaatcatggagagagctatggaaagacaaaagatattgcttcgtcatctcaatccagtttcttcttctaattcttctcttaaacatgaaccttctcttctgtctgtaagtttagttgtcttaatccgtgagtcttaattagacattgaaattgtttgtggaagctgatgatctttaactctgttttattatgtgactcacttgtgtttttgttaattttagcctgtgaattgtgtttctgaagtttcccca

SEQ ID NO: 1904 - DNA, 786 bp, Arabidopsis thaliana
  Intron number 1 from transcript AT5G48880.3 (locus AT5G488 80) derived from phytozome v7.0 (chr-ID Chr5; pos 19817022 to 19817807 reverse strand)
ctattggaactcttactagctcattcatccgtcgggtaactttcttgacctctctccatcttatcttttacgagtcttaaagactttacttatctaagaaaatccgttttagtctctcaaaattgatttattagatggtatattctagtcacaacaactattttttggacgagaattttacaaaataattgaaggatacttaactctttcttactaaacaaaacaacttaaatctatatccgatatgaattcttgtgggtaaagaatacaaatcatgtatattatctggatatccaaattattcactaaaattttataaattatctcaaattcttctaaatttgtaaattactcaaattatcaaaatcactaatacccaaaatgagaagaaacatttattgcttaaaagttagattcttcccacgtggcccggtttagttatagttgccgacgattaatttccggtcacatttttaacggcgtgagtttgtatgtggcgtaaaacatgtcaaaatgcgatattttcgtaacgacgttaacttatacaaatacgacaagacaaggttttggcaacgaggccaatcagaccagacttgtgagaactgagaacgatcgatcaaaaatctctcccacgataaaaatgaggaccctgaagctcattgtacttaacgtcttcccctttccagaaaaatcaaccaaacccatttcagtttccccggaaagtttttgtctttcaatcaccattagaattcagctgcaacacaagtgtttgcaacagagagaatc

SEQ ID NO: 1905 - DNA, 410 bp, Arabidopsis thaliana
  Intron number 1 from transcript AT5G49540.1 (locus AT5G495 40) derived from phytozome v7.0 (chr-ID Chr5; pos 20105610 to 20106019 reverse strand)
cttcgatcttcctcttactactctcgtttctaattgtaagtctatatcaattccttttccaaagtttgtgtagatctcaaagtagtagatcggaagagatcgataaaaccagatcgattaatcatagttgctcccactctcgactacttaagagataatcataaagtcttaacctttaggaatcgaaatttattgtgatgcttagatagcgaaacccagttatagaatcattgaatcaattagaaacccctaattttcctgtggaaatttgcttaaaatcaatacttttttgggtttgtaatctatacacttactctatgatgtccaagttcttccttttttgttactgtaatgtaaaatccaatacaaagatttgaaatttatgttgtttcagattgttgttatcttaa

SEQ ID NO: 1906 - DNA, 560 bp, Arabidopsis thaliana
  Intron number 2 from transcript AT5G50460.1 (locus AT5G504 60) derived from phytozome v7.0 (chr-ID Chr5; pos 20551643 to 20552202 reverse strand)
ttccgatcaacaacatcatcgtcggtgccacttaggtaaaattcctcgatttgaattttagctccttatgtgaatgatgatgatgatgatttgtgcattgatggaattcttcataatggttcgtgtagatgacattgtatgagaaaattaatgtagacgtaggatcagttcttgtgtttgattgttgtaaggacccattttatgtttagttgctactatgtggatcttgtatttagtttctatcgtggtgttcttatttcgttcgtgaaaagaaaatcgtgtggaagcttttatgttagttatataaattcaacattgagtcaatgagaaatttctatataggtagaaaatgtagttgtttggttgcagactaatgcatatatgagtctagaatctgatagtgtaagagatttgtgatttagcataaggctgaggaagatatgtgctttcttctactacatgatgtgaaaattcttgtttgctttaagttttggaactattcttctaagctctttttattggtgtgtttgcagaaagcaaaggatacacaagtcagttct

SEQ ID NO: 1907 - DNA, 528 bp, Arabidopsis thaliana
  Intron number 5 from transcript AT5G50840.2 (locus AT5G508 40) derived from phytozome v7.0 (chr-ID Chr5; pos 20686892 to 20687419)
ctatagtaagttgaacacatttttctttcgatgtgaattcttcccagggttttgatctttgctgaatatagaaatttgagccattttgccgtcggtattggcagttttagagaggaacaagtattggataatagctttgttttgtgtttctaagtatgcaaatcttaaatgcacatcatttattgatccttgttatattttcttaggatattatctcctttaatcttccgtgctatatgctttggacagtcatggcaatatctttttcttctttctgaaactctctacactgacattggcaaatgttagtaccgatctacactaaaatttagtccttggaaataattggaactaaacaaagtagaaaattgtccatattggtttcaagttacagattgatagaactaagtttgatgaattgcttgcaggcttttgcaacatcaaaaacttacaaaaacaaaatcagaatttatttgattgatttttttcttatgctctctaccttcctaatcctcttttgtttatagg

SEQ ID NO: 1908 - DNA, 570 bp, Arabidopsis thaliana
  Intron number 1 from transcript AT5G50910.1 (locus AT5G509 10) derived from phytozome v7.0 (chr-ID Chr5; pos 20708503 to 20709072 reverse strand)
cgagaacgattggtaagttaaccgaagggtccacgattcaatttgataacacgcctaggtgagaaaaaatgttgtacattattacacaactaatacagccaaaaaaaaaaaaaaagcaacaattcgaaggcatgattaaatgagcagtccggccgttagtcgtccagagattttcatgtctatgtctagtcccatctcttctattacactctttttctttgtttgttttcatgtacctaacttcatttccacgtgtacatgaatcattcttccattacaaaaactataaagatagtagctagccaagatggctgttgaaattgccattcttctatccctctcaaagtagtgaatggtaagtgaacaagtaaactctataggacgatgaaaatgtaaatacgtatagatatataatgacgtagtagttctagaaaatacaaccttattaaccaaaataacatcatcaaaagttttgaagttgaagaaacactgatactaggtcatatttaagcttaaaattattattttctatcagtatactagtcgaccaactattgttactggtttaga

SEQ ID NO: 1909 - DNA, 1061 bp, Arabidopsis thaliana
  Intron number 1 from transcript AT5G51460.1 (locus AT5G514 60) derived from phytozome v7.0 (chr-ID Chr5; pos 20901131 to 20902191)
ttcagtttcgaaagttgtatctgcatttttctcaggtaatcatttcttagcttaaagtttagtgttttataccattttagcataaagtcaccatttttacaatctctgttctttgttatgagctgggattttttagttttggttcaaagttgaagtctttttgggatgtttgttgtatggttgaatgtctgaaccaaaccagtttaagaaaaaccggattttgttttctgggtttaggaatttggtagtttgtttattatgggttggattttatgtgaagtgacaatgatttgtcaagctttaagcacaacacatttgaaatggtggtggtgggtcaagacaatgtttcattgtctattctctgcaagtgtgttactaaacttttggtaaaaatttatgttttcttcgataccatacaaaatcttctgatgtgcctgtctttgtgcttatacatttgtggcaatttggtattcaatatttatatatctgaaatgtagttttaccacagtagtttctctccaaaatgtgtttgttttttatgcttgaaatgtagggtttggatttttgctctattctttagctttagatgtttggttggtaaaaattgtgaaataatcccaaagtaatacagagattttctatatcagtcagaaatttctatttggagaaataatcccaaacttttgttcctttgatagagaggttcaatattggctataatgcgatctctctggcattacccttgaaaattttctattacaaagtaaagtcatttcatgaataatgtgttttcttgattaccttttggtacaactgtcagcaaactaaagacaaagaaatgttacaaaccttttgtttgtttctcattggctcatagcttgaggtctatgtgtgattttggtatccaatgttttcttgttatagcttaagagaatgttttcaaacttttttcaacagatacaatcttagtaatcacacttgagtatttttcttaactggttttgtttcttggcatcttcatttcagggtctatatttctctgaggaattggattcttatag

SEQ ID NO: 1910 - DNA, 623 bp, Arabidopsis thaliana
  Intron number 1 from transcript AT5G51560.1 (locus AT5G515 60) derived from phytozome v7.0 (chr-ID Chr5; pos 20946233 to 20946855)
caaggcttgcaaggttagttcttttttactttaattttaatcttaatcattgattaaacttaaaacctaaatttagcattgttagatctttggtttctgcaaaattcttgtcccaagattaatcaatgttctgtggagatttgaaacctagaaatctgagctccttgtcttaggggttttagttacttcattactatctctggtagttgaaattatttgaattagatgattttggaatttaatgctttaatgatctgtctttaaaacgtccttttcatgtctttttgttaggatttttctttttgtaattttcctgtaaggaagaatagtcaagaactttttaagattcaaacttttaattggaaccataaatggcttactggtcccaaaatatggacttgaattgaagataacttgtacttctcttgattaattttgtttatttagataattgattcacttactttcaaaaggctttatatttgagctttaattagcaggaccaggtttctaaatctagaattagttctaagttaatgtaagtcaaagctaagcttcattccttttttggtctatgttgttgtgtagttttgcagctctgttacaacaatttgactggaagc

SEQ ID NO: 1911 - DNA, 428 bp, Arabidopsis thaliana
  Intron number 1 from transcript AT5G51650.1 (locus AT5G516 50) derived from phytozome v7.0 (chr-ID Chr5; pos 20978789 to 20979216 reverse strand)
ccttataaggtttatgaaaacaaatgctaataattaattgatttaaagatacgttcatataatatttcttattaattgttgaaaaatcttgaaaaggaaaataaccaactttgggcttcctctacttctcacctcttgtcctcataaaataagaaacctcctgcaagtctctgtgaaacgattttgagtgttcctcccccatacaagacgacaacaatgatagctttaagtttaaccacctataactactctttttacatacttcttcttctgcttcatcctctttttctccaaatttttatcttatttctcattaccagaagaaaaaatgtcaaggaagaaaatttttacactgtgcttgttaaaactattcacaaagagatactctcttaggctccaaagcctcgattccttttcgaggatttttg

SEQ ID NO: 1912 - DNA, 653 bp, Arabidopsis thaliana
  Intron number 1 from transcript AT5G51930.1 (locus AT5G519 30) derived from phytozome v7.0 (chr-ID Chr5; pos 21101893 to 21102545)
tgcttctgttcacaaagtcctcttcaccaccgaaggtatttttgactactattcatatttgttttaggaaggttttggaaaacatgtaattattatattttgatttcctaatataatttttcttcgacagatttacaaaagtagttagaaaagctcccgaaatcagttgtagaaaatgttatgaccattatagagatgatagtttttcaaaaagttggaatacaacataaaaaatggtattttgtgctatctttttttttataaaatcgagctagcattattagtgtaaaatctaatgcattgactttttaaaaaggaatacttatttataacctcatgagctggtcattaggaattatggagtgagcccactttcctaaatgacttttatatgttttattttaattgtgtgtactttaaaagtttcttacttttctaattttttttttaaacttattagtttttcaattctacataagaaagtatattgacaaattcaattaatataattttgaagaatatagaaattaaaaatatatattttagtttcaattagtatatgatttttactttatgaatgattgtttgctaaaactacttgctgcaaaaatgaacattaaaaaaaaaaacaggtaactagaagccaaaagcgt

SEQ ID NO: 1913 - DNA, 682 bp, Arabidopsis thaliana
  Intron number 1 from transcript AT5G52040.4 (locus AT5G520 40) derived from phytozome v7.0 (chr-ID Chr5; pos 21130399 to 21131080)
acggccggtacgatttttcaactgcttgttctaaggtataatcaaaatcgagttcttcagatattgaattcgattctctctttggtctctctcttctcttgttcttcagatttaaattcgatagctttttcattttcttccgttgaatttttcttgtttcattaggtctgttgaaattgtagtttcttcttgctttgttttctcatatggttgattttttttttccagatctgaggtttttttcatcatagcttgaaaaaatccatactttctgggcttcctttgtataaatatgaaaactttaatgaaaatctgttgtggtatgttatgggttgtgacttgtgatgaattgaattttgaatatagttgtaaatttgaaatcttgaagtatgaaatttgcattggtttgttaatttgtgatgaattggattttgattattacagttataaagttgaaaacttggaagtgtagatgattacatttttctgtggtttggttcctgttatgttcattgttctatgatcttaattatatgttttgttattgcttctcttctggagtgtgtttatttgtatattttggtcaaatctgtgctctgtttagtatctcttggatatcttttgatacttaggttgttgagaggagctataaatcgtttctgttgtctattttgtaggaatc

SEQ ID NO: 1914 - DNA, 401 bp, Arabidopsis thaliana
  Intron number 2 from transcript AT5G52040.4 (locus AT5G520 40) derived from phytozome v7.0 (chr-ID Chr5; pos 21131180 to 21131580)
aaagctggtaagtcttggttcttgtttttctttatactttctcttagtttttctgtttggttgaattgaaatggataaagaagtctcgtaaaccactaccaatccgatgaacaacaagcgaaattcagtcaaatgcattgttcttaaaatccacttacgtgcgttcattccatgagactctctggaggactgtcctttcaaagtgtgctctctagcctctgcatcccacattccgtattccctcggttcgctaccatctgattccaacatctgccaaggaacttgaagcaccccgcatgaagttcatagcatacctcagaagagaaaagatcgagtaattttagggtaaaaccgccatactcaacatttgattttggcgcaggatttgtttcgatcttggg

SEQ ID NO: 1915 - DNA, 924 bp, Arabidopsis thaliana
  Intron number 2 from transcript AT5G52040.2 (locus AT5G520 40) derived from phytozome v7.0 (chr-ID Chr5; pos 21131180 to 21132103)
aaagctggtaagtcttggttcttgtttttctttatactttctcttagtttttctgtttggttgaattgaaatggataaagaagtctcgtaaaccactaccaatccgatgaacaacaagcgaaattcagtcaaatgcattgttcttaaaatccacttacgtgcgttcattccatgagactctctggaggactgtcctttcaaagtgtgctctctagcctctgcatcccacattccgtattccctcggttcgctaccatctgattccaacatctgccaaggaacttgaagcaccccgcatgaagttcatagcatacctcagaagagaaaagatcgagtaattttagggtaaaaccgccatactcaacatttgattttggcgcaggatttgtttcgatcttgggatgcccattctcccacacagcccattgatggacaatatggaaaatccatttcctgcccaaaagagtcaacctcatccacgcaatggcactacgttcccataaccccgactttagttgcatttcattcctcttgacttttctcctcttcgagatgcacatgcctctttggtagacttataccaacctctcacagcagaggcagcaaatcaaatggagtttgcgccaccacgtttctgttcacaattccgtctcatctcctcctcattttcagttcttcttctttgacatattaattccataatgcaaggtctgtaaaactacttatagtttgtagagattttaggttcaaaacttatttgtcacagtaagtagtaaaggctgttttgatactgccgtggaagggagagtcttcatattagaattcctcttggaggaggttctttttcttggtttacttgataagattgttctcatgttctgactttcccttttggttctctccccagggtttgcttttgtctat

SEQ ID NO: 1916 - DNA, 497 bp, Arabidopsis thaliana
  Intron number 2 from transcript AT5G52040.3 (locus AT5G520 40) derived from phytozome v7.0 (chr-ID Chr5; pos 21131084 to 21131580)
aagcctgtcttttgcggaaactttgagtatgatgctcgtgagagtgatcttgagcggcttttcagaaagtacggcaaggttgagagggttgatatgaaagctggtaagtcttggttcttgtttttctttatactttctcttagtttttctgtttggttgaattgaaatggataaagaagtctcgtaaaccactaccaatccgatgaacaacaagcgaaattcagtcaaatgcattgttcttaaaatccacttacgtgcgttcattccatgagactctctggaggactgtcctttcaaagtgtgctctctagcctctgcatcccacattccgtattccctcggttcgctaccatctgattccaacatctgccaaggaacttgaagcaccccgcatgaagttcatagcatacctcagaagagaaaagatcgagtaattttagggtaaaaccgccatactcaacatttgattttggcgcaggatttgtttcgatcttggg

SEQ ID NO: 1917 - DNA, 797 bp, Arabidopsis thaliana
  Intron number 1 from transcript AT5G52070.1 (locus AT5G520 70) derived from phytozome v7.0 (chr-ID Chr5; pos 21161319 to 21162115)
ttccagatctgaagcttgaagtggagtcctatcaggtatttcactttttctctttttatccttttgctcgttgtgattatggtcgagttttgtgtgagaaacgtcttttgaaaagcagaattctcaaacagctttgggatatagtttttggaactccaagttttaatttaagcctaattttgaagatgaattgtcagtataaatctttgatctgatactctattagttagtatgtgaatttctttttaacaattttcttattcatgcgagagctatcaataagtattagaacaaagttttatactgacaattcaatcttacctgattttcaaaaaaaagtatatcttgaaattttgtcttgggtagagtctttgattttgctagatagtagcattaggtgttagatgtttttattcagaatttgaatgtttgctatgaactatctagattaatctacttgtggattagactactctccacatgttttgggttataatgatgtaaatatcaaaacattgatggagtagatggggtggtctagtcaactaaggtattctcaaaaattgaatggtctagtccgcactgctaatggatgaccatctatatgtttagtaccttatatatcaaatgatctttcatttttccttggacaataatggctatggtcattacagtctcttttgcttcttcaaaataattttaagcaaatctgagatgttgtgagagatcattactccacccaactctaactcatagtataagttttactatgtgcagttctcatcttggaaaaaaaa

SEQ ID NO: 1918 - DNA, 892 bp, Arabidopsis thaliana
  Intron number 2 from transcript AT5G52230.2 (locus AT5G522 30) derived from phytozome v7.0 (chr-ID Chr5; pos 21210673 to 21211564 reverse strand)
ggagaaaggataaggtgatttatgagttttaaacccttttcttaattttgattgtcttttgcatgtttggttcttgttagctccttttgtggaaattgtagttatctttattgaagtgccaaatactttgattcactcttagtttctgattgtatgattttgtaatgatggaaaaaggtgaagtcttttgtgacgtttgagtgattttctcttgcatgcaatgcttagcttttagggaaagatgacatgtgatcaaaagagaagaggtctagttgattaagtgtctgaaaatggtcttgacctgactttttgttttgttatagatgatgtagtttgatcaaagctttgttatgtagctacattttgaactcaattgattttacttggttccactgtggcttagaaagctcttattacttgtgtgcatgattggagatgtttattttttttaagtttttcttgaatttttaaaagtttgtctcttagtttacttcgtgtgaaaaggaattatatggttactttactgagatggttagacattaagagtaatagatcttgtgaaaatgaatttggattgttaagtaaccatcttcgagagaatactgtaatattcgtaagcactaaaactttgtacctctcgcgtatgcaaagggaaagttttgagatgaatcacatttatattggcaagggtctggtattaggttgttcatggaaagttcataagcacagaatatctgagagttttgtgttgtttatatgtttgaagacaatgttactttgttctttgtgatccctaaaaagatttgacatttatacgtctcttaaaatgaaaaactctttatgtttaagtgatacaggttatagttgagaaatctgctgctcaaggtttacc

SEQ ID NO: 1919 - DNA, 788 bp, Arabidopsis thaliana
  Intron number 1 from transcript AT5G52240.2 (locus AT5G522 40) derived from phytozome v7.0 (chr-ID Chr5; pos 21213428 to 21214215)
ttacacaaagcaggtgaaatttctgaatctaaaaagcgaaattaggttatgggtttgattcattgtttcctctaatcttgttttagcgtataaagacttggactttgcatacttttatgatctataaagctgtgagaatcgtaaagttgttcactttgagaatcaatttcacaaaggagttttgttttgagaatcaatttcagaaaagcacattggaaaagttgatcctttttgttacttttatacaagagaaagattcaaaggaatatgtttttgttgttgatgtttgctagtgattgagatcatgttgtgaaatatcttagctctatcttcgagtataatcaatctcttagactggttttagtgtctcaagtgttgtgtttgtaatgaaaggttggatttttattgtcttcctcaaatctcgttttactctataacaacttggactttgcatagttttatctatgaagctgtgatatccataaagttgttcactttgagaatcaatttcacaaaagttgtgcttttctatgtaatcgagcttttgagtggcatagtgttaatttacccttttgcttccttcatacaagaacaggattcaaaggaagttgtaatatgttcttgttgttaatgtctgcttgtggttgagatctttagtgaaaactctttgttaatctttgagtataatgaattgatcatcttcttatgatagtctagtctggtttttgcgtatttaaattaaatgttgtgtttgtgatgaaaggtttgatatttattggttttgtagg

SEQ ID NO: 1920 - DNA, 732 bp, Arabidopsis thaliana
  Intron number 1 from transcript AT5G52530.1 (locus AT5G525 30) derived from phytozome v7.0 (chr-ID Chr5; pos 21317464 to 21318195)
tgtatttgagtgaggaggaaggagaaatataaaaagtaggtggagactcaggtatatgaaaaccctaagttctttgattactactgctctttgtttattggttcaatcaaggagagatctgttttgcttatggacgtcaatggaagatcccttaggctgcgatacgcttcgaatattcttttcgccatggaagatcccttaggtttctgcaattttcttgggagatctcttaatcatgagaacgatttctttttaactcatcttcctcaggaacttagtggacatgagtctagcctttacccttctgatttggctcatctatatgatagaattaggacacgatgatactctgattttgggcaagtttaatggatcttggcttcacgcggccattcaagtttttccagaatcttcgatttggccaagggcagtgatctgaagtcagatttaatcggactagaaacatgaataaatacttgttttgtatgcttttaatgtcaaaactctggaggtttttttcagacttatagcgcaatctgtcttaaggtaaaggctcatagagtctttaacttgactgtctagctatgaagtttttttgcctgcagtgactctattattgtatactagaagtaggcaatagctcttgcttatgttttttttttaatatggtttactaatgaaaggttattgcttgcaggtgaggtaagcgttcataaaacaaaaatcaagttt

SEQ ID NO: 1921 - DNA, 716 bp, Arabidopsis thaliana
  Intron number 1 from transcript AT5G52530.2 (locus AT5G525 30) derived from phytozome v7.0 (chr-ID Chr5; pos 21317480 to 21318195)
ggaaggagaaatataaaaagtaggtggagactcaggtatatgaaaaccctaagttctttgattactactgctctttgtttattggttcaatcaaggagagatctgttttgcttatggacgtcaatggaagatcccttaggctgcgatacgcttcgaatattcttttcgccatggaagatcccttaggtttctgcaattttcttgggagatctcttaatcatgagaacgatttctttttaactcatcttcctcaggaacttagtggacatgagtctagcctttacccttctgatttggctcatctatatgatagaattaggacacgatgatactctgattttgggcaagtttaatggatcttggcttcacgcggccattcaagtttttccagaatcttcgatttggccaagggcagtgatctgaagtcagatttaatcggactagaaacatgaataaatacttgttttgtatgcttttaatgtcaaaactctggaggtttttttcagacttatagcgcaatctgtcttaaggtaaaggctcatagagtctttaacttgactgtctagctatgaagtttttttgcctgcagtgactctattattgtatactagaagtaggcaatagctcttgcttatgttttttttttaatatggtttactaatgaaaggttattgcttgcaggtgaggtaagcgttcataaaacaaaaatcaagttt

SEQ ID NO: 1922 - DNA, 708 bp, Arabidopsis thaliana
  Intron number 1 from transcript AT5G52545.1 (locus AT5G525 45) derived from phytozome v7.0 (chr-ID Chr5; pos 21324889 to 21325596 reverse strand)
gaagtctgcgtctgtgagatcacgctttagctttgtaagttgctttccatggatactctctaaatctttacaacatttttcatctgttattagttcccaagttgcatatgaactctctgcttcttctctccatcgttgttcagttgtaatcgaagtaggtgcctaggttgactagctagtaattaccaccactcaacgaaatccatgaggttttggcgatgaatttagggatttctgtccaattttgaattgtttctggtgtttctcttaattgattattgtaagattaagattcatgtcggggaatagttactctaagttcatcaatcacacttagaacagacaataaatttgaccacagatcttgttcaatagatagagagcttaaggtttatcttcttttgtgcttactaaacaactgcaattctcatggagaagcctctgtttttttttatagtgtttaagcaaatatagagagtagtaactaactggagtattgttagattgatttatgcctttcttttgtggcttttgatcaaagattggtcatgtctcgtgtgccattattttcggtttatggtccttatgtgaaagtgtttattttaaattctttctcatctaaagtgttgaagaatagtttgattgttgtattggccttaaagcatttgtactcttactgaattcttgagagctgttattttcaggtgg

SEQ ID NO: 1923 - DNA, 369 bp, Arabidopsis thaliana
  Intron number 1 from transcript AT5G52560.1 (locus AT5G525 60) derived from phytozome v7.0 (chr-ID Chr5; pos 21330844 to 21331212)
tctctacaattccccagtcgtcgaagaagctacaggtaaaccgatcttctcaattttcatctcttctcgtcgcattatgctcatacctcgccgcgagaggatatcaaaaagcgagatttgttatttttgcatccgagaattttggttatggattacacaaccgaattaatcgaaattctctttgttcgtgtttcccttgatcgccacgaaagtttcagatttttttttggatttcttaaccgaatttagtttaatcttgctcatgttctgtttcataccatgttctgaaatattgtttttttgaatcataccttttgaaactcatcgccaccagcttgcaatttgctcgtgttctcttccatcattcct

SEQ ID NO: 1924 - DNA, 846 bp, Arabidopsis thaliana
  Intron number 1 from transcript AT5G52890.2 (locus AT5G528 90) derived from phytozome v7.0 (chr-ID Chr5; pos 21446198 to 21447043 reverse strand)
gaagcaaacatttctctccgtcgcgaacctaatcggtgagtgtttcttttatatccccagtttgattttgccgggaaatttttcgttttcttggttgattaatcaatttttaggttattgttggaatctaggttttatctcttcgttgttctgtttctgtttagattctcgaatactttgtgtttacagggtttccttttttcctttggttatcttgtaatcgttgagattcttgtttccgtggcttatacataatccatctgatcataaactattttgatttgatttcatggggagctaaaaattgattcttttcttgctttatgaggaatatagaagattttagaatcatttttattgtctttctgaagtacgagagtttgtgatttgaagtgttgaatctaaagtttctttatttgtcttgtgaggaagttgcatttccttaaaggttactgtttggggatttactgacgtatatgtatgattgaacaaaatggtaacttggttctttatgttaaaagtcaatcacagttttgcattgtcatctatctttgaggataaagttagtgaagtgtcaagctaatagtcgattttgtaggctataatgtgatcttgtttccgtcgcttgctgttatgtgaattgtcgttctgtttgattgttctgaaaattgatgaataggtgctttgttcagatagataatgattgaagtttgggtttgtgtagttttctgttaaataatggtaactatgagaacactaatgaaactaagagaatttacttttttgttgatttttttgctagacgactattgttgatcaagaagaaggttttaaagttgaaagatc

SEQ ID NO: 1925 - DNA, 837 bp, Arabidopsis thaliana
  Intron number 1 from transcript AT5G52890.1 (locus AT5G528 90) derived from phytozome v7.0 (chr-ID Chr5; pos 21446207 to 21447043 reverse strand)
gaagcaaacatttctctccgtcgcgaacctaatcggtgagtgtttcttttatatccccagtttgattttgccgggaaatttttcgttttcttggttgattaatcaatttttaggttattgttggaatctaggttttatctcttcgttgttctgtttctgtttagattctcgaatactttgtgtttacagggtttccttttttcctttggttatcttgtaatcgttgagattcttgtttccgtggcttatacataatccatctgatcataaactattttgatttgatttcatggggagctaaaaattgattcttttcttgctttatgaggaatatagaagattttagaatcatttttattgtctttctgaagtacgagagtttgtgatttgaagtgttgaatctaaagtttctttatttgtcttgtgaggaagttgcatttccttaaaggttactgtttggggatttactgacgtatatgtatgattgaacaaaatggtaacttggttctttatgttaaaagtcaatcacagttttgcattgtcatctatctttgaggataaagttagtgaagtgtcaagctaatagtcgattttgtaggctataatgtgatcttgtttccgtcgcttgctgttatgtgaattgtcgttctgtttgattgttctgaaaattgatgaataggtgctttgttcagatagataatgattgaagtttgggtttgtgtagttttctgttaaataatggtaactatgagaacactaatgaaactaagagaatttacttttttgttgatttttttgctagacgactattgttgatcaagaagaaggttttaaagt

SEQ ID NO: 1926 - DNA, 546 bp, Arabidopsis thaliana
  Intron number 1 from transcript AT5G53905.1 (locus AT5G539 05) derived from phytozome v7.0 (chr-ID Chr5; pos 21888437 to 21888982 reverse strand)
cgcacacacgacacctcaactccctgtcatccctggttatcccatcgatctcaaaaaatgtttgtcatcacttgtcaatgtttaaggttgcgtaactgaaatctataaatcagtttttacaagaaagtttgataatgttggaccaattaatgcgttgcacgacgttgtcggcaatagatgcaaagtgttgcccacaaatatttccactaaatccgttcttccctcctcttctcaaaagtgaatattctcgcatcaagagagccgatcctacacacaagtgaagtatctatgggaccattcacaatgttttaatttaggctcattatagattctagttccaaaattcaagaattatctctaaatcagtcatgaaagacattcacatggatgttggtttgttctaggttttcaatatctacaatgatcgatatacaaatttaagtttatggcaaaaaaaagaaaaaaggaaagggacctgtcagaccgccgtgcgaccaccccggcaaggtagaaaccgagccgagtaacgatcctctacagcaccgg

SEQ ID NO: 1927 - DNA, 866 bp, Arabidopsis thaliana
  Intron number 1 from transcript AT5G54310.1 (locus AT5G543 10) derived from phytozome v7.0 (chr-ID Chr5; pos 22060164 to 22061029 reverse strand)
cccgccatagaaaggtctctctctaatctcgaatctcagattctcttattttattttctccgagctttgtggatttgtcgtcatatatttgaatttggttgccaacaatatatgatcgatcttaattcgattggatctgtgcattagcagctatccttccttcattttcttcggtttcctctagttaggagaggatttgtatcgtcgatccttatcttcttcgatcgattgagctagaattattattcatcagcaatgaaaatcagtttctctatttcgatttgttgtctaggacaatagttgatcacgatcgggtttttgaattgttttatattcaacgtcggcttattgaatgttacagtttcatggagcttgaattctagtgttttcctatagaaattcgtattcaattgtttgattttggaaagaatcgaacacagggatccaaggagcttagcgtcccatagggattttcatttgtgcttggtagtctttgagttatttgccatgttgaaactattagttgtagttgggatagctttgtgggattggtgatgcatacatgtataggatattaggaatgatgttgtatgtcgagtcttcgagaactttggtgttcattcattgacgaaacttatctcatactgcaatgagaactttgattcattttggttagttaaacatgtcaattctgataattttgaagttttcttgagatactctatattttgtatgtgtagattcttctttatgttttgcgacgtatgattttttcgtttatgtagtctattgcttgaatattcatttgattttggtgctacttatctgcagattcttgaagggcttcttaaacatccagagaacag

SEQ ID NO: 1928 - DNA, 712 bp, Arabidopsis thaliana
  Intron number 1 from transcript AT5G54580.1 (locus AT5G545 80) derived from phytozome v7.0 (chr-ID Chr5; pos 22171481 to 22172192)
tcaggctgaacctagcaccaatctcttcgtctccggtaacaaacccttttcatctctcaattcatttcgagggtttatcgttgttagagtctatgtctgtttctatttgatgctttttaaagatccttcctttttgaattcagatttagattatcaggttcgtctaacatcaactaagattgtactctatgtgtttaagaatttgataagttcaattattcatttttggttctgatttccagaaaaatgtctactttcgattgcttaactctaggaatgaactgtaagagttaaagagagtttctttgcactcaattacttgagaattcggttttttcggttaaaatttggatgctatgtgtaccggatcagtgtcttgtttcaagggtctatgtgggctgtttctaacatcttcaaggcttctgtttttgtaaagtgcttcctagtatcaattagtttttgaaatactgctcaacattgggctttgatgcaagcaattttgattaggctattacttattgttccttcatagcctctgtttctcacttttatcacatggccattgaacatctcatacatacatctaaggaattttatgtgttcgatgctgtgtctcagtttcgtgaaagtgtcttcttctcatgttatctttatctttgtgtcactgaatatttcagggcttagtaagcgcaccacttctgaaggactaagg

SEQ ID NO: 1929 - DNA, 706 bp, Arabidopsis thaliana
  Intron number 1 from transcript AT5G54650.1 (locus AT5G546 50) derived from phytozome v7.0 (chr-ID Chr5; pos 22200775 to 22201480 reverse strand)
aacatgtaaagatagtttttttgcttttcaagcttgtttgattattttgtagctctctagtgtacttttgatgggaaagttgcgagacattgctttttgtttcttgctgaaagctatgttttagagactgagattgcatttttgggtttgtatcatgtaccctgtaagaatctaggtgtctgagaaagagaattatgatcattagcttgtatcctgctatataaagtcgataggttttgaattatgtgttattcatgtaatagtcttgacttacgttttaatcaatggagtcatattcagagaacaatttgttgctgctaaagctttcagttcacgcttgtcgctatcgtgatatgttttcgtttgtaaggcattcctatggtctgtgtgtgataaaactagaagatcaagtagctccgtagtagattttatccagacagaattgcgagtcatagcttgtttcttgctgaaagcttaggtctttagagactaagatcacattttttgtttttgattcatgttctctataagaaagctaagatcatctcagaacgattcttgcaaaatagtttggattcgccatttgtaatcatacttggaattatagttggctctctcttatttactgatatgcttttcaaaatgttttatagctcttatagttgtttctctcttgtttgtacaatgtttgacaggaagaaacatc

SEQ ID NO: 1930 - DNA, 529 bp, Arabidopsis thaliana
  Intron number 1 from transcript AT5G54750.2 (locus AT5G547 50) derived from phytozome v7.0 (chr-ID Chr5; pos 22241551 to 22242079)
tgtcttttgcttctgggttttgcttcttatttttggtaagattgaatttttctttcaccccatttattatttcgtgcttttagatcgttgattgatctgtatcctgcagtgatcattctttaatttacgaaattgttttttgtgtgtgtgtgtgtgtgtgtgtgtgtgtgattgataatgttgttggggactttaggtgccatttttgtcgattttgtggtttaatttacctattgtatattgtgattgaatcgattgggagggtattgagaggtggttgtttcaatctaacaaaatcaagtgcaaatccattttatagccacttatcttctgctagtagatctacttgagttttaagagatgtgtcttctttaataccattgtggttccttttttaatttcatggcttaagtgaatgttttttggcttctttggttgctatagcttatctctgatttgattaagtagaatcctttgtactgaagtgactttttttgtatggatctaatgtagaatatagtcattggag

SEQ ID NO: 1931 - DNA, 313 bp, Arabidopsis thaliana
  Intron number 3 from transcript AT5G54750.1 (locus AT5G547 50) derived from phytozome v7.0 (chr-ID Chr5; pos 22242467 to 22242779)
gaagtagaggaagttaacaaacagcttgatcaaatgtattcttcttctacgatttatgtagactctcttccatggttttagttttgtatttttgtcatcttgcatttgtatatttcattcttgtgtttgaattttggttgcattatgtttctggttcttttgttcatatatctttctaataatatgtcatggatgggatgaataaagcattgtactctcaggttcatactgatgagtgttcgattgtttagacctttatcactaattttctgtttattttgcaggggatacaacattggaatccgacttatcg

SEQ ID NO: 1932 - DNA, 777 bp, Arabidopsis thaliana
  Intron number 1 from transcript AT5G54760.2 (locus AT5G547 60) derived from phytozome v7.0 (chr-ID Chr5; pos 22243952 to 22244728)
atcagatcttcaaaaccccaaaatttgcaaatcaggtaataactttctccgtatgtatctcttcgatcaccgattgtctgtttctttgtttgcttttctcgatccgttattgaatttttgagttcgtcgttaaattttgattacatcaatttttcttttcgattcgattcagagagattgaattgcaaattatgtgccagatcttcgtgttctgtatctgattccggatcttggttattagttttttttttgttgttggaatgaattcaacaacgatgattttgatttggtcaattgattttttaatgctatagttttaaccttataggaatgtaattgaactggatcagctttacttgaattgtttggatctagattattcagacaacatctttttaactaaattgaaacatatttgtgtttgtgttcttgatgatcatgtgaatttggtagcataattttcttgttgagatgatttctgagatgggtttttgtagtttaattttcttactcgatgaaccatctcgtgcaccttgcaaaatcttttgttctatatctcattgttcgatatcaaactaatgaggttaacgttttttggtgagacgaccagttatgtaacatgttgttaactatcttcatgtttgaatcgattttgattggatgttttcatgttctatcatattctgcggttttgaatcttctgaattctaacgtgaggttatccttcttgtgcagatctcagcttcccggttagtactaccctcaaatcaactaagt

SEQ ID NO: 1933 - DNA, 755 bp, Arabidopsis thaliana
  Intron number 1 from transcript AT5G54760.3 (locus AT5G547 60) derived from phytozome v7.0 (chr-ID Chr5; pos 22243967 to 22244721)
ccccaaaatttgcaaatcaggtaataactttctccgtatgtatctcttcgatcaccgattgtctgtttctttgtttgcttttctcgatccgttattgaatttttgagttcgtcgttaaattttgattacatcaatttttcttttcgattcgattcagagagattgaattgcaaattatgtgccagatcttcgtgttctgtatctgattccggatcttggttattagttttttttttgttgttggaatgaattcaacaacgatgattttgatttggtcaattgattttttaatgctatagttttaaccttataggaatgtaattgaactggatcagctttacttgaattgtttggatctagattattcagacaacatctttttaactaaattgaaacatatttgtgtttgtgttcttgatgatcatgtgaatttggtagcataattttcttgttgagatgatttctgagatgggtttttgtagtttaattttcttactcgatgaaccatctcgtgcaccttgcaaaatcttttgttctatatctcattgttcgatatcaaactaatgaggttaacgttttttggtgagacgaccagttatgtaacatgttgttaactatcttcatgtttgaatcgattttgattggatgttttcatgttctatcatattctgcggttttgaatcttctgaattctaacgtgaggttatccttcttgtgcagatctcagcttcccggttagtactaccctcaaatca

SEQ ID NO: 1934 - DNA, 953 bp, Arabidopsis thaliana
  Intron number 1 from transcript AT5G54855.1 (locus AT5G548 55) derived from phytozome v7.0 (chr-ID Chr5; pos 22283053 to 22284005)
ttcttgaaggttagtatctctgtccctcttctttatgtcttctctttagtcagttttagatgttcgattgctgggaagaagaacaattgtctgattttgagaaattctttggatttaactgtgtagaactctggattcacttttaagtagtgcttcttcagaaagagtgttgctttgctaatgttctgatggatttcttcagagtgattactgttcaattcagtagtagttgtttctcactcatcaaattggtgtgaatttcttcagagtagtttattagcccgaagcttgttggtactgtttgttcttatttcttgagcaaatggtgcatatcttggtgagtgtgtgtctacagtttttgcagattcttatttttcttttttaataacataaatcaaagttagaggggattttgtttagtatcatctctggtctctctgcgacataaaaatctgttatgttcattttccttatgtttttagctgcgcttttgtatatatcctatagtgtcaaatgttttttgcagattatgttatacttctatgcgaaatcttttcaagttttctgattcatatttggttctctgaattccatgaatcaaatttaggagagcttatggcttggatcatctcttgtctctccggaacttagtaattagtttgttcatccttgtgtttccagctagttttatgtattatccgatagtgttaatgatttttccacactgcttcatattccaaatagtcttgttgataactcaaaaccgggattgcttagaagccactcggttttatgtgtttaccattctgctagtgaaatgatctctttggcacttttaaccgtgttatgtgatccagtcacttcatatcattgacgtatcaatcacatttgcgagctgttattgttcaatctttacaggagctgaggttgcggttctgtgcataaccaaatct

SEQ ID NO: 1935 - DNA, 665 bp, Arabidopsis thaliana
  Intron number 1 from transcript AT5G54930.2 (locus AT5G549 30) derived from phytozome v7.0 (chr-ID Chr5; pos 22306851 to 22307515 reverse strand)
agaaagctgaagaaagggagacgaaaaattcgcaggtctgtgttttttctctctgtcttctatgtctctgtgttttacaccgaaattgacggaaaaagtttaaagcttttgtttcctgtgtcgtgctttgttttggttattttgggtaataatactgtgtgtttcttcactcgattttttttttgaaatccgagattttttgttttttctggggttgtctatgtgatttgattctagggctactgagagattgctaattttgtttcttgtgtgtgttgattagtggtttgattttgagttaatttgtaattaggagtcttgattttaagggtttagaaatggttgcatgttcttttggattactggatcttatctgctttaatcccaggtttttagtagaaatgtgaataaaattacagtttcattattcagtttttttcttggattgtgaaagttatttgtaaaaaaaaaaagtttacatttttgaaacttgttttggttttggttaaagattttgtttatagaacatctgagatttttaacttctcgttactgtgatgatctttggtgttgtactgtcaattgtgtgtattgacgattttcacctgtgttttatatttactgtctcagaggaactatagccaacactagtcactgcaatatcg

SEQ ID NO: 1936 - DNA, 804 bp, Arabidopsis thaliana
  Intron number 1 from transcript AT5G55060.2 (locus AT5G550 60) derived from phytozome v7.0 (chr-ID Chr5; pos 22342147 to 22342950)
ggagcgcgtcttcactgatctcaaatctgatcgaggttttattctatttcctcttatctctccattcccgtagcttccgcttcaatattgacttaattttgttttttttgttcttccaaattttctcatttactaaaatttgactgatgaatagatgcttatcgctcgacctctgattgtatctgttgttgtggattaattcgaattctatatttgggttcttctctcttgtcaaattcaaatctatttctgttgtttctctttgtttctggagtcaaaattcaaatctatttggtgatgttttattgattttttttcttttttaaattggaattttgttggagaggaggagaagcaatcgacgaggaatgtgaatgactctcaggtagcttctttgcatagaaaacacaattgtggaatcattcttgagcaatggaatcaatagattcgatagaaaaaaattctggggaaaatgaatagaaatagagtaatatcaatgatgtgaagattatacaatttaaaggatttgccttttggtattgagaagtagtaagctagtcactttcttgctcaccaaaattgcagaacatatgtatgtgtttttgtggatgatgagaagaaaaaagaagtttacttgatccattatagagactgtcaaagagctgtacagtgttataggtgttggacaatattcagcatttcgttgagcttttgaagtttcatgatgaagtgtgttgtgagtgttgactatagggatgttttttttggtttacgctaattggcaatgctgggaacaggaggaga

SEQ ID NO: 1937 - DNA, 368 bp, Arabidopsis thaliana
  Intron number 1 from transcript AT5G55060.1 (locus AT5G550 60) derived from phytozome v7.0 (chr-ID Chr5; pos 22342147 to 22342514)
ggagcgcgtcttcactgatctcaaatctgatcgaggttttattctatttcctcttatctctccattcccgtagcttccgcttcaatattgacttaattttgttttttttgttcttccaaattttctcatttactaaaatttgactgatgaatagatgcttatcgctcgacctctgattgtatctgttgttgtggattaattcgaattctatatttgggttcttctctcttgtcaaattcaaatctatttctgttgtttctctttgtttctggagtcaaaattcaaatctatttggtgatgttttattgattttttttcttttttaaattggaattttgttggagaggaggagaagcaatcgacgagga

SEQ ID NO: 1938 - DNA, 945 bp, Arabidopsis thaliana
  Intron number 1 from transcript AT5G55530.3 (locus AT5G555 30) derived from phytozome v7.0 (chr-ID Chr5; pos 22493494 to 22494438)
gcctcagatcagagcttggttttggatttaggcaagttttcttaagtaatcagctttaccatttctgttgtctgtgttgattgattgtaagctgtggcaggatttttgagtttctttgatgattggatcgagcaagaaactttgaaactttcagttaattgatgccttggttagagtttgaatttgtatgaaaccgctcataaattgtttgacttggttagagtttgaatttaaagacttggtaatacctaaacttgactctagttcaaaatttctttattgttgaatgtgttatcatctatgttgagattagccttgaattgttgtctaaacttgatctgtggattttggctgtgttgattgttgatgcatccatcttgaattacaagtgactatattgtgagttgggatctaagggagcagagttcgtttccttgttcttgagattctctctattagctctgctctgcgtagtttaggcctataacgttctcaattctgattttgacatgaaactgtccttttggttggtgtatctcccttacatatagttttcaaaatctgttaatcaacattgtttgagttttaattatgatctaaatttttgttttctttcccaaatttttattttaaaacttgatctttcggtttatattacattctgatatattatcacaagatcccgttctttccgggttcagtcttaatatctgctaggctgttagacgcattatagaatagcccgtttgcttgctaaagataccatggcatggtgaatattaacaaattgctcagcttggtgttgtacttatcatggacacatagttcactttttttttagtcatgtctcttctggatgtgcaagtttccaacaatagactctatctacatgtgctgatactaataggccttcatcttttgcaggattgtttgttaggttttaca

SEQ ID NO: 1939 - DNA, 949 bp, Arabidopsis thaliana
  Intron number 1 from transcript AT5G55530.1 (locus AT5G555 30) derived from phytozome v7.0 (chr-ID Chr5; pos 22493490 to 22494438)
agctgcctcagatcagagcttggttttggatttaggcaagttttcttaagtaatcagctttaccatttctgttgtctgtgttgattgattgtaagctgtggcaggatttttgagtttctttgatgattggatcgagcaagaaactttgaaactttcagttaattgatgccttggttagagtttgaatttgtatgaaaccgctcataaattgtttgacttggttagagtttgaatttaaagacttggtaatacctaaacttgactctagttcaaaatttctttattgttgaatgtgttatcatctatgttgagattagccttgaattgttgtctaaacttgatctgtggattttggctgtgttgattgttgatgcatccatcttgaattacaagtgactatattgtgagttgggatctaagggagcagagttcgtttccttgttcttgagattctctctattagctctgctctgcgtagtttaggcctataacgttctcaattctgattttgacatgaaactgtccttttggttggtgtatctcccttacatatagttttcaaaatctgttaatcaacattgtttgagttttaattatgatctaaatttttgttttctttcccaaatttttattttaaaacttgatctttcggtttatattacattctgatatattatcacaagatcccgttctttccgggttcagtcttaatatctgctaggctgttagacgcattatagaatagcccgtttgcttgctaaagataccatggcatggtgaatattaacaaattgctcagcttggtgttgtacttatcatggacacatagttcactttttttttagtcatgtctcttctggatgtgcaagtttccaacaatagactctatctacatgtgctgatactaataggccttcatcttttgcaggattgtttgttaggttttaca

SEQ ID NO: 1940 - DNA, 838 bp, Arabidopsis thaliana
  Intron number 2 from transcript AT5G55850.3 (locus AT5G558 50) derived from phytozome v7.0 (chr-ID Chr5; pos 22603737 to 22604574)
tttccttttgattggagggtttttgttgtttcttttatatccgctgaaaatcttagattaaatagaaaaacagatgtgaaattgtgattctgatgagctattgtcttgttgttgaatctgataatcctgattctggatctcgggttttattcaagttttgatctttttctgaatttgattgattaagcttagatttttgattcagggtttctgattttggatttgagatgaaataaaggtttgataaagagaagttgttttgttgtctttgtgttagcttatctttttttccccagattgttgttctttgattttattgatagtgaaagaggcatgaatattgtgtggcattgtttatggacaagcaaaagttctttttgccttgtggatttgtttgcttatttagagacacaattgaaatccactagtttcaaacttttggttttattattttctcacctaatcaaatggattataaagttgtttggaactttaaaatttctcttatggtttggttttggtaatccttttgacttgtgctctatattgtttgctacaaaatggaattataattagtttgggcaaattgtacaaaccattttttcctcgttattgatgatagaaaaggttccattccttaagtcctcattcttatttacttggttgattctttttttcggtttatccttgcctcttctcttttgtatgtgctcccacttaagacttgcttagcttatgaattcatctacttggcaagattgaacttatttcttgatttcaccatttggtttttatatgaacaacaggacaaaggtcgtcccttgccaaaatttggtga

SEQ ID NO: 1941 - DNA, 955 bp, Arabidopsis thaliana
  Intron number 1 from transcript AT5G55850.1 (locus AT5G558 50) derived from phytozome v7.0 (chr-ID Chr5; pos 22603620 to 22604574)
tcggtgcgtttaaatctcctctctttattatatacatatgcttgagaacagttttgaattcgatttgtttggttttgagaattttagtttcgttttggtgagttagatgattatatgtttccttttgattggagggtttttgttgtttcttttatatccgctgaaaatcttagattaaatagaaaaacagatgtgaaattgtgattctgatgagctattgtcttgttgttgaatctgataatcctgattctggatctcgggttttattcaagttttgatctttttctgaatttgattgattaagcttagatttttgattcagggtttctgattttggatttgagatgaaataaaggtttgataaagagaagttgttttgttgtctttgtgttagcttatctttttttccccagattgttgttctttgattttattgatagtgaaagaggcatgaatattgtgtggcattgtttatggacaagcaaaagttctttttgccttgtggatttgtttgcttatttagagacacaattgaaatccactagtttcaaacttttggttttattattttctcacctaatcaaatggattataaagttgtttggaactttaaaatttctcttatggtttggttttggtaatccttttgacttgtgctctatattgtttgctacaaaatggaattataattagtttgggcaaattgtacaaaccattttttcctcgttattgatgatagaaaaggttccattccttaagtcctcattcttatttacttggttgattctttttttcggtttatccttgcctcttctcttttgtatgtgctcccacttaagacttgcttagcttatgaattcatctacttggcaagattgaacttatttcttgatttcaccatttggtttttatatgaacaacaggacaaaggtcgtcccttgccaaaatttggtga

SEQ ID NO: 1942 - DNA, 392 bp, Arabidopsis thaliana
  Intron number 1 from transcript AT5G55860.1 (locus AT5G558 60) derived from phytozome v7.0 (chr-ID Chr5; pos 22609741 to 22610132)
agaaaaacaaaaaaaattcaaaccgcaacgatcaggtacgaatcgaattttttttgtcaccatcgcttgttttgaagatttcttcgtcggtggaagagacgcttcttttattctaagattagcctctttggtttgtagaatctgtaacaaattttggtgattatgtttaattaaaagttaccatctttgatcttcgtttaattaatctttcccttaataacatgttcttagggttttgattttttccttatgtgtgtactgtttgatatttacttaatttgcttaatcttctattaatggaacagaaataaactgattttgagctctctgtgtttgtgttgtctctctctgtatcaggtagtgaatccttgattttatagtctatataaaga

SEQ ID NO: 1943 - DNA, 464 bp, Arabidopsis thaliana
  Intron number 2 from transcript AT5G56240.2 (locus AT5G562 40) derived from phytozome v7.0 (chr-ID Chr5; pos 22762986 to 22763449 reverse strand)
ttaggtcaatcccatctctccaatttctccatcaggtaaatttcattatcctttttcttttcctctgaatctattttcttcttctgggtttcttcgccaatatggttttgtttgtctcacaaaaaaaaaagtctctggatttcatgatgggtcagtgtcaaatcatagctcgagatcgaaagttataagcttttcttctttcttccttgtagtataattactaatgggtcagtcttcaaagtttctttctttcttcttccaccttctgtgatttctgtgattagaaatcagtatcatcaaattttgttccttttctcaaaatttccttaaatatgcttccttttgagttttatcttgtgttaatgtttatctctaatttctagagtttgaaagtaatcaactttgttttatctatgtgatgctttgcagagattacgcatatagtaacaggaagaacaacatta

SEQ ID NO: 1944 - DNA, 833 bp, Arabidopsis thaliana
  Intron number 1 from transcript AT5G56240.2 (locus AT5G562 40) derived from phytozome v7.0 (chr-ID Chr5; pos 22763615 to 22764447 reverse strand)
ccacttttttcttcttttgccaagaaaatctaaaggtttgtgtataccttcgtttcatcaaatccatcaacacttagtttcgtttcttgttcttgtccttgttttaaagtttgtagatttagttactcttctttttccttctctttgatctcttatttgatcttaagatccaaatcttgaaatctacgagattggtatgtgtgcatatgtatagatttacgagtaaaaatatcactgtttcctcaaactcttttttttcttcttcccgatcttggcttttcatgttttggtttcttgatttctagattttcagatttctttctttgtgttgttataaatctcatctcttgttgatttctcacttcttaaatccatatggtgtctttttttggctgatcaagaatcttcaagttttttcttcttacaaatgttttatgatcttgaagtttaagaacaccatctgttttgtttatattacttagttgagttctattattgtatttggtagcttcttcatccatttacggatatgtcttaatccactttttcttatgatcactcaacataaaataaactctctcgaatcagattggtaactgaaaccttttttttttttttttttgcgtgcgaataattgttcctcttaagtgagatttcacttcatcaaaatcaaataaataatctttatccactaatcctagttacttttgtgtgacttcttcttccacatgaaataatgttcttctactaagaagatcatcaaatctgagtaacatgtacttgtgtttgtctttgcagaaggagtaaagagaagagtcagatttggataggtg

SEQ ID NO: 1945 - DNA, 476 bp, Arabidopsis thaliana
  Intron number 2 from transcript AT5G56250.1 (locus AT5G562 50) derived from phytozome v7.0 (chr-ID Chr5; pos 22771301 to 22771776 reverse strand)
ttaggtcaatcacatctttcaactttctccatcaggtaatcttaaagtttcttcttctccgattttgttgggggttttatggagaagaagtcaacagtttcttgttcttcaccattgttttaggaggcttaaagtctttagctttcttgttaggtttgattactgatacatcttttcttctcatccattcatttttgctaaatgggtcagattcaaaacaaaatgctttttatttttatttttctttcaccttctgtgattatgtggagcttaatggtattgagttttgactattctttgatccgttggtccatgatctgaacgagtctcagtatcatcaaagaacaaacttttctttgttgtgtcatgtctctcagaagtttttttttttataaaagcctgtacctatgttttgtctggttgttgtactactaatggttgatgatttggtttttgtgatgttttttgcagagatt

SEQ ID NO: 1946 - DNA, 685 bp, Arabidopsis thaliana
  Intron number 1 from transcript AT5G56250.1 (locus AT5G562 50) derived from phytozome v7.0 (chr-ID Chr5; pos 22771952 to 22772636 reverse strand)
tttcaaagatccaaacttatactcttcaaaaataggtatgcttattataagtatatatctttaatcctctgtaagtttttgatattttatgatccatttcttctgttcataacattataaaaaagggttttgtttcttggattcctaatattgtcttctcagatttgttgttaaatctcatgttccagttggttcatccataagtagagattatagtttttcttaagggttagattatcttctttcaatgtgttcattttttttttagaaaaaaaaataaatctcaatgaactttggtttaaatctcaccaaatgtatgttcttttaccttctgtgtcttgatctattagtttcttattgtgatgtctttgagtttcatatgattccttgcataaaataacactccaatcagattagaaactgatgcttgtttttaggggaaaaactttgaagaattaaaaaccaactcttttgattgttcctatttgtgatttgcttcaccaatcaaacccatatacttgaaaatctcacccactaatcctaattttattctctgttttttttctaaccttcacatgaaataatatttttttacttgatcttctcaagtttctgggttttaaagacttaaactttaaactctttttcaggtttcataggctctcagatttggtattataaagat

SEQ ID NO: 1947 - DNA, 885 bp, Arabidopsis thaliana
  Intron number 1 from transcript AT5G56250.2 (locus AT5G562 50) derived from phytozome v7.0 (chr-ID Chr5; pos 22771952 to 22772836 reverse strand)
aaaactatttctgaaaataatcaaatcctctaaaggtttctgtctatttactgatataatttttatctgaaacttttattttagcaactctcttcttcttctctcttcgtcgtcttcctacttctttgttttttctttctttgtattgtctcaccgatttacagtttcttgttcttactttactttgaatctttattaagtttcaaagatccaaacttatactcttcaaaaataggtatgcttattataagtatatatctttaatcctctgtaagtttttgatattttatgatccatttcttctgttcataacattataaaaaagggttttgtttcttggattcctaatattgtcttctcagatttgttgttaaatctcatgttccagttggttcatccataagtagagattatagtttttcttaagggttagattatcttctttcaatgtgttcattttttttttagaaaaaaaaataaatctcaatgaactttggtttaaatctcaccaaatgtatgttcttttaccttctgtgtcttgatctattagtttcttattgtgatgtctttgagtttcatatgattccttgcataaaataacactccaatcagattagaaactgatgcttgtttttaggggaaaaactttgaagaattaaaaaccaactcttttgattgttcctatttgtgatttgcttcaccaatcaaacccatatacttgaaaatctcacccactaatcctaattttattctctgttttttttctaaccttcacatgaaataatatttttttacttgatcttctcaagtttctgggttttaaagacttaaactttaaactctttttcaggtttcataggctctcagatttggtattataaagat

SEQ ID NO: 1948 - DNA, 1021 bp, Arabidopsis thaliana
  Intron number 1 from transcript AT5G56260.1 (locus AT5G562 60) derived from phytozome v7.0 (chr-ID Chr5; pos 22776050 to 22777070 reverse strand)
agctttggtctttggagctctaacctctgcctctggtaaattttctattttttctttatgatcgatttggttattgttgaaatccagatcaatttttgttgagatgggtttagttgttgtgatgattgctaagtcttctcagctgcttttgttttcatttcttacatattaccccccaaaaaaaggctgtgttttttccaggtttaagtgcaattgagtttgcttcaaagggtttacttctaatttttaatgtctaattatagaaatcttggaaggttcctttggattttgctgttatgtagtgaaattaggttctgtttcttccgccgtataagttaacttggatctttgttcgttggacaaaaatggaaacaaatcatactataaggttcaaatagctttgttttattagacaaatggggtttgattttcgatatttcattgtttctttaacgtttcatatgtaggtcatggaagaaatatttaaaggttgtttatagcatctggctcaaccctctatacaatacacaaaacttctgttcgtacttacatatatcagacttaagattcaagcaaacagtcatcaattcagtcaactgttagaaactttaaggtcattgcatttcaaaagttgtttgtaatttgagctctctctcttttcttgagtctgaggatttgattcaaatctcaacctcttcttgtcttccaagtctggctttaacactgtttgtatgcaaacagttgcacatgtctttgtttactttgttttagatgcttctctcagtgtcatcagcattcaagtgcgttttaagtcagtaacaagatgaatacctcttgttggcatcttaaatcacacgaattgttcatgttaaagaagaagtttcaaattgtttgttgatattgaagagaatgagaactattttctatgtttactttattttgctattttcatttttttctttcagttccctactcttatctgtcttgtgattccaaatgcagaacacacacagaatctccc

SEQ ID NO: 1949 - DNA, 533 bp, Arabidopsis thaliana
  Intron number 1 from transcript AT5G56340.1 (locus AT5G563 40) derived from phytozome v7.0 (chr-ID Chr5; pos 22817723 to 22818255)
ttgggttttcaagaaaaagtagagacattttaaaggtatgatttttatgtttgttgtgggcatgtaaatttctgggtttatctttgtctcatgtattgtgtttctttatttgagaaaatttatgacaaaggaagaaaacaaaaagctagaaatttgattcctttttaagggttttgttttctctctttgatcttttacaagattctgggttcttcagatgtttttctccttttctgggtttaattctttttgggttttatccaaatttatgtaaaaatcttgactttttcctctcctttttcaaaagatgttcttgtctgaatttgattggtcaaaatcatttaatttggattattaatgacaaaatctacccatttagattgatacttgtataaaagttataacctttgagggtcttagatctgaaatttaaaaccaaattggtagatgataaacaaaatttctagggtttcattgtgtgttcttcttgttttgcagaatcaatagatttgtgggggtgaagtaaggaacat

SEQ ID NO: 1950 - DNA, 725 bp, Arabidopsis thaliana
  Intron number 1 from transcript AT5G56350.1 (locus AT5G563 50) derived from phytozome v7.0 (chr-ID Chr5; pos 22821595 to 22822319 reverse strand)
ctcgacaccaaggttcgattacatgacttccatttttatagtttatgttgttttgtttccaatttcatctcctttgacttagattcgactgtgatttggaattctagggtttctagatattttatttagtttggattttggtatttgattctatttattgatctgtaacattgacgcgtctattttatttcctatgtgtgaaatgtttatttatgcctcttttgtattttcatctatctttggtaaatggtttctgtttttttgtctgtttatgccatttttgtgttagactgtttattaatgtttactctgcttatgaacaacgcttaccaacctcactctcatgatgttttaccatctgggaattactaaatttattatgaattatgaatctagatctgtgagactttctccagttagaactctgagttgttagaccaaattagttgagaagaaagagttgaaatcttcttgttgtggagaccaaatgtagaaaatgatgttagctcttggaaactggtgaagaatttgttgttaatacaaatttgatagatgactaagacttataattgttgagagtggtgatagctgatgttcttgaattgtcttatgtatgtgaattgtggcagatctatttgtttgtttgttttcgattttgctaatggagtgttgttgtttcttttctgttataaagggtccagaaatccgaaccgggttcttgaaag

SEQ ID NO: 1951 - DNA, 665 bp, Arabidopsis thaliana
  Intron number 1 from transcript AT5G56460.1 (locus AT5G564 60) derived from phytozome v7.0 (chr-ID Chr5; pos 22865538 to 22866202)
cttaaaccacagagtttctgcaaacgctaaatcaggttctcttttttcctcttcttcttcttcttcttcttactcttaatttggatcttctttcttttttctgctgcaaattttctgttactattatggcacttttttaggcctgaaattacgagatttactaatgggttttatcccaaaaaccttgcgcaaacttggaaatatctgtcggttaaccgttatcaccaaattactttcttggtttgttctgattatgttctgttttctctggttttttgggttctaaatttgttccattagttagttagagttttctatttggataagctatagattcgtttttgtataagtttggactcatttattgagaatcttgacttaccaattctttgttctatagagtctccttccttttcatctctctctctctcctttctctttgtggtttctgcttttgttttcttctagattagtcaaagtcacattttttattatatattctatgttcttggattttagaccccctagaagaatatttctaaaatcaatccatctctctagaatcttcaattcacatacaaagaatctaaaccaattaaacattggtttctttgtctgaaacttttgcagagtcaccaaaagaacagagtccaacagtagaagat

SEQ ID NO: 1952 - DNA, 915 bp, Arabidopsis thaliana
  Intron number 1 from transcript AT5G56750.1 (locus AT5G567 50) derived from phytozome v7.0 (chr-ID Chr5; pos 22958011 to 22958925)
ccgtcgacgttggaacaatctatcttggtggcaaggtttcattctttaacctttgaactcggatccgaataaagctttgatttttgtttctgggtttatcttaaacttgcttaaatctaatctttctgttgatttggggaagaacagacatgtgggcattgttagattcatttgtttttgtaaaaaaaagactcatcttttgtttgaatcaaatgttcttggagaaattctttgcttgtggatttgtgaaacttcttttattattatgattcatttccagatgggattattcttgggatcttcttcttctctctattcaaagatatcttcttcttattattattttgtattccttattctttgtcttattgccttttgatttttttatcttatagaaaaaagaaaagaaaatgccagctgtttttgtctaccattaaccttttgtttaataagactaatgcttctttattatctcattaagactcatattagctcatcttttttaaactgtcattccctttttattaaaaaaaaaccacaatgattagaattaggccatttctctttggttgttgatgatcaagtttttggttttgtttttttgcccttaaaagtagtaaagctgcacatggaaaagctttaacagagatgttttcttttttgtgtgtgtgttaatcaaagcatttcttttccacctaaagtcagttgtcatattcctatctttagtatacatttactaacgagaaaatagattcattgtttacaaacacatgttttatgaatatggagtagacaaatggtatggttaaaagtttagtttttttctgttggtttcatgatccgttacttttgttataacttgttggtttcttgtgttcaggagcatcgtgttaaaactgctagtggtgttgtgtc

SEQ ID NO: 1953 - DNA, 260 bp, Arabidopsis thaliana
  Intron number 1 from transcript AT5G57860.2 (locus AT5G578 60) derived from phytozome v7.0 (chr-ID Chr5; pos 23437695 to 23437954)
tcttgtggtcactttttcgtccttaacccatctaggtaagtcgatttcattgtttgttatttgagtcagtaatttttgaaaatctttgcttttttttcttttcttttgaatatcaaaagaagaaaagatttgggggataactagatcatctctttagttaaattgactctttgaggtgtgtcaattgtcactgatagtctgattaatcttttattggcatcttagaacagattttgattctaaagtcttgtgaatcggca

SEQ ID NO: 1954 - DNA, 296 bp, Arabidopsis thaliana
  Intron number 1 from transcript AT5G57860.1 (locus AT5G578 60) derived from phytozome v7.0 (chr-ID Chr5; pos 23437695 to 23437990)
tcttgtggtcactttttcgtccttaacccatctaggtaagtcgatttcattgtttgttatttgagtcagtaatttttgaaaatctttgcttttttttcttttcttttgaatatcaaaagaagaaaagatttgggggataactagatcatctctttagttaaattgactctttgaggtgtgtcaattgtcactgatagtctgattaatcttttattggcatcttagaacagattttgattctaaagtcttgtgaatcggcagcggaagaagagtgaattgttcatccttatcttgcc

SEQ ID NO: 1955 - DNA, 265 bp, Arabidopsis thaliana
  Intron number 1 from transcript AT5G57860.4 (locus AT5G578 60) derived from phytozome v7.0 (chr-ID Chr5; pos 23437695 to 23437959)
tcttgtggtcactttttcgtccttaacccatctaggtaagtcgatttcattgtttgttatttgagtcagtaatttttgaaaatctttgcttttttttcttttcttttgaatatcaaaagaagaaaagatttgggggataactagatcatctctttagttaaattgactctttgaggtgtgtcaattgtcactgatagtctgattaatcttttattggcatcttagaacagattttgattctaaagtcttgtgaatcggcagcgga

SEQ ID NO: 1956 - DNA, 454 bp, Arabidopsis thaliana
  Intron number 1 from transcript AT5G58620.1 (locus AT5G586 20) derived from phytozome v7.0 (chr-ID Chr5; pos 23693498 to 23693951)
cgagaaaagagagagtttgtctctgtgactcagaggtagaaaatctttactctttgtttctttgatttgattagtcactaatttagtttcagttgaatccatatatgtcgatttgttttagagtttgcagtttgtttttaattgttttgctgattggaaaatgagttaacaatatgattagttttcgatgttgcaaaagtggttaattatggatctgttggtgtttatttttggtttggtttgttttaaagttggaaactttgtatcccaaactaacaaactcttccttctctccttagcttaatcgtttctgcagtttttatttctgttttgtatgattttgttctatgtatattaccattttaatcagaagaaaaaagattcatccttttcaatttgttctgcaattttttttgcagtgaaatcaatagagcgggaaaagattgttgctttt

SEQ ID NO: 1957 - DNA, 328 bp, Arabidopsis thaliana
  Intron number 1 from transcript AT5G58760.1 (locus AT5G587 60) derived from phytozome v7.0 (chr-ID Chr5; pos 23733080 to 23733407 reverse strand)
ccattaccgttaagcttattaagaaagtttgcaaagtaacgctattctaaaaaccctaacttttctaatgagttttcttacttggcttatgatttcaagttctgagtaggcttatgtggaataagtaatgacttttgattttgatttcgaacatattagaagtattcactgtattggttcccattataatggtgcctgaaattcactttattgtttattagtattcttcacttggatgcagagacagaggattttggtgtttggctttgattgtttcgtatctgttgttgtttcatggtggttttataggtttgtaaacagcctggcc

SEQ ID NO: 1958 - DNA, 734 bp, Arabidopsis thaliana
  Intron number 1 from transcript AT5G59020.1 (locus AT5G590 20) derived from phytozome v7.0 (chr-ID Chr5; pos 23829646 to 23830379 reverse strand)
tgtgtcggttctgcattttctcttcgctgtttgaggtaattttactcttttcttttcccacgattctcgggaaagtttcttcgctttgggtttggttgaaacattgccgtttcgttaagctgataaaccacttcaatgccgttcttctaggttttatcacgctttcgttttgcttatatatgtacaatctaactaaacctagattaaattttatgtttcgaattcgattcaaatcggagcttgatcatttttgcttcgttgattttaagaacaaattcttagcgatttatgtatataccgtcgtctctttcttctccgagcttacgattttggttaatttccgaaatttttgatttctcctttttttcttggatccgtcaaaagttttgaatcaaatctgaaatttgtttttgtcgtttcttattgtttgtgatacttgttcataaatgcacggacgcatcattcagctgtttcttcgggtccatgatatgtatttttagcattatcgaaagatgttttgatatcaatcattattatcttcttcttcctgcatttctttctgcgtccttgaggaccactttttttgtttttttttgtattctttcttctctttgataccgtgatcattgtagaaaagaacttttcagaaagtgctttcaatacactttttgatgtgattgattttggtgtttcttcaatttttcagaatccaggaagtcatataagttagattg

SEQ ID NO: 1959 - DNA, 353 bp, Arabidopsis thaliana
  Intron number 1 from transcript AT5G59290.2 (locus AT5G592 90) derived from phytozome v7.0 (chr-ID Chr5; pos 23917555 to 23917907 reverse strand)
ctccttctcctctccgcaattccaagttttgtcaggtaaaatctttctgcaaatttctttgattagattttgttgattaagatgcgatcgggaaagcattcgtgtcacaaggatcttatgtaaatgacctgatctctttggcattgtaatgaagaatccttgaaatcgaatgccatttagatctgacccttttttgctggcttcattgtgtgagaacttctgtatcattgtaggttatatagattttacagaatcagatcttggggttttattagtttgatctgttgtgactcaaggatgattatgtaattatatgagtttacttttttcttgtttgttttgtgtagcccaat

SEQ ID NO: 1960 - DNA, 507 bp, Arabidopsis thaliana
  Intron number 1 from transcript AT5G59340.1 (locus AT5G593 40) derived from phytozome v7.0 (chr-ID Chr5; pos 23933855 to 23934361 reverse strand)
ctcccgtttcttctacccccctccttgctcaaacggcacgtagttcttatccttttctcttacttatccgtatctaatcttcgacgttctattttataatcttaaaaaaattgtagtccatacgttataggttctttttgttgacgacgttttctttccgtattaaagaaatgaaaataaagcgtatgaattacatctggactatgaaagaacttacaaaaacatgtcattaaatacatatataaatatataatccagttttggccatttatcgctgagattcaaatttgttttttaaaattttaacataaaaacatataatcggatgcgaaaggattatatcatatgggactattttgagatgtttatcagcaaattatgtactctggattagcaggttttatgtttgttttttcatttttatcaatataattgggtattactaaataaaatcttttttttggttatgaagtgggttgtgtcagtccgtactatttacagcaagca

SEQ ID NO: 1961 - DNA, 538 bp, Arabidopsis thaliana
  Intron number 1 from transcript AT5G59430.1 (locus AT5G594 30) derived from phytozome v7.0 (chr-ID Chr5; pos 23967645 to 23968182)
ggagattttcgttaccttggtctgaaaatctctgggtaaatcccaattttacgtttttttaaaaaaaattcgtcgatttttatctttcatcgctttattcttcgatctgtaaaatccgatctgagatttagaacccttttgaacacccgtgatctggtggtcctttgatcttgagatcgaagtttttcgtccatacgattattttcttaaatttttttttatggtttagggttttcctgtggtgaaatatttggaacgacggtttgactctcaatttcagatctcaaagttgtttagggttttagggtggtttaagcttttttcaatgggctttgacccaaaaccttcaaaatcattcctttttttgcttcatgcattatttccagagacaaaacccttttattctgtttttttttttaaatttaaaaccattggctattttatctcgttttcttttgatttcaatgtctctttctaatttgatttctcaattttatctacaggttgggaattacattcacagaatttcgttgattgg

SEQ ID NO: 1962 - DNA, 640 bp, Arabidopsis thaliana
  Intron number 1 from transcript AT5G59430.2 (locus AT5G594 30) derived from phytozome v7.0 (chr-ID Chr5; pos 23967543 to 23968182)
tattcgccggaaaagttaaagattcagatttaaaggtgagagattttacagtcattttttttttagtcatcctgattctgtctttgaatttcataaaaccaaggagattttcgttaccttggtctgaaaatctctgggtaaatcccaattttacgtttttttaaaaaaaattcgtcgatttttatctttcatcgctttattcttcgatctgtaaaatccgatctgagatttagaacccttttgaacacccgtgatctggtggtcctttgatcttgagatcgaagtttttcgtccatacgattattttcttaaatttttttttatggtttagggttttcctgtggtgaaatatttggaacgacggtttgactctcaatttcagatctcaaagttgtttagggttttagggtggtttaagcttttttcaatgggctttgacccaaaaccttcaaaatcattcctttttttgcttcatgcattatttccagagacaaaacccttttattctgtttttttttttaaatttaaaaccattggctattttatctcgttttcttttgatttcaatgtctctttctaatttgatttctcaattttatctacaggttgggaattacattcacagaatttcgttgattgg

SEQ ID NO: 1963 - DNA, 770 bp, Arabidopsis thaliana
  Intron number 1 from transcript AT5G59880.2 (locus AT5G598 80) derived from phytozome v7.0 (chr-ID Chr5; pos 24120353 to 24121122)
ttattttctctgagactagctttgattcaaccgtgagctcaagtctaatttttctctcttatatagttctctttctttgttctctatggcttgatttgaactttgcttctcgattcgagttccatttcatcttggattttcaattcttccgatttaagttctcgcccagagttagatatgattagatctgtagatggactcgtttctttgtttagatctctgagattttggatttgtatggttagatggactgatctaggatatgaatcggccgatagtaaagtcttcaatttcagtgtgcttgtgttggttttagccaattgattttgaaaccaggaagaataatagtgttccatgtggttttcctttgattttagggttacgtctatcgtttgtttagccttttccttttataagatattgttttctcgcttctttgagttattatttgctgctgttgaagttttcagatgtgtgtttgattctgttgatggtagagtatcatccgattaatatgattcagaactgtaaaatctgtcaaattgatattatgatagctcaacatcatcgttcatatacgttgtgggagtcatccacgtcttccctttgatatacacactaccaagatctgttcatgattcattatgtttgatctctgaactaatgtataacccgaacgccgttttaaaagatgggtatagtgtctactaatatgtgtattctgaagagagttgcatcttaatgttctatgttttgttggtaacaggcta

SEQ ID NO: 1964 - DNA, 522 bp, Arabidopsis thaliana
  Intron number 1 from transcript AT5G60400.2 (locus AT5G604 00) derived from phytozome v7.0 (chr-ID Chr5; pos 24291577 to 24292098 reverse strand)
cggaggaaaaaaggtaaagtgaaaccaaaatttattttcactataacacaaagatcatattcagaactattttctttttaattcactcacagacggtacttttctataaagtttgattaatgcattttaatagtagaagaagaagagaccatacctaatacctactactctcaaatgcacaacacaccacaggacaaaaaaatctttctctcatattaattacatggtaccattatatatctatactctctttaacccattaccaattcaagatcttgtctttttttttcttcttaaaaacaagatccaaatttctgaaaaatccattcactacaaagaaagaaatgctgtctacaactcttagtggtaactatggcttccctctgtgcatctctgggatcactcagcaattaagtctgtccaaagagtaatatttctctgtttcacttatgctctctgtcttgagatcttctctgtttatttgacttgtctctttttctctctctctgtggatgttgaaga

SEQ ID NO: 1965 - DNA, 391 bp, Arabidopsis thaliana
  Intron number 1 from transcript AT5G60610.1 (locus AT5G606 10) derived from phytozome v7.0 (chr-ID Chr5; pos 24363658 to 24364048)
atccagcgattcattgtcttcacttttacgtttctgtaagcaaattcgtcctgtgtttcttggtttcttacacttttttgttgttgatttcttttgtaatggatcttgtttaggtttcatttcgtgttccatcatcgtcactctcctagggtttcggttttgcttactgttttttttaaaaaaattcttagcctttcctggaaattattcttattattctaggttattaatagttgggttgtgatttgtattctgatttggttctctgaaattgatggaattctgttgagtttatgatcttgtttgattggcttcagacaaattctgagagtcttgacgagttttcttgtttctttttcaggcaatagaatcttgggtttggttaagagag

SEQ ID NO: 1966 - DNA, 599 bp, Arabidopsis thaliana
  Intron number 1 from transcript AT5G60900.1 (locus AT5G609 00) derived from phytozome v7.0 (chr-ID Chr5; pos 24500418 to 24501016 reverse strand)
ttgaaaatcccaccgacactctgttacctaatcaggtaattaaatctttattatgcgatcatagacaatattgaccaaaataataaaaaattctatgaaatttaaaacaaaattgatgaattaaatgacaaaaagaatatctttgggagataaaatatggaaaatcttcaattataattttttgtttgttttgacaaaattgcaaacgcggagatgaggtgccaaaatgagaaatttctagttttttttttttaatttacactatacgtaatcaatatatgatgaaaatatatacgtattctagtaatttttttttgcatgtaagatatattttatttactaaaacaaaaataataatatgtgttcacaaacgtaagaaattaactcaaaaaaaaataaaagtaaaaattaaattagcagttagcactattaattaaggttttgatcctattgtgagaaaatactttttagttgacttcttttgttagatttgcaatcgattttaattgatttgtttccgttagtatgttgcggatgatatatttatgaatgatgatgatacagaatatagaagttggaaggaatctgtcatcacgtag

SEQ ID NO: 1967 - DNA, 929 bp, Arabidopsis thaliana
  Intron number 1 from transcript AT5G60910.1 (locus AT5G609 10) derived from phytozome v7.0 (chr-ID Chr5; pos 24504935 to 24505863 reverse strand)
aaaggcaaactcttcgaatattccaccgactcttggtaaatgtttttttaatgttttatattatatatcacatcgatcatatctatctgttttcttgatctttaaccagattttgttttttattcgtacttctcgatctcgatcgtcgtcagccttggaaataaatccaaatctcgtatcttggtctttcatatcttctctagatttgtttgttccctaagaactggctcgagaaattagggtttttttttgggattttacgtacggacgcatgaaaaagctgtttatgtttatttctaaatttcctttcctttacccaattgaaaatagcataaaattatgaaacttagtacacacactcacgatttgattgccccttttgatgtatggaagcacgtgcactcagacacgtacgaagatatgtatgtagataacatgtataataatacttgagtataccatatatttgaaagaaaggttgatttgaaacgatgaaataaagcatttataacaaggatgtgctataatccccaatggacaataacataacgttaaacatatatgtaagttcgtactgatattttaaatgcgttttgtgaaagtgtatatatatgtttttatgtacgatcatagagatttatagtgatcgtttgctttgataaccgagtcaggagggaaactcgaatctttaaattgaatttgtacgtatgttttctatgatgttttgtggactcaccaaaaccaggttctatatacatttttgtgttatattcttatttttagctattctttgtcggtataccaaatacggtaaacttttggcttgcagtttgtaacaaatgttacacattataacatgtgaaattataataatttttatggatcaaattaatcgagtgttgaccttttttttctttcttaaatctagc

SEQ ID NO: 1968 - DNA, 543 bp, Arabidopsis thaliana
  Intron number 1 from transcript AT5G60980.2 (locus AT5G609 80) derived from phytozome v7.0 (chr-ID Chr5; pos 24543445 to 24543987)
atctctctttgtccttctctctccctcagatcactgtaagtacacgacacttcacttcatttcctaattcgatctgtttcttttactctttctcgatttgcttccaatcttgatctcttttctctttctatatcgagcttgatctgactcattctttattatatacttctcttctcgattccttttttgtgaaaaaaacatctttaaaatttcatttttgttagttgcttcgtgtcttgattagtgttgttcttgtaataaatgttgtgatcttatattcattctagggttttgtgtgtgtgtgtatgagcttaatttcatacagaacagtgaaatcttagactttcgattagatcgttgacttttatctgaattattggaatttaggttattgaatcagtctttaggttattgatcaaaatgatttacttcagagaagattgtctcaataattactaacacagtggttgattattgataatgttattaatcctgagctatgtaaattttgattctcaccgtatatatatatattgagtgtag

SEQ ID NO: 1969 - DNA, 735 bp, Arabidopsis thaliana
  Intron number 3 from transcript AT5G61130.1 (locus AT5G611 30) derived from phytozome v7.0 (chr-ID Chr5; pos 24587683 to 24588417 reverse strand)
ggttatacaggttgtgcctttcctactagtgccaggtatgcttctgattcaaatggccttatcaagaaattgaaagaaacgttttgcattttatggaaccaaaaccaagaatttgttttctatgtttgtggcaaagagaaaaagtagattaaagtttggtttgggtcccaaattacaactttttttgttcttgtttacttttgttgtgaaagagatatcatcattcagcttaaattaaaatagaaaacagcatcattagtattacttaaatagactaaaggaaatagagtaagtaatgaaattttttgactctgttgtgaacagtcttattttaagacactgttaattgtaagtgttcaacgtgaacctaaaagtactcaattttctttatttctttaaccaaacttttggtcatatctataatcaaaatcaaatgctttattggattacagtttgaacgcatgatcatgttcttgactgatatggccgtattaagcaatagtactctaaatctttaatcttttggacccatcaaagacccttttagttaatagaaactgagactcttctttttgttagcgttttttgagtatagaatatgaatttgctttgaagactttcctttagatcaatctctttcatcaagacttggtctggttttggaacttcattgtctgatataactcttattttcttccagtggctctagcggcagcacaactgtgacacctggca

SEQ ID NO: 1970 - DNA, 494 bp, Arabidopsis thaliana
  Intron number 1 from transcript AT5G61210.1 (locus AT5G612 10) derived from phytozome v7.0 (chr-ID Chr5; pos 24623489 to 24623982)
tcttcttcttcacggactccacttcgctcatccaggtaaccacaatctgctctctatcttttgcttcaaaattctcagttcctttcttctcaatttccgtctgctagatcctgggctttcgatttgttccgttcctcttctgcgattgtttcgttccagagagaattatcgaaataattaagcgaattttgtgtgtggttttcatagtcttgggttctttagccgctacatatactcaattatgcccaaaattaggtttaaaattgattaactaaaacttatactttttggtctcgtcttatgttatcgtttaaattgttcttagaagtgaaatcattcgatgctacgtttttgacttgttgctttactttatctatacctttgatttgatcaacttttctcttagcttacaagttagaatcaaagcatcaatcctgattactgttttggtttctgcaggaaggtttattagtagtaaccaatccaagtgttcc

SEQ ID NO: 1971 - DNA, 836 bp, Arabidopsis thaliana
  Intron number 1 from transcript AT5G61330.1 (locus AT5G613 30) derived from phytozome v7.0 (chr-ID Chr5; pos 24660104 to 24660939 reverse strand)
tcctatttgcgtctcagcttctacagagcttttaggtaagctcctctgcttgtatgattccttttaattttcaaaattcactgctttctcttgcgtatctgctcaaagtctctccctttttcatttaatcgtttctcttcctgaaacattcgaactcataaactagtttgattcaaaagttttcttgctttaaacttgtgttagctctagaatgttgttctttgtaatctgtttgtgacattgtggtggagatgatgaatgttaaagtaaaaggtctgagcaggttatgagtaaagtgtgtggcttttgatgtttaatttagttacgaggagtcaatctttgaactttataggagagggcccttgtccatgtcttgagccatggcatctgtggctccgcaacctctccaacaatgaacctgatttgtgtgtgcaatctgatgggtcgatttttaaaggcttggggttgctttctatcattgattgtcaatctagaattctccctatatacatttgtctccttgtgcttccttatcaccaattagctaccctcgtgattctgcactgatcaaagaccctttgactgatccacgtgagctgtttttatgagattatctataggtctctgttttttttttttttttttttttttttttttttttttatgtttgaagcttttgacaaagcttgtttgatggtatggttacctcattgttgctctatatttggtccttctttatttgtttcaatatttttattgcttaatccactgtataatagtttctccttcctcaattgagttagtttttcgtgattgcagcattaaaagttgttaaa

SEQ ID NO: 1972 - DNA, 412 bp, Arabidopsis thaliana
  Intron number 1 from transcript AT5G61530.2 (locus AT5G615 30) derived from phytozome v7.0 (chr-ID Chr5; pos 24742215 to 24742626)
cagctatctcaatttttctggggattgttctaaaggtttgatgatcggattgcttttgttctatttgttctttttgattctcgtatatgattgattagagaatataggattagggtttgtgttccttaaaagttatctccttttggcagttaaagacttggtttttattctttgtcaagaaattcattccatggttgacgatgaagtcaaggttttggttttcttttgtgtttcttctgtatcaattgtatatgattagattgaagatgatttcatgtgatgaagttgattacaacggataataccgcttgtgaggttgtatcataatttgctaagaataagtatatatcttcccatttgtttcttgatgcaaacaggtttctagtgacttgtttaaagtggttggtattgg

SEQ ID NO: 1973 - DNA, 634 bp, Arabidopsis thaliana
  Intron number 1 from transcript AT5G61960.1 (locus AT5G619 60) derived from phytozome v7.0 (chr-ID Chr5; pos 24883554 to 24884187 reverse strand)
ttcttcaaggatcgtgatacctgaagaagaagaaggtaaaaaataagagttaacgagatccactgtttgttgaaaatctggtttgaatttgtttaagaggaagcataattgtgtttgtttgtgattaggtaagttttcttatttttttggtagctggtggtgattagggtttttatttttatggtttaataatttggaaatggtttaattccgtgccgaatttgtgaattaggtaagagttggttcgctgtttgattataatgagctgcacaaggatccggtattaggcgaattctactcttattgcttctggatgtacctaatcgtctcttctagatatttctatgagcttaaaatgcagcgatttgatatgttttgcctctctagtggttgaagttgctaactttgttttatccttggacttcgcgtaattctagtagaaatcttctgtttctctacttttgtagttcttttgcttgatttttttggcttgtacgtgagtaattgagcacttttatgtgtcgtttttgcaagatcttcctcgcaattgagaaatgcattttgtttatgtagacactggttttgacttgaccacttttttttttttttttcaggttttttcaggggaagtgat

SEQ ID NO: 1974 - DNA, 541 bp, Arabidopsis thaliana
  Intron number 1 from transcript AT5G61960.2 (locus AT5G619 60) derived from phytozome v7.0 (chr-ID Chr5; pos 24883554 to 24884094 reverse strand)
taagaggaagcataattgtgtttgtttgtgattaggtaagttttcttatttttttggtagctggtggtgattagggtttttatttttatggtttaataatttggaaatggtttaattccgtgccgaatttgtgaattaggtaagagttggttcgctgtttgattataatgagctgcacaaggatccggtattaggcgaattctactcttattgcttctggatgtacctaatcgtctcttctagatatttctatgagcttaaaatgcagcgatttgatatgttttgcctctctagtggttgaagttgctaactttgttttatccttggacttcgcgtaattctagtagaaatcttctgtttctctacttttgtagttcttttgcttgatttttttggcttgtacgtgagtaattgagcacttttatgtgtcgtttttgcaagatcttcctcgcaattgagaaatgcattttgtttatgtagacactggttttgacttgaccacttttttttttttttttcaggttttttcaggggaagtgat

SEQ ID NO: 1975 - DNA, 252 bp, Arabidopsis thaliana
  Intron number 1 from transcript AT5G62260.1 (locus AT5G622 60) derived from phytozome v7.0 (chr-ID Chr5; pos 25009057 to 25009308)
cagtgttggttttcagctgcagaattggtgaaaaagtaaatctagaaactgtaatcaaatttctctgctttgatctttggtccttttgagctactatttcatatctcttgttccttttattgttcttagttattattacaaagaagaagaagaaaaaaaagaaacctttacttcttcttcatctgaaaaagctcattttttttttttttggaatcagagtttggtgaatttcaggagcagagtatttaagta

SEQ ID NO: 1976 - DNA, 800 bp, Arabidopsis thaliana
  Intron number 1 from transcript AT5G63090.3 (locus AT5G630 90) derived from phytozome v7.0 (chr-ID Chr5; pos 25309914 to 25310713 reverse strand)
gatacaagatcctcaaagaacctaaagatctaaaggcaggtatatgtatatactttgatgtatgtatcttaataaatccctggatttatgcatagctcccgattatcaaaacaagtcttctaatctatgtttaattttattttctatgctccatgttctatgttctatgttgctcatacacatattcactttgatccttctgtcactttccttttgaatttctactataataaagacttaacaaggttatctaattaattatagcaaatgagacaaggatataagtaaacacgtgtaattaaaccttcgtgatctctttgagttgacataattaaggtcagatctaaagtttacaaacaaatccaaattggtatagacttgaggtcagtagaattgcttcatctcggagaaaaagagagagtttatcttacttagtaaagacaatttttgaaatttctttgaccaagtttagttttgaggcatacaaatagaaattataaaatcctcactgagtttcccttttaagttatagtttcttttaacaaagctagggttgaagagagagtgagaggaagatgaagaagatggtaaaacacatcaggacacaattgaattacaaagaaaaactgtttgatatattttggtaaaatatgaagtagatatgcattgaacaaaaatatgtagtatttatatgtaagattgatatagatacagagggatacacaaactcatctgacattttaaaaataagattgctttttttttttggttttgttttgttcagggaataactgatcgac

SEQ ID NO: 1977 - DNA, 930 bp, Arabidopsis thaliana
  Intron number 1 from transcript AT5G63135.1 (locus AT5G631 35) derived from phytozome v7.0 (chr-ID Chr5; pos 25325391 to 25326320 reverse strand)
gaagaagctgagttcgaagaaaaggtagcttccttcttttttatttatgtattcgttctccttcggaatctgctgaataggaaattttcagttttcgactgtcactacaggcagcataaaaggtcaatcttagatctttagtttcatgtaagttgagctgattatgagtgaaatttattgattgtgttcgagattataagtggtttctactttgtaaatgatcaatctttttcgatccgtggtgatgattttggttttaggcagatcactttcttctctacttcatattgataagatgaatatgagtttctgaatctttctgctttggaacatattcttttgggtcctatgtttgagttttaagttagtacaaaagtgagaattttagtggataccaatgtcgagttgtgattctagtgtagtggtttttccagtgtagactctatggatatatgcatttgtgttcattggactatcatcttatagctttagacccgtaataatgtataaagatccaagggtgatcttcgagtttaaattggagagatttttggtttctagatttagtatggaaaaggatttgagtttattgttacatgttttccaatgtttgaaaactagttccgtttcctgaatcactagcaagtgaaaggaaagaagcaaagacaaaatttgcagatttggaatttagccattgtgaactttagacaacatgtctccttgtcgtgtgatgtgttggtgttacctctaattatatgttcttcttaaatatattagattgtgtgattatatagacgtgggagctcaaaagtgagagagatcagtagagctaattgtcagtttcagtgttgttgttatgaatgttttaagacaagttctaagtaaattcttgttgtcttgggtttggtgcagtgcaacgagatcagaaag

SEQ ID NO: 1978 - DNA, 760 bp, Arabidopsis thaliana
  Intron number 1 from transcript AT5G63700.1 (locus AT5G637 00) derived from phytozome v7.0 (chr-ID Chr5; pos 25496768 to 25497527 reverse strand)
ctctgtgacttcaagtgagtctctctcacttagttaagcataatgctgctgctgcttcggtagaggattagttttttttgtttgcttgttctttgcatgttcttgatttctaatgatgaagggtgttttagtctttgttgggttttgcttatattataacgaggatttgtcaatttcaatgtaggattgtaccgagtgaacatgtatgttgtcttattggttcttttttatagatttgtttgtctaagtggaaacaggaaactttgtgttcttcactaggaaagtacttctttttcaatcaagttacttttgtttattcaaattgacgattaggggatttcgtttggaggcagtgatttatgccaaaagaagtcatttcctctgaatgatgaagctataaaaaatgttactgctttggttttttttgatgattctttcatatgaatgcgcttgaggagagacattgtgtattattctgtagttaaaggtataaagatgtttcttttttctttagttcattaattaggagcttaggtaatgtagcaacattgactttttccttctattaaattgcagcagattgttaatgtatgatttgcatgaaaattaacaatttcattatgaaaagattgtcaagatgaatattaaagtattgtcagtttgtcagtacacttgtgatatttagtctagtttaaatgtatgcatctaactgtgcacctcattgtgcttgcttgtttcagagactgtccaaaagtttatc

SEQ ID NO: 1979 - DNA, 257 bp, Arabidopsis thaliana
  Intron number 2 from transcript AT5G63860.1 (locus AT5G638 60) derived from phytozome v7.0 (chr-ID Chr5; pos 25558272 to 25558528 reverse strand)
ctccgctggtgctagccactccgtcgctcttctctgtacgtctctcttcttcttcgctgttttttttccttttctattacggactcaaataatcaccggaattgtgaaatccgctgctttagtaggctgtgctcttcgcgaattctcttgatctggcctttaatcgagtttcccttactttcgtcgtctactaatgagtagttttatgttttgattttgtagctggtgacattgtttgttcttggggtcgaggagag

SEQ ID NO: 1980 - DNA, 810 bp, Arabidopsis thaliana
  Intron number 1 from transcript AT5G64130.3 (locus AT5G641 30) derived from phytozome v7.0 (chr-ID Chr5; pos 25665338 to 25666147 reverse strand)
accaatcctcctttttcttcttcttcttcctcctggtgagtctaatctcgatctcgtttttataaaccttaacttctccgtttcgtttcttcgttttcttatctcgatgatgatgatcgagattcaaattctctgattctctatctcgtcatgtcgttttttacaatctcgcaacataggaacctgattgtttatcgtttagggctttgtttgagctgcctctgatttgaattttgagttttgattgtgtatctgatccgctgtcgtttttgttgtgatctgatcatttgccgttgtttaggttaaattctaggtttatacaatctttgtctatatgcattgtggagatctgatccatatgaccgtaaatccttgatgtcaatctggaaattgatttgaattcaatgtcgaatctgaactctaaattctggatgctgttttggttacatgtatagataagcttttggaggcttttcctatcttatggagtatacactcatttgttcttgtacttagggtttttgttttggctgccttaagtttcatagttaggttcattcgttttattgagctgtacaaaactacacttttcagaacagattgtgtggtcacaggattgtggaactagtatcaaataggaagttcaattattaattagcttcctttgattgatatatgcgcttcattgatgaaccctcgagtctgcttttgttatttgttcatgaggtttgcgtattttcgtttaagtaatgttgtttattatatactcgtgcagcatttttggttttggtggcgttgagacatcatcat

SEQ ID NO: 1981 - DNA, 293 bp, Arabidopsis thaliana
  Intron number 1 from transcript AT5G64680.1 (locus AT5G646 80) derived from phytozome v7.0 (chr-ID Chr5; pos 25854140 to 25854432)
gttttaggtcatcgccgaattgctatttctccggtaacgattctctctcttttccgccgccgacgaagccatctttctttctctttagctttctcgttccgatttgcatccagtttcttgatttttctaactaatttatgtcttttgaagagatttataattgcgattttgacagagtttgagtttgttcaaaagctttgtttattatatatgttaaagctctcgctatatttaacacttgttttctcgattttgcaggttttgtgaaatcgcgagagctgatttgagcagag

SEQ ID NO: 1982 - DNA, 292 bp, Arabidopsis thaliana
  Intron number 1 from transcript AT5G64850.1 (locus AT5G648 50) derived from phytozome v7.0 (chr-ID Chr5; pos 25921588 to 25921879)
gaagatcgaaaagaggtttttattttttattttctggtctaatcccttcgtcttctgtgttttctccttacataatattaaagttaaagtgatacattaaataaaatgggatgttcatgtcaacttcttgcattaatattcgattttgatgtgagaaattagtctctgaatcttggtgaaaaagtctttttttgtgtgattgatttttaggattgtgtttttttctttctaatggttcttgaaaataaaagtaattgaaatggagatttatttggcagaacaagaactcgcc

SEQ ID NO: 1983 - DNA, 913 bp, Arabidopsis thaliana
  Intron number 2 from transcript AT5G64850.1 (locus AT5G648 50) derived from phytozome v7.0 (chr-ID Chr5; pos 25922113 to 25923025)
agttctctcaccatcacccacactctccttctgtaagattcttgttgctctatcttaaagattcattgttttgaatgtcagtccattgtatatgaatttgtattagctcctgcgttcattgaaaccggtaggtaggtgttttgacttggttaggatatgaaatccaactttttagccttatatggtttatttctggcaaaatgggtagattttgtttgggtcacacattgtttaccctagttcgttgttcatgctcataccaataccaaacttttgaaacttatgtttttgattgcatttacatgttaacactttgaatatccattgtaagattcatattttcttgatgaataggatgataatgtttgtgaattgttcatttgatgtggaccttcttgggttggttaggtttgagaatctaatattgtaagcattatatggattcttctagcaattgggtaaaatgtggtccttcaatgtttggtcaagttggttgcttattgctgtttatgactacacatgaaattaattttatataccccaccaaacttcacaacttcagattttgagtttaagttggatttggatcttgattggatatgattgtgatcatatggttaaggaatcacatgaatgcatagagtatgttttatattgatgataaaatattgaaaagaatatgtaaaactatattttaaaacagagtaaacttatagtagtacattaccctacaaagttattataatggattctttctttcaatctgagtaaagcataatcctttattttgtacctaccatgtgaagtgacataaataatgttgttcttttttttggataaaacatacttaatcttgtttgtaaatgactttggaacagaggaggagaagaatcttcagctgcttcaactgttg

SEQ ID NO: 1984 - DNA, 584 bp, Arabidopsis thaliana
  Intron number 1 from transcript AT5G65290.1 (locus AT5G652 90) derived from phytozome v7.0 (chr-ID Chr5; pos 26089947 to 26090530)
ccgttatcatcctcgctcctgccgacatttggacggtaagttttactttccatgttttcagccaatacggacttgtgcgattctgatcgaattggcctttacgagcttacgattttgaatttaggagtcgtcttacttgatttggaattgaatcgtcggttataattaaagggttctttctgatgcctggaagtttcataggatcatacgttgaattgagatttagctgaagaatgtggtgtttgaatacggcttatacgcatttgttagacctatattgaaattagtatttagtggtgaaagagtttgaaatactcactgaaggtttttaagcatgaagcttagttgatttggtagtcaaacaaattgtgtttatggatagatagctttggtctctcatggttgtgagctgttgaggaatgtttttgggaaagtttcaatggtagctagattttggttgccatgtatgatttggatgtaaaccaaactagaataactaggagatgtctcatatgaaattgttttgcttcatttgtcttcttatgttctgcagacactatctctgcaacctgatcatcctgaga

SEQ ID NO: 1985 - DNA, 602 bp, Arabidopsis thaliana
  Intron number 1 from transcript AT5G65670.2 (locus AT5G656 70) derived from phytozome v7.0 (chr-ID Chr5; pos 26253857 to 26254458)
catttttcatccaggatttgttttttccgtttgaggtaattatgtcttctctgttcttcttatacatagtttcaaatccggtaatttttagcttgttgttgtttgtgtgtgtagttagtagttattagatctattagctattgagtttctttgctgatttcctcactatttctatggcgaattttggtttgtttgagctgttggcttaaaccttgctaggtttagtgatttgtagatagaattctgtggaaattcaaatctgagatcagctcgaaaaatgtaactcaacggtgtagtttcttcatctgaccttaagttgacttctatttatttttagctttccatttttttctcagattgagctttattttgctctaaattttggttgtgagtttttcatagatgcaatctacttttgaaaccctaattgatacggtttcgagtttcttcgaattttgattgaaattgagttcttgattttttctggtaatttagggttttgtttgaggatttgtttatggttatgtgaatttaatgtggaggactttgtgctgtgtaaatcatcaggtaaagcagctttgcagttaaagaaaccttgagta

SEQ ID NO: 1986 - DNA, 370 bp, Arabidopsis thaliana
  Intron number 1 from transcript AT5G65860.2 (locus AT5G658 60) derived from phytozome v7.0 (chr-ID Chr5; pos 26348687 to 26349056 reverse strand)
ctgcaactcaggtaaaagactcttgctcctattatctcatgttccattgtttgttgatttcaatttgaaatattagtttctttcttcttcccttcattccttcaacttttataccattttcctgttatctattgatttgaaagttttaatttttaagaggcggtgatgacaaaaaacatttctcgatgctgaaacttactcgagagaccaaatcactcttgtaatctttcgtgatgcttgtttttatgcgtgtctgagcctaaaccaaaaaatctttcatttatgctttgattatcatagatcccaatttatgcgtttcttttattgcttttcaatttgtaatgcgagttttgctttattttgtccagcc

SEQ ID NO: 1987 - DNA, 373 bp, Arabidopsis thaliana
  Intron number 1 from transcript AT5G66250.1 (locus AT5G662 50) derived from phytozome v7.0 (chr-ID Chr5; pos 26468677 to 26469049)
ctcccgaaatctacgggcaaagttgatccctctgggtttgtcatttgatatcctcttttcccgtaccgcgcgtttatgattctgattacgttcttggttgtttgcgattgatccgtttaggattttctctgagtccatcgcttattgaatcgtcaaggctttttcttgtttgactttggaatatcgaatctgctcaatactccaccaaattatcaaacttggtgttctttgttgctcaatactccaccaaattatcaaaacttggatgttctttgtagctcaattaccaaattaataagttgcattcttctttgttgcttgttagccttttcatcgagtttcgtttctgcgatactattttgtttaggatagt

SEQ ID NO: 1988 - DNA, 373 bp, Arabidopsis thaliana; identical to SEQ ID NO: 1987
  Intron number 1 from transcript AT5G66250.3 (locus AT5G662 50) derived from phytozome v7.0 (chr-ID Chr5; pos 26468677 to 26469049)

SEQ ID NO: 1989 - DNA, 349 bp, Arabidopsis thaliana
  Intron number 1 from transcript AT5G66410.1 (locus AT5G664 10) derived from phytozome v7.0 (chr-ID Chr5; pos 26519961 to 26520309)
tattggcggcagctgctagagattataaaaaggtaatttaatcttcattgtttatttcgtacttcgaagctgttctccataaattcttcttggatcttgatttcgcgtattttcaaagggtaaataatgtgcttggttttccacataatcaatctcatgttgtttggtaacccaattaacagagataggctagattctatttgtgctgacatgaggtctacgtgtcaggaaatttgatagtgtatagcgaattttaagtgtttttttgttggttacaattgcaattagagtttgatgttcttggatcaaaaacatttccgtatttttgttgtgcaggaagttcttgcaa

SEQ ID NO: 1990 - DNA, 473 bp, Arabidopsis thaliana
  Intron number 1 from transcript AT5G66510.1 (locus AT5G665 10) derived from phytozome v7.0 (chr-ID Chr5; pos 26550944 to 26551416 reverse strand)
tcgcctccaagggaaaaatcatttccgagaacagcgtatgtcttttggatcgccttgtcttctcttagttccattcgaatcctggtgatgatttttttttgtttcattactcgtcgggtcttcgaaatgtttgtgtatttctctggaatcaggtcatagttttgattgatgcgtttcctcttatgttgatgattgattatggcatttttgattagaaaccttagagcttaagatcaaatgttcttcattttgctagtgacggtatccatttctgtggttgcgaagagagattctcgttaattttctcttacaagttcctcttatgttctctgtatttggctagttattatcctagttgaaatcttcttcacttagacaagtctgttatgtgttagcctgtgctatgatgggtggttcacttgtctatcttctgaaactctttttttgttccagtatcaaggcaccgcacactc

SEQ ID NO: 1991 - DNA, 721 bp, Arabidopsis thaliana
  Intron number 1 from transcript AT5G66700.1 (locus AT5G667 00) derived from phytozome v7.0 (chr-ID Chr5; pos 26634846 to 26635566)
ccaactcgagtctcaggtataaattttatgttttttcactataaaacagagtaaatttggtgattcttaatttcatgttgcttgttttttcgaaagatgagtaattttatccgttcttagataattaacatatagtttattcgtcaattagtatattttgagtatttattacacatatgtgaaatgtagttgaatcgaattttacaactagtgaaaatccggtagctagctaaaaaacacatgtttgggaccacaccacaaatataataaagtgggatatttcgtcatctcattcttatccaccattaaaaaaaaaaaaaaagttccgtccgtacaatctcagttgggctcatgagtggcccatttacagttgcccactcatttaatgccacgtaaaaaacccttctctgcatttgggctgacatgccagaaaatatcctcctcatttgatgaataacaaaattaatttataacaatttttttcttttgacattaactttgcattgtattaaaacactatttatttcactgaattggtagtaaaatatatcttttttttttggttaacaaaattactcttatttttgtttatctaggtactaaataagagttttatataagattttcttcttcacatagtgattaactatggtattaactaatgatgtatttttttgctgttgtagatattgaaactaacagaacaattgagtgaagctca

SEQ ID NO: 1992 - DNA, 508 bp, Arabidopsis thaliana
  Intron number 4 from transcript AT1G02340.1 (locus AT1G023 40) derived from phytozome v7.0 (chr-ID Chr1; pos 466248 t o 466755 reverse strand)
aaaaaccttcaacttcaacttcaggtctatatttaactttattcactatttttatttcacactttattcagtgttcttcttccatatatttgaattattgaggcttgaggttttaagtgtttatctaatagtctgagtttttttttggttaatttaactagttgacataaactgttcttggtattcgatctgactcgccaacttatgagatatggattattgttttacaatatgggtttcaaattgatcaaacaaatatagccactttttggtgtttagtgacgaaaaaaatggaatgatatatagtaggcagtagataacctagatggtgaagtctatagaatttctttaatatttcgaattcatctcttttcatgtgattatttagtgccaactaaatgttttatattttatagaactatgtacccattttgatcattcgaatatgtatatgtgctatttatattcagaaactaagttgtaatcaaagttgatgttataattgcag

SEQ ID NO: 1993 - DNA, 778 bp, Arabidopsis thaliana
  Intron number 2 from transcript AT1G02610.1 (locus AT1G026 10) derived from phytozome v7.0 (chr-ID Chr1; pos 554829 t o 555606 reverse strand)
agaaaggaaacacaatttgtgaaatttgtctccaggtttgatttctagtttatcaataatttctctaacatttactttctctttttttaaggggttttgcttttttgatgttagattataatttgttttcatcttctcctaaattttgaattggttttgaatttacgtaattggttttttttttgtttcttctaagtttaatctgttttcttgaataacaaacgatacgtgttacaaaaactttctccttcgtgtcccatattttttttggcataactagaaaaggaaaaatattcgattctcgtaaaagatcgtaatcaatgagccaatgccacgctgttcatgatatcatattctcgagttttatttgtttatttgtgtaatctatacattaaatggattacaaaaagagttaggaacaaaaatggtaactggattcatccatcgctttatgggacccataacagactgacaaaaaaaagagttaggagcaaatgcattagaaaaatgtatcttcaattgaaaaatgtctccaatataatgaagtttttcaccagcttatttcagtttcggttcggttatggttggttttctttattggggtcgatttttgtattggtttacttgacatattaattcagtaaacatcggtttaaccagcttgtatactttctataaatgtatttagaattaacactataatggtgacaaaaaaaagtgtaataaattttgtaatattgcaggagtataaacctggatacaccacaacttcaaaacc

SEQ ID NO: 1994 - DNA, 929 bp, Arabidopsis thaliana
  Intron number 1 from transcript AT1G17090.2 (locus AT1G170 90) derived from phytozome v7.0 (chr-ID Chr1; pos 5843258 to 5844186 reverse strand)
aaattttggcttcttcgacgagttttgacattcgggtatatctgttctttatgagttaaagcaactttgtcattttttaatttatctttgggatcttttcgtgttttacttttctcgaaggatttctgtttcaatatctaactttttatgcatgagtttaaaagagatgattttttcaagcttttgaaatttttattgtttagctcaatttgggattatgatgaaacagtagtggctgaatatgagactaactactgcccagctattagctgcaggtggttctctgtttcaacatgatctctctgccttactcatctgaattctctttttctgcattgttttttttttggtattttgtagaacttatttgacatgttcttgtatcatcatcttgccatgtttttaaaaaagagttgacttggttgatcaaatgtcaattgtgtgttgatgcaaagatgtctttaaaacaatattataggtttcttgttgtacgaattgggaaaaatatattagtgtttttgtattctatattttgttgttcatggcttttaaatttgatagctgtcttcaacaaattgttctttataatccttagtatttctagattgcataatgcaagtagtcaatgataagttgtgagcttattgtgataaattatttatgaattagataagtcgaagaacaagtctagtttactaattcggattgccacaaactatgtctttttaaatgaagttttgtacgtagtaaggcctctttgatgtttacttcaaaccaagaaaccttcaaatccttaatagattattatccacactcaagctacatattgaatgctaacatcagataatctttataaacaaatggttttttgtcatacttcagatttaaatcgcaaaccctgaacctttcactgatatagacaggtggtg

SEQ ID NO: 1995 - DNA, 440 bp, Arabidopsis thaliana
  Intron number 3 from transcript AT1G18400.1 (locus AT1G184 00) derived from phytozome v7.0 (chr-ID Chr1; pos 6332210 to 6332649)
ttataaggtaataatgcaaagataaatataatagtttaacattttcaacttttcattacttcttttttaatatatttgtaatcaaaatagaaactaatggccattaaacaataaatagcatatgaaaaggtcatcatcggcattaattgtcactaattatacttgaatcaaatttaagcattttatgataaaagtgatacttttagttaaacaagaacatatgtatccaaaagtatttttaacatgcatgagtgtgattttagcttttttctttgataccgctcataatattttccgaaaattgttcttcggatttttttttgttttttttgtttacaaagaactcagaaaaaaaattgtagaaaaagtgatgtgattttctattgatttagtggtgcttacttcttataatgaaagtgtatgtttggtgggtgcaggct

SEQ ID NO: 1996 - DNA, 608 bp, Arabidopsis thaliana
  Intron number 1 from transcript AT1G18460.1 (locus AT1G184 60) derived from phytozome v7.0 (chr-ID Chr1; pos 6352704 to 6353311)
ctcttgctatcacaaaagagtgagtccctctctcttttcgatttcaccattagtctgtgcacgcttattgattttgtgatttctgatttgtttttttagttgcatgtttagtggttttagtaatttgatatgtgatttcaactgttttgtttccttaatttggattttaattcgattagattttctcaaatagtaattcgatttgctttagatatggaagttgccaaattttgagccagtggttttatagtggagctaggagctaagtctatatcttatatcttctgatttacattaatcttgagatttagtggtatatagttttactaatttggggatacatttctgatttaccatttttagttagttgttgaaggtttgttgtctctttgaagaaagtatacatattgactctttgtcctgtaataattacagcgattctcgttgtatctgcggatagttttctttgtttaatgcttgtctgtttgggtttttggtgttcgttgtgggtttttgattggtattaggattgtttgtgttagtctaaaatagttttaagctaactaatgattttggtttttagtgcaggtcagtgaaaactctgactt

SEQ ID NO: 1997 - DNA, 569 bp, Arabidopsis thaliana
  Intron number 1 from transcript AT1G29840.1 (locus AT1G298 40) derived from phytozome v7.0 (chr-ID Chr1; pos 10446727 to 10447295 reverse strand)
gctttcgatcaaccaaggttagtgtgtgatacctaatttggtttgttttgatttaaattccggattacacacattttgtgttttgcaacttacttatatgttcatttctcaatccataacttataaagttgcatacttttagttcaatttgtaatgttagttgattaaaggttttgcctttaaaagctagtcatcttcgttgttttggaacttcctttgtctttgcactatggatgaatctggattgtaatcaatatcaatgttgagggaaaacttcaaatctgttctttgcttattccaactagatagtaagacttcaaggggtttattgttttagtcggtttgattgtttcatatagtaagtgatttggaaggttatacactactgagtaactgaaaatcttaccacagtttcctgttatattctttgattactggtttttgaattcaatagagtaagtgcattgacaattaagctaactagcgatttgtacgctaaaggtggaagcatatattgctaggagttttatgtgcattaaacttttcattggctaatgaaactatgcaga

SEQ ID NO: 1998 - DNA, 736 bp, Arabidopsis thaliana
  Intron number 1 from transcript AT1G35670.1 (locus AT1G356 70) derived from phytozome v7.0 (chr-ID Chr1; pos 13205962 to 13206697)
taccgattttggtttgtctgtcttctataagccaggtttgatttttctcttttggttgattgattcattaatcttgcaattggtgttttggtttgatgatgattttttcgttgcttaagggaattttgctttgtatcttcattgagtctttgaaagtttatgtgttgattggaatgattctgcatttgtgtattttggcttgtatctgtgattctttgaaaccttattgttggtggttcatcgcctaattggttttagtttactcttcaggacaatgtctataaggtgtagttagggagcttgctttggttagttgttactcattgaggagtctttgaatgtgtggattggaactattctgcatttgattaagtctttggtttggtttcttgtagaatcaggttatttgtgttttctatgaatcgaaaattgaaacaaagtggtttcttgatagaaacaggtttgttgtgttttatatggattgcaaatcgaaataaggttttcggtatgtataggtttgatgatctgtttggttggattcaaatttgttaccttcttagagggaacattgtattgatcgaaattaatgtgtatagatgttcgtcattgaggagtctctgaaacttaatgtgtagatcgaaattattctgcatttgtgtgtctggcttgaaccttctcattaatgccagtttatcggctaattggtttttgtttgcttcttcaggacaatatttat

SEQ ID NO: 1999 - DNA, 943 bp, Arabidopsis thaliana
  Intron number 2 from transcript AT1G35780.1 (locus AT1G357 80) derived from phytozome v7.0 (chr-ID Chr1; pos 13278575 to 13279517 reverse strand)
aagaagttgagagcttgaacaagaggtgagtgatagagatctcacgattttttttttgtattcgaaatttagaaaatagtagtattaatcaggaagaaaacaaaacggtacgataatttaataaatgcgaaacaacagtaagtacgaagaatctgtcaatttgttaacagatgatgatgatcctgtcgttatttggactgaccctatagaatgttttttttttaggtaggaaagtgtttgattgccataattagtgtccttaattatgaagcatttttggtatatcttcaatttaatttccgtttttgatcttctttgtatcgttcacgcttctctaattttgtttttttttcctcctaatttattctttttttggtaaccaatgatccggtctaattctgattcaaaaacccaaaattttagtatttttaccatttttaataattgttgcttgattggttaggaaagttatataaatattttggaaccatgggttaagttttaaccgcagttagtgctttcgttagtaaagttaacagacgttaacttgaatgtatgattttaccaattttcttaaaacgaaggttttaaaaaacaccaaaattaaatgaggtattttagttacaaatttaatattacgcttattaaacggccaaaaataaattagatggcggttttttccccaattttttgttgttagtgtttttggcaatgaatttgatcgtaggaagccttggttaattgattcaatctccaataaatctttggttatttctggtttagattggttattgtacttggtttaatatgggtgtatttaagctcatctttgtacacatgttacattcaatgaaaacgttactatgacatgttatagatagattcattgttaatttttttggttgagtacacaatttgtaggaagccttgttcaaattacaag

SEQ ID NO: 2000 - DNA, 1003 bp, Arabidopsis thaliana
  Intron number 1 from transcript AT1G48210.1 (locus AT1G482 10) derived from phytozome v7.0 (chr-ID Chr1; pos 17798550 to 17799552)
aatttcttccgtagtttttcttgtaagcgaaaaaggtaaataaaagctttttcttcttcctctgttacgagtttctctttttggtactttccttaaatgtcaaaaacccttttttaagaaccgagggtttcgaatttcaggttgattttgatgattaaagggaatatcgtaattgatttcatgtttttcaagtttgaaatctgtatcctaggttaaaacctcgttgacttgtgaaaagtctaggtctacggaacataaaatgtctctttcttgttgttggtgtttgagattttgatcggttcatcatgtagatgaacaatgaactatgtacttcttctgatatttggctttatttatgtgaattttttttgatttttcataattctgtttttgtaaatgctcaaaaaccttatccttataactattcttatttttgtttttactgataactactctgtgaagttctctgaaagttttcttctttttggttattactatgagaaaatcttgttttgcaacaccatttactgaaaatttgtgtctgaatatgttcatgttcgtgcacacggcatgattagccaaatgcacaagcttactcatttgcacatcttagagaaattcttccaatcttttctttttggaaactatttgctagcttttgttggtaacataagtgcctttaccttgtaatattaagcttagatagccgaatcgtgtttgcaaaactgtttattgtgcttgtattttaccttgtttatatatatagtttcataaacaggagatactagaatcttactctgcaaagctgttcatttttctgtgtctattcttcatgcctatagtttggtgcaaactgtttattagaggtctgtgtctgaacaatctctttgttatcaataagtttcagaagctgctcaaaccttgtttcttaccactgttttgttgacattttgtcttttctcttttagaagtttagttagctcgtgtgagagaagggtgtaat

SEQ ID NO: 2001 - DNA, 756 bp, Arabidopsis thaliana
  Intron number 1 from transcript AT1G49480.1 (locus AT1G494 80) derived from phytozome v7.0 (chr-ID Chr1; pos 18315588 to 18316343 reverse strand)
ttattctctcttcctttcttcaacacaagcgtctggtaattgatctcttctctctcaaattgtgtttcgttctttttggttctgtatttggtttctgacaaaattgaggaaactggtgttgggtttgagtctagaactgccaaagatgtgattttgttttttgggtactgaaaattgagtgagatgaagtgataaagtgtcttttttttttggtaaattattcgaatggaacttgggatcggaactctgtttctttgttagggttggttgaaatctgaatctagtcttgatttttgtggtgaaatgagaggtgagtcagtgaaattttgaaatgtctttgattcaatttgacatcagaatactgctcaggttgtgtcttttgtcagatttattgagaattatcagcttccgactgtagatttgactttggtctcagtttaaagactatgagtggactttatagatctagaagcatgcgttgttttgattataagaaataaaaagagagtttttgctttaagctgtttgactaataacttgacttgggattatgatttaaccagcaaaactctcttttctccagccactgtgttttatgaatgtttgttgattccaaataatagtatgtgttgatcaaagtgaagtcatttggtcattacttggttctgagctttcagttgtttttgcacttacaatacctgatggtcatgtttgcatgtaggactaaggaaagccaacaacaaaatctggtttcaa

SEQ ID NO: 2002 - DNA, 866 bp, Arabidopsis thaliana
  Intron number 5 from transcript AT1G52240.1 (locus AT1G522 40) derived from phytozome v7.0 (chr-ID Chr1; pos 19457816 to 19458681 reverse strand)
atgtaagatttttcatttttacaagtgtttgcttttgtgatcaataaaagtgaaatgcagaagattttttatatttatattcttttagttgagatgcaaacaattataattgcccagccacaaatagagaatttcttagactgacttagactaatctatcattagcataatataaatttattttaaacttttactttgatagaaattcagagagaggtcaaaattgaggaaaacattatcatccataatccttaatttagttgagaaactgagatttttttaatacaacaagacataaacaaaaatgatattacagataatgtcagtaacatgtcctccctacatctcaatgtttgatttaaagaaaaagattgagattttttttatgtgtgtggagaaattcaactttcaaataacgtgcagcccacattccaccaagtatcaatttataaatagtaaaacatttcaagaaaattaaaaatatcctcttatttttttcccctgaagaatctgaccaaattcactacttgtttatggttatggacaacgaatcataatagttactaaaataatcaggttaaaactaaaaccattaacagaagtcaaatgatggtgttctgtatttgctaagtctgaaattaaaatcaaacaccgttttttggttaattaagtttgttttttcttcatgatctcctaaaactcctctttattacacgaagaggagaacaaatggagattaaaaagaattttcaaatcatagaaatcttttcattttttttattgttttgattaactagtaattaatggtaaaagcaatggagcaagaacaagagacttacaaatcaagattgtttcatttcaagaac

SEQ ID NO: 2003 - DNA, 813 bp, Arabidopsis thaliana
  Intron number 1 from transcript AT1G52343.1 (locus AT1G523 43) derived from phytozome v7.0 (chr-ID Chr1; pos 19494715 to 19495527 reverse strand)
tctagaaagcccatctcttaagtatcaattcaaaggtacacaaatttaaactatatttgctctctcatgtaatattgtatgatacatattgttttattgccttaacatgttaagaaaatatatatatattaactcaaatttataaaggaatcaaaattgtaaatcaggcataatacaatataactcaaactcaacttctaaaaaacttagatcaattcttatcaaaaataagagaaaaagttgtattcattggtaagaaaaaataagagaaaaattagatatgagaagcacatgacagtttggtttgcaacaagataaagaggctgggttctcttttattttttcagtttctgtaactttaaaacgattaaatttccgttgcatttgatgtaaacacgtttttccgaataaattttacaatttattcaaaacaaaaatgaaaaaattagttaattatgtaactacatccataatttaagttaccaatcacacataaataatatttttttgtagaaaatgtgaaactataatttttagtgttttaatcaaagttactttgtaatttgtataaattcatgttgtgtttcacatatggcgtatttaaaactttagaattaaattttaagagaaaggtactatttgatattttcacatatagacgcttattatatgctaattttcatgtattaattgattgcacaatatgcgagtgaaacattcaagacttgaaattgaatcgtaatgatttttgtctctgacatgacatgcatgaatgcagaggaagtaaaggcaagatcagaagaaccaaaactc

SEQ ID NO: 2004 - DNA, 396 bp, Arabidopsis thaliana
  Intron number 1 from transcript AT1G54830.1 (locus AT1G548 30) derived from phytozome v7.0 (chr-ID Chr1; pos 20451276 to 20451671)
cgcaaattctccagattcttccgtcaatctttgaggtaatcaattttctcttaaatttcccaacattttttctgggtttatttcataatcaaagcttttgtcttcaatttatttgttatcgagggctaaaaaaactttgatttatgatcgtttctcttgttttgatgaaatgtatttttattttgttaatttcactacttttgcattcttttgtctgatttttatcttgtctgattattgttttgtctgatttttatcttgtctgattattgttaatgtgtttaagttgtgttttttttttgttttcaatatgaaacttataaattcattagtgtttttgatgatagaattaaaattaaaaactttgaaaaatgtttctcttagtttggtagagaa

SEQ ID NO: 2005 - DNA, 853 bp, Arabidopsis thaliana
  Intron number 1 from transcript AT1G65480.1 (locus AT1G654 80) derived from phytozome v7.0 (chr-ID Chr1; pos 24331676 to 24332528)
ttggtggagaagacctcaggaacttctatactttggttctttcacttgaactcccttttgtctcttttcttctttagtttcttcagtgcttcttacaccttcttttttaaaatagaaattattttccttttttggggtatactgaaaatatttcttgggcatgcagagaccttggttaaaaatgccccacgctttccttttctctgtttttttatgatttatttggttttactttatgatacccaaatcaaaaactaatttatatttcatttcttttttcatgaagatggacccataaaatatttcttcctatcctaaattaaatagagataaatttatgatctatcccaaattttttccaccaacttcttgcataagtgattattatttaggataagaatcttgggatttttctttgttcctcctacctaataatttaatttgcatttgtttttttttgtttttttttaagtataattttttactatactttgaaaatggcatttttgaaatatcctttttgctaattaaaatatctgcaaaaagatatagaaaattgatgttcattaaaacaaatatatatattgatgaatctctgttgtggaatatttgaaaactgtttgaataaggatattctgatattcaagccagcctttaagatactctctgctatatatagacatgtagctactaccttttttctattcatagttttcttcttctttcttgtgttatctcattttccaaacttcaaaaaagaaaaagaaaaaaagaccttttgctttcttgatttctttgaaaatgataatcttatcttcttataattcttcgtcttatttgtttaatgaaggtt

SEQ ID NO: 2006 - DNA, 342 bp, Arabidopsis thaliana
  Intron number 1 from transcript AT1G69040.2 (locus AT1G690 40) derived from phytozome v7.0 (chr-ID Chr1; pos 25957846 to 25958187)
ggtatgtctcttttttctttctttcttttttctcattgttgattcttcttcatacgatttttgggtaagatatttcattattggttatggggttttcagtatttggtagttgcaggttaaagtttttgtttttcttcttcttcttgtggtttttttctctgttaagctcttttagaaatttacctaggatttgatgtcagtggtatctctctgtttattggtatttacaagaatacagagagaaagaagagattattattcatgggttttgttctgatttttgaaagtttctgtctttgaaactcactgatttttttatatttgggaattttttgattgcag

SEQ ID NO: 2007 - DNA, 911 bp, Arabidopsis thaliana
  Intron number 1 from transcript AT1G69310.2 (locus AT1G693 10) derived from phytozome v7.0 (chr-ID Chr1; pos 26056678 to 26057588 reverse strand)
gcctccgccgagaaaacaccaccaccggagacaccgtgagttttttttactgagacgagaaacacgtgtgtgtttttgtttgcaggggtccgatcgtaatttacttcattatcttagtgttggtggtggggagggttttagttttatcttgaggccaaagccaaaagccccattttttctctcatttattttctttcttttgagtaatttctttggcatcgcaagaaagatagagagtgatgagttcgtccgtacagtagtacattagaagttttggagagggaaggagaaattggtaattaagtaaagaatcgtcggtggcagttggagtaaataataatgatgatggaggaatgggaggaacaccgccgcaatagcggctgtgatattagcgtgcactctacatcttctttttctcctcgtcctttccttttcttttttaattatactaatgttaggtcaaaaagcgtctcacgttttaatgatgttaatctacatagtatctatctagcaaagttattaaaaaagactctgatttttttaacaattcttgtctcgtcaatcgttgtttcataagatgttccgtatgtagggttttcacttaaaagatggatgaaaatgttctagcaatgtaaaatggatgattttaatgaaaacgttatagcaagcatttgaagtcaagtaacaattttttttggttagatgttcaagttaattgcgttttattttaaactctcttttttattttccgtggttgttttgactgtgcaatattaggattggagtccatgttttgtgatatttttttgaatttgatagcttgattaattggttactctgtgatattgatgcatggttatatactttgttttctagagtgaaggagaagaagaaggctcaaaagcgaattc

SEQ ID NO: 2008 - DNA, 450 bp, Arabidopsis thaliana
  Intron number 2 from transcript AT1G70710.1 (locus AT1G707 10) derived from phytozome v7.0 (chr-ID Chr1; pos 26661850 to 26662299 reverse strand)
cttattccagacttctacttgaccgtgccactagggtacgttactctgttttcacactttaaccattagcattaactgtggtaattaattttaattattacaaacattttaatattctctttgtttttctttaatagtcaaatttaatagtcaaaaagattttaatttttaatcaattattctttgcttgtgagataagagattcgtgtccatatgcatttataataattgttttatttcagtacttttttgggtgatggttggttcatttctatgattcgtttttaataatttgacttttttgagtatatttattcttacgtatatgtactattgaataaatatttttactgacgtagagaagatatatcaaattcacggatctgaaataaaaatgttgtaccgttgatcgcaggtattcgcgtttgctaacagatatcgcggcgcgta

SEQ ID NO: 2009 - DNA, 428 bp, Arabidopsis thaliana
  Intron number 1 from transcript AT1G74440.1 (locus AT1G744 40) derived from phytozome v7.0 (chr-ID Chr1; pos 27979616 to 27980043 reverse strand)
tcgcagctcgattaggacattccttgactttaaaggtaagccctttgttctaattactggaaaagatttcgtctttatgcttctccatgcatttgaattttgaagctcagtttcttcatgcttttgacttgatagccatgttgtgtcctctgctcattgtgttcttgttcctaatgtttctgtggagctcttgtttttttgatgttccttgatgtatatatgctgctgatgatgttggaaggtcaatgtcttgtctccgaactgtaatgatcacccgtctagatataatgtggtcctttcatgttcaaattcagtgtcgatatcacctgtttaaaacaaagttgcgtttttcttctcttgcatagcaaaaaattatatcttttgaaatctgactcgctttttcaggttggagtagcttctcagctctt

SEQ ID NO: 2010 - DNA, 414 bp, Arabidopsis thaliana
  Intron number 4 from transcript AT1G75730.2 (locus AT1G757 30) derived from phytozome v7.0 (chr-ID Chr1; pos 28438063 to 28438476 reverse strand)
cctctgtaccacggaagcttcgttcaggtgcgttgttcgtgactcattgagataacttgtagaaaccaactttaatgttttttggtttttcctttgtaaagtcgtgattcatatgtgtgtgtgtgtcagtaaaaacttagtagttgagaagattatggtatattggcttttgaatctgtggagattttggattatttttcaagcaaactcttttttctttttctcactttcttattatggacgcaagattctgctacttgtcttttatcttctttttactacttattaaaatcaaaagcttatcaatcttcaacttataatattattttcattctctttcttttctttaaagcttgtctttgtcacttttgtgaattctttagcatctctttttgtgcacttttaattgcagcc

SEQ ID NO: 2011 - DNA, 447 bp, Arabidopsis thaliana
  Intron number 1 from transcript AT1G75730.2 (locus AT1G757 30) derived from phytozome v7.0 (chr-ID Chr1; pos 28439065 to 28439511 reverse strand)
atttgtactgtgtacgtttttttatcttcttctacttcttcttcttgtgtcagttacatatcaatgtttgatttgattgaagaacagtgactccattaatgaagctttccttatagtaaatgcttttttcgaaaaaaatcaacgatctacattttttttttttgtattcacgggttgaatgtacaaacattaataataataaaaaataatttcttctttaagtcttcttttttttcttttggctttatttgtctcatctcttttatttcacgaagaacctgattcttcgagacacgagaaacgattttataacttttctctcttttttcttttcctcttctttaacgtctttttacttttctctcttttctcttcttcttttgtgtatctatctaacaatcaaagtgtgtgaaaatcgtaagagacctttttttgttttgcagagag

SEQ ID NO: 2012 - DNA, 948 bp, Arabidopsis thaliana
  Intron number 1 from transcript AT2G03370.1 (locus AT2G033 70) derived from phytozome v7.0 (chr-ID Chr2; pos 1025933 to 1026880 reverse strand)
tcgtcaattgttacaatcgtcaagtttatatcaaggtatgcatatttcaaattacttcttcgattaagcaaataaaaatcttcaacatcttcttcttcttttgaggctgcgatcaaacacttttacactttaaaatagtagtatatattataattaaaaatttgttgcgagtagaaactatttggggaataaaatatatttttgttttagaaaaagttgtttatatattcatttttctcctttataaattaattttcatttccatattttaaatttattgtaacataaattataatagtctagtaaaattaaactatcaatcaccaaaactttttgccaaattatatatacatcattattattattattattattgtcaaatctccgaaattactaaatttcgcctaaaatatgattctccctctttttcagaaaatgttttacatgcgaatcaatgatcaaatcgtcacaaaatatcataaaagtatgttttataatttcgcctaaaatatgattcttcctctttttcaaaaaatgttttacatgcgaatcaatgatcaaattgtcacataacatcatgagaaatatattttgtaatttcgcaaaatatgattctctcttttctctttttgcttttctcttagtaaattcaattttgatattgttaaaatgatttaagtgtggttagaaatgataatcataaaatggtacacagatttcttctcacatttttttttttgcgcaataattttaaaatcataaaatgactcaaatcttttgtcataattttagcggttgacgtacaaaagaatagaaacaaaaaaatgtttagtaagattttaacatccactaaaaatgtttttttattatcttttttggctacgtactcttctctttttaagttttaactaaaaaaataagagaagttgtaggtacgttacaacaacc

SEQ ID NO: 2013 - DNA, 800 bp, Arabidopsis thaliana
  Intron number 1 from transcript AT2G15530.2 (locus AT2G155 30) derived from phytozome v7.0 (chr-ID Chr2; pos 6773133 to 6773932)
agacccatttgattctttagggattttgaaggtaccatttgtctcaatcttataaaaaatttcacctttttttttttttttttgttaccactatgtgtctttaatctgtgttcattgttcagatcgttgtgaaatttggttcgtgattcgttgcattgcaatagctagacggatcgggattgacccactttaggtttctcatctcaaagattgcgaaattttctaatttggcatcggattgtttggatttgattgcttatgtaagtaacttgatttggttggtaacttggtattgcaatcagaaaatgtgctattcagtgttcctttgtgattaggtaattaagtatattagaaccgcatggtctttgttctcaatgctagtttagttgttttggtttcatgaagtagaagaagttttgacaatatttactctctgttgtgttaaaaattagcatagctttatgtaacatgtaccttgttttctctgtactttcatcttttgaatggattctatgttaaagaatccattgatgaagtttacaagtggtagtttgttacttgcttatatgttagttattacactagtttgacaaggttttggtacttacttgctcaattgctacactcacactgtgaaattcatgatttatacttatttcagttatgcaagaaacttttgattacataggaatgatgtttttgatatatgatagataatttgacatttattagtgaaagtttctgatcttgcctttttgtggtatcaattggaaacataatgcagaagctatagttggagc

SEQ ID NO: 2014 - DNA, 728 bp, Arabidopsis thaliana
  Intron number 1 from transcript AT2G17410.2 (locus AT2G174 10) derived from phytozome v7.0 (chr-ID Chr2; pos 7559118 to 7559845)
actgcttcttcttcgttttcgtcttctttatcaaggtgcgctttagcttctcaacgccgtttgatttttagaatttcgatttttttttttttttcttctagttcttgaatcaatccggaatttggcgactatgttgcttcgtttgtaaatcgtattctcctgtttagaaatcttcaattgactgtgttataggaacaatttaaatctcaatttcaatgtctcttttagtcaccttcgtgtagtaatttgcttttgaattactgttaatgaatctcaaaaaatggattttataatttgggaaaaggggcttctgggtttaattaaagaacacgagataaggtctggttttttcttttcatttctttgtgtgtgtttttggtttctttgattttcttctgggttatggtccgtttgagtctggtgatagttagttggcaaccaatttttattgatctattacaatcgagaacacaaaactaaaccctaagaaagaagtacataaagttgttgaaaagatctcgttaactctcccaaagtcctagggctttcacacaaccagtgattaaataacctttgagctgttctccttcccacactttatatgtgtgtttgtggtttgtctaatttgtgaggagcttctatgaaacctctggttattttaattgttttctgcaattcctgattgatatgtttatatatatttcttgtatttgtgaatttgtgtagga

SEQ ID NO: 2015 - DNA, 727 bp, Arabidopsis thaliana
  Intron number 1 from transcript AT2G20630.1 (locus AT2G206 30) derived from phytozome v7.0 (chr-ID Chr2; pos 8898892 to 8899618 reverse strand)
aaggtatgcttagctcaacgctagtctttttcttttttctttagtagcgtttcaagggctctaaagaatcttgattttgtgatctgatccttgtatgtcttgttctgtttctcattaagctatatttgtttctttgtgataacttgtacgtagagccgttttaaggaagttagcatctcgcatgttaaacgatgatattgattcttctagagcttgtgttactgaatttgtttcagtaatttgtgcattttctatattctctttttggttagagatttggtgataatgaaatgtatgtatgttgctcttgatgaagaaattacagaacttggattaatgtgattgtgttttggtgtgaattggtaaaggttggattatgtagatcttttttgtttgttttgttctgcaagctgaattttattcatgaaattgagtctttacaaagggttatgtggatctaataatcatttgtttttctttaaatgtctaaactttgaatttctttttgtttatcaaaccaaacttgattttataatttatctttctcatttattttcatatttgcttttttttttcttcttatattttgctgttatttgtcaacttatgtttttagcttaagaataaaatgattataatgtattgagtagtaaaaaagttttttttaaaaatgaaactaatagtataatttcttgttgtttgggtgtgaatatttgaaggttggatt

SEQ ID NO: 2016 - DNA, 780 bp, Arabidopsis thaliana
  Intron number 1 from transcript AT2G22330.1 (locus AT2G223 30) derived from phytozome v7.0 (chr-ID Chr2; pos 9489580 to 9490359)
aaatcaaaccaaccattaaggtacatagctttttaatatacttttcatatgttacatttatacatatttaaaaaattaaaccaactgttacgttcgatatataataatatatgacatagtatttatatatagtatcgacgagtaaatagtttgacattctttgagttgaaatagtggagatttctaatattctttagaaaaatatgcgttgaaagagtaatatttcacttttggcagagaaaatgccataacatctattacaaagtatctttgctaaaaaaaacaaggcaatccaccaatatccgtcagattcagacgtattttttgtttaatataagaaagttaaatatggtgaaagcgaaacataacgtcaaatatccatgttgactcgtgagtcatgagtccactcatggaaaaagggtttggcttttttggagttaaaatggcagaaacttattaggaaggaaatagtggagacacaacatctataaaataaaagaaaaaaaaaaactgattgtgactctattttgctgtccacaaattaaaagaacaaaaacaattgtcttagcaattttgggagaaaaggttaaacaccaaacaatctatatccaacaaaatcttatgtgtagcataaagcatgttgaccacgagtccatgcatagaacagtaaaccgataagaatctttatctttttggttataagataagaatcatttattaattgtcaacttgcttaaactaatgaaaatattttacatattaattttataggaacttgta

SEQ ID NO: 2017 - DNA, 692 bp, Arabidopsis thaliana
  Intron number 1 from transcript AT2G27510.1 (locus AT2G275 10) derived from phytozome v7.0 (chr-ID Chr2; pos 11758749 to 11759440 reverse strand)
cttccctaattctctctctctcgctacctctctacgtaagtttcagatttgactttattagcttcgattctctctgatatttgtttctagaatttgatctgatcagcgatgtttacttgttccttgttttttgttttttcattgacttcttgtggggacaaaaaaaaacaatcaaatatctttcgatttcgttgttcttctctttttcgttatctgatagtgaccgatttgatcctgtatcgttgctattcagatgctaatcatctccttaattgtgaatttttttgttgttatttagtgaatcttgttacaagtctgttgtaggtttatttttgccattaagctactttgatcgactttagaatctatttgatgataagtaattaaacatgttttagtgattgttaagtaagtcatttagtcatgtttttggagcatcgagtgaagatctaatatagctttaagcttgcatcttctcattacgctccatacactaattttcacatcatatttgctattggaaacagataagtttttggttcttgtttccattgctacttgtgatgcacatcctcacaattttctctcagttttggttcttatttctctggaacagtttgatttgttagattgtatcactatgaagaaaccctgaagctaaacttgtttataaacgcaggtgataaacaaga

SEQ ID NO: 2018 - DNA, 663 bp, Arabidopsis thaliana
  Intron number 1 from transcript AT2G29980.1 (locus AT2G299 80) derived from phytozome v7.0 (chr-ID Chr2; pos 12784011 to 12784673 reverse strand)
cttttctgggccatctttgttctcggccacgactggtataatttcttaatcttacgtttaacattttcattttaatttaattaatccttctttatcaactaatctcttaaatttttcattttttctaattgtttgtgttactttttgcttttttaattgcctcgaattcttaaattacttagaatacacgttcgatgagtattgtcgctaacttcaatatttgttcttttgaggttactttattttttttgtaatattaaaaaacaaaacaggaaaagaggatccaagatttctgtttttagatatttttcttcaataacgttccacgatgatgattagtcgtaagactcgtaacaaaatatcttttctattattaatgttaattccgcatttcatggatctacgttccaagtttccaattatttctcctctagatctccggaacttttaattagaaattaaatattttatacaatgtttttattaactctttttatgtgtgtaccaatgtactttcgagatttatacacgtcatatatagattttcttactttcttaaggtgtcttaaattaaaacaaacatggaaaagcaatatttttttgcagtaaatgtgatatatactatgaataataattgaatgtgtaaatcatgatacagtggac

SEQ ID NO: 2019 - DNA, 936 bp, Arabidopsis thaliana
  Intron number 1 from transcript AT2G32710.2 (locus AT2G327 10) derived from phytozome v7.0 (chr-ID Chr2; pos 13874039 to 13874974)
aatttcttcgaccttgaagaagaacacactcaaaggtatcatctttcttcatcaatttcaacctaattttttgggggatttcttatttttatgaatctgtgtgaatttgttctgtttcttgagaaaactttggtattggatttgaaaatttccgttgttaatttgaaaaaaggatcaattttttgtcttgtatttggttaaaattgaaactggcgttttcgattttgaaatttaatgatatttttaccatgtgtatgatatgatgccatcttttctttatctgacaacaccagactcttctctctgtttccgggaaagaaaatatatataattaatcaaaaatgtgtttcttttttcttgagaaagtttttattttttcttcaattactttgaagaaggtgatagtgactattgttttttcttcagactttttatctgctttcatgtaaagaatgttggatttgtgtttgaaatgtctctgtaagtaactctttaaagtttggttcgtttttgggattctgcaaagtatatgatgtgtctctgtaacatcttaagttctagtttctctgtcttttaatttttcttgctgtttggttgttttttgatgttatgatttcagtctaaagtcgtgatcttgttgaacattgtatgagtcattaacttttcaagcattgctgaagtaatcttcattggaagtttcttctttggttttatgctttgtgaactttgaaccacaaatcaacaaggagtttctccttgtccttttttcagttaaacatgacttgcttagttttagttatctatatgcaataaagtttgcttgcttttgctgctaattaaggaaacacggttatgtgctttttccttgagagcattgtatgaaagtaacatattacttactctcagcttcaacaggaccacaagggaatccacacc

SEQ ID NO: 2020 - DNA, 936 bp, Arabidopsis thaliana; identical to SEQ ID NO: 2019
  Intron number 1 from transcript AT2G32710.1 (locus AT2G327 10) derived from phytozome v7.0 (chr-ID Chr2; pos 13874039 to 13874974)

SEQ ID NO: 2021 - DNA, 505 bp, Arabidopsis thaliana
  Intron number 1 from transcript AT2G33860.1 (locus AT2G338 60) derived from phytozome v7.0 (chr-ID Chr2; pos 14327796 to 14328300 reverse strand)
ttaagcttcacgtatgtaactaactctctctttctttctattttttgttttgttttgttttcttcatttatgttttctcctctgctctcaaagcagagagatatgggttttgttctgtttttctgattctttgatttttttaattgtttgtttggtgaatctgagttgggttttcgatacaagtatggagatttgtgcctttggtttattgaattgtttgagacaaacgaatttatgttgggagaaaagtttcctcttttgctccatttgcatttcttctcgtggcattttgatgacgaatacttgaaatccccataaattatcttcagttttttctttgatgataatgaatttgatttcaaagtttcgccttttgctccattttgatgacaattgatttcagaacaattcaattctctgtaaaggtttaaactttttttgttgttgtgaggattaataaacaaaatgtgggggattttgatttcgtaggcagagacgactacag

SEQ ID NO: 2022 - DNA, 707 bp, Arabidopsis thaliana
  Intron number 1 from transcript AT2G34360.1 (locus AT2G343 60) derived from phytozome v7.0 (chr-ID Chr2; pos 14507505 to 14508211)
cctccttcgcctccgtcaccggcttcaccttcctcgtcagttctttctatcaaccctctctctctattatcaaatcattctattcttttactacaaagttttttttatgagacaccgagaattattagatggacaaatatctagtaattcatttctttatagatattgatatttaattattttctatttagcaatgttgaaaattaccaatagttaataaaaaaaaagcgaaaagaagtgactaaatataaaaatctattaaatacaagatttctatgaattagaaccctatagtttaaacggctaattgaaaatttagaaacctaattaatactaaaaaatcttctcaaggaattgtatgatatatatattttaattcagctacgatgtagctatcaggccaccttttctgaatttccaagttgcgtatgcatatttgattcttctatgctactccaagaacaaaaacattttgtcattttaagaagaaagcgaaaacaccaaaaataaacaagaaaaagtgttttgtgtataaatattttcttttttcttttgtttttgctacccgcacatgtttacattgcatggtaaatgacatggagtatggacagtccaaattaactatctaacgatgtgaagatttacgttgaacacttacttgtaaagcaagaaatcttatcataagaaaactattcacctctgaacag

SEQ ID NO: 2023 - DNA, 926 bp, Arabidopsis thaliana
  Intron number 1 from transcript AT2G37450.1 (locus AT2G374 50) derived from phytozome v7.0 (chr-ID Chr2; pos 15723770 to 15724695 reverse strand)
gctccgttcgccttctacttcgacaagtattctctacatttccatctttatttcaatttctctcacaaaacataattcaatgtttggtttgcgagtagtttcaagaccatgatagcagattatcattcaggcctaattggtagttgcgtttgcagcattataaacgcaaacggaaaagtaaacgtggtttttacgtctaaaacaatcacagctctatagtttgatataaattgggaatcgagtctacttttattactaaatcttttattctacaaaacgaattattttcagatacataaattaaagataatacaatgttgagtcttttttgtttgtggatggttcttggacgtttaacatatatgttaaaaacaagaattgtaacagttttgccaatatcatgcattaaatctgagtacttaagattttagtgttttctttacaaaatacacgagttcaacatttaatacataaaccgataaaagtagttatgcaacagtaattactattgtagtccagtaataaattaggaaccagttgtgcagagtacgggatctacacaattttggatttcctaataattctcgatgaaaaaaaacaggatagtgagaccgaagatgacagcgttgattttcttcaaaatagcgattcttggtttattagagtaatttttttccttcttcaaattattttctatgagacatcacatctcttcttttattgactgaatctgatttattttccatttcgttcatgtattttgcgtataaatagtccagtgattgctcaaaacttattcaatctcgggatgaaatacacgacagctacatttgcaattgccttgtacaacactttacctgcagtcacgttcatcctcgccttaatattcaggctcgaaagcgtgaagtttcaaagtatcaggagtg

SEQ ID NO: 2024 - DNA, 809 bp, Arabidopsis thaliana
  Intron number 1 from transcript AT2G37450.2 (locus AT2G374 50) derived from phytozome v7.0 (chr-ID Chr2; pos 15723887 to 15724695 reverse strand)
gctccgttcgccttctacttcgacaagtattctctacatttccatctttatttcaatttctctcacaaaacataattcaatgtttggtttgcgagtagtttcaagaccatgatagcagattatcattcaggcctaattggtagttgcgtttgcagcattataaacgcaaacggaaaagtaaacgtggtttttacgtctaaaacaatcacagctctatagtttgatataaattgggaatcgagtctacttttattactaaatcttttattctacaaaacgaattattttcagatacataaattaaagataatacaatgttgagtcttttttgtttgtggatggttcttggacgtttaacatatatgttaaaaacaagaattgtaacagttttgccaatatcatgcattaaatctgagtacttaagattttagtgttttctttacaaaatacacgagttcaacatttaatacataaaccgataaaagtagttatgcaacagtaattactattgtagtccagtaataaattaggaaccagttgtgcagagtacgggatctacacaattttggatttcctaataattctcgatgaaaaaaaacaggatagtgagaccgaagatgacagcgttgattttcttcaaaatagcgattcttggtttattagagtaatttttttccttcttcaaattattttctatgagacatcacatctcttcttttattgactgaatctgatttattttccatttcgttcatgtattttgcgtataaatagtccagtgattgctcaaaacttattcaatctcggga

SEQ ID NO: 2025 - DNA, 906 bp, Arabidopsis thaliana
  Intron number 1 from transcript AT2G37460.1 (locus AT2G374 60) derived from phytozome v7.0 (chr-ID Chr2; pos 15727931 to 15728836 reverse strand)
gccccgttcgccttctatttcgacaagtacactctactttcccttctttacatatgtaccaactcataaacataagtaaaatgttttgtttaagtaggtagattcaaggccatgacaacagaatatcaacctagctagtttgatatattctgatgaaattagtttgcctagctaggattattattttgtgttttgagttttcagggtgtgcaaacgcaaaataaaataaaaattgtgaccatattctacaaaacagattatatcaaaaacatgaataatcatttaatatattattgagtgttacgttgtctaatttatttttgtgagtgatgcttagtgtttgaagcttgaaaagatgagagtagcaaaaagaaaccatgatgcttttgacgtaatatatgataagaaagggtcactcatatgttaaaagacaaaagacttgtaaccgttttatatttggtttttgtgtggtttctgccaatgtcatgcactgaatgtgagtccttacttttttagtgtctctttacaaaaagaaacactaattcaatttttagtgcgtaatcaaaatgtgtgtatgcttctgcaattaattatgactgtaatccagtaatatttacacagatttgtacgtaactaatttgaaatgattctagttatctatccatggagaatatttgtcctaatcaatttttccttttttattgaaattaatttttagtttagatgattctcaaatattattttcttacaacgattctcatataatccaatgtccctaataaaaataaaataatgatttggttggaatttttttttttcttttttttttttcttttggtaatggttcgacgttctaatgtaatgtatggttatgatgtaaaacaaatcaggaaggtgagaccgaag

SEQ ID NO: 2026 - DNA, 923 bp, Arabidopsis thaliana
  Intron number 1 from transcript AT2G37980.1 (locus AT2G379 80) derived from phytozome v7.0 (chr-ID Chr2; pos 15895962 to 15896884 reverse strand)
tcgtcattgagaagcttcccgtgagttttttcttcattacattttgcaaaattcattttcatgagaaaaaaaaacaatttttttagctatatagattattctggtcggtgcacaattgaggaacagcgaaatgtgaaattgggttcgtcaattgaatcagtgcttgtgacgaaatgtgaaaaagttttgagctttatgatcaaaacccagaaatcatttagtagctaaattttgctctgttttcttaactttatgtctttattgaagagatttttttgggtcaaagattggatttttaacggaaattcgcggtttcttttcctgtctttttctcgggaaaattctaaattctaatagaaaaagtggggtataggggatgtaggatccaacgtgttattctcggaatatgtctaatgattgcgtcactgatagattaaactaacgaatcatagagcctttaccaatcaaaattcgttgcatttttctgatattagttatatggatttgatgagaaatagtcaaatggatttgggcagcctttgtttagtatggattaccactttctatagtttccattgacaatctactatgtagctggagtctttgaactttattataattctactatgcattattggataatcattcgaaaaggtctgagattttgtctctttgtgtcaaatctggtggatggtgaccctttgattcttgttgaatactaaaaggaatggtctttactgttttaaagtcctttgggttatgctacgttttactgtcttttaagttccaaagaatgcatttgttgttgggatgattgcaatttatgaactttgacttagattgtgaacttctgcaaacgtatgaatcattaatctgtttgacttgattttccaatgatttggtggtttacagattccggaaat

SEQ ID NO: 2027 - DNA, 717 bp, Arabidopsis thaliana
  Intron number 1 from transcript AT2G42200.1 (locus AT2G422 00) derived from phytozome v7.0 (chr-ID Chr2; pos 17587925 to 17588641)
ggtatcgaacagaggttttgtcaacagtgcagcaggttcttttattcttcttcccagttctaccctttagttctattctttattaacatgttttgccattgccggagatattcgagtccggccaaggctctgcttgttccactgttgtgaatcaaatctaaaggctttagctttttgtgattgtcagtgtcatatgcttttttggctttaacgtctttttattttcattttttaaaaaactttacagcttagttttgtaacctggtcttgtgtttgttggactcgttgggctcatttttgggaatatgtttacgtctacttgtagatgcttctcttttatttttcttttgattttgtctttctaaatatctaatccaaagagatatgaaatgaatggacaagaagaaagccgttgccctcatttttgcttctttaggtcatatcattattgagggggacaaaactagtgtaccatagcatcattgacgtgatcattgaggaactctgttacattatattacaagtgtgtggttttagattttaattcaaaactgatgacaaaagcttataatgactgatagaatgtatacaaacggtagttaacgtggagaggtcttgtctttggaatgttctgttatgttgcttttctttgaagttaactcaatctgaatcaatcacataggtttcatcagcttccggaatttgacctagagaaaa

SEQ ID NO: 2028 - DNA, 467 bp, Arabidopsis thaliana
  Intron number 1 from transcript AT2G43700.1 (locus AT2G437 00) derived from phytozome v7.0 (chr-ID Chr2; pos 18115243 to 18115709)
ctcggatatttaaccgacggtgagggtttgtatttctctatctcttttattttattttacttttttttttgttttgttaattactttttagtccttcatgtttcctcaaatatatgtttggccccaaaatttcgaaaatcttgcatttcctccttggtgtcattgctcttcaggctgattcctactaaccgaagtaaacatgatgtcatgtatgtatgttattagaaaaatatattcatgccaagaattttattatgtatctgaagtcatcactttgacttttatcttgcttatcaaagatataaacaacaacaaaaactgaattatcttcttcccttgtaaaccactcaatcaatcattgatcatgcctcgtaacttcaacttgttgttagttctggtgatcattgctctgtttattactaaaaactcacttggcaggcttcttgagggatccactggtattatca

SEQ ID NO: 2029 - DNA, 965 bp, Arabidopsis thaliana
  Intron number 1 from transcript AT3G06080.2 (locus AT3G060 80) derived from phytozome v7.0 (chr-ID Chr3; pos 1836125 to 1837089 reverse strand)
tggcgttggcaacctagacactgtaatttgcccaggtattgattctgtttttctcccccggaaaattcgactgtttcctctgttcttactctgtttctgccacttggtgttcttaattgctaaatcaaatcgtttatcttgatggaattcatgtttgttctttgaatagtgttttctttggaaaccgaaagggttattgaatcttagagaaatcagagcttcttaagtttcttctgtgttttactgttctaggcaacttcttaagtttcttatgtttgttttctagagattttggttattggaaaggagattttggtgtagtaatttctggtaaatcaaaaggttttttgtttttgggtttgagatttatcaagtctttggtctatggagaagataagtcagaggttctttaagttttgttgctttcagctttgatgatgtcgttttctatggtctcttctccagttgtccgcaagttacggcttaggataagcacaatctcgtgaaactagtcatcagattttggtattaaagccagtcgctctttttgttctcttctcttgatttgatcgttttatatggtcccttcttcttccatttcccatttacatcaaacagctatttcttctccaatcaatgtgtgtgctctttctttttctattaagggttttgttttgtattgtacccgtgagttaaactggaaagacaggattggttgccaaataacatgtatgcacaatagtttgtccgtggtgtttcttgagctatgaactatatgtttaggttttgaattccacctagatcaagcaaagtttttgacattggttttgtggaatagtgtgagtaaaggtcaattcttgtggaatacttgattgcagatatttataatagagaattcagttttgtcttgggaggcagtacttagctgactctattttcctgttttgaaaactgaattagatttg

SEQ ID NO: 2030 - DNA, 700 bp, Arabidopsis thaliana
  Intron number 1 from transcript AT3G14850.2 (locus AT3G148 50) derived from phytozome v7.0 (chr-ID Chr3; pos 4995851 to 4996550)
gcagcctctttcctgcaaattagcaaggtatcatccattctttatttattacatacatttttatcttttcaaacttttttttttgggtgtctagctattgaaccaaggtatcgttatagatatgactatttttatttttttacttttgattcatgattttgttttaatatattcgtcggtttttatttgttgaaatatgacattacattagcgttataggaggaccacaattttttgatttgaaagataaacgcaataataattcagcagtgtgaagaaatcttgatttggttcatataattacttttcaagaaagttgaaaatgtttagagatattgtttttgtgtttgtaaaataaagcacttttgagtgagcaaccaatgagaaaagagaatgctatttatatagttgtttgctataattgaatggtgtttagaatctccaaaattgcacgagatgaaaacgaactttttttgtcacaatatatgccaagtggtggatccggcgtgagttacacgcgccgccattgagattaggacagccaccaaactcttcctcataagaagacataaattcccccacacttgtggggacagtaactcaaatctttcgacggttctgtcctcctgtttcttaagttaatttcaatgcatgccaccgacataaaacgccaccgtttatattgtttgttctaggttca

SEQ ID NO: 2031 - DNA, 526 bp, Arabidopsis thaliana
  Intron number 1 from transcript AT3G16857.1 (locus AT3G168 57) derived from phytozome v7.0 (chr-ID Chr3; pos 5756278 to 5756803)
cttaggacttgtctttacgaaggttcgtatccaaaaaccaagatcttctcttttcatttttttttttttttttttgttcgtttaatctcacgagagagagagagagagagagagaaagagagttcatggtctcttgctccaatgatgggtttatttgtggtccattctcgaaaattatgttattttgaggaataattatggttttcatatcggtggttgactaactttgctccccctttaatagaaaccattttggttactttttaagattcacatattaatctcgagcttcttcatttagatcacaccattttgatctactgatagattcacatgtagatccattgtatataataagttaggggaggtttcaaatggattcaaatcttgagtctttgatctttgacttgagttttggttaaatgtcaattcatgaggtccttgttgtcagaattcaaatctctgtttttttcttttatctttgaagatatgaaacattttggttgttatgacatgcagtaacgaa

SEQ ID NO: 2032 - DNA, 671 bp, Arabidopsis thaliana
  Intron number 3 from transcript AT3G45290.1 (locus AT3G452 90) derived from phytozome v7.0 (chr-ID Chr3; pos 16618507 to 16619177)
ctcttccaaggttctttttgaccctttgatctttaattaaaatcattttacagttttattttcatttatctttaaatccaaggtggacatatatataatgtataaaagtagtatacaaaggttttaacttagaaaaacaaaagttttgatgaccagtgaaactgtagatagaaattatgcagcaattttgttttcttaatcaatcacacaatttagtttttgatttatgaattttcgttaaatgattttccagttttcataaccttttattgcttactattctacaatatgattatttaaataagagatttaatcatatacatttttatatgcttaacttatgaaacttctgaatccaaaagttttaagatatcttcttgaaatccaagatggagggagagaggaccgcaaaatccaaaaatgtcaactagtttactttgacgttgacttggagtcttggacattgtcgttagctagagtccactaatcaagaaaattacgtccaaataaaaaagaaaacaaaaaaaaaattgttgagttatgaacaaaatatcaagagtatgactttttctttgcttactaaagtaaattttatttcgaagtaactaatccgatttaataaaataaaatttgcagggtaagacttcactaatatcagaagaagggttgac

SEQ ID NO: 2033 - DNA, 726 bp, Arabidopsis thaliana
  Intron number 2 from transcript AT3G55880.2 (locus AT3G558 80) derived from phytozome v7.0 (chr-ID Chr3; pos 20737550 to 20738275)
gaaagctcctagtcttcaaaatcgacatcgaatccgtaagttcactttgatttttcttattttattaacttttagccgttacataaagcattattagcattaaaaaaatgatataggccgtatcaaaattgtttatttttcaaatctagcattagttatttgtttttatatcttaagatattgttcttctaccactaatacagatcagactcggtcagaaatagcatgtgacttcagatattacattatagtcaccgtcttgaattaattttcacattttttttggtaccaagtgttattgtaggtttgaaaatgactagtcaattgagaaggtttgatttttcactcccaacaaaaactagaggaaattgtattttgattagcactttcttatgtataaaatcactttgattcaaacctaattagatagtgacgaataaatagtattaattacttatatataataagaataagaataaatcgacattttccctcgaataaaagaaagagtgaaacggatgtttccgagtgggaaccgtgtgggatgaataatgatggacgactgctttatataatcttcgtatttaatgttactttcaattaaatttttataagatattaatagacatgacaacgtcactaacacctaaaacatggctcatgattttagttgaagtgtgactaataaatatatatattccaatttgcaggtttcagcttgtaaaa

SEQ ID NO: 2034 - DNA, 1020 bp, Arabidopsis thaliana
  Intron number 1 from transcript AT3G59290.1 (locus AT3G592 90) derived from phytozome v7.0 (chr-ID Chr3; pos 21911757 to 21912776)
tcactgttccgcgatccaatttccttttccagcaggtttgattgattttgttcttcctttgtgagatcggattcatgtttgtggctatatatatatatatatatatattttttttttccttttagatctttgtttccattttgataatttcagctgactttggcattatatcttctgctttggattgtttgtttgatcaattgcaaatcgtttcgatagacgaaatctcgaatcacgcaatcaattttaaacatgttaagaagctgcattttgaaggctgttcttgaatccaaaatgtgtttggcacccagaatttgttttgactttattgatgatttgtcggtggttgttcatttgggagattttgttgcgctatggatcttttatattgcatagataatgttttttaggtttaatctgaaaaaaaaaatgtatcaaggtctcgctgatttatgtgtgagtcgaggatttgatcctttgcaagatttttgtcttacgctagtgccatgtatgtttatgtgaaggttacttcatttggttcatgttgtatcaaattttctttatgggaggttttgttgctatggatctttctatagcctatataatgtttattaggttgaatctgaacataaaatggatcacagtcacgtcattatgctgatttatttgtgattgctgcttgattcgatgatttttaaacttttacatgatttttacggtggtggatgtctgtttatattatggttgatcaatttggttcatactgtattaaacttcatttacttactagttttacattggaatgtgagatttgactgtgatttattgtgggttcttcttcttcatttttttttaattctattcagtttcaaactacaagattttgttttgatatggctctttattttcaattttttttgtgattgctggtttgtttgaattatttgaaacaattgacactgaaagctctttgcattctgaacaggctataagtgtagttagcacttcttctataaaaag

SEQ ID NO: 2035 - DNA, 606 bp, Arabidopsis thaliana
  Intron number 1 from transcript AT3G59300.1 (locus AT3G593 00) derived from phytozome v7.0 (chr-ID Chr3; pos 21918670 to 21919275)
gtgatcgcggctgcttcctctttttccctcggtacttcgccattcttcgagatctctcttcattttgtttcatatgtattgttcattgactaatctgaagttagtgcatggctgacagagacgaattaaaattaacttctttttttcattaatggcgaaagcatttgggagattctttttggttgacttgttttgatatttaatcgaattggtttgtttagctcgatcgaaatttgttttttggttcgtgggttatctctgtcgtcgaattgttttcttcaatctttatgctttttggcgtttagcctgaaattagtttcatttttctctgctttgaatctaaacgagacctcagacaattatttctgtgtcaagttttgttttttttttaattattttttgtttttttaggaattaaatgctaatgtcattgttagagatctttaaatctgatattagtaattctaaaggtctctccttttgcttcttcttccctgaaaatttcaatttttgttttttttttgtttttctgttaaaatttgggagcagtgaacaatcttggtatgtatttatcaggtccatctcattgccatcaatcttacacgg

SEQ ID NO: 2036 - DNA, 502 bp, Arabidopsis thaliana
  Intron number 1 from transcript AT3G59500.1 (locus AT3G595 00) derived from phytozome v7.0 (chr-ID Chr3; pos 21986608 to 21987109)
tatagatctactatctccttcacagttgctatcaggtctgtgttcgtcttcatttttaccaaatcctgattgttacaattttcttcgttttcttctgtgtttatcttcgttttcttcggtttaaataatgggatatttcttgtcgaaatctggattctatgcgcatgtttagtcacggataatatcggaaacccctggagtatcagcaatgtcgtaatttttctggtttgcttagtgaattctctgtgaaggaaatatagaaaagaaagtagataacgtgaagaaattgttgtgattgagcaataagagatagagagaatagaagtaattgatggtttcttgagtgttggtgatattttgatggttggatttttttatgtataaagaaagcttataaacaagaatcatgcaaagaaattttgttctttatgcttatggagtttatagttagtcaaattattaacggtaagctctttgtgttggttttgtttgaatgtcagag

SEQ ID NO: 2037 - DNA, 990 bp, Arabidopsis thaliana
  Intron number 3 from transcript AT4G04330.1 (locus AT4G043 30) derived from phytozome v7.0 (chr-ID Chr4; pos 2117020 to 2118009 reverse strand)
aacttaggtaccaaaaataacacctttatatcaataatttggttataaaattctagtatgcgttttctttttgtgaaacttgttagttggaattttaattctaggttcttaaagttatacattatacttttttaacaaatttggttttcttctagtaatttagacgaaatctctttactttttccaaacattcttttcgtacattggaagttgaaacttctcactaaaataactagttatgggagttcggtttatatattcggtttcagttatatccattcgcttatcgtttttttttttgttttaaagtttagtatcccttcggttaatttgaaagttcggttcggtttcgattatttcggttttaaaatttagtatccatccggttattttgctttaaatatttttggatatttcggttattttcggatatttttggatattttcggatattttgagatattttttttattatttttgaatatttttactattttatatatattctcaagtatttttaattatctagtctagaaataactaatacttttgtaaatatatatttatattttagatatttttggttactcaaaatatttcggttggtatccattcggtttcagttatttcgattataaaattttgtatccattcaattagtttctggttatcggttctgtttacttcggttttggtttggtacatctggttcgggtaatttgctcaggcacaaaactaacagtataacacaactaatctgtgcaattcttgtaaagaaaaactacttcaaaaattgcgtgacgaaatacaattccaccaatttgcggattactaacgaaatcactttgtagatccataagtttcgtatatcttttaggtatacatatacttgatatgagataagtaaactaaaaactttgctttttttttttggtatcatggccaatgcaacaagcccttcgaattttagaggtaagctaagcttttctt

SEQ ID NO: 2038 - DNA, 716 bp, Arabidopsis thaliana
  Intron number 1 from transcript AT4G12230.1 (locus AT4G122 30) derived from phytozome v7.0 (chr-ID Chr4; pos 7284682 to 7285397)
actttaaatctcaggttcctcttcacaagattcccgtatgtttcttcttcctctctctctctttgacttttgatgaattttcgattctgcattctattcggctactaaattaggtttaatctcgagcttttgaggttttgatttttgtttttttttttgttgattttcgattaatctcatgtgggttttaatcgtttgggtttatgcagaattttttgtgtgagtagttctatcgtaaatgggtttatcctgctgagtttgggttcaaattttatgcttagaattttaatttttgggttcttgtctaaaagcaagaacttggtagtctttagtttagtgatgggtattctccatttttgatctttttaacttctgtagattcttttagtgttgcttttgatttgatctatgagtagcctgtgacacacttagtgatttgtctttgtttatgttcgcatatttagttcttagctctactaatcccaagcaactattgaatggctctatagatgtaatgtttgttcgggttgtgttgcttagagtttggaaaactgtgatttgttaagcatttgtacatgtatgtccactgtttcaagcttcggaatgaaagatttcattttttttgttttttcttggaatgtcatttgctcagagcataaacaatcttataaatatctagctttatgtgcatgctaactgcagattgggacaaagca

SEQ ID NO: 2039 - DNA, 563 bp, Arabidopsis thaliana
  Intron number 1 from transcript AT4G23520.1 (locus AT4G235 20) derived from phytozome v7.0 (chr-ID Chr4; pos 12275229 to 12275791 reverse strand)
tgcagtgtcggaaattaaagaccaaggcacttgcagtgagtacttttactagtcttcacattcataccctaatattcgtacggtgatttatttaggtccgaattttttatttttttttcgcttattcaacaaattcttgcctttgtttttcttagataaatttaggttttttatttccgaatatcgaaatttgacttcgtgacctaaattaagtttgttattccctttagaatgcctttatatgtagtatagtagagtttcatacttattttttggcgtgctagttacttttgttaaattatttgatatttttagtatcttttcggtaattttctttttttatatatatatttttcttttaaaattttttgttttgtttgaagaattagcaaaacattttaactactttatgcaactacgtacatgcctttgaaacaatcagattttttttttatattaagaattttgaaaggcatcacgattagtactttaatatcttttttttttgtatattaatttaaataaaagacagctgctgggcgttctccacagtggcagcagta

SEQ ID NO: 2040 - DNA, 951 bp, Arabidopsis thaliana
  Intron number 2 from transcript AT4G30200.2 (locus AT4G302 00) derived from phytozome v7.0 (chr-ID Chr4; pos 14789114 to 14790064 reverse strand)
gattcttctctcggtattcacttttagatttctgggtttcattggttgcttaagatttatcgatatccgtgtctctttgtttttccctataataatgtttcaactttcaaaaataaataaatagtcttacttctctttgtttttagctttgatgatgaatgatgaagctttggattctcaaatttgtgtttattttattcaattgttttcgaaagttggagactttatatactttttactaagttgctactgagtttagattactaatctttctattttctattgcaagttttatgttttctaattggtgattattctaaatggtgggtctttactttttttttggttgattggttctaacttcatattcttctgtgtatgtgtgtgtgtgtgtttcttccactatcattggtttgatgaattctgttttttaatttaatcgtgcgtcagaagactatatgacttttgttctgtgtatagaataagattccatgattgatgaatgtgggttctgttacctaaaagaatcatgctttcattctttgctttggatctttggtttcagaatcatcttgaagagcattgatctttcctttgtcatgttgtttggttctctctgattctttgatgtctattgacccaaccttatcaacattgttgtcctgtggtggttgttgaactatctttgtttttagatgaataaagtgttttagttttcagtattctaaattagctttgtgtttgtatttatttgaatttggaatcattcttcttagttttggtaaacaagaagatcagacacaagtttctttggtacattcttttattagtcttggatagttttgtgtgtttctggttaagacattgttgttctccattgccttcactttgagttcacataatttgacttccttttcttctatatgcaggagctgcaggtgactcatcgaa

SEQ ID NO: 2041 - DNA, 657 bp, Arabidopsis thaliana
  Intron number 1 from transcript AT4G31180.1 (locus AT4G311 80) derived from phytozome v7.0 (chr-ID Chr4; pos 15156039 to 15156695)
atccgagtcatcatctgttgctccttctcataggggtaaggtcttcttctttctcctttcttaatcgttttttttgtttaatagtttgttttgttgtttgctcgctaagatctacctctgttgttttatctatgattttgtgctttgcttacggttactctgttgtgtatgtgtattgattttgagcattataggattatggtttaatctaaactttaaaattagagaatatcgattgtttatcttggttttgtactttgtttactgttcttgtgttatgtctgtgtatctattttgagcattatagagttagggtttacttataaactttaaataatcgattatttattttggttttgtaatttgtttaagtatctcttttgttgtgtcttagtgttatgattcttttgctaacataaactgtttgtgactttgtttatgttcctgattgtatgaggcggcgcgttgtagcttctggttcacgctttctatttttcttttcgtttctctaaataacctccaattcttaagtattggggtcaaaacgaattaaataaatattaaaggggcctttttgaatttatctagtttttataacctacttacataaaacctagtgtttcgtttcagtggactgactattcattcattctcatc

SEQ ID NO: 2042 - DNA, 652 bp, Arabidopsis thaliana
  Intron number 1 from transcript AT4G31180.2 (locus AT4G311 80) derived from phytozome v7.0 (chr-ID Chr4; pos 15156044 to 15156695)
agtcatcatctgttgctccttctcataggggtaaggtcttcttctttctcctttcttaatcgttttttttgtttaatagtttgttttgttgtttgctcgctaagatctacctctgttgttttatctatgattttgtgctttgcttacggttactctgttgtgtatgtgtattgattttgagcattataggattatggtttaatctaaactttaaaattagagaatatcgattgtttatcttggttttgtactttgtttactgttcttgtgttatgtctgtgtatctattttgagcattatagagttagggtttacttataaactttaaataatcgattatttattttggttttgtaatttgtttaagtatctcttttgttgtgtcttagtgttatgattcttttgctaacataaactgtttgtgactttgtttatgttcctgattgtatgaggcggcgcgttgtagcttctggttcacgctttctatttttcttttcgtttctctaaataacctccaattcttaagtattggggtcaaaacgaattaaataaatattaaaggggcctttttgaatttatctagtttttataacctacttacataaaacctagtgtttcgtttcagtggactgactattcattcattctcatc

SEQ ID NO: 2043 - DNA, 674 bp, Arabidopsis thaliana
  Intron number 1 from transcript AT4G33020.1 (locus AT4G330 20) derived from phytozome v7.0 (chr-ID Chr4; pos 15933050 to 15933723 reverse strand)
tggacagtggtgtgaggcacgttgttgtttctcaggtaaacgacctttttcttttcttcatatgttttttgactttgactttgtttttcgtaagctctgacttttaagttttgagttctttaatgctaataagatttatttatttcaaatgcagttgacttcattcatatacaatgtagccaagtcaattggatgaattctaataactgtacatgacttgcataagctgttttagagttgttatagtaatcaactataaagttttacaatgccaagtttagttagttgctaatcactatatagattttgttattgaaaaaaataataaaatttattttattgcttgtttaagtaattatttaatgttatcttcgtaactattatatatagtactacttcatgttcattctaccaaaacattattaatatgaaaacgaaaaaataagataattctaaaatatcatactattatttaagttttcttccaaagatacaaatgacgacttaaacgcattgtggaaacattttttttttttggtgtgtgtgtgtgtgttaatatattttgacgttatgtgacttagtcaaaccaatccgtttatataatttccttgtatagtgtcgatgcacaaaatcaattgatgatacccttatatttttgtattcagatacttgaa

SEQ ID NO: 2044 - DNA, 963 bp, Arabidopsis thaliana
  Intron number 2 from transcript AT4G38950.2 (locus AT4G389 50) derived from phytozome v7.0 (chr-ID Chr4; pos 18158502 to 18159464 reverse strand)
ttagaggaggaagaagaagacaactcactcacaaggtaaaaacagctcctttgcatgtttctttatcttgcttgttagagatgtagacaagacacgcactttatagacgcaaaatcttagtattctggttcaagattgagatgcattttgtgataatgattaaatgttctgttggtgcaattgataaggtttcattgagttttgactaagtaaactccaagttactttttttaacctttaaacacgcatttgtgactgaccttgtctccctctccattgatgaattcaaaaactacaaagctattatttttatgtttgattttgcgtgtacatatattataatccaagttacttttcaaagtttagagtatgataacttatttttttgttctctacactagatgtatatgcattttataaggagaagcatggtctgtgggaccatgcattacctctcttattcgattaaacaatgtttagatttggtaaaacgtgacttagtcctcaagcatagtgggtgaccattacagataaagtcggtaatctttgttttgtttttcttcttcttcttcttcttcagttgtggttgatcaccttctaagtaaactgtcttgtataatcctaatattataatgacaagaagtcttctcttatttgtgtctttgtggttcatataaaatgttcaagtgttctctttcatcacaacacagaagcttttccttctccaggcatgtttcatgttttagtctcttagttttagtttggtgagatcagatttctgagtttttccatttatttatggttgtgattagttggaaaataagggtccttcctgcttttgaagttctttcacaagtcctgaatatattttctgcagtaaatatgctaagactccaatcttagaggtcttaagtttgaactgtttcaggaaaacaaaggttcctctggttactctgaaatatt

SEQ ID NO: 2045 - DNA, 954 bp, Arabidopsis thaliana
  Intron number 1 from transcript AT5G02230.1 (locus AT5G022 30) derived from phytozome v7.0 (chr-ID Chr5; pos 448178 t o 449131)
ctctctctgttgttctctgttccaaaggctttgaggtaaataaagaaaactactagtcttctttttcaacgcctttccgtttccttgttctgtttatcaacatttcgtcggttctatgttttccttacgaacttcatgccgtttggattcttgcgtcttagattttttcttttggtccaccattttcaccgtgaacatcgtcgtcaattcactaattttacgtacatttatctaaatttatttgtgatagttttttatttttatttttatagttaaacttgatttcgttaaaactatttttttttggaggcttgttacttaaaaatagaactattaccaagttgaaatatttctcatgccaaacattgaaccggatccataaccgatcagagctaaggttttttaaattaaataaaaattaagtcaaacgggtcaaataatggtcataactcggttaataccggtttaattttgaatactccttcagtaatacaaccattttacaaccttctatttttgagagaccaattcatcattgtagtgacatagtacacaattaaatttttgttgtccatacacgtgttatatgcatacaagatacatacgtacgtatataaattcgtatatgattcatcttttgtctgtacatgcatgattgcatgtagtactaaaaattattaggagccaattagtggttgaaattcgctgaatctctcagttcacgtttaacaaaaatcttatccccagtttttttgggacatagcaactttgtgtccattcattacacgaaactatttctgtttttttttttacaaatctaatctgaaaacaaaaaacaaatcggtccttattatccatgcaaaatctctgtgaaatatcagaactaaaaccctaaaaaagaaacacaaatatttaagattttcttccctgatccaatcaattgtttcagaaaaa

SEQ ID NO: 2046 - DNA, 641 bp, Arabidopsis thaliana
  Intron number 1 from transcript AT5G05180.2 (locus AT5G051 80) derived from phytozome v7.0 (chr-ID Chr5; pos 1536283 to 1536923)
gctcttttgttccctcgatcatatcaattttcaaggtcagtgaaatctcatgtttatttggtcctatgtgaatcagatttcagggtttgatatttgtttgttccgttgatgtgttttgtagatcttatgatctgagttacttgctctgtttttctgagatttatggagggtctttgtctatgtttcttcaccgttgcaaatgagttataatttctgtttacatgtagtgaaaaaagttcagttctgtgacataagaaagtcttaaaatttacgcaaccctagtttttttattttctaagatttcaattaaagaacattagcttgtctcttcatgatagttttccactgattattatcacaacttttttttttgttagatatttttaatcgaaattattgtagagataaatataaatacgttttttttttttttggtcaaaaaatataaatacgtttagttatagctaaatcttaggagtataaaaaaaaaaaaagtaaataaaaatcttaccagtttttatatctcgtatatcttctgtatttttagggtttttctgttacatcattctatgtttacgtttctttgatttttttttgcttgatcatttttaagttgattcgctttttgttgtttaagtgta

SEQ ID NO: 2047 - DNA, 972 bp, Arabidopsis thaliana
  Intron number 1 from transcript AT5G06950.1 (locus AT5G069 50) derived from phytozome v7.0 (chr-ID Chr5; pos 2151097 to 2152068)
tttacttgtgcaccttcaagatttcgtttttccaggtcagtttcttcatcaagccaacctttttttctagggtttttcttcctttgttttttttctgggagttttctccttcacagtcctaagaagctacttgttaactctgtctttttgcttttgaagttaaacctagttgactttctcaagcttaaagagttcagcttttttttttttttaattggtgattttgttcttaattttgagctaccaaaatcatcgaattaaatgttaatctcttgaattctgtttcggtggtagtttcttggtttgaaatcatagctgcagcttcatgccgaattctcactggttctagatttagagtttagctttttttttttactttactcggatatgaatactgagtaaggaattgagtcaactcggatgtgaatactgaatagtttttgttctagctagagttgcaaaactaagagattcagctactgaagctactttagtgtcattcaaactgaattgaaatgatgtgtgtgagtgtgactgtacctaatttttcaaactcaggcattttcgactgtgccaacaccttaagtctcactgattttgactttgatccgcgagctaagcttaaggtctgaatgagtttctcagactttgtagattgtgcaagctacatgtctgattgggtttgatgaattgctttaaaggttgtgtttttgatgggctatttttgtcagtctgttagctacaaacagattgttcttatatatttgactttgtgacttatggtagtcagcagaatttcccttaggacactttgaataagtaaaggactctttagcattctttagctggcttgtttaactgaaacaaactagagaacctttttcttgactttataggacataattgaaaactatgttagcaaaagagatggtatgtaatgctgtttttttttgtgctcattcagcgcagcca

SEQ ID NO: 2048 - DNA, 968 bp, Arabidopsis thaliana
  Intron number 1 from transcript AT5G06950.3 (locus AT5G069 50) derived from phytozome v7.0 (chr-ID Chr5; pos 2151101 to 2152068)
cttgtgcaccttcaagatttcgtttttccaggtcagtttcttcatcaagccaacctttttttctagggtttttcttcctttgttttttttctgggagttttctccttcacagtcctaagaagctacttgttaactctgtctttttgcttttgaagttaaacctagttgactttctcaagcttaaagagttcagcttttttttttttttaattggtgattttgttcttaattttgagctaccaaaatcatcgaattaaatgttaatctcttgaattctgtttcggtggtagtttcttggtttgaaatcatagctgcagcttcatgccgaattctcactggttctagatttagagtttagctttttttttttactttactcggatatgaatactgagtaaggaattgagtcaactcggatgtgaatactgaatagtttttgttctagctagagttgcaaaactaagagattcagctactgaagctactttagtgtcattcaaactgaattgaaatgatgtgtgtgagtgtgactgtacctaatttttcaaactcaggcattttcgactgtgccaacaccttaagtctcactgattttgactttgatccgcgagctaagcttaaggtctgaatgagtttctcagactttgtagattgtgcaagctacatgtctgattgggtttgatgaattgctttaaaggttgtgtttttgatgggctatttttgtcagtctgttagctacaaacagattgttcttatatatttgactttgtgacttatggtagtcagcagaatttcccttaggacactttgaataagtaaaggactctttagcattctttagctggcttgtttaactgaaacaaactagagaacctttttcttgactttataggacataattgaaaactatgttagcaaaagagatggtatgtaatgctgtttttttttgtgctcattcagcgcagcca

SEQ ID NO: 2049 - DNA, 709 bp, Arabidopsis thaliana
  Intron number 1 from transcript AT5G13080.1 (locus AT5G130 80) derived from phytozome v7.0 (chr-ID Chr5; pos 4150086 to 4150794 reverse strand)
ggccaaaaggccgtcaagaacaacaagttccctaggttcttcttcaattctcccttcttatttattcattgcttacaattgctatatattttatcgaacatataaagaaagagttaagagttagacatgcatatatatgctttagccaattcgaatcaatctccaattaatgtgtatatgtatcattcacatcggccctagattgatcttaactattctgcaatatgtgttttgattaatttatcgttttcatcttctatagctagccgagatacatgatctatttgtttctctatctaataattaatcaatatttaatataaatacacttttggtcaacaaatcatagaaatgtgcttttgtgaagaaatttgatgattaattactcttctaaaagactcgatgaatatatgtatatcctattcacattttattctagattgatctttactaattgattgggatatggatatggatattgattttttttttttctagtctatgtagctaacaatcagcgattaaaaatgaaagtcttttggtagacatttttcttcttataatttggattcgggaacatatatgtgacagttaattactcttctaagagattcaaaaacagttatttgcatatagagaagtgaagtgttttgaaatataactaatggtttatatatataaatgtgcaggagttactataggtgtacat

SEQ ID NO: 2050 - DNA, 862 bp, Arabidopsis thaliana
  Intron number 1 from transcript AT5G14940.1 (locus AT5G149 40) derived from phytozome v7.0 (chr-ID Chr5; pos 4833213 to 4834074 reverse strand)
tcaccatccttgcttcttcttctctctactttgtggtaattatttctataccatctttttattactaatcaagagtcatttccttgtaccaaacatgttaatcaaatggtccctttcctttccttgtttttacaagttgcctttttcgataaaattgtcttataacaaaggagagcaaattgaagcccatcaacttatgttttgaacgagtttttctgactcaaatcctagagttagagttgaaagatttgtttttctcgaatttgtttgtttatgcatgatgcctgatcatgtgaccctcttctttgcgcacttttatgaggtctatttgcttgaaaaatggaacctttataacacaaaacgtttcttgatattttttttgtcttttctgtatgtagtttggtaccaagcatttgaaccatttcgatgcatcttcccgataaaaaaaaaaaaaaaaaaaaaaaactgttttcaccgaccgttttctaaacttgtatttggtaaagtttggttccataatgtgatattggggatcttatcagaaatagttaagcctagtgtataatcaactataataatggaactcgaatcactcctcactaatcttgattatttattcgccagctgtaaatcttgcgatattaaatatataggattaaatttaaaaaaaaaaaaagcaaaaaatccgtaattgtaactgaatttgtcatcattaatataaaagtggtattttagtattctttcaaattcttatttatgttgttagataaattatttttggtaattacgtaagttactaatgtttggctttttggtattaaacaaagggtctagtgggattgacatttacggcatttgctgg

SEQ ID NO: 2051 - DNA, 899 bp, Arabidopsis thaliana
  Intron number 2 from transcript AT5G16560.1 (locus AT5G165 60) derived from phytozome v7.0 (chr-ID Chr5; pos 5409300 to 5410198 reverse strand)
tgaagagccatttgcaggtataatctatactctatttgaaattaaattagacacaacaaagaatcaatttttatttgttaatttaggtttaatctagtcgagttagttcgttaccaatcaagattttctataattagggatatttcatagttttcatcaccatcatgtcactctcttctcctttgcgttttgcacaaaaacagctgaatcaagaaacaaggtttttgtgtacgtatatatcatcagagcaatgaatagagctccaattctgatgtgttacttttattttcttgttttgtctttgctttaagtttagtcatattttggaagagatggcacaattgccaagaaaattgaagcagttgaatgaatttaaagagagaaaaagagagagtagttatagctttaagtgactgaaacctttcagagaattattaaacaatggagaattgagatgatagatagaagttattttggattataattcattttttcttttttaaattaggaagaggggacaaaagtagtcatcattactcaatgataataatacaatctttctattactcaaccttctttcagacatcaacctcgtggtcttaaaatcataaataattaattatatatacatcatcagttccaagacaaacccagaaaaccacacatatgtactacatatattatttatttaataatataaagttcatatgtgtctgcatatatctctccagtttgtcatctgtaattctgtatcacattatacaaaaataaatctatttagtttatcagtatcttttgtccgatatttattttggttttttcctgtgtctttaattggatttatggtttattctagttttagagctctcatcatgcctttaatttttttttttttgcag

SEQ ID NO: 2052 - DNA, 465 bp, Arabidopsis thaliana
  Intron number 4 from transcript AT5G17230.3 (locus AT5G172 30) derived from phytozome v7.0 (chr-ID Chr5; pos 5660956 to 5661420 reverse strand)
agtagatttctacaaacaatctattgtggctcttggttagtatctagttaagttgtcttaacaagagaagttgaagctgaaatagattccttgaatcttacactcatgtagaaagataggtctctagttagtttgtgtggttaccttgtgtctaagataagtccatgaacaccaagcatccaaatttgcaccctttgaagataaagaataaagacccaaaaagactagcttagttactaatatgggtttgtccaaaaaaaaaaaagttactaatatgggtttttaatgggcttttttggcccaatggtcttaaactctggagattttactctaatgaccccctgtctaggacatactagtatccaaagcatatggggaattttaaagttgttttcttatatgtttgattggtttgaatttgatagttttactctgtcttttgtgcagtttggtgtagaagaactg

SEQ ID NO: 2053 - DNA, 594 bp, Arabidopsis thaliana
  Intron number 3 from transcript AT5G17230.1 (locus AT5G172 30) derived from phytozome v7.0 (chr-ID Chr5; pos 5660956 to 5661549 reverse strand)
acccgaaaggcgaaaggcgatttgggcaatctacggtaagttactgcacaaaaccaatggttgaagagctgttttagaatatttgcattgtcaacattgattataattgtaggataaagtgatgctcaaagtagatttctacaaacaatctattgtggctcttggttagtatctagttaagttgtcttaacaagagaagttgaagctgaaatagattccttgaatcttacactcatgtagaaagataggtctctagttagtttgtgtggttaccttgtgtctaagataagtccatgaacaccaagcatccaaatttgcaccctttgaagataaagaataaagacccaaaaagactagcttagttactaatatgggtttgtccaaaaaaaaaaaagttactaatatgggtttttaatgggcttttttggcccaatggtcttaaactctggagattttactctaatgaccccctgtctaggacatactagtatccaaagcatatggggaattttaaagttgttttcttatatgtttgattggtttgaatttgatagttttactctgtcttttgtgcagtttggtgtagaagaactg

SEQ ID NO: 2054 - DNA, 530 bp, Arabidopsis thaliana
  Intron number 1 from transcript AT5G20030.1 (locus AT5G200 30) derived from phytozome v7.0 (chr-ID Chr5; pos 6766037 to 6766566 reverse strand)
attcactaacctaaaaactaaaacttcgttttcaggtaatcacaatcacaatctcaaatttattttttttttcttttttttttaatttgaatttttgagttttaagtctcttcatgtccgcttaaagatttttgattctcttcccctaatcaatttctcagtaatgaagattgatcctaggaactgagtcatactctgttttcaatttcattaacatttcaagccattgtatgcttctggatttggttttttgcaatttaggactttttctgcaatctagtgattatgaagcaaaacaatctgtaatctttataccaattggttgaagttgaattttttggatgtgaatgagtctaatggatcttattggtccaacttgtttctggatatttggatgtatttatcttgttttgttgcttaatgattgtgaagcaccagccttttagcatatgtgatgttcaattctgatctttataagcagttggaatgtgaaaagatatttactttaaggtgtttttgaagcagcaatc

SEQ ID NO: 2055 - DNA, 645 bp, Arabidopsis thaliana
  Intron number 1 from transcript AT5G23850.1 (locus AT5G238 50) derived from phytozome v7.0 (chr-ID Chr5; pos 8038280 to 8038924)
cttttatctccacgcgcctcctcctcgacaccaccgtaagtccctcaaaacgacacagtccacttgtcgtttagctgaaactaatttttcggtgtttagtttctttatgggtttgaattttgtgccttttgtcacgtgagagaagaattttctattagtactattgatcggaagtgtctttggtggttggtgttgtcggccaatcccgtagaacacgacacgtgtttgttgtgggactcattatgacttttccagttcaattaggcattagctgtctcccatgaccatgagtagaatttcgggtttaaaggtttttggggttttagaaggacaaaaaaagtccaaattaaagaactcggttctgtttaaatatttcggttcgattggattcatacaagtttggtttaatttatatatttttcttttgcagcaactttagtttagatttaggtacgtatgggtaaaaatatatagaaatttttgaatccataaaatattagttcagattgatatatattcggtttgaatcggttcagttcaagtgaattacggtttgagtcgggttttttgcacaaatatgctaactagtcatatcgttttcacggtttaggttctgctagagaaaaaagccgcgacgacgacgac

SEQ ID NO: 2056 - DNA, 599 bp, Arabidopsis thaliana
  Intron number 1 from transcript AT5G26340.1 (locus AT5G263 40) derived from phytozome v7.0 (chr-ID Chr5; pos 9246288 to 9246886 reverse strand)
tttggttacgacgtcggtgtctccggtaagaatattaacatcccttagttatttttctatatgtataatacaatccttttatcttatattatacaaaacgtagaagaagtttttattttaaagatacataagtttttgttagtgcaagttttctcaaaaaacgattttaaataggacttgctcatgttttcaactaccgccaataacttctttggtagaactatttcacctaatacctaacttctttggtaatcaaaatgaaatttcagtaactagctcgatgttaattaatattggttaaagtaagaaaataatcaaaaaaaatcttagcttacaaaagtttggcagctaaagatctagaccgtccttgttttagttagtatattgacaaaagtagtgtcatataggttttagttcttctttttgttattttcttacaacacacatgctcgatgttgaatttgaacatgggctacatcaacatgaataaattaataaatttatgagtataatatcctatagggtttaacggtaaaaatagtaacaacaaaaataattttccatcattgaaatggctatacgcaggcggagtgacatcg

SEQ ID NO: 2057 - DNA, 1056 bp, Arabidopsis thaliana
  Intron number 1 from transcript AT5G28640.1 (locus AT5G286 40) derived from phytozome v7.0 (chr-ID Chr5; pos 10648507 to 10649562 reverse strand)
ttacctctgatcatatccaacaggttctcttctccttctcctccttctccttcttcttctattatattatctctttcttttttctttattatatgtttctttgaattcataaaggaaagtgaagaaatctctcttgcaagtaccttataactttttctttatattatataaaaaagtatgtgaaacccttttcttctgttctcataacatagatgattttttttcattggttcttttttgtttggtaaaagagttcttgttattcttgtttccatgtctttttttttcatagagaaattagttttaatacatgtgtgtttatgtttgataaatttggttggtagagatgctttggtcactaagatgattctttcaactttttttcttttccttatagatttggtgtattatcagttaactttgatgctaattaaatgtctaaaaccagacaaagttaagaaagattctttctttcaatgaaaatgaatgtttagggtccagttgtgttttgagttcttgaaacatgtaatgaaaaataacgtgttcaaaacagacaaatcttgggaactgaagatttgtttcacatatctcgttttttcttcttgtcttggttttcgggttctggaagtttcattgatggcaaaaaccacaaagccatttatgtgaatattgtgggtggtcctgtttagatttgttatcattataagtagatctatgtgtattttccagtccaagtgtttcttttattgcttacatgaccagatatactttgtggtccgaaacaacatctggtccttatctcagttttttttttgtgtggtcctcaaaatcttttcgaagaaaatctttcgttacacttttgtgatatttcaacattattgtcttttgagataagtcggaatttaagttactggggtctccttttgagattttctatgtctttattacaacaaaaacaaaatagtatgcaaattttttgtttgtagcattagtaatgattaatgaaaatgtttgattgtagtacttggacgaaaacaaatcgttgattctgaagat

SEQ ID NO: 2058 - DNA, 846 bp, Arabidopsis thaliana
  Intron number 1 from transcript AT5G35735.1 (locus AT5G357 35) derived from phytozome v7.0 (chr-ID Chr5; pos 13901497 to 13902342 reverse strand)
gtggtggttccggtgacaggctgaggaagagaaacgtaagtccaagtctttctctattaaaaatttatactactactactttggcaactttctaaaattaccacaaatttaagccttatgagaagtttctttaaagtgaagtaagagttactaaatcatttggaacccactttttttttttaacatttagtattcttctagaatttctgttctattgatatctaaatatttgatgataatttaaaatatatatagtattttgagaattttataataatttattgaaaatatctaaaactagcaaataaatgctttaagaataataattttgaaatattgtggatgagaaattttagtttaaataatactttgttgtcaaatgataattgcttgaataagacaaacacatattgacgtgttttgtcaacatactgaaagtgaaatgatggcgtatttagcattcaattattttatgaataaataatttaatagaagcacctagcatgtatatattttcatatatagtaaaatagtaatgtgataatttcttgaaaagctagtcaaatattaacgacgcatttgttaggttttctttgaaaaagaaagtggacttctctgtcacggtttcactttaaccaaactcacaaattctgtctccacttctataatcaaaactattatttgaaaagacttatttgtagaattgatgaagattcatgaaaactattaaactaaaaaactttaggagctaatttattagactataaaattttatttgttggaatataaagtttattactctatgaaaaataaactaaacactggaaactttatgaaaacagacgc

SEQ ID NO: 2059 - DNA, 876 bp, Arabidopsis thaliana
  Intron number 2 from transcript AT5G36880.2 (locus AT5G368 80) derived from phytozome v7.0 (chr-ID Chr5; pos 14539087 to 14539962 reverse strand)
tcacttggatctcgaatccttccggctactcaaaggtgaggttttttttttctttctgaaatttgattcgaaatttagaatcatgagtgtaagaaaatgtttgaaattttctgttatagtgatgatgatatgataatgatatgatgatgactgatgagggtaaaaggataatgatgaatatgctgttgatgatgtgatgtgatgttgatatgttgttgatgattcagggtttaaggatgaggttctatgtcttgattgttgtttattgatattacccgttggccgttgctttgaactttagaccgcatttgtgaccccttgaactttgaacatggtgattactggctttaagaaaaagacagtgttggagaattgttttgaatattaaagatttggactttattgatatttatgtttttcagactttttcgatttgttaggttatttatttgactggattcgtgatggagctgtcccaattctttagagtaacctgtttcaggcttgtttgtgtcttccttgattagtgttggtaactttgtttgaagttaaaaggtttagtctttgagacttcacatttcacaataagttttagttcatctttcgcttttcccccataggtgactcataagtatttcttttctatttgagttcttacagattttggattactttttggtttatcattggatttatttggtgtttagtcaacagaggaaattcatttaacagtctaatagtcttaccgaatttaccaaagtatttttaacataagttaaaacatttgtgattttgcttgtttgttatgacttcttataagttctaattgtatgtatattagatcatccccatcggagaatcttctcctccatagga

SEQ ID NO: 2060 - DNA, 802 bp, Arabidopsis thaliana
  Intron number 2 from transcript AT5G37850.3 (locus AT5G378 50) derived from phytozome v7.0 (chr-ID Chr5; pos 15065667 to 15066468)
gtcgtgttcttagtatccaatcccacactgttcaggtttttgttcgaactcttaagatttacttatcttatcattagaaactgtgtttaaagtttcaattttgattggttgcccttaagaaaaaaacagagctttttctgcttttgaatctgaatttgtttgattacaaagattcaagattctactttattccctgcatgatgattttcttataaaggtttagacttttttattgaattgaagaacaataatatgtttacttatcttatcattagaaactgtgttaaagtttcgattttgttttgttgctcttaaaacgttttaagcaaaaacagagatttgtttttgcatttgaatctgaatttgggataaatcaataagctggtaatgaattgtgtgctaattcacattgaatatattagtgatgcaatgtttttaatacaagattctactttattccttagatgactttgcataaagttttagactttaggtaatcaaaagaagaacttcgatgtgtggagaacaatttatagtctgttccttaatttaccaattgttgatgataaatcttgtgtttattggttcgatgagtaatatgattttgctaatggaagtcaaatatattagtgtttctatgcttgagttaatataattgtgctaaggtatgtcaacatattagtgttggttagattacactgtctctctatgcttgagttctgcaacttttttttttttgtgtgtgtgtgtgtgttaccagaaatgtgatgccattttatatgtctattactttcttagggat

SEQ ID NO: 2061 - DNA, 980 bp, Arabidopsis thaliana
  Intron number 1 from transcript AT5G39785.1 (locus AT5G397 85) derived from phytozome v7.0 (chr-ID Chr5; pos 15930134 to 15931113)
ctcttggttagttctctaaattcactctcttattttattttttacaaattaatttagttttggtccaaaaacttagttttaggtgttttttcaaccataccaattttttttaattttgcagtgttttataagttagaaagaaaaaaattagaggtcccacgaaatctactcattatagggtttttagaatttgttgatttctctaattggcgtttgattttgcgtattgaagtgaacattgcaccaaacctaaaagccaaccattatttaattgtctttattggtttcttactagttttgttgttcaaataaatgtttccttggatgatgtgtttacatttaatttatgaagaatatggaatagaattcctaggaataagtgacgaataaaatcatcatatgtcagaagaagttagaagttttttattttatttgactaaccatatttttggttagagactagaacggatttttggttacatgacatttttttttgtttaatttacttttcttagataagtaaaccacatgtggatgatattgtgataaatgctgcatcaactataaagtttaattgtggtaattgaaaatatagtttaaccaagtttttttgttttctctgtgttttttaagccaatgcacacatgcatatctttattggcctatctcaccaaatgtgtttagttatttggagttagctttcaatgttagcttttatgtttcttctttattgcattgctctcttatggaacccctttacctaatttttcccactctccactaacttagtttttgctagtgcgaacctatacctttcttatttccttgaatttattcccaaacatagaatttgtttaattaagtttatgtgcttagtttttttacattttttcttgagttgttacgatttaaactaacattgttttgtttttattattcttgaagggcttcttcaatcaaagagccctcaacaagcaacc

SEQ ID NO: 2062 - DNA, 741 bp, Arabidopsis thaliana
  Intron number 1 from transcript AT5G44575.1 (locus AT5G445 75) derived from phytozome v7.0 (chr-ID Chr5; pos 17973958 to 17974698)
cctgccttctcaacaagaatcactcccagtgatcggttagtgtttctctcacatattcatatatacataaacaaaccaatatccgaaaaaatgattatctaatctagaactagaaaggaaaaaaaaaactattgaagtaggtctttttggttaactatccatgttttctagaagaaaaatccaaactaatttcaggagtacatacaattaccaattgaattcgaagtggtgaaattaatatggcttctattaaaattactaaatgggtttttactttttacgattaaaaaaatactattcgtaaattgaaagctatggaagagttatgccaattttaaagcctttttaacaattaattatattataaaaattatataagtttgaaaatacagaaactgaaattttgatgctaaaatattcgtaaacttttaaagccagaccaaagtatttgtacatttctttaaaaaagaaactgcagccacatatataggatgtattttctttcctttgcttgcatattagcattttttgagtcttatgaagcttagaacataaaaaaagtatttagatttttgtgaagttatagttttataccattttaaaatataatgttttttatcaagagtcatcactgtattttataaactaatttatttttttgactgcaacacttattttcattgattagacacataaatatataactttatttttatttttgcaggatcgtcaaggaggttg

SEQ ID NO: 2063 - DNA, 719 bp, Arabidopsis thaliana
  Intron number 1 from transcript AT5G46800.1 (locus AT5G468 00) derived from phytozome v7.0 (chr-ID Chr5; pos 18989811 to 18990529 reverse strand)
ctgatatcgattggattctctctaatcaatcgttggtaagctaatatttaatcacttttgattgaattttccttctgggtttttgatctgatttcacctcattgtcttatgaatccaccatttgagttctagggattaaaagattcaaactttctcagagacaactgaggaaaaatgacatgtttttagagtttgagtttggttacattttcaggttttgttaagatttctctcattgtcttctgaatcctttgatttggtaatgattggaaatgatcataagattcctactttcttggaagcaaaataaaaatatccactttttatgagaaaaactctttgaaacgtctttgttatattcaaacttggtttgtttatacgttttgattggctaagtggttcaggtcacaagtgacaaaagtactgattttggatgatgatatagttggtttaagtggttaggttataagttaatcttgactcttgaaggattattcattaacaaaaagtagtgagtttggttggtttatgaaacatttggttagttaaagtggtttaggtcacaagttaaatgacaagtattcattaacaaaggttttgattttggtttgttctgagaaaattgtttcaagtggtgtaaaacttattcttaattaacaaaaacttttgatttttttggttgattctgagaaatttgattgatttattgtttcttagaa

SEQ ID NO: 2064 - DNA, 992 bp, Arabidopsis thaliana
  Intron number 1 from transcript AT5G48580.1 (locus AT5G485 80) derived from phytozome v7.0 (chr-ID Chr5; pos 19697416 to 19698407 reverse strand)
tgaaggaagagtcagtgggagcagatttggataaggtaagcaaatggtaaaaaatcttttttgtttattgctttgtgtggttaatgctgattttgtaagttgactagtaaagtaaagcgacgtttatttgggtaatataaaaactcttcaaggatcaccttaaaaactttttcattttaataaatttctttggatattaattgtaacattaaactatgaaagtcttattggttgtaattttctttgaatttagtcgaaatggcttttggtttttcatcaagctagaattttcgaattcaaaaatatgaagaatcattttctgagatataaattaaaattttagcttagttagttaaaaattaaaagattcttcatttgtcccataatattataagatattctaaataaaatcacaatggttaaaaaaccataaatatttttgttactagatatttgtaccgcagtctatattattattaaaaaaaaaaaaaaattacactcatctcatcttttaaataatatgtgacatactagaaaaaaaattagaatagaatatgataataataatagagattaactgtttttttctataactttaaatagtgacataaatcttcaaatgagattgtgtgagcttctcatctttgtttgcttcctcttctatattaaacaaagatattaaaccgtgaaattataaaataaaacttttatttgtaaaacattacagcaacttaaactacaattagatgcatgcgaaacattctaatataattaagagataatgtagttgtcttcttgctcgttaaataactctttgcataccggtgtaaccaccatagtgaacactcttgagtagatttagaaagaaatgaaatgaaatgaaaactcttaccgaaattttcaactttgctagtagaaatataagactctaacgtagtgaaatgataaaactcttaaaccgaaattttcaactttgcttgtagagataaaag

SEQ ID NO: 2065 - DNA, 841 bp, Arabidopsis thaliana
  Intron number 4 from transcript AT5G50740.1 (locus AT5G507 40) derived from phytozome v7.0 (chr-ID Chr5; pos 20636352 to 20637192 reverse strand)
aaaggtttgtattttttattttatttttttacttttctcatttaaaatttattttctgaattgggtacaatttctattgattctgaatttggttcaaaaaaaaaaaaaaaaaaaaaaaaatctgaatttgtgggactacacttaattgggacatcaagtgtggactcttctatgtgtcataaattgattccaactctttttattttactgaaagtactgtgtactgtgtaggacctttttaaaacatagcaatttgaaaaaagcatgtgtttagtgaatctttcattaaaaaagaaactctcattcacctgattattgttattataatcatatagttacaaaccgttcttcttcacatatatttttgtttgttttgagtgtttcaagattacataaataatacgaattgtgttgaatcgagtctaacttaagtcaactactttacttttacttcacctattccccaagaatcccaaagttctaaacacttctttaattagggtttatgtttcatatatcctgattttgtacttatctgaaatcaaatttatatttataatgccatcaataagttggaccagattttatattatgaaagtgtggttaattatgttaggtagaaatttattggccaaaagattacattggtgactactactgcctatagaattgatattagctttgtacaatgatctcatttgatagttaatttgaatttttttgtaatgcttattattttattataatatatagttagtttacattttcatatagagaataaagtcaaaacatgtttatacatataggagtggagtctgtggaaccagattttaaagcatca

SEQ ID NO: 2066 - DNA, 757 bp, Arabidopsis thaliana
  Intron number 1 from transcript AT5G52450.1 (locus AT5G524 50) derived from phytozome v7.0 (chr-ID Chr5; pos 21290785 to 21291541 reverse strand)
cctctttcgcctccgtcaccggtttcagcttcctcgtcagtttttcctcactctctctgtctttctacaaattacatattcccatatcaatttattcttaaccatgtatcttaatctttaatttaatttaccaaaaaaaaatcttccaaatttaggatattaggaataaatgtctgaatgtgaaacttgatttggtaattaatatcattttttttgatttttttcctatacatatatgcaaacctttggatttttttaatatgtagagtttttttttttgtgtgcaagtaatatatagtgctttaaatctttaattagtttatctctaaaaagagatgtattagtaattatatatcattagaaagaaatatatattattcacctcacctatgatggacatatcactttatcagttatcaggccaccttatttgaatatccaagttgcgtaagcatcttttctgccactcatgcgacaagaaaacaaaatacatttttgccattttatggacagatcgagaagtgaaaacgccaaaataacaaaatcaaaatgtttttcttgtataaacaaaaatgaatgctttaagcagttgcttatggctcttatttgaacttgaaaaccacttgtcgaacattgaacgatgtcaacaaatccaaattttaatattcaattgaaagttttaaaaattgggttgtacgtttttacttgtgaagcaagaaactacactgattcacttttccattttcctcatgaacag

SEQ ID NO: 2067 - DNA, 671 bp, Arabidopsis thaliana
  Intron number 1 from transcript AT5G55660.1 (locus AT5G556 60) derived from phytozome v7.0 (chr-ID Chr5; pos 22538689 to 22539359)
aaagctcactgctttgaagcctttggatagcgaaggtgagattccaaagtcttctcctttcgagtctctttgtacactctgagcttgttctctttgtttagcggttgaatcttcatagcttcgtttatattcgcatgtggttttttttttttttggttttgattgttgtcttgcttcttgaagtcgcgtttagggtttgtgtttttttgtgttctctttgatttgtgaatttgtgttagtttagtttaggtttagagagagactaattttgatttctgtatgagctcttggattcctctgttgttgtggtttggatctaaatctatgttttataccacaaagtattcagattgaggaaaattttggttacccttcgtttttgatttggaattgaattatgaagaacttattgtatgttgtctatttcctttaaaaattgaatcttttttctcaatttctcgtgttagagcccattgaagtttttattgagttgtatgtagaaagatgggatgcaatgaagtttacatgttgatataagttttgggttatgtaacccttcttttgcgtgacttttgtttcatgaaatttctgccgctattgtgtaagtttttaacactgtacttatattttctacagcgttctggtgttttctggctttaagatctactgaa

SEQ ID NO: 2068 - DNA, 960 bp, Arabidopsis thaliana
  Intron number 4 from transcript AT5G57150.4 (locus AT5G571 50) derived from phytozome v7.0 (chr-ID Chr5; pos 23153231 to 23154190)
atcttccacactgtctttattgaggtcagcatctttctctctctatctctcttgtctctctaatttgtaattagttaattactaattagaagcaatgattgcaattagtcaagagtggatagtaagctttccaagaaaaagtaaaagggaaccattcaaatagtagatatatgattgctttagtaaacttttctaaaagtctccatcaaattaatactaattatgtaataacatgatagtaatttctcttatttctcaaatctttcttaaattttaccaaagtgtattttttttttttttgtagtttatcttagctttgcagtttatttgctaatatgggtggcgttggaatttatttaactagattgtggaatataaagggattttctgtggcttaagtcttttgctcgtgtcaaatactcaaacttattttaagaataaatgtctcattcgtgacgctggcaatgagcgttgtattattactttatttgtttacctgacaatataaatatagttttacagattaattataagatttcttgatttgatactgatttagacgacatggacctttctggttgatttaaagcaagattttattgagtaaactaatgattaagttagcatcaatattccacttagtctatcttcttagttaatacaatttttttttttgttggccacttaaaatgtgttgtttattttataattttggtcactatgtacattgcatgatattgaaaactaagtaaaaagtatattcgttagttccaatatcatgcagtttttgccaatttgtgttaattaaaaagattatgaatttttatttctttttgtcaatttatgtatacttattacaaagtttttgtagttgaaaatatttcttatggttaaattaaatgtttaacgtatgggaagcttccagttgcgaccaaacatttattgggttgtgtggttttt

SEQ ID NO: 2069 - DNA, 642 bp, Arabidopsis thaliana
  Intron number 1 from transcript AT5G62430.1 (locus AT5G624 30) derived from phytozome v7.0 (chr-ID Chr5; pos 25070067 to 25070708 reverse strand)
aagaagaagaaaaggtactcattattatgtctacttttttgtttctgaaagggctgagtatgttttgttatatacaagtatagagaaaatgagttttggtgttttgaaaagggtatttgagtttttgttcattttcccatcaaaggcaactgttttctttttttggtatcgttttatattcatagttgatgaattggtaaactttttggagaattcctaagaaaatacacttaaaccatctgtttaattaaaactctagttctctgttggtgaaccagaggttgcaatttggtttgatgacttttcatgaaacgaaaaagcatattcgtttctccataaagtaatcatattttttagtgaaaaaggttgctttatagtatacacactgaaaccaataaaggtgagcgaatttagacttctaactaaagcgtgttctttaaaagactttttcctccaccaaaatttcatctagaaccttcttcttgagaatcatactcattataatacaaagttttaaattcatttctgtttaacatgcttcaaaaatgttattctttctttattcatcatccgtccctaataatccgatttcattgtcttgcatcagaaccaaaacaagacattaactgatcaatcggagaa

SEQ ID NO: 2070 - DNA, 1012 bp, Arabidopsis thaliana
  Intron number 1 from transcript AT5G65210.1 (locus AT5G652 10) derived from phytozome v7.0 (chr-ID Chr5; pos 26058019 to 26059030)
gcatcacaaggttcggcttcagataacatcacaaggtttgattgactttgctctgttctaatctaatcttgttaatatcttaaaagcctaaaacttttctcttattgattgttttggttaattttgtttccccttttttttgttgtatttactcgattgattacttcaatatgattttctggtttgcttggaatttaagctggaaggaactgattcgaatatttcttgcataagaagatgtttcaatctacctatctattgacttcatgattggcttttgcttttattgttgatatctcttactatcttgatttcacctttcgttaccatttgcgtacaaaaatttaacaaagcaatgaatgggaatttcttattttttgtatagtcgttttaactgctaaactatgttaagttggtccacacaattaggtgctgaaaataaagtgacatcctaataagtggaaacttgacttatggagcttttcgtctgcttaacattaatttttatcatcttatctatttgacaccttccaaacactattggggaaatggcttcttctcttttttccggtgtaggtttaaggttttagatttgaaggcggatggtgaggagtttgtgttgatgaaatgggtgatttgaagttaaatcctttaagttcttttagccttaagttcttttagcctgtcattacaatatatgtttcagttgtgatcttttggtgctctccaaggtcttagggaatctccgtgtcccctctggtttctttctttgtataaagtctctggaatttaaagatgattttgtcctgttttcttcgaagaatttggcgaagaaacatcaaaagttcactatttgctttacgtgttatgcttgtttgactttgtgtgatctaacttttggttgaaaactaatgctcatcttttgttctttggaatgtcttgatctgcttgattttgaatgctttgtcacattgtttaaacaatttgttctttgttttcagttgaggaaaac

SEQ ID NO: 2071 - DNA, 1037 bp, Arabidopsis thaliana
  Intron number 1 from transcript AT5G65210.3 (locus AT5G652 10) derived from phytozome v7.0 (chr-ID Chr5; pos 26057994 to 26059030)
ctagttgctgccttgacttcagatagcatcacaaggttcggcttcagataacatcacaaggtttgattgactttgctctgttctaatctaatcttgttaatatcttaaaagcctaaaacttttctcttattgattgttttggttaattttgtttccccttttttttgttgtatttactcgattgattacttcaatatgattttctggtttgcttggaatttaagctggaaggaactgattcgaatatttcttgcataagaagatgtttcaatctacctatctattgacttcatgattggcttttgcttttattgttgatatctcttactatcttgatttcacctttcgttaccatttgcgtacaaaaatttaacaaagcaatgaatgggaatttcttattttttgtatagtcgttttaactgctaaactatgttaagttggtccacacaattaggtgctgaaaataaagtgacatcctaataagtggaaacttgacttatggagcttttcgtctgcttaacattaatttttatcatcttatctatttgacaccttccaaacactattggggaaatggcttcttctcttttttccggtgtaggtttaaggttttagatttgaaggcggatggtgaggagtttgtgttgatgaaatgggtgatttgaagttaaatcctttaagttcttttagccttaagttcttttagcctgtcattacaatatatgtttcagttgtgatcttttggtgctctccaaggtcttagggaatctccgtgtcccctctggtttctttctttgtataaagtctctggaatttaaagatgattttgtcctgttttcttcgaagaatttggcgaagaaacatcaaaagttcactatttgctttacgtgttatgcttgtttgactttgtgtgatctaacttttggttgaaaactaatgctcatcttttgttctttggaatgtcttgatctgcttgattttgaatgctttgtcacattgtttaaacaatttgttctttgttttcagttgaggaaaac

SEQ ID NO: 2072 - DNA, 848 bp, Arabidopsis thaliana
  Intron number 1 from transcript AT1G62290.2 (locus AT1G622 90) derived from phytozome v7.0 (chr-ID Chr1; pos 23012682 to 23013529 reverse strand)
ctggtgcttaaacactctggtgagttctagtacttctgctatgatcgatctcattaccatttcttaaatttctctccctaaatattccgagttcttgatttttgataacttcaggttttctctttttgataaatctggtctttccatttttttttttttgtggttaatttagtttcctatgttcttcgattgtattatgcatgatctgtgtttggattctgttagattatgtattggtgaatatgtatgtgtttttgcatgtctggttttggtcttaaaaatgttcaaatctgatgatttgattgaagcttttttagtgttggtttgattcttctcaaaactactgttaatttactatcatgttttccaactttgattcatgatgacacttttgttctgctttgttataaaattttggttggtttgattttgtaattatagtgtaattttgttaggaatgaacatgttttaatactctgttttcgatttgtcacacattcgaattattaatcgataatttaactgaaaattcatggttctagatcttgttgtcatcagattatttgtttcgataattcatcaaatatgtagtccttttgctgatttgcgactgtttcattttttctcaaaattgttttttgttaagtttatctaacagttatcgttgtcaaaagtctctttcattttgcaaaatcttctttttttttttgtttgtaactttgttttttaagctacacatttagtctgtaaaatagcatcgaggaacagttgtcttagtagacttgcatgttcttgtaacttctatttgtttcagtttgttgatgactgctttgattttgtaggtcaaa

SEQ ID NO: 2073 - DNA, 787 bp, Arabidopsis thaliana
  Intron number 1 from transcript AT1G01200.1 (locus AT1G012 00) derived from phytozome v7.0 (chr-ID Chr1; pos 87128 to 87914 reverse strand)
aaagctcagatctgggacaccgccggtcaagagaggttatatcatctatatccaaaaacacattgataattctttatatattttattaagctctcacttttggattcaaatcatttgtttagactatcacttcatttcacttggatcacggtaatttagatatggtttgatttgattttgtaactaaatatatttctaatacaatatggaatatttttgttgggtaaagaattgtggtatggatttgaataaccattggtgttcttgatttggttaatacaatgtcagatttcttttctgcatattttgtttttgtctttttgcaaccacttatagatcaaaaggtcaaatgcaataactcaccgaatactttgttgcatacttgcataagtaaaactttatatttttcttaccgatgcaaaagtttcttttaatatcgttttttcatattatttttcttgataaaatatgtataaatgttgcgtatatttttgttttgcattaattaaagagcgaagaaattgcagtcttacattgataattctttatagctgaatctcagatttgtatacaaattaaatgttaaaataaactagagtagaatttcgttatattatctaggatcacgatatttaaatttatgggattttgaataattattggtctttcttgatttggtctgcaatgtcagattttgttataatatattcaattaaaaaatatttgtttgcttaccctgtttcggcggtcagatacagagcggtgactagcgcctactacagaggtg

SEQ ID NO: 2074 - DNA, 710 bp, Arabidopsis thaliana
  Intron number 1 from transcript AT1G01230.1 (locus AT1G012 30) derived from phytozome v7.0 (chr-ID Chr1; pos 97771 to 98480)
tggcttggactgttgttaatctcgctcacttcgttgtaagtcttcgattgtgtttatgctttagagatgattttttcacttagggttgtgactttaaattagatgatggattgattccttgttttttttttatttcctgagatctggatgtgaatctggctctagtgtttgaattgatctctttggttattagcaattttttagttggtttagggttcgaatgaagaggcaattaccttctgattgatcagttttagctatcgtatatcgttgagcttggatcaggcttcgaattaggatacagttaccttcttatcaatgaattgatcagttttggtatcagcgattttgaattgatctgtttggatactatcagcagtgttgactgttgagttgatcaggcttttaagtaagatgcaattctcttctaagtttgaattgatcggttttggatcaggcttcgaattaagatgcaccttctcgttaatgaattatcagtttttgatatcagaaactaaaactacctatggcatcaatgcaatttcttaaggtctaactgtttgatataatgcggtgacttgtaaattggcattgcttgattgtcaaaaccaaatttaatctaatttctaattactctttaggaaaatgtgatgtctgagtagaaatttgtggatatttgttgtcaggtaacgtatcacagcttccactgg

SEQ ID NO: 2075 - DNA, 296 bp, Arabidopsis thaliana
  Intron number 1 from transcript AT1G01530.1 (locus AT1G015 30) derived from phytozome v7.0 (chr-ID Chr1; pos 193069 t o 193364 reverse strand)
agtctttaactgaggtaagttttaagttttggcattatctaatctttatttcttctctcttttatttttcaatttagataaaaaattattatataagtgtttcacaatttgtttttgatttgtaaaagaaatggtaaacctcctttgcatatttatttcctcaacaaagtaaattaagaatgaaaattttggtgggttcaatttttgtttaagtcatagtcatggattcacggattttctttacacattcattattcatgaaattaattgtttaaaatacaattttatcttaggtg

SEQ ID NO: 2076 - DNA, 682 bp, Arabidopsis thaliana
  Intron number 1 from transcript AT1G01670.1 (locus AT1G016 70) derived from phytozome v7.0 (chr-ID Chr1; pos 245230 t o 245911 reverse strand)
ggacattattggtctgaaaatcggatatagaacaggtaaatttcgaaacgaaatttctcactatcaagccaagctctctacatgtatatattttttgtttctacttctccgtgacttcgtcaaagctttccccgtcactaaaccctaaaattatcttgtcttcgatttcggattccacgtatcatatatatacttttaatcttctctgagttgacattttaaattaaaaatctggctttaaaaaaaaaatctaaaatgatcgtaggaaatgtgtcttttacggtaagaattaagaaatgttctgcgattagcttaagttgcatttaatttatttgtgagaattggctcgttctgaatgatgttatcctactctgtttagatcatgtctttcgttctaatcactttctttctcataaaagacgattacgattttgaatattatataattgactaagaaaattgtcggaaacatctttgcagtgacttggtaagcgaacgatacatatgtatattcatgtgttgtttgtgtattatcttcttgttttggaaaaagagagaatttgtctctctgcgtatctatcttatagagaaaagtggagaatccatggcaaaggctttgaatgacgacgatcctgtttatgttgcagtaagcgaagacgttgatcaaagtagattgactttg

SEQ ID NO: 2077 - DNA, 618 bp, Arabidopsis thaliana
  Intron number 1 from transcript AT1G01910.3 (locus AT1G019 10) derived from phytozome v7.0 (chr-ID Chr1; pos 314991 t o 315608 reverse strand)
ctttggttcaaggtttctctaatctctttgccgtaagctttctccgattttgttctagatcgtgctagattttagagggaatttggtagtttcgctcctggattttaatctcattgggaattagggttctctgattcacgaatttcaaaccgcagattgatggatcaattttgattttgaagtcagatttagtacttgcataaatacggttgatttgtgcctttcttatcatatgcccactctgattttggggattaggtttggaatttggacgccaatttgtattcttgatacggaaggggattgtgaagaagatttgatgtccccaaatcaaatcgaatttttgtctattgtagttaaaattcatggctagttatgccaaattcaaaaaaaaaaaaaaaagttgttttttgtggttctgggtcgcctctaatagacaggcttgatgatgactttatggctactcttctaagcttgaagctcttagttgtgtctgtgtgtatatgtatatatatacacatactataagcaaatggttacgattcacactccttccctcttgatagtgagtgaatcttgtttgcttttctcaggaggtagatcctaccgttgaaactg

SEQ ID NO: 2078 - DNA, 819 bp, Arabidopsis thaliana
  Intron number 1 from transcript AT1G01910.5 (locus AT1G019 10) derived from phytozome v7.0 (chr-ID Chr1; pos 314790 t o 315608 reverse strand)
ctttggttcaaggtttctctaatctctttgccgtaagctttctccgattttgttctagatcgtgctagattttagagggaatttggtagtttcgctcctggattttaatctcattgggaattagggttctctgattcacgaatttcaaaccgcagattgatggatcaattttgattttgaagtcagatttagtacttgcataaatacggttgatttgtgcctttcttatcatatgcccactctgattttggggattaggtttggaatttggacgccaatttgtattcttgatacggaaggggattgtgaagaagatttgatgtccccaaatcaaatcgaatttttgtctattgtagttaaaattcatggctagttatgccaaattcaaaaaaaaaaaaaaaagttgttttttgtggttctgggtcgcctctaatagacaggcttgatgatgactttatggctactcttctaagcttgaagctcttagttgtgtctgtgtgtatatgtatatatatacacatactataagcaaatggttacgattcacactccttccctcttgatagtgagtgaatcttgtttgcttttctcaggaggtagatcctaccgttgaaactgatgacatggctggtacagacgggatggatggtttattctctgatttggcaaatgcgattcctggaatcgatgaggctatgagttttgctgagatgttgaagtaaatagccatttagttcttctagtaatcatctgcctttatccatgtattatcacagtcaaattttgatatgtttatgtttccttaggttggtgcaaaca

SEQ ID NO: 2079 - DNA, 466 bp, Arabidopsis thaliana
  Intron number 2 from transcript AT1G01940.1 (locus AT1G019 40) derived from phytozome v7.0 (chr-ID Chr1; pos 323248 t o 323713)
aaatcttctgtgacgaggttcccaagagtgctgaggttagttattcactcagctcatgtttctcggtttcgatttgagctgttttctttgaattgtttacaaaatcagtccagttgaggcaaataacaaaacaatattcactaggttatctagtgtccaattagctattacctggtgctgggttcttgtattgtatggatgatttttcttctccttctctggattgtttttaatctttaggcgaaattagggttatatgaatgtcatgattggggaaattatttttccctcaacagtgttggtgtataggttcattatttttcaatgcgtattcattggatcactgagctatttctctctgacaattttcgcaagtttttccatgtatgaagcaccttgacctttagctttgatctttcatattggtgcagaactttttggcgttgtgtgctagtggctactacga

SEQ ID NO: 2080 - DNA, 580 bp, Arabidopsis thaliana
  Intron number 1 from transcript AT1G02380.1 (locus AT1G023 80) derived from phytozome v7.0 (chr-ID Chr1; pos 477171 t o 477750)
ctctgatttttcaccctgaagaaccctaatttcaggtgagtactactctcaatccatttttttttatattattccagtgccgcatttgctagttctcttccttattacaagttattaatgggttttgacactcgtagcgaaaggtttgaactttatctgcttcgattgaattctctgtaatttatgaggctttgcagagttttgttctttagagtctgtaatctttgtttagcttagggcatttattgtccctgtttgttttgttctgtcttcattgttagaaaatttgggttatggaatcgaatgcgcgagtttttgagtatagtgatttcaaaattcgcattcagttttcgtgaaaattataaaggtatataagtcactgattttggtagttaagcaaaatcagttttcatggttactttgtattcttagttagtgttttaaggtgaaccagaattagcattcttctgtgtcaatttactcttgtgtgttataaggatgattggtatcctaatctctcctatcatttgtttctcatgttctaggaagttgcgagtttcgaaagtcaaaaagcggttta

SEQ ID NO: 2081 - DNA, 720 bp, Arabidopsis thaliana
  Intron number 1 from transcript AT1G02390.1 (locus AT1G023 90) derived from phytozome v7.0 (chr-ID Chr1; pos 481585 t o 482304)
caagtcacagatctctcttctctcaattttgccaggtaaattatattctggagacgtatatacataatctaaaagtgctttagttgtgttattcttgcattaaaaaatttatgattctaaaagagacattggtaaccttataaaaaaacagacgtaactgtaattttttgggagacaaacaaagacaaagcttatgttactcttctatttttttttcccttacatttggtaacccgataataaatttatcaagtcccgaataatacttgcattctaattttgttaaataaatagtatacgtttaattggtttataggaacttaataataagaaatgataagattctttgaacttaataagaatccccaataggattcttttagttttaactgtggctctttggacgaatcgagatgcattgattttttattttttttatgttaaaacttaaaaccattgactaagacttgttgtaatctagtactgcgtcacaaatcaaactaatatatcaagtaaatgctattttgaaatttttggaaattaattatattataaagttctgatgcaataaattcaaagcatgcatagactacgtacgacttggaaccggtccacttcaactgatatatttcatttcctaatgataatctccccctaatcctttcttttttcttgtcataaacaggaaatttacttcgtcagaaattcagacaagaaaag

SEQ ID NO: 2082 - DNA, 434 bp, Arabidopsis thaliana
  Intron number 1 from transcript AT1G03180.1 (locus AT1G031 80) derived from phytozome v7.0 (chr-ID Chr1; pos 773675 t o 774108)
caccagcagatcccttcgtatgttatctcttcctatcttcgtatctctatgcttcgatgtatccttcgatctggtgatgatgtatctatttgtttgttcttcaatctctccgttaatttctccgattagtctgttggttacgaatttatcagaagaaaaatagtttcgtggttatgaatttatggattctggatggattagtgattaattcctggtaggtgagttatgttcaattctaggagaaattgaaaagctctacgcaattgtgcacactacttccttttggttttagaattaagtctgttgtatccactatgagtgttttactgaaaaccagaaacttcaatttgcagctttggttttggctacacaaagctccttctaccaatatgactgttgttggttatttacatctgtgcagggtattacaagac

SEQ ID NO: 2083 - DNA, 279 bp, Arabidopsis thaliana
  Intron number 1 from transcript AT1G03200.1 (locus AT1G032 00) derived from phytozome v7.0 (chr-ID Chr1; pos 780802 t o 781080)
aacttgcaccgactccaacactctgttctcaaaaggtacttttcgtcttgttggaatttttggccaaataacgtcttttttttatatggtatctaattactgtattctggttgatcgcaaaacaaagaattctcatgtttaaagtgggtttcgtctaatccaatttgaattttaggtcttatattatttccctagctctaaccctaatcatatatttctcaaagtttttgatttttattcaagattccttctaatcaattatttcttctttgtatgtag

SEQ ID NO: 2084 - DNA, 327 bp, Arabidopsis thaliana
  Intron number 1 from transcript AT1G03240.1 (locus AT1G032 40) derived from phytozome v7.0 (chr-ID Chr1; pos 792462 t o 792788 reverse strand)
aacttgcgcggactccaacactttgttctcaaaaggtattttttttccttatctctgtttctgtttttttttgtttttttatctacgtcttgttggaattttcggccaaatcaacgtcttttttatatggtttgttaatctttagtatctaattattctggttgatcgcaaaaacaaagaattctcatgttcaaagtggttttcttcaaatccaatttgaattttaggtcttatattatttccctctaaccctaatcatatatttctcaaagtttttgatttttattcaagattccttctaatcaattatttcttctttgtatgtag

SEQ ID NO: 2085 - DNA, 387 bp, Arabidopsis thaliana
  Intron number 1 from transcript AT1G03310.2 (locus AT1G033 10) derived from phytozome v7.0 (chr-ID Chr1; pos 813577 t o 813963)
cgacagtaagctcgacttttttgacgacgtttgtctcttctttacgctttcttgtgttccttttttttttcaattatttcttagtgttccgatgaatcatgatcccgagacgtcttgttcttgttgattctactacactatctttcttaatttctggaaatttgaaatgccgatggtaggaaaactttgctaagtgggttctgttttgattttagctttgagatgggaatttagcttattcaacgagttgtttattggatatagtttcccttgcgaaattctgctttggtttctgttttctttcgttcaatcttaataaagagctttggggtttgatctgtgttcttaacagggatattcataacctggattaaagtttttggtgct

SEQ ID NO: 2086 - DNA, 387 bp, Arabidopsis thaliana; identical to SEQ ID NO: 2085
  Intron number 1 from transcript AT1G03310.1 (locus AT1G033 10) derived from phytozome v7.0 (chr-ID Chr1; pos 813577 t o 813963)

SEQ ID NO: 2087 - DNA, 714 bp, Arabidopsis thaliana
  Intron number 2 from transcript AT1G03457.2 (locus AT1G034 57) derived from phytozome v7.0 (chr-ID Chr1; pos 862780 t o 863493 reverse strand)
tcaatagttttcataacaagaagacattgcctggggtaagtcttctttcttgttaccattcttgaagctgttttgcttaattttctgggattttctgatatttgaatctgatgtttctgtgtacatcaaaactacttaaggtgacattttttcaagctactgattaaaatctcagattgatttttcttctttttatccgtctcgatctgcattgtacttgattattgtccctgttaattttgcatgttgttgcttggttatatatatcatatatccatcgaggtgaaatcatgaatctgatttggctgatcagaatctgccctatcagttattgtaatctgatgatactagttcgtttcaaatcctctctagctgatttcttcaaacccaagaaaccacattggtccactatagatgtatgtcagtggtcactaaaacgtgcaagatgcaaaaagctagaacatctctaggaatgagattataggaacccaaataccaagagaaaacttttgcttcattgtgttgactttttgttgagcgatctttaacaaaaatttggtgtatatatatatccttgcttctttcgatttttctgtggccggtatctgaacattaggatgcttatgggctatgtacactcttatccctctctcgaattatagaattcactttcttatgatatgtttcaggcatctagtccgttgcaagttaagt

SEQ ID NO: 2088 - DNA, 456 bp, Arabidopsis thaliana
  Intron number 1 from transcript AT1G03810.1 (locus AT1G038 10) derived from phytozome v7.0 (chr-ID Chr1; pos 958980 t o 959435)
cattcttttcaccgctcgcaacgaccaaggtaaggatcttaattatttacatatataagttctcttggttagggtttcgtaatcgtttctctatcgttttcactcgaaattgcgttcaatctttccataatttctctgtttctaggtttatatatgccttgattggaatctctatgtttgtgaagatctaaaacatttatacttcagagattttgataaagtttaactttttttatagataattttgcttatagtttagtttattgatgaacagagtatatctatttatatatgtctaagctttgattagtgttcaatatgttccacttcattaatctctaagctttgattagtgtgtttgtgtttgacatttatacaacttcctattcaatatgtgagaatatgtatggtactaattaatgatgttcttttggggttgcaaatgcagttgatcta

SEQ ID NO: 2089 - DNA, 819 bp, Arabidopsis thaliana
  Intron number 1 from transcript AT1G03850.1 (locus AT1G038 50) derived from phytozome v7.0 (chr-ID Chr1; pos 976474 t o 977292 reverse strand)
gctgctcatattagtgatttagtgcctactcttagacaagctggggctttatggctttgatttttaatcctcctaaatctagttgccttcttatttatttctatccctttttacattatttgttaatatatgtgaacttgtaaaagattgttacgtgattggtttgatcataagaaaaacacagaaaaaaacaaaaaaaaaacatcatattttactttattttggtaattaaaacattatttacgaaaaataaaaaatcaaaaagtaaaaaatatatatatatatatatatagatatatattttcacgtaattaaatttatcacttagttttctaaaacaaaaacattttgtaaatcgaaattttttagttaaaaatcaaaacactattacttatactttatttttgacatcacaaaaaaaacattatttttgaaaaccgtttaaaacataattaagtgttaaatttgtcttaaaaacaaaagcattttaactaacatatcaagtgaaatttaaacggttttactttaaaaatatatatatttttcaaaaaccttgatatttagtttaaaatcagacgtgaaaaacatattactttttctataatcaaatcattatattttatatttttatttttaaaaaaagagagagaaaagaaagttttattaccttgttggatttgggtagtggggagggtcctcacaggaaagcccattacgaaggcccattgatgagctttgactgcatcgttctgtatccttcttgtgacatcttcttcttcgttcatcctcaggccactccatcaagattcgaaccgatac

SEQ ID NO: 2090 - DNA, 465 bp, Arabidopsis thaliana
  Intron number 2 from transcript AT1G03860.2 (locus AT1G038 60) derived from phytozome v7.0 (chr-ID Chr1; pos 980321 t o 980785 reverse strand)
atcttcaggtgcgttttggtttcttcttcttttggcttcttttctgtgtgtgtttgtacaatatttagcccagggatttaattttaaatgatgttactgaatgtggtgctatatagatcatactagatattccttcttttgacgttatgttaagacccttcaatgcagcattaagagcatgttttagaaaattttgggtgtggtttgaggttatggagctgtagattaaatatcacttactcttttaggatattacacgatcaatgttgatccttatatgaactgtgtgagtgtatggataagtggaaaaacaagagacaagttacacttgctttcagtagacttaggtagagcaagaaagaacttagtctccattttctttcttaaaggagttgctgtgtttctgatatttttcttgggtgttgcacaggtgaaaattggattaagggttctcacacgtcccat

SEQ ID NO: 2091 - DNA, 650 bp, Arabidopsis thaliana
  Intron number 1 from transcript AT1G03860.2 (locus AT1G038 60) derived from phytozome v7.0 (chr-ID Chr1; pos 981158 t o 981807 reverse strand)
tcctaccatcgccgtcgattaagagctgagctcaggtttatctatctgctttttcctcccagttttcactgtgtttcgttgtatgctctgtttggttgtcgatagtcacacagtgcctgatcgtcggtcaatttgctaatccttgtgtgatttagagttggaatgatcatttggtgaaatctcgtggatcttttcttgttgaaagcttgttgacttgctcgtcatatatattcgacgatctatgggtactgtatctagttgataatgttcaaaggcttgatcgattttagccttgggatctgctaccgatgctttcaatttctgacgcttttctatgcgatcttttcgaattcgtttttctctccagtttttgccatgtcaattgattctcttagtaacactacttctttgtttgctctcttggattttttgtttcttctgaaatggaggcttgtgcattgattgttctatgtgtgtgatttcttatgcggtgttaagtcctttggatcttcgtataatgatgtttttaatctgctgacaaacgaatttatccctgcggcgttttagtttgctacatataaagttcttagctgtgaactgtttctcctgggtatctcattgcggtttgaattctgttttgctatcaggaa

SEQ ID NO: 2092 - DNA, 406 bp, Arabidopsis thaliana
  Intron number 1 from transcript AT1G03860.3 (locus AT1G038 60) derived from phytozome v7.0 (chr-ID Chr1; pos 981158 t o 981563 reverse strand)
ggtactgtatctagttgataatgttcaaaggcttgatcgattttagccttgggatctgctaccgatgctttcaatttctgacgcttttctatgcgatcttttcgaattcgtttttctctccagtttttgccatgtcaattgattctcttagtaacactacttctttgtttgctctcttggattttttgtttcttctgaaatggaggcttgtgcattgattgttctatgtgtgtgatttcttatgcggtgttaagtcctttggatcttcgtataatgatgtttttaatctgctgacaaacgaatttatccctgcggcgttttagtttgctacatataaagttcttagctgtgaactgtttctcctgggtatctcattgcggtttgaattctgttttgctatcaggaa

SEQ ID NO: 2093 - DNA, 615 bp, Arabidopsis thaliana
  Intron number 1 from transcript AT1G04555.1 (locus AT1G045 55) derived from phytozome v7.0 (chr-ID Chr1; pos 1242862 to 1243476)
atcttcttcttcttcttctcgccgactcatttcaggtctgtaacttttctgaattccttgtgggtatatcctgattttgcgtaatttctctggatttcatcggaatttgagcaaagtttggtgctttagggatcatcttctgatgggtctttctcggatctgctcataacaaaaagcttgttgactcgtttttagatttctggatcctgtggtcacttcaattcgatctttgtagatttagggcttctacactgatatgattcgatttcgaaaaagtttagatttttgcgtattgaacagataattcaattgcataaggcacttgaaagttaagctctttccatggaactgttgatatcaaagttgttacatattcacattctaagccttgtagagatgaagaacttttttttttttttttttttttttttttttttttttttggtttaatgagatgaagaactttgagagattgttgatgtttttttctacattactgcagagctttgtcttctttttgggtacttgaaaaagtttcttctttcatcatacataaccattacctctttgataaatgcagctcagcttcggtatatcaaggaagccgaagaactt

SEQ ID NO: 2094 - DNA, 560 bp, Arabidopsis thaliana
  Intron number 1 from transcript AT1G04580.1 (locus AT1G045 80) derived from phytozome v7.0 (chr-ID Chr1; pos 1256850 to 1257409 reverse strand)
ttgctttaagagtgtcaagctcagctgtggcgaaggtacacacacacactgtgatatttttcgatgaatgtcaatatcttttgtggttttattttgtttatatacacttctctgtttgaatctctaattcgtatcaacaactattttgcttatgaatgaagatccttcaatttcgaggacctggatgattaactcttttgtctccaccagaacgtaaaagtcatgatttattatttgaatctgtgaacgatcatacaaatagttaaaatctatgtttatttactccttccttttcagaaatcaatcttgttgtgttttggttttgtgccactcatatttacctgaattagtataccacttgtctgacaagtgtttaccaaactgaaatgaggcttggaacttggtttctttttccttgtttcatgtgtctttgaacttgatatttttgtcttcttttgttgcctgtccggcattttcagtgtgtgtttctctcactgactcagctatatttttcaattttcacagggggttgtggtgcttgcatcgtaattctatcaaaa

SEQ ID NO: 2095 - DNA, 357 bp, Arabidopsis thaliana
  Intron number 1 from transcript AT1G04650.1 (locus AT1G046 50) derived from phytozome v7.0 (chr-ID Chr1; pos 1298529 to 1298885 reverse strand)
aagttactcgaagagatcaaatcttctgatgtaagcttctctttgatttccacctttgatttgattttctaggtttctgtatattttttccaactaaaatcttctggtggattttatcgcttccggtagtcatttctacgaatcctctctgttaaatcgagaaatttcttctgattgctttgggttttgtgatgtttcttatcaatttcccttccgattaagtttctgcagcttaatgtatatatagagtgattaggattcagttgagttctgtagctcatggatctaacgagcttcgttttcttcattgttcgctcaacagcttatcgagaatcgggctcaattactcacgcggct

SEQ ID NO: 2096 - DNA, 856 bp, Arabidopsis thaliana
  Intron number 1 from transcript AT1G04880.1 (locus AT1G048 80) derived from phytozome v7.0 (chr-ID Chr1; pos 1378265 to 1379120 reverse strand)
aatattcaagggtgaatagttagcaaaggtgacaactttctttcattttcttttaatcttctcatattatttcatcatcacttctttttcgtcgtctgggcttttgctgcttcttgtttgttgcttcgcgggaaaccccaaaaatggtttctctgttgtatcgtctatcgagaatctattcgttgtttggtaacagagaattaatggcttctttgaagaaagttgttgttgggccttgaatttctcaatagatgcctgtaatgtatttgttaatatgcctcctcgaggggttttcttggtttatgttccttcgaatctcaggctaatatacgttgccggcgcaaaaattccctcttttttgtcagagcgatagcgagagagagagattggttgaaaaagatgtgtctttgttatgattccttaaagtatggttgcttttgtagcacaagtccttttacatttaatggcaatctgtcgtattcagttttttgttctgcatagaagaaacagagggaagagaagaattcatggaggggcttttatagctttttccttgaagcctttcttggactttgcaatctcttattttcttgtttaagtttttcgtcatttgattctttgtggataatatttataaattgaactcctgtgtatgtatctttgagtttctttgatggaagacggttaattacactctgatctgatgtgtggagccttaaagtctctgacttttgtttcattaataagccggatagatagtaaatgctgaagaaggtttagtggttgttaaagagcgtaaatgatcttaaagtgcttacctttttgttttcttttttgtcttttggctgtgttagga

SEQ ID NO: 2097 - DNA, 627 bp, Arabidopsis thaliana
  Intron number 1 from transcript AT1G04930.1 (locus AT1G049 30) derived from phytozome v7.0 (chr-ID Chr1; pos 1397848 to 1398474 reverse strand)
ccattagagcaagtcctcaatttctgcaaccgcgggtgaggtttcttagatgaagtcctcaatttctgcttgtcatgtttcatttgttaatgcttagattctagctaagtagtggaaagattagtggggaaaatgctcgagatgatccaaagtttcttgattggagtcttagtagaactgaatctgactgtaccgtgacttaagaatcatcttggttaatattggatccatttttgtcagagtgattctcattcgaactaatgcatgtagttctagaattttgatcgactagtctagttatacaacaatgtgagttgttggacgtgtctttcatggttttcttataaaccatgtgatagttagtaattggatctagttatctttctattttggttctttgtcctgctatgtgcctgctttactctggtcttgaaaattctcttttgtggaatgaggaagacttgaaaatgcttttatatcttagcaaatgttaagctgttcttctcttaatagttggtttgcacctacttacttttgattattgctcttgctccagtcacattttctcattttcgtaaattttggtacttaggttgccccgcccccaacttcaattctagacactag

SEQ ID NO: 2098 - DNA, 608 bp, Arabidopsis thaliana
  Intron number 2 from transcript AT1G05060.1 (locus AT1G050 60) derived from phytozome v7.0 (chr-ID Chr1; pos 1451722 to 1452329 reverse strand)
gaaattgaaagctgctggtgaagggcttcaacatagtatgatcacttctcttcttttgtttatctgcaaatcaaatctttttgaacgtggataattggatttatggatacagttacctacagaggaacatgactagatttgggttgtttgctagagatagaaggattgctatctttacgtgttctgttttcacttccttgcttttgttaatgttgatcatgtaaattgcttgcccaaacttgtctattttaccttgttagggactgcaatggcagtaattctgaaaggtttcagcttactagagaaaactttggtttgtttggttatgaaagccaagattttccgtggctgagggttcatgagtgtctaatgtaacaactgctttctggttgtctctttttgactctgatgacaaataatctaagtatctctctcacagcctagaaattgttgataatattgcttagattgagattctgttattgtcttttgtcttttaatgttaattgatgtcgtgaagtgttcggaaagtttgcctaatctcgagccctctgatttttctggtttctgcagttggaaaagcatttgcagccgctactattatcatc

SEQ ID NO: 2099 - DNA, 747 bp, Arabidopsis thaliana
  Intron number 1 from transcript AT1G05070.1 (locus AT1G050 70) derived from phytozome v7.0 (chr-ID Chr1; pos 1457633 to 1458379 reverse strand)
ctctacctattccgctgtcaccattcccaaaggtaaacagaagttagcttgatcggtgcccatgatttcaacagatctgtggctaaagtttactcctttttgtagagtgatgtaggaatttagcaactttatatcaaaatttggtgttgtagctggtggtggaagtaaggattagtagtatcagttggattttcaagtttggctttttttaatctggtgctgaggttactgaatttgtaagctttgagcttgattcgtgcttgagtttgagtctgagaatgattagtgtagtaagtaagtgtagatctacttgaatgatgtttcattcgtttaggtgttctccatcttaaaaagattatctcagttatttgtccacagtgttgatgctcctattgtttgagttacattaatggttcaagttatgatttgttaacttctcggattgtggaagttgaagtttactggcgactgttctgataatagccaatcaacaaacaatgcagtttgtttggattgtatgcattgtgattgcttttagaccgatttgattgatagaatttgtttagtgaaccccaagaagactgtagtatgaactcaacatcattatttgtaatgcttgttgtaacagatttcttaagttactatatgtttctcgctaagctgaatttatattcttcttcagatgttaccaattccaaaagattgatccttttttacttgtttcctttcttcttgcagagctcagta

SEQ ID NO: 2100 - DNA, 830 bp, Arabidopsis thaliana
  Intron number 1 from transcript AT1G05160.1 (locus AT1G051 60) derived from phytozome v7.0 (chr-ID Chr1; pos 1489935 to 1490764 reverse strand)
ggtctcttctctctcattgctttatcttaattaaggtctggttctcttttactttatcgattcctctccatgtgtgtctaccaaagttttgattttttgttgttgttggtgtctgaatccgagtgtgaagtagtcgtacaccctaatcgaaatttccaggatcaaacttagtgaaattcacttgttgatctacgtattgaaaattacgttcagagaggtcgaatcaacggattttttagttgtaattaagctttaactgatcaaaattaaacaacttgaagaagaatgtggacaaaaaaaaagaagagaaattgataagaaaaagtttagtattaattttagactaattaatcttcttggagtgttttgtttctctgttgtttaacgaatgtgttcactgttttgcatttggatctacatttgctacttagttttagtatcaacgggatcttatcgatgaattagtatactcatgctcgacacatgtagagatgatagtactggttttggtgaattaacttattttcttgaagaagaatatacagagaggcatttgccatatagagaacccaaaatggaagtaatttcggttaatccttaggagctagccgtgtgtccctttgtatcttcccaccacaaattagataggaacactcgttttggttagaaatctctttcataaataaattctatcccgctaagattctctcttgttctttagaaacaaaaataagatataatattactaccaggaattgcatggacaagattttttccagattaaaagatattttaccagttttacttgtagactttccaggtattgagta

SEQ ID NO: 2101 - DNA, 447 bp, Arabidopsis thaliana
  Intron number 2 from transcript AT1G05310.1 (locus AT1G053 10) derived from phytozome v7.0 (chr-ID Chr1; pos 1551384 to 1551830 reverse strand)
gttctcagttcgtcgctaagaacatcagtttcgtaatttcattaatttatcaattaacatatgtacttaaatagaaactaatcaagggataaaatcaaacatgatatgaaatggttactataaacagaaaccggtaatcaattgtttcgatttagtacagttttgatttcaatttcttataaaactatagctttagtttgaagtatatttttgaaagatgttgctttaatcggtttgatatttcctctctcggctttttctcggtttggttaccatatggtcgaattagtgttctcttctttactcggttttctcataatttttttggtacgctttcctttaatttaaccggataaggttaactagtatcaacaaattaaagataactttaccgtgatatatattgtgatagaacgtggcaccgataccaaagccaggagacgtagg

SEQ ID NO: 2102 - DNA, 362 bp, Arabidopsis thaliana
  Intron number 1 from transcript AT1G05410.1 (locus AT1G054 10) derived from phytozome v7.0 (chr-ID Chr1; pos 1587269 to 1587630 reverse strand)
tctgaaattaatcagtcttgaagtctctggagattgtacgtttctcttcttcctttcctcgtcggttttaatggattccgtttgcctgatttgcagtttctgcttcaccgtgaaatcgaaactcgttttgctcttaaacaaatattatgcatgcgtttcaatttgggtctttttcttgacaatattggttctgtttggattaagaaattgaaaattagttttgtagctgagccttttctcttgtgtgtataggaactgagctatatcagtagtgtatctagcatatttgattaatgttccttcatgttgttcttattgaagctgcttccattggttttgtgattgagtgcaggtcttataac

SEQ ID NO: 2103 - DNA, 389 bp, Arabidopsis thaliana
  Intron number 1 from transcript AT1G05510.1 (locus AT1G055 10) derived from phytozome v7.0 (chr-ID Chr1; pos 1629638 to 1630026)
gctccgattaaccaaatccaccaacatctctgcgcgtacgcttctgaaattgttaatcttctcttttcattttatctttaaacaagaaataaagaagaggatcggaagaatgagggataatcataacagtataaaacctacaccacattttttcgtttaatagatctgtcaaattcttgtagtttagatttaaaaaacattgtattgatatcttacgtaaatcaagttaatcaaattttcttgaatttttaatcgatgtgaacacgtgtggagttgtgtacatgcatgcagaatgaaacttaactatttcatatgagtttgtttgcatcagtaaaaagatgaactatatatatcctctcctttttgcgcttgtcataggtttcatttct

SEQ ID NO: 2104 - DNA, 307 bp, Arabidopsis thaliana
  Intron number 3 from transcript AT1G05620.1 (locus AT1G056 20) derived from phytozome v7.0 (chr-ID Chr1; pos 1679849 to 1680155)
ttccggtggctgaaggaacacataaaaccttcttggtatgtttccactttatggcctttgatatgtttttgtgagaaagatggatgctatgtaatgtgtttgagattcaatatatgttttctagatctttagtaagaataataattcacacaaatgtgtttagttccaatctgtgttataaatcaaatggtaagttatattgtgtctttttcacatgtcataccacttagattttttagcattgataacttgttgtcttttcttctctaaagaacgatacgaagcttcgaatagctgactttgttca

SEQ ID NO: 2105 - DNA, 405 bp, Arabidopsis thaliana
  Intron number 1 from transcript AT1G05660.1 (locus AT1G056 60) derived from phytozome v7.0 (chr-ID Chr1; pos 1695251 to 1695655 reverse strand)
ggaaatctggtcagaattgtcctcccggtgttagagtatgcatctctcctctatctctagtttgaactttttagtgtttttcctctctagtttgaatttaaatgcatacttacatatatatgcgtgatatataaatatatgtacgtcaactaaaatattaggcttatttaaaaaataacatatttataatccaatatattataaaaattctaaatttgtaagatgaataaacaaacattgaaaaaaaagaaaagaataagcaaacatttttttaattatgtattaaactccatttggctacgtcctagttactatattaaaatttgaccggcgaaaccaatctcataaaatctttgatgcattattgtagtcaatatcgttcaactcggcaaaagacgtgatcat

SEQ ID NO: 2106 - DNA, 518 bp, Arabidopsis thaliana
  Intron number 1 from transcript AT1G05690.1 (locus AT1G056 90) derived from phytozome v7.0 (chr-ID Chr1; pos 1707161 to 1707678)
gagaattgggtaaatcttcgattctgattttctgggtaagaatgatcaagacccttcctttattttctttttttgttcttgcctaataattcttattctctgaatttgatttctttcttttaatgactcagaatcttccgtattggatgtttttgttcctgttcttgataatctctttatgactgtatctctacctctggattctcactgtcactgatgttcatgtctaatgaagcttctttaatttagtcttgttcgtgtcactgttcgatatttttaaatcaaaagttgctaactttgtgtcaatgatttgcttaagtaggactattttgagtttatggacatttgattcttaaattctgaggttgcatcagattagggaacttgaatcttggttactgtaaatttactaggagaaacctgagattgactattaactctgatatataacttatgtttgcttcttgcatttgatcttaacagattaaagaacacgtaacctattttcaattcgcggg

SEQ ID NO: 2107 - DNA, 848 bp, Arabidopsis thaliana
  Intron number 1 from transcript AT1G05710.3 (locus AT1G057 10) derived from phytozome v7.0 (chr-ID Chr1; pos 1715350 to 1716197)
tcttccaatttgtgactctacctatctctctctccgtaagctctttctctctctctttattcgttctttctttatttgctctgtttctttactccatttttggcttaattacaccaaatttagtctgctaaaagctaatttcaagcataattacttatctctcctcttcttgttgctaaccttcagttggattaggttttgatttcgtttatacgacaatccccgtgactgaaaaagttaccaactttgatagatatcgttaccagattctactcatagttttgttattgtaatgcaagaagttgagttcttgtttacattaacttcaataattcactgagagtgactttttgttctcctctgatccgtggaggattctctatatgtgttttgttttttgggggggttttctcctgtttttagggactctattgattcatgcatatatgatgttattctctgtttatgagtttatgcaaataatctaagcaaggtatgataacatatttaatctttttgtttgagcttataattgtgcttagaaatcttaaaataatgcttaagctgatgtgaacttgaggcctagcctctgaccacaaatcctagcctacttcgttgaccatacctttgtcttggcttaatattctaaatttctcttccaaatcctgtctcccaatgcattggttggtccaaaacaagatcatcatttcatagatcttgtaatctttctggtctgtaatttgctctaggatggtaaccttgtaccctatgtaacatgtcttgttagtataaattttgggtcatgttgtgttgatgactctttagcgcatttcttattgacaaaaggt

SEQ ID NO: 2108 - DNA, 749 bp, Arabidopsis thaliana
  Intron number 1 from transcript AT1G05710.5 (locus AT1G057 10) derived from phytozome v7.0 (chr-ID Chr1; pos 1715350 to 1716098)
tcttccaatttgtgactctacctatctctctctccgtaagctctttctctctctctttattcgttctttctttatttgctctgtttctttactccatttttggcttaattacaccaaatttagtctgctaaaagctaatttcaagcataattacttatctctcctcttcttgttgctaaccttcagttggattaggttttgatttcgtttatacgacaatccccgtgactgaaaaagttaccaactttgatagatatcgttaccagattctactcatagttttgttattgtaatgcaagaagttgagttcttgtttacattaacttcaataattcactgagagtgactttttgttctcctctgatccgtggaggattctctatatgtgttttgttttttgggggggttttctcctgtttttagggactctattgattcatgcatatatgatgttattctctgtttatgagtttatgcaaataatctaagcaaggtatgataacatatttaatctttttgtttgagcttataattgtgcttagaaatcttaaaataatgcttaagctgatgtgaacttgaggcctagcctctgaccacaaatcctagcctacttcgttgaccatacctttgtcttggcttaatattctaaatttctcttccaaatcctgtctcccaatgcattggttggtccaaaacaagatcatcatttcatagatcttgtaatctttctggtctgtaatttgctctag

SEQ ID NO: 2109 - DNA, 757 bp, Arabidopsis thaliana
  Intron number 3 from transcript AT1G05840.1 (locus AT1G058 40) derived from phytozome v7.0 (chr-ID Chr1; pos 1764560 to 1765316 reverse strand)
gcagtgtcatttttgggtatgtttccttttaataacctcgctttacatgacttatctttaaactagtaaactgctgcaacatggttcttgcggctttcttagatcttctttgtgttctcacttctcactgaaaagaacacaatttcaccttccttgtggtcaaggttttattttgttaagtgaacagaaaaaataagaaatggaaaacgctgttacaaagcttaattgaccaacagttttcaaagtgcatacaaaagccaaacagataaaacttaattgcttaaagaaaaaaatcttgagattcgttgaagtgcatactggtatctattcttttttattttgaaagtaacatgggaataggttctccaccatatagtgaatatcacaaatagacctttactgaatatgttgtgcttttgattgtgacagttgattagtttgctaaggtatcttcccgagcacagctcatttcatctaatttcatatgcttctacacgttgaaaaacttagtaatttagaaatatcatatttatacaatatttatattttagttttgtatcctggcctgagaattgctggtcacgtagaaaatccctcagagatctgtaaacaaagtagaatagttgtccattagcgttttatcagtcctacggcaaggaagcttaatccgtcattcctcattgcctcttccatttttttaatgtttttatatgatcttgaaggtgtggtgctaggcagtcaggagatctagactctt

SEQ ID NO: 2110 - DNA, 599 bp, Arabidopsis thaliana
  Intron number 1 from transcript AT1G05930.1 (locus AT1G059 30) derived from phytozome v7.0 (chr-ID Chr1; pos 1800285 to 1800883)
aggcagtatagctcctattttcgtcattgacaagtttcttgtgtctgttgagattcacattggtctaatctttcaggccattcttgaggtttttggtctagttaacaaaattagggtttttattttttactaggatttctttcatctctcttttaacactttgtcgggtttttgagtttctaggattgtttaaaatgcaggaggcttagcacagtctctgtttcatgcttaatacaatacactctctaaataatgctttcaagaaaagaaaaagaaaagattatacctttagagttattataagaggaaaacgaagtaaatcagaacggattaacgaactatataaaacaacaaagtcactcttttcagttttcattcacaacaaaatcttaatggggcttccacttcttcttcatcgcctttttctttaaccttcttcaaaactacattgccgagtccaagaagactccatctttgtgtctaacgggagaccacgagccccaagaggcgtgtggtgtcaccgagaggggtaaatcagaaagacatcagtctttggtctttcaggtggcgtggaatcctctgttttgctcttgttcctc

SEQ ID NO: 2111 - DNA, 698 bp, Arabidopsis thaliana
  Intron number 1 from transcript AT1G06010.1 (locus AT1G060 10) derived from phytozome v7.0 (chr-ID Chr1; pos 1822649 to 1823346)
agctctcctctgggtctttctttgaatcgtgaaaggtatcgtttttatatctctctatacttgtctgattctttctctggatctttttccgtctcaaaatttgttaagggaactacattggcttgtcgatttgcttaacacaagcagttctcattttagagttaacgaaagtagcaatcggttttcgattttgtaaactttaatcgccaattacagttactgaaactctgtattgagagaattagggttcggtttcaaatcagctgggttttgtaattttgtttctcgtttatctgaaacccgagtttttgaggctctatgtgttgggattagagtcttacgagattgttataattaggattcgattaatttgtggtgtaaattctggtgggagatgtttatgcaatctctaaaccccttttttctgcagttatgtcttataatcagtttctgcttactgcattttgatctctagtaaaccattttttctcactattttgtatcgaaatcaatgagggaaccaccaaataatccccatctattgattgaatgattcttcttgtttagtttagattcgtcacaagaaacaaaatcttgataattggtctaggtttctgatcactggttagccaaactgtagtctggttttagtttgtcactctgctaaaaaaattgggatgaatttgtgatgctaggaa

SEQ ID NO: 2112 - DNA, 367 bp, Arabidopsis thaliana
  Intron number 2 from transcript AT1G06150.1 (locus AT1G061 50) derived from phytozome v7.0 (chr-ID Chr1; pos 1872397 to 1872763 reverse strand)
tacactctcttggggaagggtaaggaaaatttgcttgctgatgcactgttcttgttaatactcttgctatcttcattactttgagatcttttattgatgttgtcaaacaatgcaaagacttggtgtgtttatagcttgactgtgtattacagtcttacattaatgtagctataatattctctgctcttttaacttttgtttcattggtattgactacatgatatacttaatattgaatcttctatcaggaacatcagctattaattcgttttgatgattgaattttacttaatgatgctaacatcttcattcgtatctctctactattataggattgtaggacaagtagcaatctctggacaacatc

SEQ ID NO: 2113 - DNA, 367 bp, Arabidopsis thaliana; identical to SEQ ID NO: 2112
  Intron number 2 from transcript AT1G06150.2 (locus AT1G061 50) derived from phytozome v7.0 (chr-ID Chr1; pos 1872397 to 1872763 reverse strand)

SEQ ID NO: 2114 - DNA, 916 bp, Arabidopsis thaliana
  Intron number 1 from transcript AT1G06200.1 (locus AT1G062 00) derived from phytozome v7.0 (chr-ID Chr1; pos 1895900 to 1896815 reverse strand)
acaagctcgagtactctctcactctcagccttaaggttcttataatgctctctctctctctctctttcactctgtgacgcacagcttgtgttaagctttcagttccttaccttttgcttatctggttgtatggaaatttaactttctgatttctctctttgtaatttatgaaattggctttaggaatggttaaattggctagggtttctgatatgttcccctcatccaattatgattttgcttgaatacgtagctttagaaaattgcctccataaaacgccatttatcaagaaaatttgcttctttcgagctatgcatttggataaactaaatctttatgcttttagttagggaatgattgtaagtaccacttataataaaagggcatactttgaaattaaaaacaagaaaaaggaacaaactttatgctaagggatcagtagtttggttgacatgatcttcaatagcttgtgattcttgaatttattttaaaacaagttatacggtcaaatcattgctattgaatttgtgatagtacttctatcatattagtttcacttgtgactatgatctcaagatctttctttcagatgatctgattaaatctaatgactcaaaaaaagcgactatgatctcaagatctttctttcagatgatctgattaaatccaatgactcaaaaaaagccgtcatgattgttctggtccttgttgtttcttctgctgcagatacttttttttttctttctgaatccatttttttcagctcacttagttgtttaaaactgtcatgtagaatctgtcttttttttaaaaaaaaaaaaatttaaacacgttgtaaaatctgtttttagttaccatgcttgagttactctatttgcagaaacatactagagagaagctcagtgaccgggaact

SEQ ID NO: 2115 - DNA, 1017 bp, Arabidopsis thaliana
  Intron number 1 from transcript AT1G06400.1 (locus AT1G064 00) derived from phytozome v7.0 (chr-ID Chr1; pos 1951484 to 1952500 reverse strand)
aaagctcagatttgggatactgctggtcaagagaggtcagattacgtttcctctcttgctttttttttcctgcttactttattgaaaatccttaggataaggttttaaaaaaccatcctttttggctcgatttcgttgttgagttcttgttggattcgctgtttatgaattcatggtgtttgatttatgtatctgaatctgtagcctgatttggatattacaagttcaaagtgtcttgttcatttttccttgttggtttactagttacgactatttgtggcagaactagagttttctggttttcggaacgaaactggttgtgtctgaatttgtaaatctcttagacttgagcaactttcaatatggttcagaatctcaattgtgctgaatatcgctcgcaggctgcagtttactcggaatatacttttaggttttattcacatttgggctactaatggttttcttttgtggcatagcttctgtgtttgtaagattcttgttcatagatctgtatccctcatatatgggtctacttgattagcttattcaatcctctcctgtctaggtcaattcccgttgttaaaatgttgtttgtagatatctgttatctaaacctcggttactatactagtattgtgctgttccatccgtttcacacattgatatttgtctgagctcgtctgtgatgaacttctgaacccaatatacttgttgaaaacaacatttctttcatctcctctgtcttgtcttgcactagacatagataacattttgaattttgcagcagaattcttcattaactctgcgattgtaactttacaaagtaaccatttggtagatggataccatgtaatatggttatcgaaaatagtctaactttgtgtacttaatctgtaatgttactgaacttattattgtagttgttattatatctttgttaacaacatctgagaaaatgctggttttgtttatgctatgatagataccgagcaatcacaagcgcttattacagaggag

SEQ ID NO: 2116 - DNA, 416 bp, Arabidopsis thaliana
  Intron number 2 from transcript AT1G06515.2 (locus AT1G065 15) derived from phytozome v7.0 (chr-ID Chr1; pos 1991496 to 1991911 reverse strand)
cttgattggtgggaacgatacctcttcagtatccttttttcctcactctatccctccatgcttcattcgttctctccatcgattttggtttatctgtgctccaatttcgatttaccctttcattagaaagatgcaagttttgatttttacatctttggtgatatatggtggcattgtgttctgttctcttgtgttgtcgtcttaagcattgtgtctgttcaattttagaattttgtttttaaaaagctactttcttaaaattttgtcttcaacttcagagtttggattatagtctctactgaataatatactgtcaattgagataattttttgctagtttacaaggacttaagatctttgcttgcatcttctttgcctttcctcaactcttttcagattctttggtggttgttttg

SEQ ID NO: 2117 - DNA, 505 bp, Arabidopsis thaliana
  Intron number 1 from transcript AT1G06550.1 (locus AT1G065 50) derived from phytozome v7.0 (chr-ID Chr1; pos 2006568 to 2007072 reverse strand)
tcgagctccattcctcaccagaccccttttgcaaggttatccctttttctctctctatttcatttgatttcactattagcttcttcatttttgtgagaggctcttggatttttttgatttttgcaacttgtaatggagtctgttcccattaaagtttcttcatttctgagtctttagccatctattcgttggttggaacttggaagagtaggattttagtttgaaatgctcattctccgatcataaagtttatatattttgaatagaatttgtgttcttgttctagtggatgaagtagagaataatctagggaggttgaaattagattgttgcaagttcgtgaatattaggatttgtctcattgggtctgaagttttgtggaatttcttgacagtgtagtttggcagtttgagagtgtttttcatatccgactctttcaaactgatggttttgacatttttgttgaccagattagtaagttattgttgtcgttttgagaaagctg

SEQ ID NO: 2118 - DNA, 289 bp, Arabidopsis thaliana
  Intron number 1 from transcript AT1G06630.2 (locus AT1G066 30) derived from phytozome v7.0 (chr-ID Chr1; pos 2027782 to 2028070)
cgtcctccaccgcttgaacatcgtgtacggatttggttagcatcgttactttcgtttgcttttgttcattcctttggatttaacggaaacttgatattttctgatcttcgtaacgtctcttgttcttacaatttctcaccttctttagagaattcaagcaattttgagcttctacgactaggttatacattttcgtgaaattaggtcgatttttggatacattattggtttatgtgttaattcaaggcagttgaatcacttgatgtttcaggtactgttgtttatctct

SEQ ID NO: 2119 - DNA, 593 bp, Arabidopsis thaliana
  Intron number 3 from transcript AT1G06660.1 (locus AT1G066 60) derived from phytozome v7.0 (chr-ID Chr1; pos 2038909 to 2039501 reverse strand)
aggtatgatttttatttgaagcattgcctctattcatgtgattctaaccatactgattcttattccttttatcatgatcaagacttgtgcccttggattgattttgatatctcaacttaactccacatgaatcaatttcttgtttttgaaaccctgattttgtttttgcgagtcttataattaccacatctcttcttcaggtaatgagaagatgagttctatgttttttgttactgaggtcgtcttaggtttgttgatataatgaagttttgttcttcttttttccctctgctcttaattcactgttcatatttctatcacggatgtctatatatctgaatgcatggatccctgtgtaaatgtgtttccttacattaatgactttcttattagaatgcagggattctttttcagaaactctgtaattttgttgtggaagctctgaaatttttcagagcattctttctttgcatatatcaatataatcagattttacatgctttcaagagtctatgctgagaatctaacgcttttttccttttacttgtggaatcataggcgcggtttcttaaagcttgtggtactataccgga

SEQ ID NO: 2120 - DNA, 616 bp, Arabidopsis thaliana
  Intron number 1 from transcript AT1G06700.1 (locus AT1G067 00) derived from phytozome v7.0 (chr-ID Chr1; pos 2054562 to 2055177 reverse strand)
aatccttgagagattgagagggacaagcgagttttgtaggtgtctcagaccggttatttttttctcttttcttctttttatctgaatgattttggatttcgtagacaattgtgtggtctctagattcatgctttctaggcctttttaacgcatctttgctttcttagatttcatgttttacaattcgatttcgtttctgattttcttttcatctgggttttgtttctgatttgtaaatgttcattcttttgtggattgtgatccttgagtattgttttcttctggccgtatttgctggcaatatgaggttgtcgtccctttttttgctttttggtttttgcatgtattattatccatcttctgcccataaacaatgttctcaatgtagttggatcttgtctttttttttctgagaattttgattttatgaaacttgtaattacattttttttttctcaatcaaattgctatcaagatgtaattacattgctgaaactgtgtatagtagaagacatgtttttggctcacacatctggtcctatctcttttgcatctaaattcagttacttgatctatttcaggacccaaggattgttgacggtctatattgaacaag

SEQ ID NO: 2121 - DNA, 599 bp, Arabidopsis thaliana
  Intron number 1 from transcript AT1G06700.2 (locus AT1G067 00) derived from phytozome v7.0 (chr-ID Chr1; pos 2054562 to 2055160 reverse strand)
gagggacaagcgagttttgtaggtgtctcagaccggttatttttttctcttttcttctttttatctgaatgattttggatttcgtagacaattgtgtggtctctagattcatgctttctaggcctttttaacgcatctttgctttcttagatttcatgttttacaattcgatttcgtttctgattttcttttcatctgggttttgtttctgatttgtaaatgttcattcttttgtggattgtgatccttgagtattgttttcttctggccgtatttgctggcaatatgaggttgtcgtccctttttttgctttttggtttttgcatgtattattatccatcttctgcccataaacaatgttctcaatgtagttggatcttgtctttttttttctgagaattttgattttatgaaacttgtaattacattttttttttctcaatcaaattgctatcaagatgtaattacattgctgaaactgtgtatagtagaagacatgtttttggctcacacatctggtcctatctcttttgcatctaaattcagttacttgatctatttcaggacccaaggattgttgacggtctatattgaacaag

SEQ ID NO: 2122 - DNA, 566 bp, Arabidopsis thaliana
  Intron number 3 from transcript AT1G06890.3 (locus AT1G068 90) derived from phytozome v7.0 (chr-ID Chr1; pos 2113387 to 2113952 reverse strand)
caaagcgcttattagcacccttggcttcacattcggtaaccttttcaattcttccttcactgttacaggctcctttgattatccatgttgcgctgctgatattgtttcctctggatctattcttgtgtttgtatactaatgcttactctgcgcgattcgtttcgagccttctcttatttgatgaaattgaggaatagattgttgatcattttacttcatactatgttctgaattgtctgttggttatattttaggtcccttatggtacataaacgagaattgccttcatgattgtatatgtttaagattgtttcttatcgctttagaatttaggtgctcctcttcttttctgtatgactcaatattctttcctaggatacaccattgattcttatgtagtattattatacttgcaagacactgttttatcccattttgatgtctgtgttgccataacagcttttatgtcatcttatgcaattttgatctcataagctatctgttcttactcttgttattttgtatgtacagcgactactttgacaagttggcatcttttggtcaca

SEQ ID NO: 2123 - DNA, 235 bp, Arabidopsis thaliana
  Intron number 3 from transcript AT1G06900.1 (locus AT1G069 00) derived from phytozome v7.0 (chr-ID Chr1; pos 2119778 to 2120012 reverse strand)
aagtaagcattgcattattttctatggtttcaatggtttggcattatttatagattcatatgaaataagtattctgcttactttagaattttctatctttgaatcaagaaactaaccgagttagaatgattagatataacaatgaatctttacggagcttggatataatggatatggacttcgttttgttagcatgatgtatcttttaattcttccggttttgacttcttgcagt

SEQ ID NO: 2124 - DNA, 368 bp, Arabidopsis thaliana
  Intron number 2 from transcript AT1G06910.1 (locus AT1G069 10) derived from phytozome v7.0 (chr-ID Chr1; pos 2122073 to 2122440)
aagtaaatttgcttctttttctaattgtttcatcatatcatttatgtttttttcttcagacttcctgtgtttaaatagctaggtcgatggaatacccacccaatacacacagattaactaagttttctcagcactatcccgattcattctttgatcttttcctattatttcatattgtctgaccagcccgctgcactcggtgggaattagtattgtgtaggactcgctgaattgatttctttgcatgttcggtttcggagttatagctgagttaatataatgtgcttttcatgcaactgtataacataggacttgtttgttcagatgagtttgtttttcacattatttttgtttgtttgattagtgga

SEQ ID NO: 2125 - DNA, 481 bp, Arabidopsis thaliana
  Intron number 1 from transcript AT1G06960.3 (locus AT1G069 60) derived from phytozome v7.0 (chr-ID Chr1; pos 2135985 to 2136465)
agaagatcaagaaagaaggtaatgcttacgaaattcatataattgcatcggtgattttctaagagtttttgcaatgcttaagtagcttggtaatgcttgtgtgagcttctcttgaatgagttgtctgagtttaaagttgcttaatttgatgtttacgaaggttagattagatgcatttagagttatctttctaagtattagggatttagaatttctgtctaatcttaatagacctgaactagagatactctaacaaaggtgctttatttaagtaattaagtaggaaaggcgattgcttttgccatgaaatttgtttagattgtttgattgaagtcaatgaccttaagttctttagctgctgcttttgtttgtctaagagtaatgctgttcaagcagatcattgtttaatgtttccacttgtttttttcagagctgaagaggtctctttactgtttgttctctcagtttggaagattacttg

SEQ ID NO: 2126 - DNA, 356 bp, Arabidopsis thaliana
  Intron number 3 from transcript AT1G07060.1 (locus AT1G070 60) derived from phytozome v7.0 (chr-ID Chr1; pos 2167338 to 2167693 reverse strand)
gattcccttccattgcaggaaaggtaaattactcttccttctgtagtatatgatctcgttgcttttgggaatggttggagaaattcacataagaggaatggttagagattctgtacatgtttcttggaaagtgagtttactttgtaattgtgttaacaagttcatgcttgtatgatcggaattgttgctttaccaatttattcaattttttggatacatagcaatttgttatttgttacatttttctgttcccacatggaagtacagatcagataggttctttgcttcttttgattttgacttgttcttactatgaggtatgacattttgatgagtttttacgtaggcgtctgaaa

SEQ ID NO: 2127 - DNA, 257 bp, Arabidopsis thaliana
  Intron number 3 from transcript AT1G07110.1 (locus AT1G071 10) derived from phytozome v7.0 (chr-ID Chr1; pos 2182992 to 2183248 reverse strand)
tcagcattaatcctgatccaaaatctgctgaggtactttgttcttctacttttttgtttctaccgccattctatctatctgtgatgtattagttatgtgaactaaaacaacaggaatgattttctatgcctccaatttcaaagttttgactgcaacgtccatatcaatatagaattcccatggggagaaataaatcttatggactttgatgtctcatagcagtgtcctttagaaagtttggagctcgatcttgcaca

SEQ ID NO: 2128 - DNA, 449 bp, Arabidopsis thaliana
  Intron number 1 from transcript AT1G07750.1 (locus AT1G077 50) derived from phytozome v7.0 (chr-ID Chr1; pos 2405228 to 2405676 reverse strand)
ttcttcaaggttcgtttttttctataaaagttttctactttattgcgatccatgcgtttttgtataatgggtttgttcgatttcatcactctgcttcttcttttgagggtttttgatcttttctatgttctgatcttctttattgctttaaaagttgtcaactttatggtaattcatgcactttgaccactgtgattaggtttattgtgatgctgattctatgatctgatttttgttgtagaaagtgaaaaatatgatagtcaaatagatcacgactactgtgtgcaagaaaaaaaagtagtctttagctgtttttgttttgcttaatcacgtcttaatcgttgatctgatcaacctcgcgtgtaaggaattgaaagcttgtttatttgactctttttcaaatttctgtttcaggatctggaactgctggaattgttctcccagagaag

SEQ ID NO: 2129 - DNA, 750 bp, Arabidopsis thaliana
  Intron number 1 from transcript AT1G07780.2 (locus AT1G077 80) derived from phytozome v7.0 (chr-ID Chr1; pos 2411895 to 2412644 reverse strand)
ctgagtaccttgcctctcgagctcccaatcttaaggtacaattgatcttcactatagtcgttcagaatctgatctgcttatagaaatattcagaagtgtgagatagctgctaattggtctttactttgtttttttctcttgcttcacatcagaaaatttaggatcttagagcttttcatagtgaacttaagaacgcttttcgaattagtcagtcttagctctattttgtctgtgtgtgtattttctggacacgagacctttgtttcaatttctataagtgatttcggtttacattttaaaagcttgatttattcccattgaaataaatattcatgatgagtaaatctgtgcatttgtatcaaatttttagtgctttgcagattttattttaacgcaagctcttgtttgttgtttgacttgtttagtagaggattgagcttaaggcaagatggtaagaaacttaaatatttattttgaatatttgatcaattatctatctttatgaattattgatcaagaaacaaaatttaaagaacatccgggacttgaaaaagtagtggaaatttcacaaaaccgaaaagcaaacggttaattcggttttacaaagaccaaacagaaaattcaataattcggtttggttcggtttaattacaccgaacaaaaaagttggtacattcgtttttatttttccgccattcttgtcgatcttcttcagtcgtaaaaccgccgcgtctctgctgaccctcctct

SEQ ID NO: 2130 - DNA, 331 bp, Arabidopsis thaliana
  Intron number 2 from transcript AT1G07780.5 (locus AT1G077 80) derived from phytozome v7.0 (chr-ID Chr1; pos 2411895 to 2412225 reverse strand)
cttgtttagtagaggattgagcttaaggcaaggtaagaaacttaaatatttattttgaatatttgatcaattatctatctttatgaattattgatcaagaaacaaaatttaaagaacatccgggacttgaaaaagtagtggaaatttcacaaaaccgaaaagcaaacggttaattcggttttacaaagaccaaacagaaaattcaataattcggtttggttcggtttaattacaccgaacaaaaaagttggtacattcgtttttatttttccgccattcttgtcgatcttcttcagtcgtaaaaccgccgcgtctctgctgaccctcctct

SEQ ID NO: 2131 - DNA, 541 bp, Arabidopsis thaliana
  Intron number 1 from transcript AT1G08040.2 (locus AT1G080 40) derived from phytozome v7.0 (chr-ID Chr1; pos 2497974 to 2498514 reverse strand)
atctatcaatttgatcctgtccattctctgtgtaagtatgtattatcgcattttccttgaattgcttcattttttgattttcttttgagccggatttcgatttcttctgtgtatgggtgtttcggttttgatccggctttgttgtttaagtaattttgaatctatggttaaggatcaattttaaaatttttttttttgcaattatagctgtcggtttcaactattgaaaaattcactgtagaaattctgatgagcttgttgtgtttcttttctataaatgtgactgttgaattaatcaattggacggttatgctttcccaaatcaattaggtcaattagaattgttttgaattctttgaattttgtttcttttctatttattgctgtgtatgtaattttccaggattgtttaatgatcaatacaaagaacatttcgtcagttcttgaatagtttctttcttgtgtccttcaaagtcttttttaacgattgaatttagtttttttttcttcttgcagtattgtttgagaattgtgcaatccg

SEQ ID NO: 2132 - DNA, 545 bp, Arabidopsis thaliana
  Intron number 1 from transcript AT1G08040.1 (locus AT1G080 40) derived from phytozome v7.0 (chr-ID Chr1; pos 2497974 to 2498518 reverse strand)
cctaatctatcaatttgatcctgtccattctctgtgtaagtatgtattatcgcattttccttgaattgcttcattttttgattttcttttgagccggatttcgatttcttctgtgtatgggtgtttcggttttgatccggctttgttgtttaagtaattttgaatctatggttaaggatcaattttaaaatttttttttttgcaattatagctgtcggtttcaactattgaaaaattcactgtagaaattctgatgagcttgttgtgtttcttttctataaatgtgactgttgaattaatcaattggacggttatgctttcccaaatcaattaggtcaattagaattgttttgaattctttgaattttgtttcttttctatttattgctgtgtatgtaattttccaggattgtttaatgatcaatacaaagaacatttcgtcagttcttgaatagtttctttcttgtgtccttcaaagtcttttttaacgattgaatttagtttttttttcttcttgcagtattgtttgagaattgtgcaatccg

SEQ ID NO: 2133 - DNA, 327 bp, Arabidopsis thaliana
  Intron number 1 from transcript AT1G08060.1 (locus AT1G080 60) derived from phytozome v7.0 (chr-ID Chr1; pos 2510489 to 2510815 reverse strand)
gcgatagattctgacaattacacactttcgcgcaggtatgcttccttccctgttttaggttggtgttaatctatcggtgaatcgaaggttttgggcctcgggctttgcgttttaggtttttcagagaatcttatctacttggggatggatcttaggcgtttgttagatgtaactcattagttttgcatataggaattttgatttgaaagttaggtcgccggatttgtagacattttgtttgatggtcttcttcggtgctcacattctttgtttttaagtgcttgatttggttgctaaggtcctttccgttgcgtgctctcagtgaat

SEQ ID NO: 2134 - DNA, 239 bp, Arabidopsis thaliana
  Intron number 2 from transcript AT1G08080.1 (locus AT1G080 80) derived from phytozome v7.0 (chr-ID Chr1; pos 2517920 to 2518158 reverse strand)
acatcgtataataatatatataaacatgcatggactcatcttctgtttaagctagcacacacttttttcgtttgattttgttgtgtttatatataaaactaggtaactttttattcttacacagaagccattattatagagccacctatgtgcttctagtttctactaattaaaaaccgtaacccttaataaaccaataatcatgtgttgattaatcctgttgcagttaaaatttgaag

SEQ ID NO: 2135 - DNA, 495 bp, Arabidopsis thaliana
  Intron number 4 from transcript AT1G08260.1 (locus AT1G082 60) derived from phytozome v7.0 (chr-ID Chr1; pos 2591722 to 2592216)
atattgagattgttgaaaaagaagatcttgatcttgtaagtcagtaaagcatactatgattattattagtttaagtctgacttcctcattgtgtgatgtagttgactagtgtcttccaccagttgattaatgttgtttctctactcatatcagaaatatttgctacaacctttagttgttatcctcttcttgtaacccaaaactgaacatttgtagtaaatagtccaaaagtagtcttgaatccattaggtgaaatcaataggcgtttgctagtatgtaacatgggctgtagatgttaaagttagttttctttaagtgtttattgattgtcctttagtgcaattgtatgcaagatatgaaggtttcagtactttttagttatcaattcgcttaggatgtctttgtagcttttttctgtgatacacaattttgagttcctttattttatgttcatgagcagaaaaatcatctatctggcctgcaaaaaaaatacct

SEQ ID NO: 2136 - DNA, 571 bp, Arabidopsis thaliana
  Intron number 2 from transcript AT1G08320.3 (locus AT1G083 20) derived from phytozome v7.0 (chr-ID Chr1; pos 2626238 to 2626808 reverse strand)
aggtgtcaagtataggaacgaggaagccaagccacgtaagcccccctctctctctcaaatcttcatgacgtgagctttccttaacaaactccaataaagtttttaaaattctgagcaaaaaactgaaactggaaaaaacaaaataaaaagctgagagtagtctgaacaagtctttagataggtttaggtgatgatacggaggcaaaagagagccttggatggcgtgacttgtttttctatttctcttctctttatttagaaaataagaaaagaagaaaatatcttttaccaactccctaacttcctctatatcaaaatattcataattatactattagtaaaatgtgtcatgttatatatagattccacgtgataaatgatgtagttagttctaagtagaatatattgtagtactacttaaattacatcaaaaacacatatacatgcatgcacacatttaataagtagctagcatactacatgattacatatgaacattacatatctgataaatgtaatgatgggtaaaattgcagctttattaggaggaggaggaggagctacgactctg

SEQ ID NO: 2137 - DNA, 519 bp, Arabidopsis thaliana
  Intron number 1 from transcript AT1G08320.3 (locus AT1G083 20) derived from phytozome v7.0 (chr-ID Chr1; pos 2626861 to 2627379 reverse strand)
ggtctcaacaacaatcatccatcttctggtttcatgtaattaacaaatcttccttcgtcttttcttctttacatatacataaagctcaactttattcatattacatatcttaatattgagctctaattgaattttatatgggttttctttgtttattctcaatttgtcattttcttagtagtattatgatatgttatacggtttcatttatgagatatgaaatggtcaacggaaatctataggtaaaacagaaactaaaaaatgtgttatggatcatccgaaataggttttatatgtgctttagcttttgtgtaaactttcattatatgcgaccgtctttattaatcttctaactcaaaatgcgaccctctaatcaagtatttatattttaatttaattgttgttccttttggtctccaatttttcttggtttctgattgtatagttgtagtaacacatgatgaatattctctttgtactaattaaacaatactattaataaatgaaacagtaaccaag

SEQ ID NO: 2138 - DNA, 424 bp, Arabidopsis thaliana
  Intron number 1 from transcript AT1G08680.2 (locus AT1G086 80) derived from phytozome v7.0 (chr-ID Chr1; pos 2762884 to 2763307)
caccgaatcgtcgttgtatcaactgcaatagccttgtaattttatctaactctctctcccttttaccaatttttgtcttccttcaaaggcttaatttgttctctaaattgttcctgtgagtgtatcaactgagttttgaactgatgggtttcagcttctgtgattatgatttctataatcttgtgaaagatatgttttttttggggggcttgtgtttgtctagaaaatgttttgatttatgtccttcgatgggttctatcagtgaagttaatctgcaaagccaagtaatttgtttatttccagatatagaaatggaaagagaagctcgcaaagctacaatttttcgttcatttgtgtgaatttggatttaattccattctggctatattatagtaagacttgcaaatgatgcagggccctcaat

SEQ ID NO: 2139 - DNA, 928 bp, Arabidopsis thaliana
  Intron number 2 from transcript AT1G08680.2 (locus AT1G086 80) derived from phytozome v7.0 (chr-ID Chr1; pos 2763343 to 2764270)
gcttgtagcgggatacagtgagtaccttccccttcctatatactttctttgcaactattcctgacctctcttgtgttccttccttgtcagtatcgtacgctggtttgtgttaccttttctctttccatgatttactttatcatcttacatcttacatttacagttaagttatatgtaatttgtaaagtaggaataagtaacctttttgttaacggtttcctatgttcatcccacgattaagttttctgctatattgtaagctatcgagtctaaattagtttaaatatttgtagacaggactcattgtgatcccccagaagcatggctaatgcattgtcttacaaaatatacatttatatctagtgtttgattgtttttgtgggctttagtttttgtttcatgcacctgatttcgtcgacagattgtgtgagctgatttttttggcatcattgtatttggtggctgacttataccttttattttattactcttgtactgatataacagaattctcaatctattcagtggatccctttttatttatgtctcttgtcttgatttggtaaattttggtgcaactgttatacgagacttgttatcattgaaaaggaaatataggcttatgtgaaatgagcagctgtaatctttcttcgcgttatttttaggtatattcggaagtatttctttctccagctgtgcatcgtttcatatgcggttatagggttcttttgatgcatatttaagtatagggaggtgcagtgtgcattttatttattacgatttcctgtttcctagctaagttacactgccttgatgtagtgaatatgttcctaccttttctttttctcttagtttcagtttttcatggtttattttattttgatgacctgcagccgcgaattcactcatcgtgtgaaatctgtgtcaa

SEQ ID NO: 2140 - DNA, 485 bp, Arabidopsis thaliana
  Intron number 2 from transcript AT1G08750.2 (locus AT1G087 50) derived from phytozome v7.0 (chr-ID Chr1; pos 2801361 to 2801845)
aattgggctgttttggtctgcacttctcgcttctggtaaatatactcacactcgattgcttgtaacagagtttttgctcgatcttaattcggttaatgtgtagctttcgtgcccattggtagctgatcaatgtagttcttctgataagtgagtcacaaatggtgataggctttgaagttgtattcttctcaccatgatctctaggacctttgaatctggagttatgacgtaacctgtgctatagatctatatcataatttcgtgccttcttgatttgtgttgtcgattggctgagaaaacctgaatttgtttctctagtcaactgttgtttcatcttttgttacttggttacttaggaccttgtgtgggagagttatgcttgattgagaaacttgttccaggtgccaaaagtctatctagcttcatcaagttacatactaacctattgctgcggctaccattatttcaggtttaactaccggcac

SEQ ID NO: 2141 - DNA, 760 bp, Arabidopsis thaliana
  Intron number 1 from transcript AT1G08820.2 (locus AT1G088 20) derived from phytozome v7.0 (chr-ID Chr1; pos 2824442 to 2825201 reverse strand)
aagctccgttccgttagttcttcgtcggagagacggtaaggtttccttccgatttcatcattctcgttgatcatcttcttctctggtttttgtttttgtttcgaaactaggttcctcttcctcgagtttcctgatttttgtctttagaatctgctttagaaatcgaaatcgctagggctcgggaagatctatgtgatctgagtttactattggctaccggatcccgaggagtcgctcctcgtaaacgtcgtcgttttatttcgcccttttgttttaatactatcaggcctgtggtggcgtaactagatcacactgggggactaggacgatttggttttccggctagtcgaaagcgcgttgcccaaaaaattgtgtcggtcggatcgctgagaaaaaacgagcgcattaaggtaaaatatagtcacgtttgagtcttcgggcgagttcgtatcgtcagatttgagaacgcgtcgtcgacgagttagtgcggtggtttgtttatggtgacggaagacgagaatccggactcgaaagagtgtaacagagaaacttttctgattgttgactgtttggttagatttcgtcatgttcccaatgggagagcgggtttatgattgtcccaaatagagtatagatctgagtttgtttttcgctctagtgtcgacagtttcatacttgaatggttctgggctgatctttctcttattatttttttgttgaaataggggtggagagaatcctgctgcaagtggtagctgtt

SEQ ID NO: 2142 - DNA, 757 bp, Arabidopsis thaliana
  Intron number 1 from transcript AT1G08860.1 (locus AT1G088 60) derived from phytozome v7.0 (chr-ID Chr1; pos 2842283 to 2843039)
ctcgtggtcaatatcctctcttttctcaaatcgaggtactaaagtcaggtgttttttatgtttgtttagctcctctagtatatgatgtggtcacatttggattagtcaaccaagttaacaatttgtgaattgaatattgcttaaacactagattattgcttttgtttaaggatccttgttctccttttttttatccatactggataagatattccctcttgttttgtacttttctaatggagctagcccattgaccctctgttcagtctttgtccatgttttttctctctcttttgcgtgcgtggggttatagtttattgaattgaatcttcttatgtggggtataaagtgtgttttcttaattaatatctttagcttattgtttggtttctgagaaagtaggccaggctatgcaatgaaaactataacttaaagtaaattgcaatgaaacataaccctataatactatactactactctgcaacttctccctcagtgcaaccatttaatatttgcactatttgatacgaaaagaaaaaggaacttttccttaagatttgttattgtgacttaaggatggcttaaagttttcgctttcttttgcttgttgcttttgagtttacactctttctttaggattttcattatcatgaaatatcataaacttttttcacaggtttacctttaagttgtgtttaacattgtgcaattgtgttttgcagttaactttgtcggcttcaaacttgttggactgtga

SEQ ID NO: 2143 - DNA, 614 bp, Arabidopsis thaliana
  Intron number 1 from transcript AT1G08940.1 (locus AT1G089 40) derived from phytozome v7.0 (chr-ID Chr1; pos 2878116 to 2878729)
tgaatccgccgccgacgtctacgatcgtgtttctagtaagttcattattttattatagtagacatgaatacgattattgatatggatacttgcattaaaataacatcgttgaattatataacctttttaatataagaaaactagtgaaattcaaattataagttttatattggtcaagtctactttcaggacttttgacatgagaaaagaagacgtatagtttgattggttttcgaatttgttgatttttttggggaagtattccacgtataataaactaagtattaagaaaaatcattttacggaaccaaaattgtgcaactggtgaaagttgtagatgtagactaatttagatagaattagtttgtagaatcttaggctgtatctttaaataaaattactgtagggacattcaacattttatatttcacaaaaaaaaaagaagtttttatttttgatcagtgttcaacttatctagtaacactagtatatgtaaagtgagatcaatgtccaaattttcatttattaagaaatttcatggatgttaaatcatggatgttatataacatcgatcgatcaatgtctcacctaatttcaaaggttttctggagtct

SEQ ID NO: 2144 - DNA, 521 bp, Arabidopsis thaliana
  Intron number 1 from transcript AT1G09340.1 (locus AT1G093 40) derived from phytozome v7.0 (chr-ID Chr1; pos 3015549 to 3016069)
gcgctaagctccatttacaagtccaggtctttttcatccttcgttctgacgactatcattatcaattttatcagatgggttctgcttttgtgtgtctgatgagccaaaatccgttcagcacatttcaaaactattccttttaaaatgggtttaagcttgtttgttcgacttcttgagctatggatcattgtgtctatattaatgaatgtgtgtctaaagtcttagtgtggttcttgtttcagctctgattttgtattatgagtaaagagttttatgagcttcttcgtcataattgtgagagtttctggtttgtggtttggctctggtttgagttgtctgaatacccccctcatttgtgtcaagtatgatttgtttctgtgacgctctgccttcagattctatcactagtcttagaattgaaactacagtttgtattttggggataagatttttcttatagagttggctttgttgttaaaattgcagtacaagaggaaggttcatcagccaaaaggagcact

SEQ ID NO: 2145 - DNA, 465 bp, Arabidopsis thaliana
  Intron number 1 from transcript AT1G09500.1 (locus AT1G095 00) derived from phytozome v7.0 (chr-ID Chr1; pos 3066911 to 3067375)
ccaccgttcgagacccaagtttgaattccttcttctctctttcttttttcctcctgatttctccttagtaatatcgaagacaatccctctttgtcactcacttgaataatcaaagttatctagatgctttttagagatacaagtgacaattcagagaaaattaagaatattagctaagcaaatccaactatccaagagaaagtattttgtaggtacttggtacgattaagagttggttctatggccaaaaaagtatgtttttggtttcattctctaaaaggaagtatacattaacaaacgaaaattcaaatgaactcacatgtagtggatatagatggggtgaaactttggtcgatgtttagagccaaaaactaaataagcatttatgttatcttgaagtgcactttgacatatatgtgtttttctccagaagatcgaaagaaaacagatcaccttctagcactt

SEQ ID NO: 2146 - DNA, 477 bp, Arabidopsis thaliana
  Intron number 1 from transcript AT1G09530.1 (locus AT1G095 30) derived from phytozome v7.0 (chr-ID Chr1; pos 3076731 to 3077207)
ccactttaatactttgaggttctcactctctctttctctcttcgctgacttcgattgcttcagtaccctttttctcaggtcagctacgatgatagctttattcagacaagaagatcaaagttttgatctttttgttttggttttcttaagagatggttaattaggtcttgagtgcgctgttttgaatcgttcttcagtgtgattaaacaattggttttgatttgactaatcatgttgccattaaactaagtgaaaatctctgctttttttatattgcatattgatgattgagacattgatttcttttctatttctttatttcccagtttctaatttgggaactgaaaagttttctaatttaagcattacaaagtgtacaatttttgtttctggcaagtttttcttggcctaattcgtctattttatgaattcacctttttaggatcaagacttcgtaaaagattgtttctgtaaaac

SEQ ID NO: 2147 - DNA, 434 bp, Arabidopsis thaliana
  Intron number 1 from transcript AT1G09530.2 (locus AT1G095 30) derived from phytozome v7.0 (chr-ID Chr1; pos 3076774 to 3077207)
gctgacttcgattgcttcagtaccctttttctcaggtcagctacgatgatagctttattcagacaagaagatcaaagttttgatctttttgttttggttttcttaagagatggttaattaggtcttgagtgcgctgttttgaatcgttcttcagtgtgattaaacaattggttttgatttgactaatcatgttgccattaaactaagtgaaaatctctgctttttttatattgcatattgatgattgagacattgatttcttttctatttctttatttcccagtttctaatttgggaactgaaaagttttctaatttaagcattacaaagtgtacaatttttgtttctggcaagtttttcttggcctaattcgtctattttatgaattcacctttttaggatcaagacttcgtaaaagattgtttctgtaaaac

SEQ ID NO: 2148 - DNA, 632 bp, Arabidopsis thaliana
  Intron number 1 from transcript AT1G09630.1 (locus AT1G096 30) derived from phytozome v7.0 (chr-ID Chr1; pos 3118810 to 3119441 reverse strand)
ccattggtgtcgaattcgctactcgtactctccaagtacgcacacatctctctctatatatatagtatatagtgtaatcgaaatgttgctggatctaggtttagttctaagttaagcagcatccggtgcttttcgattcgatccgtatctgtgttcgtatgaatactcggaagcagtcattgtgtgtaggaacatttgggcttggttttgaattttgatgtttacatgtgtggtgcctgtttttttcatttggtcgagatttttgctttggtatctcttaatttaagcgttttattgataatgttcccaaatttgtcgatactctggtacgtggtagtgtaaggctccctcacatgtcagatctaaaaccttgtttaaggcagatctaagaatctcttcatctgaaattgatctcgaacatgattttcttttgaagtatgaatcatggttgttgtttcacagtttctagttttcttactgggttgtttgtggaatttagctgcgaagttactaattttgttgttgcagacacactaatcatagagtctgctgctcattagatctgaattaacctattaaaaaacctatgatctttgttctaaggtggaaggaaggactgtgaaagctcagat

SEQ ID NO: 2149 - DNA, 731 bp, Arabidopsis thaliana
  Intron number 3 from transcript AT1G09660.2 (locus AT1G096 60) derived from phytozome v7.0 (chr-ID Chr1; pos 3129394 to 3130124 reverse strand)
ccaaattgctgcagactgcttaatcgtgagctatcttattaagctatgtgattttgaatttagtatttccttagagtgtgtgcacacgaacttaagaaatttcccacgtgaacaaagccttagtgcgcatcaccctggcttttttccagttaaaggtttacagaaattgggtaaggatagttgagtaacaaaaatgtatctacatgcaactttttattctctttgttatggccttcttaatatatatatagccaatcaaagtctatgttacttttagcatttagaaacagtttttaattgcaacttattgctaaatgatcatccttgatgagttatgttatgtgaaaatgaattaagtctatgtgtttgcaaatgataatgatcgttaagcaaatgatcaccaactaatttatactaggaagcctatttgtccgtaaatatgcatatggtgattagaagcttgtttccagacttgtttacctagcttttagttgtccatcatgcccttaagggatgtgtgaaccttaaaagacaaagatgtgtttgaagttttcatcattctaacctattagaacccgagccttttgtttcattattggcattaaagataagagactgaagatgcccctgatgtataactcttacagtttcttttatacgtttgcttaactgccaacattgctgacgtctgtgcagaaatcaggagggtctctagttttcctgatcttgat

SEQ ID NO: 2150 - DNA, 422 bp, Arabidopsis thaliana
  Intron number 3 from transcript AT1G09740.1 (locus AT1G097 40) derived from phytozome v7.0 (chr-ID Chr1; pos 3155323 to 3155744)
gccgcattaagaggtaccaaactcttcttccagtactctagtatcttgctatgttgaacactgatgaaagcgctgtaaatcaaattccaggcgtttgatcttggttactatgctgaattagttgttccatatcggtttactctagtttaagattgtttcgctttcgcttgaaatggcatatagatatctactgttatttttttcaactcgtgcggtcaaataacagaagaaatgtttagttaatctttgaacttgtgtgaagacaaatctctgctcaaccaccaagtagtgcttcgaggaatctttatccctttgaaaatgtttataccatatcactgtcactgtgtgttctttagtgagttaaatcttatttagtgagcaaatgccagtgttgaatccagtttgttctttctttcaacaga

SEQ ID NO: 2151 - DNA, 562 bp, Arabidopsis thaliana
  Intron number 2 from transcript AT1G09920.1 (locus AT1G099 20) derived from phytozome v7.0 (chr-ID Chr1; pos 3225437 to 3225998 reverse strand)
ctccggtacactgatttctctgtttcttacttgttgttaaactgttttctgtttgattaatttccacaactgtcatctttgatgtgaagagcttctctttgttagctccatcaaaattatatactttgtctagtgtgacgtccaaataggttgatcaaagggatttacattgtttcatatgataggattctgctctcaaatattttgttaatgtccctccaacgggttttaagcttgtttcaattaacaaatattagatcacttatgcatttattagactttttaacttagtgtgtaacacaaacagctagttatcaacgcttgttcctgactgttcttgagttttatggttgacaagaactcccccaagcgcagcttgtgtttgcaaggttgtgactgtttcaattactaggtcgagaatagttattcagtataacaagtaggaatttgttttgtttctgttttagactcaggatttttgtatggcctagatgctgctagatgactgaaatgacctacattttcttacgaaattctttctgttctgtattgagaagatagc

SEQ ID NO: 2152 - DNA, 378 bp, Arabidopsis thaliana
  Intron number 3 from transcript AT1G09932.2 (locus AT1G099 32) derived from phytozome v7.0 (chr-ID Chr1; pos 3232134 to 3232511 reverse strand)
actgtcgagttagtgataacctctccgctgtgcaggtactaccacctaaatttggattttaggctaaagaattggtaaatcgtaaagtcgtaaacatcaatatcaatgaaaataaatgatcgacctaaaggctaggcatatctaacattcatattttcaacgatgattagttgaattattcgatatatcatataattcaaaccttgaagttttttttcttttcattttttctttctaatatggttcccaagtctcaatcgagcaagtcgttccttgttcacaaatattcttgattattatgtaatgtgaagaatttagaattgttatacataatttggtagcacgaatagtaacactgttccatttaatttcagagca

SEQ ID NO: 2153 - DNA, 401 bp, Arabidopsis thaliana
  Intron number 1 from transcript AT1G09960.1 (locus AT1G099 60) derived from phytozome v7.0 (chr-ID Chr1; pos 3244761 to 3245161)
aggtccttgtagagctctccttgctgatcttactggtaaagttcctgactttagtgttgattgggtcttcaatttgaaatcattcaaatgtagtaaatttgggattctcgtgattatacactcacatgcaaaacatgaaaatgcataaatttgtgattttggatacaatttggggttatataattacctaattggttcctaacaatcaaaaggtcccttctttgtttctggtcggtggcttatcgttgagtcacagagactttgttttttctctttcccttgaatcaaattgtggattttggtgaagttaatcgtagcctacgattgtgtgataacctcatggagtgaaaacaaagatatgttgtgttttaattcttgtcctattgctttattttcagaga

SEQ ID NO: 2154 - DNA, 722 bp, Arabidopsis thaliana
  Intron number 1 from transcript AT1G10010.1 (locus AT1G100 10) derived from phytozome v7.0 (chr-ID Chr1; pos 3266276 to 3266997)
ggcgtcgtccgatcttaccttggtatggattcatataaacaaattcattttgtgtctttatcagcattgtttttcacagatttttcagttttctagacattttttctcagatgaacaaggattttgttcatttgatatcatttagattttgcctaactagtctcaatttaggacatgtgttttgattttcttccatttctgtcacaatgatgatggctggcgaaagaaaaaaaatctgatctaaaaatatatatttaatgctaagttggaatttgtaaatctacagtataattggctcatttcaacaattttttaccatgtaaatttgttgaagaacattattgttgttgaacaatgaaagaaaaaaatatggttgttagaaaaaaatgatttacgattttgccaagtgtgcatgctctttcatgggaagatatgaattaattatcaaaatctatataaaaaaaaggaagataatcttcattctttcataacttagttaataaattaaattgattaggattggtaacatagtcaattcaatttatcccgttaaagaatgttataaattcgattgttgacccctcgttgaaaatttggaattatgcgggatgtttagaaactttgccataagaccaaaagattggtagtatttgatagtagtacaagagtaatcatttttcttctttaataacataaaacgcaggtggtaaaaaggttcagct

SEQ ID NO: 2155 - DNA, 461 bp, Arabidopsis thaliana
  Intron number 2 from transcript AT1G10060.2 (locus AT1G100 60) derived from phytozome v7.0 (chr-ID Chr1; pos 3284710 to 3285170)
tctcgggggcagaacggtaacagtaacctccaatcaaattcaacatttgtccgttcttattcattgttaccatttacaagaaatatgcaagaaacaaaatggggaaaaaattaaaggaaataaaaaaaataaaaaatagatgctaaaattgtatacttttagaaaaaatattgcgtgacggaaagcgcttattggtggtggttgcacaatgcagctcaagcccgtgatcgtttcgatggagtaaacaaattttgtaaaaaaaagtgtagtatgttttttttttaaaatcagtaaaaatagtgctttacatttccaaccattaaaagttttaaaccaaaaaaacaaaagtttaaaagttagtgttttgttaggaatatgaatagtccttgtcttggattctagttatcatataagaaaataggcttcaataggcaaaatattcttcctgtgatgcagtgagg

SEQ ID NO: 2156 - DNA, 749 bp, Arabidopsis thaliana
  Intron number 1 from transcript AT1G10280.1 (locus AT1G102 80) derived from phytozome v7.0 (chr-ID Chr1; pos 3367429 to 3368177 reverse strand)
attctcccttttacgaccgccagatccccagccaggtacgttttgatgcaggacagtgaactttttgtgtcttgcttgtgttcttcagtggatcagaacaaaacaaatacttagtttcaccagtgacttaatcttgtatacaagaacagagtaatagataagtagataagaaatatagtcattctggatcatggagatctagttctctagaggaacaacatgtagatctaatcggcatgatggaatccaagttacactggcgcgtgactatttgagattgtttataggatttgaaccttttaattgtttcttccactgtcagctacatctgtttcaaggttgtgtattagatgaagctttgttactaattttgctattatgtgattatttggaacatagctggttttagtttaatgatcgggaacagcttttattatagaggtgatctgcttagctgtgatctgcttagctgtgaactaggaaactataaaagactaattcatagacacattatataagcttctcttgttgatttttacaccttttattgtagtaatccctttaattttctctgtatgtcacaatgatcctggtaattgcataacgctttgtttggttcttcaacttggtcatctgatgaatcatggatggtctgtgtcattgtatgctagatctacttgataaaaaaatctaaagaattctgtctggttctgatgggttttttatacttgaattttttagagagttga

SEQ ID NO: 2157 - DNA, 718 bp, Arabidopsis thaliana
  Intron number 3 from transcript AT1G10522.2 (locus AT1G105 22) derived from phytozome v7.0 (chr-ID Chr1; pos 3470413 to 3471130)
aaattgttggagtctgcactgaggtaatctcaaatcttctcaccttcactcatgtatatctgttcgtgtctatgtgagatgtcttgaattgtggtgtttttagtaattgtgttccatttcaaagaactcaaaagtggtgtaatttttagtctcagtttctgatattttcttaacatgcctcaaatctcttattcttgtgatgaatgagaatcctgatctgaaattgtttaggtaatgtaatcatcttttactgtcaatatgctagttttggaattgcaatggtgatgtttgatcgaagttttcctagtttgtatgattgtgattatgcaagcattttccttaaatcttgaggagtgattttgtggtcttggacttagtcgagcttaaggcctagaatggagagggtcatgtgattcggtttagaatgtgaaggagtggttttcaatttgaacccatcttgaaagctcagtgaaaaaaagtttgtattgtttgaaaatgagatgctgtggtcttagtaatgatgccttggtgaggatattaatctacgtatggtttacaatgagtcgactgtaagtttttgtttcatgagtgatactttaaaccccattctctaagtctgttatatgtcttggcatgagactcagggagttttaacagttttttgttctgcaccattgtgattattgacagatcttcgagacgttcttgcgcagtgagt

SEQ ID NO: 2158 - DNA, 478 bp, Arabidopsis thaliana
  Intron number 1 from transcript AT1G10610.1 (locus AT1G106 10) derived from phytozome v7.0 (chr-ID Chr1; pos 3506563 to 3507040)
atccttctaggttcaacacactctccggtttttctttgttatttgttcgttgttcatgtgaatcatcatcagctgtctactattttgtttcagtagcaaagcttccgtttttatgtatactgatgggtttttcgtgtttgtcttttatctttgctttctgaattaggacttttttttttgtttttgctctgttattggcttcctgaaactattttgtttcagtagcaaagtttccatttttttgattttgattagtccttagtaacttctggctctgttctatcaaatttctctggtttctgtttttttttttttttgctcatctggtttttgattttaatggtttatggtttgttttgctttaccatctacctcctgttcttggttttgtcttgtctagttttactaaaagtttgtgggttttatgatcttcatctcgtaattggtatgaattccatttaaactacaggtttattga

SEQ ID NO: 2159 - DNA, 540 bp, Arabidopsis thaliana
  Intron number 1 from transcript AT1G10680.1 (locus AT1G106 80) derived from phytozome v7.0 (chr-ID Chr1; pos 3543023 to 3543562 reverse strand)
tcttcccacaagaagcttctcacaaagtcgccaaggttcataactttttttgtatattcgtagtattttttagaaaactttaaattattagggtttgttcataatcttccatctgagtgaatatgaaattgttaattgtatatttttatatgtctaagaattgcagtgagtagtaagattttgaacttggccattagaatttacatgaagattcacatatctaaagaggttgagatttgataaatcaaatttttcctaaaaactaaagttatcatattcttgggttcaatgttatatgagatatatcaattaaatttccaaaagcgaggtcaaaatgctaattaattcatgcatattctgaaatacatctttactaatgttgactccaaataaaaaatgaaatgaaaaggtaagaaataataagttttattctctgaaattgaccggaaacaaaaagttttattctctgctcggcttattattttatttatttttggatgtgcagtactcgttggattttgtatatctgagtgtggtgat

SEQ ID NO: 2160 - DNA, 754 bp, Arabidopsis thaliana
  Intron number 3 from transcript AT1G10750.1 (locus AT1G107 50) derived from phytozome v7.0 (chr-ID Chr1; pos 3576575 to 3577328 reverse strand)
aagtaagattttcatcttctcctctttttttttcttaatgtgaacattagtcatatgggtccaatttgaaaacctaaaaatatatttttaccaagaaaattaaaatctagacccaaaagaaaaagagatagatctttggtccacctatactataagcaaaattctaaagagaaagattttttgtccggagtgtttataaattcgaaattcgaatttttggtatgaaaatgtaaggttttaaaatatatggaatttttatttatttactatatttgcctctttagaggagaagataaaagtggtcaacgaaattggcaagtgttttcacttcttctattggttttgaaatttcatcttttgagaattgtataacaaagaaagatagacaagcttgtcggtaaaaaacaaaagaaagaggagaaagtatttttttttttaacttatttgagtaatgattaattcctcttctacattctgtcagcaattatattgttttcccaaataatatcacatattttatataactttataataaaataaaatccttagttatctagatttggaaaacacaaactctcacgaagatatagctctgccaagttaatttgttattgacacaacttgcataaacatgaaataatgcttttgattatacacttatcttacttttgaagggataataaattaatgttcggttgtgttaattatactgagtatagcacgcggtgggatacgtgagcggagagaaatacta

SEQ ID NO: 2161 - DNA, 450 bp, Arabidopsis thaliana
  Intron number 3 from transcript AT1G10830.1 (locus AT1G108 30) derived from phytozome v7.0 (chr-ID Chr1; pos 3606072 to 3606521 reverse strand)
agaatcactcgacatcctcaggttttgaacatttccctaatgtgcctaaacatgaagacaatttccttcatttttgtgtttcaaaaatacagaaagattggatttttatgagccaaggtttattagtggctgtgttaatgagacccccaatcattgaatcaattatgggcaggtattggccattgacttaaatacacccattacatcagcacaatcaaatctcctcatccttctatgtttattacatcaatgcttgattactttacttgatattgcttttgatcttaaaattcttatccaattgcttcatcatgtgtttggaaaaacttgataatatatagaaagataggcattttagcttcagttttggtttgttctattctctcttcattatactggctttgttaatgagacttgattgttgcacctctctcctctgatcttctccag

SEQ ID NO: 2162 - DNA, 938 bp, Arabidopsis thaliana
  Intron number 2 from transcript AT1G10890.1 (locus AT1G108 90) derived from phytozome v7.0 (chr-ID Chr1; pos 3628195 to 3629132)
agcccttctccatactcatctcattcgtatagcaggtgatacccctagtgtttgttttttccgctattcgtttgccttagttatcattcgtttatacgaactgtaagaaacattggtggaacacggttatagatagacatgtaaagtttacagactcaagaattgcttttagtaaagttcctacttatagatatattttctacccttctctaaaagagagtgcaatgtctggatgctgctggctctgtatcgtaagcgtttttttgagtgatgctgcgtattggaaatatatcgtgtttatttggctgttgtgattaaatttgttgcaagagaatatgttttatgacctgagctttgtgatttttagaatgaaacctgtatattcggtaaagacataagttaagctgggataatagcactactgatagtctgatctagtttatattttaattgtatctgtagattattagttagaatcagttttaagagcgactatattatgttcttttaaatggagtttgttagcaatagtgatacaaaaccaccactattccttaggtaagataatatagtaatttgttgagaacatggctgagaagctaggaaaatgatacatgcgcttaccattataaaatagctcagtttcttcccgttcccacgggaggggaaatgagcagctgatggattgctcttaggtgttctttcattgatcccttgtctcgttagcttctcttcgtgtgataaaagttggagctgataattctttacagtgtatgaggtaactgcacatacttttgttttctttatgtgtaactgtgggctacctgatgcctagtcttcacgtgcgtggtacttcattagttccatctttttgcttactactttattttgggtaatgttcaggcgaaaaagtcgttctatttctcctaggcgccatc

SEQ ID NO: 2163 - DNA, 310 bp, Arabidopsis thaliana
  Intron number 1 from transcript AT1G10920.1 (locus AT1G109 20) derived from phytozome v7.0 (chr-ID Chr1; pos 3647380 to 3647689 reverse strand)
cgtgaccacacaagctcttttttgcttcacagaaggtaaattcttgtctgcttgttttgctttgatccgtcgtttatactttgttgtggtgagtggaatttgcttcaaaataaatcctgaaattattacgagattctgaaccagttccatttgatataatataataatataaacaatacctgaatctttaagtcaatacttactacaggtttgttatctaaacaagttcttctctgttttagtaaatgtttcttctgtctcagtctcactagaacgatctgtccatgaaattttctcgtaaagggttatt

SEQ ID NO: 2164 - DNA, 487 bp, Arabidopsis thaliana
  Intron number 3 from transcript AT1G10930.1 (locus AT1G109 30) derived from phytozome v7.0 (chr-ID Chr1; pos 3654239 to 3654725 reverse strand)
gctgcaaggtattatggccatatgttccttctttcgacaacagtcatctccttctgtctattgtcatttactttggcccagtactctctgttgtttggatttgtagaagtagaacttttgaagatgaattatcaaacgaagtcagtgattgatggataggtttccaccacattgtgttatatcgcttttccagcatcacttggttctatgtgacaatgcgtgttttgtttccttatcaatagctttgtacaaactagaggcttcagcttttacatggctcgactttcataccaccaaactgctccaaataatattagatgatatgtgcatcatatgtctctttgatgtatctcactatggtagtgatggaaatcttgttatgttttgttctgtcttcttcttaaatatgtttacaactatgtgattcacaattatttgaaaagctttgttctctttctgcctaggtcaattgcgtttcccagtgtga

SEQ ID NO: 2165 - DNA, 352 bp, Arabidopsis thaliana
  Intron number 1 from transcript AT1G11040.1 (locus AT1G110 40) derived from phytozome v7.0 (chr-ID Chr1; pos 3680443 to 3680794 reverse strand)
ccgattccgtacgtttaattaacatcttctcttattgtgacgaacgctattttctgatcatcatttcatttacgttttcacatttgagcaatgatttttgctatggaataacgtagaaatagataaattgttcccaacaatgatcaaacggcgaaatattcgatttatatcattatggatttccgtttctttcttctttttatctcttcgaggattgtttgtgaaaacctctgtttcgtaaaataaaaaaatcatttttcaatccagagatcgtgagaacagagtaaaataatatttttgtttgtaaaaattgataggcaatccaccggagatatttggaggagaaatttgc

SEQ ID NO: 2166 - DNA, 549 bp, Arabidopsis thaliana
  Intron number 1 from transcript AT1G11060.1 (locus AT1G110 60) derived from phytozome v7.0 (chr-ID Chr1; pos 3685159 to 3685707)
tctcaacaccagcgtcgctccttgagggctcaagggtaagaagctttactcttttttcttagatttttcgatttcccccttctctttggggtttgattttgttcaattcatgagaaattttccaaattggcatgtgggttttcattgttttccggtcttctagattagggcacgattagggccaacaaactctatggtttcgttttctcttctctgtatttttggttcttgtaaatcagatttgtgatggatttggacttctgaagaggattagggcatgacagtttagagaatctggtttgtagtggattggaatggtgtattactgaatagggtttgtatcatgatgcatgcgaggtaaggttttaggactatgtctgattctctcccaaggactggagattttgtgtttgtcccattaattgattcgttggttgagtcgataagaagtcctagatggatgctgagtcgtaagtatcatgaaatctcaggaaaagttacctaattttgtgggagcttattgtttcaggatttcccaatccataattg

SEQ ID NO: 2167 - DNA, 404 bp, Arabidopsis thaliana
  Intron number 2 from transcript AT1G11070.1 (locus AT1G110 70) derived from phytozome v7.0 (chr-ID Chr1; pos 3692827 to 3693230 reverse strand)
ttcctcctctgacctattatctctctatatccaatgtacgttacctcttccctacgttttctttctttcagataatcgtatctttgacctaataaactcacagactaatcacaatgagaattttcttttagtttctgaggtgaaaagtaatgtgaattttccattaacaaaatcgaaaaaatgttatttgcataatgaataaagaatgtgaagaagttgtaactagctatatctcatcgtagcaattacaaaaaaaaaagatatcccagttcataagcagtgatcaaataggtaaatccagtgaaaatcgattccttggttaaaaaaaaaaacgcaccacttgatttgtgtgttagatatgactgatttgtggcgttgttgtttgttttctggatcaatggtag

SEQ ID NO: 2168 - DNA, 412 bp, Arabidopsis thaliana
  Intron number 1 from transcript AT1G11160.1 (locus AT1G111 60) derived from phytozome v7.0 (chr-ID Chr1; pos 3733409 to 3733820)
gcgaagcgtggatataagctacgtatccttttatagttcttcattggtgctatattattggaaacttgtaacctgaataacaaaagatacaaactttagctacatatttgatttattttcacccctaactttagaaatttgatgttgttcattcactgtagcgttagggtttatctgcattggtggggtttatgttcttttttttgttggtaaattgttatttgagatttttcatgaaaatgttcttctgggttctaatttctgcctctgtcatcttaaaaaccaaaccgagttcagatgatagaagagacattgttatctctgtttgtcttgactttttctttcgttctggatatgaatttttcttgacttggatttggaaaattagaggagtttgtggcacattctggaa

SEQ ID NO: 2169 - DNA, 790 bp, Arabidopsis thaliana
  Intron number 1 from transcript AT1G11400.2 (locus AT1G114 00) derived from phytozome v7.0 (chr-ID Chr1; pos 3837953 to 3838742)
tctccggcgacggagaatagccaccatctccgtaggtcagctttctttttttttcttctctttcctctctctcatatctctgtatgattggccgaggtgtagggagctctggccgccggcaaaaaaaataggttaactaaatttggtgtgttctcggtttttgttaacagcaacgagacgaaattagaggaaattgaattgagctttaaggttgattgaaactggaatctggaaagtttgtctttttggttatgtttggttttaggatctgtaatgaagattttgcttgtgaggttattaaatgcagccaaaggaattctatcaccaaaggtttatactttgatgataagaaaacagaaaaatgagctgggactttgtattgcatggttttgaaataactgattgttgtgtggttataggaagtggtgtttgatatggcgaatttcttttgtggttgctaatgcttacagctcactaaacaatttttaagttgaatttgaattgttgatcagatgtttgctactgagttgtgtgatcttttgaatatctgctataacttgtatactcattcttgatacacgagcttacatgtttcagagtttagaaagctttataatgtgtgaactacactgttgtgcatttagcttcttctaacaaactgttgtaactcaccgttaaaccaaaactagattccttttcctgtctaaatgtttaactccatgaattgtttaatgaaccctgtaaatttgatacagaaaacagtatacttgatagctgaggaacaagagaa

SEQ ID NO: 2170 - DNA, 694 bp, Arabidopsis thaliana
  Intron number 1 from transcript AT1G11400.3 (locus AT1G114 00) derived from phytozome v7.0 (chr-ID Chr1; pos 3838049 to 3838742)
gtgtagggagctctggccgccggcaaaaaaaataggttaactaaatttggtgtgttctcggtttttgttaacagcaacgagacgaaattagaggaaattgaattgagctttaaggttgattgaaactggaatctggaaagtttgtctttttggttatgtttggttttaggatctgtaatgaagattttgcttgtgaggttattaaatgcagccaaaggaattctatcaccaaaggtttatactttgatgataagaaaacagaaaaatgagctgggactttgtattgcatggttttgaaataactgattgttgtgtggttataggaagtggtgtttgatatggcgaatttcttttgtggttgctaatgcttacagctcactaaacaatttttaagttgaatttgaattgttgatcagatgtttgctactgagttgtgtgatcttttgaatatctgctataacttgtatactcattcttgatacacgagcttacatgtttcagagtttagaaagctttataatgtgtgaactacactgttgtgcatttagcttcttctaacaaactgttgtaactcaccgttaaaccaaaactagattccttttcctgtctaaatgtttaactccatgaattgtttaatgaaccctgtaaatttgatacagaaaacagtatacttgatagctgaggaacaagagaa

SEQ ID NO: 2171 - DNA, 797 bp, Arabidopsis thaliana
  Intron number 1 from transcript AT1G11400.1 (locus AT1G114 00) derived from phytozome v7.0 (chr-ID Chr1; pos 3837953 to 3838749)
tctccggcgacggagaatagccaccatctccgtaggtcagctttctttttttttcttctctttcctctctctcatatctctgtatgattggccgaggtgtagggagctctggccgccggcaaaaaaaataggttaactaaatttggtgtgttctcggtttttgttaacagcaacgagacgaaattagaggaaattgaattgagctttaaggttgattgaaactggaatctggaaagtttgtctttttggttatgtttggttttaggatctgtaatgaagattttgcttgtgaggttattaaatgcagccaaaggaattctatcaccaaaggtttatactttgatgataagaaaacagaaaaatgagctgggactttgtattgcatggttttgaaataactgattgttgtgtggttataggaagtggtgtttgatatggcgaatttcttttgtggttgctaatgcttacagctcactaaacaatttttaagttgaatttgaattgttgatcagatgtttgctactgagttgtgtgatcttttgaatatctgctataacttgtatactcattcttgatacacgagcttacatgtttcagagtttagaaagctttataatgtgtgaactacactgttgtgcatttagcttcttctaacaaactgttgtaactcaccgttaaaccaaaactagattccttttcctgtctaaatgtttaactccatgaattgtttaatgaaccctgtaaatttgatacagaaaacagtatacttgatagctgaggaacaagagaagtgacaa

SEQ ID NO: 2172 - DNA, 812 bp, Arabidopsis thaliana
  Intron number 1 from transcript AT1G11430.1 (locus AT1G114 30) derived from phytozome v7.0 (chr-ID Chr1; pos 3847600 to 3848411)
acttaccttaacactcttgctactgttcttggcaggttcgttttcgctttcttattgattctcttcgttgttgaattagttaactaatagacgacatttacttgtgttgctaatggacttgtcctttgattgaatccaatgttgcgtataggaagatttggttttttgttagattagggtttttgatgatactttagggtaagggtttagtgagctgagtaaagctttcagctttaaatttgctctgaagttgacctagttccagaatttgttcttaatatcaggtgtaatctttagctgacttgtttttcgtctcttgatatgtgcaaacttattgaacattgctgcatattgaacacaaaacattggtgtctgatttgatatctaaaactttgtgctctttagcgtaattatgaatgaaattagggggaagaatagaagcatctatttttgcatattttcttcaagctatgtataaattgtaggtgattgtgcatggtttctgtttgttaaaaacttgatgtggacagtgtaagctagtaatgtatgtaaaaggagtgtacaattgtgcagagcattagattgggactcctgactagaaatttcttggtatggcagggaacgagtttgtgttacacaactaatgactaaaactttagtttatttggtgctactctctattttagagaactttgattccggtttacactatcctgctgatgtgataaccaattaatgtacttgtgtccattttccagcataaccagttcatcgtgtttgcttattatatgtacttgtgtctattttccagc

SEQ ID NO: 2173 - DNA, 304 bp, Arabidopsis thaliana
  Intron number 1 from transcript AT1G11450.2 (locus AT1G114 50) derived from phytozome v7.0 (chr-ID Chr1; pos 3853485 to 3853788)
ttcattctggttcctatcgcctattttttggaaaggtttattgatattttgatgaaaatagttgagttatatatttttcttatgcaaaattttcaaaaatttgattatatcaaaatagttttttcatatttacataattaacaacatttactacaattgaagattgtcagaatgctctattataacatgtaaataaacaccactacatgttactaatatatgaagtagattgatattttctttcccctaaagtttatgtcttattgttaacaggaaaataataccgaaaataacgtttaggcta

SEQ ID NO: 2174 - DNA, 812 bp, Arabidopsis thaliana
  Intron number 2 from transcript AT1G11475.1 (locus AT1G114 75) derived from phytozome v7.0 (chr-ID Chr1; pos 3862783 to 3863594)
tatcttgatcttctccagctcgactacactgaagggtaagcttacaatgattctcacttcttgctgctctaatcatcatactttgtgtcaaaaagagagtaattgctttgcgttttagagaaattagcccagatttcgtattgggtctgtgaagtttcatattagctaacacacttctctaattgataacagaagctataaaatagatttgctgatgaaggagttagctttttataatcttctgtgtttgtgttttactgtctgtgtcattggaagagactatgtcctgcctatataatctctatgtgcctatctagattttctatacaattgatatttgatagaagtagaaagtaagacttaaggtcttttgattagacttgtgcccatctacatgattcttattggactaatcattctttgtgtgaaaatagaatactttgtctgaacatgagagaatggttcataatacgtgtgaagtatgggattagttcaacaatttcgctattggagaagcaaaccaagggttaatcgtttatagggttaagctaatgctctgctctttatatgttattggaacagactattgttgtgcctatcttgtttagttgtagattctatctcgactgttataagtatgactgaaggcttgatgacttatgattctctttacacctgtagaaggatttaagcttggtgtctagatattcaatctgtgttggttttgtctttcttttggctcttagtgttgttcaatctcctcaataggtatgaagttacaatatccttattattttgcagggacgcacttg

SEQ ID NO: 2175 - DNA, 700 bp, Arabidopsis thaliana
  Intron number 1 from transcript AT1G12030.1 (locus AT1G120 30) derived from phytozome v7.0 (chr-ID Chr1; pos 4065247 to 4065946 reverse strand)
caggtaataacaattatctctattactctatgttcgtatgaaattacaattgtatgtagttggttttcagaggttggttaagtttgttcggtacaaactttaaatggttggctcaaatccgtttgagatttagttttgttgggttgagttgattcttctaaacctagctaagctcttagagtttttggtcatttgattttcttatttgaatttttgttaaaggttgaaatagtgaaaccaaaattaagtttgcaaagaaatagatttgaaggcgtgattacaaaaacatgattcagaaataaatttgatcaatatagagtagcacatttgagctttgaggttggttaattatttagtcatttgattcttataaagagttcctggctagtgtaagtattttctccccatacacatcagcataccatgatatgtagaacaaatcacattaggatttagatatgaattgttgtacctgaaattaagtgagatgctaatgaaatatgtttatgaacgataatcgtatgtcaatttttatctcatttgatgttgtaatattcacatctttttggatgtgtatggtaccatattgcatacatgttttgtatttaaatgtgcaactttttttgttagtattttgtaagtgtgcaattatactgaaatgaaaagattaatctacgtgtttaggtctctgcaagtctcg

SEQ ID NO: 2176 - DNA, 619 bp, Arabidopsis thaliana
  Intron number 1 from transcript AT1G12390.1 (locus AT1G123 90) derived from phytozome v7.0 (chr-ID Chr1; pos 4220384 to 4221002)
tcctcatcgctcttgtcggaatcatcgtctatcaggtgcgattcccaatttctaggataaataaacccaaagttcttaacttttctatcggaatttgccaattttttcgcttacggttataatgataccatatttgtccattttgattcatttggagccttttttttgtttctgggtagtctgtgatttagctagaattagggttttatgttcttgtcacatgtttggaagaagtaaaggtgtaatttttgggaatgttatcatcaaaggagtaaattcaggaacatatatagtgcgtattggcttctcaaaacacttttataggttcatagttagttcttatgttggatgttcatgtcaggtctgaggatttacctccttaagcacaggttgttcttttataaatgagctccatttcggcataatgaagtgaaccctttagttttgtttgtgtagactctaatgagaggagtcactgagactgataagctagcaaacggaatcttccatgtataaacagcttgggaagacattttctaggaagctaacttctcttttctgaatttgaattctttcatttgcagcttgtttgcttagcggatctcgagtttgattacat

SEQ ID NO: 2177 - DNA, 520 bp, Arabidopsis thaliana
  Intron number 1 from transcript AT1G12440.1 (locus AT1G124 40) derived from phytozome v7.0 (chr-ID Chr1; pos 4242323 to 4242842 reverse strand)
cgacatactaaagcagagttttgggtgggaattaggtaaatatcttattggttttgttctgtgccgatatgcagatttgtgttcttcgtttgaatccttcatctattcttgaaccattcgatttaagtttttgacggcgaagattaaacaactcttatctatctcttttttgtccttttttgcgccggaagggtaaagtggtctttgtgagatagacgctgacctggtcttaagtgttgacaaatgacgcatttactcttcgactttataaagagttccaagggtattttagtcataaatgagaaataattttagtctttctcgcttgagaaacaagccaagaatctccgttttctaaatctttcgatattgtcaatttccctttattttctcgacggaatcataaataaaaaccctaaacctaaagtcacaaattcattcttcatctgttattcacgatttgtgttgtcttttcttttgcagtaagatttcgactttggaattgggagatctttccatt

SEQ ID NO: 2178 - DNA, 1025 bp, Arabidopsis thaliana
  Intron number 1 from transcript AT1G12530.1 (locus AT1G125 30) derived from phytozome v7.0 (chr-ID Chr1; pos 4269671 to 4270695 reverse strand)
tccgtctcaaaatcattcgccgcctcaaagaaaacgtaagccctctttctctttctccgtcgtcttcgcattgcacatcgtgtgtttttctttccttgctcctctaattagggttcatattctctcgattcccagtacattcgtggctttgttaggaccagtgataatgattagtcgattttgattgtttcaaaagatcatcaaattggaatcttttgttagtttgacttgagtaatagagatttcgattgagaatttgtataaagtttgctcttttggttcatatagactgagcccaatagtcctccataaatggttttaggtactttcatcagtagcttctcggaactcactccaaaaaatttgatcttttcgtttcgtgtgtactgttgtagtgttgaaacaagtgatatggttagttgtgtgcaaagataagtttgagcttggtctcagggaaggtttgtgttaatatgggattcctaacaataccagttgtttaagatagggaaagtttggtcatttgattttgattttgggataagtgtatctgaagttgctttagaggcgtggaagtaagtaaaccattgatgattcggagagtttatcaagatgcctttagtttttcttagatgaatcagatcctaggggagagagttctcttaatggtgttaagctgttagatcacagctataggcctactatagctgattcagaatttcagtatcacttactgtgaattggtttgacatcttacttatagctggtatagtgttcattgtctttgaggagtctttatacttatccatcgaatgggcattgtcattagcgcaacttggtagaatatttagataagagtgaaggttactactttcttagccggagaagtttatgtaaggcaacaaggaattttcttttaacagtgtttgataaacatcttgagctttgttcttctggactgcctgtgtttgcattgtgatctgactattaaagcggttactggattgcaggaggatttacggaataat

SEQ ID NO: 2179 - DNA, 379 bp, Arabidopsis thaliana
  Intron number 2 from transcript AT1G12710.1 (locus AT1G127 10) derived from phytozome v7.0 (chr-ID Chr1; pos 4327369 to 4327747 reverse strand)
aatctcggtgagtttttgtgtctttagattataattatctaatgggaatcatctgtggcatgtacttgcttgatttgattgcttaacactaactcagttcttgcaaaagtatgcttcatttgtacgttaacttgtgtgtttgttggattgtctaacacaagctcttcaaaagtgtgcttttgtaaacctgaaattgtgttttgatcatgtggtttcaggtttgagcttttcggtgatctgagtttattaccatgtgttagactcctttgtacaattagatatctgtcatgttcttatcagagtttggatacatgttatggtctaacattcattggtgcttgcaggttttcttctgtagcttatctccaacaaatctggt

SEQ ID NO: 2180 - DNA, 750 bp, Arabidopsis thaliana
  Intron number 2 from transcript AT1G12810.1 (locus AT1G128 10) derived from phytozome v7.0 (chr-ID Chr1; pos 4367757 to 4368506)
tctgactctggttgcttctctttcatccgtggctggttcgtttctttctctaccacttgccgccttttaattttcgtttactttcattgttgtgagtgcactgattcgattctctgtgttttttttggtcaatcttgttagcttttatgttggatcactgattaatgctcagggttcattgaactagtgttttggtttatggaatttgggaatactatgatcctgatcagaaccagattcctttgagttgatttatggataagccataatgtgaaactcaagagttccgttgtgaaccctgacttgacttctttatcattttgtttggtggccaattatcgaaattttagagcaagagattcgtattaatccttagatttagttctctgagtgctttgctgatcttctaaggaaggttcttgtctttttatgatgagtttagagctatccatgtatagacacatttttatgtttatctgttggacaggatcttttacttttcaatggatctagtgactctcttaagaactacctaatggcttttattttacattcttaaccccataatatttagtataaagtttgtagataaaatgttatatcatctgcagcttttcttttagtaagagatttgtgattgacctcaagtagcctaatcatgttgcttacaaattgcgattacggaatccttttttttgtgggttgcgaattgcagtcttgctgctctttgctgttgctgtttgttggagg

SEQ ID NO: 2181 - DNA, 413 bp, Arabidopsis thaliana
  Intron number 1 from transcript AT1G13050.2 (locus AT1G130 50) derived from phytozome v7.0 (chr-ID Chr1; pos 4450238 to 4450650)
ctaatcttaaccataatcagaagaacctgtacgttgttacctttctctctctctttttcttggtactttaaccaaaaaaatgagagaattaggacccagtatttacattttctgtttcaaaacttttagatgagaaataagagatgatggttctagttttgcttgcttgaatatgaaaaaagattacttgcttccttgtgtcagtttcctttaacacaagaatcctacttaaacttctcaccaagtaatcatctctctcatttggaaacactcaaaattttctctcttcattgctttcacttaactcttttctcctttagttgtacttcaatgtctcaccaccactatgaaaccaaccctcatttcgttcaattttccttgcaggatcaacatcaaggtggtccttctagctc

SEQ ID NO: 2182 - DNA, 462 bp, Arabidopsis thaliana
  Intron number 1 from transcript AT1G13380.1 (locus AT1G133 80) derived from phytozome v7.0 (chr-ID Chr1; pos 4589834 to 4590295 reverse strand)
gcttctccatcgccgccgagcgccgccgcagcatcgtaaattcactcttctctctctgtcccactttttttttctcatttagggtttttgttctttaatgaactctagttcgaattcttaggttataatagtcaatagtatgattctgttgaatctttctatttctggatttgtttcgtaattacttgcaattttcagcgaacatgttatttggtgcctctaatttgaattcaagattcttcaagagtcagtaaattgggggaaatcttgaaactaaagaacaaatttttcagagctatgttcatgtttttgtagctgaagactagagaaacatttaagtgacttagcttagttatagattgagacattgagttataatctgttgtgacacttctttaaggtcattatttctctgtttttgtggcaggggaaatctattcaagacccaataacaaacacaac

SEQ ID NO: 2183 - DNA, 377 bp, Arabidopsis thaliana
  Intron number 1 from transcript AT1G13460.2 (locus AT1G134 60) derived from phytozome v7.0 (chr-ID Chr1; pos 4616051 to 4616427)
tgaatttttgtaagctttttttatttcattattcatcgttttttttttcctacttttgacctttgttttgtgcaatcggaggtgttgtaatgtgcgatttctcttgatttttgattttgtgattgcgtttgtttcagaatcagaatcgaaagtttcgatttttatggtttgtagtggtgatttttttctgtttctgagtttcgtgagtgaataaagaagaagaaaaaatggttttgttgtaataaatttggtaaattttgggatttatctccatttcaggttcttgatataactaactttgtgtgtgttttagtatcatatcttcaatatttcaggttcttaatctgtttttcttgtttttttgttctgttattcag

SEQ ID NO: 2184 - DNA, 469 bp, Arabidopsis thaliana
  Intron number 1 from transcript AT1G13460.1 (locus AT1G134 60) derived from phytozome v7.0 (chr-ID Chr1; pos 4615959 to 4616427)
atttgagccaaatctaaagggtacaaattcttaatttcaaagtcaatcaacaacatcgaaggaggtttttttttggaagaagaacttgaatgtgaatttttgtaagctttttttatttcattattcatcgttttttttttcctacttttgacctttgttttgtgcaatcggaggtgttgtaatgtgcgatttctcttgatttttgattttgtgattgcgtttgtttcagaatcagaatcgaaagtttcgatttttatggtttgtagtggtgatttttttctgtttctgagtttcgtgagtgaataaagaagaagaaaaaatggttttgttgtaataaatttggtaaattttgggatttatctccatttcaggttcttgatataactaactttgtgtgtgttttagtatcatatcttcaatatttcaggttcttaatctgtttttcttgtttttttgttctgttattcag

SEQ ID NO: 2185 - DNA, 486 bp, Arabidopsis thaliana
  Intron number 1 from transcript AT1G13640.1 (locus AT1G136 40) derived from phytozome v7.0 (chr-ID Chr1; pos 4679145 to 4679630 reverse strand)
tcctccgtttcttcagatcttgctttccggtgacggtgagttgttcttcttcatcgataccttctatttcgaaatatcctttaaatttcgtttctttggttttgattttctcatttggttcctcgatttgtgtaaagtgaataaatttctgtaaatcatttcttcaaacgattattggatcaagatgtatcttgtgataagtgtggagaaagtataattttttaacgatttgtgttaaaggccgagataaagaaggttgctttatatattacaactgtataaaataatcaaatcttcaagatttttgatcaatgtttcatcttttgattcaggttttaatcttcttctctctggtaacacgtataaagcatggcttacctgatgtagacatgtagtgttaggctaaagactcctcttttcacttctgtcttgttgagtttgtgttggtttaaggctttaagccaaaggcgttgttggtctgacaag

SEQ ID NO: 2186 - DNA, 443 bp, Arabidopsis thaliana
  Intron number 1 from transcript AT1G13650.2 (locus AT1G136 50) derived from phytozome v7.0 (chr-ID Chr1; pos 4681458 to 4681900 reverse strand)
cctgcatacatttctgaggtttggtttgtaattatttgcaaaatcaaacggcaataaactgtttttcattgtttttgttattatatatgctcaaattaaatgcagagattttggttgctgaaactcattgacatttcaacgatttttttggattcttgtactatatgtttttctattggataaacagtaaaaccatctcgctttagattctagtataattcattctttgacgaatactcttatttagattctagttgttagagacattgacatgtgactccatggctttatacatcaataaaataatccagttgttatgaaataatccaattatttaatgatcttcatgttaggatatatgttaaggtgtaatagtttaatggaaagcttgtgtaacttacgatgcaggagaagttgttcttcaacaagaaacctttcggatc

SEQ ID NO: 2187 - DNA, 471 bp, Arabidopsis thaliana
  Intron number 2 from transcript AT1G13680.1 (locus AT1G136 80) derived from phytozome v7.0 (chr-ID Chr1; pos 4690785 to 4691255)
ttagatccaatatcacagatcagttctccattgtggttagtaataaacaacttttgaatcaaactttattaaaaatgtggtgtttaaatataaattttaatatatatatttgagtgaaacacaaatccaatttggttttaggatcataacttaatgtaagattcttaagagatgatggatcatttagtccactaattttgtcgtatatctttacgattatggattgttaaacccattaacccttaatttctttaccaaattataatttttaaaccaattagtatatatgtttggttctacttgaatactgataacactaaaggtgaacataattcttccaacataagcctctcagtattgagatatagatgtgttgatatattgacataagataggcttgatctgcaactcttgactatgtggggcttaactcttctactgaattttttttctttgttacagaacaattcg

SEQ ID NO: 2188 - DNA, 596 bp, Arabidopsis thaliana
  Intron number 1 from transcript AT1G13760.1 (locus AT1G137 60) derived from phytozome v7.0 (chr-ID Chr1; pos 4720402 to 4720997 reverse strand)
atcaaggtcttttcctcatcaaggtttactacgaggttttgtgcttctcttctctgcaatgagtcttaaatttctttacaaattctttaaagtttgatgtgttactagtttctcttcttgtcagggtcttttaaaagtatatgcaaacatcattgtattatattagaatatatatatatatatatatagtattcagattcattatttcaactgattagatctatggaacaaattgagagagaagaagacaagattctgaatttgaacagcagctaaaaagcaagaacaaatttgactttttaattccctctcagaaaagaaatgacgaacccaaaagttctttctaacttaagaaaaacttgagcaaaacttaagcaaaacttaagaaaaatttaagaaaaaaacattccattttcttatcaaattagttctaatattatcgtagctagtgctcaaatatcacctaggttcataacagagaaaacacatggtacatatttggattttggccacaactatttgagaaaaactgtatgtatgtattcgggatcacgccatccaaccatccttgcaggagccattaaacgggactattc

SEQ ID NO: 2189 - DNA, 292 bp, Arabidopsis thaliana
  Intron number 1 from transcript AT1G13970.1 (locus AT1G139 70) derived from phytozome v7.0 (chr-ID Chr1; pos 4782137 to 4782428 reverse strand)
tttcttcgccttcttctgttcttcttcttctcctggttagttttcttgatttcatggttaacaaatgattagagttttcgttaaaaacaatacttggttgtgttttcaagattttgtttcttatctttcacgtttcataaaaaattcaaatggctgcatttgttgcgtttgatgttatcgatgtttaatttgtttatttaagtattcaaaatttcagacccaagtaagcaacaaatttaagaaaataaacctcattcgattttttttcttatatgaagggtcttgaagatac

SEQ ID NO: 2190 - DNA, 606 bp, Arabidopsis thaliana
  Intron number 1 from transcript AT1G13990.1 (locus AT1G139 90) derived from phytozome v7.0 (chr-ID Chr1; pos 4795189 to 4795794)
acggtataatctctatcgctctcaattcctgcgtttactttgattttggtgatgcaaaattaatactttcgttgatgcaactaacttgatcagagtttcttaaagattgtctaggaagtttgggaactgtagtagtttgaaattcccttagtgccttgtttttgttaacaggagtcaaatcgttttgttgaacaatgtcagaatttagtcactgtgtcacacacaaccggtgaagaagctctccattgatagatgtagtgttagttatgattcaaaagtttgtgttctgcataccatttctttagttccccaggagaagagtgcttcagctgaactatgatgaggaaaattgttcatttctagattccactcttacagtaagattgcaagcacggttttatcatctcatctttcacatagtgctgatgcataggaatatcaaagcaataggaacataagtgttttattcaatttaagcttgtattcatctaaagttaataaattgatgttgttcctttagtgctctgtatctttgactgagtgatttcgttgagaaccatttctctcactgtggcttctcacaatcttagtgttggagtccaaccc

SEQ ID NO: 2191 - DNA, 484 bp, Arabidopsis thaliana
  Intron number 1 from transcript AT1G14130.1 (locus AT1G141 30) derived from phytozome v7.0 (chr-ID Chr1; pos 4837041 to 4837524 reverse strand)
aaaaatctagaggcaagattccccacggaattaaggtactctttatttctgaaaactctttgatgtttacccagaataagcaaacgtgacaaatcatcttttgtttatttagcttaactattactggggtttcttcaatttaaacgtaattgaagtttatccagaagaagtactgatgaattatcttgttaattcagcctaattagttaccgggttttcttcgatttagactgttttagctggttgaatcgtcactttatagatcattagccaatttaagctattaaagttttaaactttttcttctgattcgttgaacgtcattgtccaattcagaccactttactgatttgatcagagagaattgtctttcttcaaagtaattttctacactgatctcattgattacgtcactctctctattgatgtttctttctctataatattggccttaggtttctttgttaacctctccattgaagat

SEQ ID NO: 2192 - DNA, 476 bp, Arabidopsis thaliana
  Intron number 1 from transcript AT1G14170.2 (locus AT1G141 70) derived from phytozome v7.0 (chr-ID Chr1; pos 4845254 to 4845729 reverse strand)
aaaacagacagatcgaccagtgaaagctcctatctgtaagcattgcatgttcccaagctctaattcaatgaaatgttgtagattcaacaagtcatgtaaaatgtttccttaataagtcggtgatgtctcatggatcttgatcggttgtgtttgtgtagttttcttgtctcaattttgcataaagagctagaattgaggggagagatttgacctaatccctgtttcttgaataatcttgtttcttgatttagcatagttgaccaaacaagtcaaaggtgtttatgtctgaaaatttggctctttgattttaactaatgtagtgccaagatctgatctttagaattctcaaggactctgttttgtgtgtttctttagtgtttgttgattatatataaaggatcatatgaacaaactaagctctaaattatttttcatattttctccagcttcctgaggcattgtgatctcttgttaaa

SEQ ID NO: 2193 - DNA, 826 bp, Arabidopsis thaliana
  Intron number 1 from transcript AT1G14450.1 (locus AT1G144 50) derived from phytozome v7.0 (chr-ID Chr1; pos 4946489 to 4947314 reverse strand)
aggtaaatctttgatgattgattcattttgtgtcgctaattttgaatttttcttcgtttgattggaacgtagagatgtagtttctcgtctatgttaaattgatctttgcgtttagttagtgtatgagtgcttagtttttatgcttacatataaaactgatttcttttgtttttgtataactcgcttaaacctgagaatgttgtgaaatgtttttattgcaaagtgatccttagtttctttccatttgttatctctaagatttggcgtagttagctccagcttaagtttgtgaatttgtcttgaatcttgatcaaagtattgtcttgcttagcttttgtatattgtgatcaaaagaacacttgaaagagaggatagattgagaatgtagtgaatgttgtgcaagatcgtatttttggtgagctcctttgcatcatttgggtgcagttggttatatagcttttaaaatgcctgaaggaatcaatggtcttgatcaaattacatgcttctcaccccaagtttaatcctctattcaaatgattttgtaactctggtatgtagcgtatagatagtggagaatgtggctactacatgcattttttttcggtttatataagcaaagctgaaggaaaatttagaataacgcataggagataaggttgagtagaagatcagaactattcaaagtaactaaaaattttaagggcataggcatttgttgtctaaaaactagtcggttgcgatccctcgcctctgcgtatgttctaaagtgtagggtttcttttgtatcataatctcttacaagaaaatatttgttgtatgattgcag

SEQ ID NO: 2194 - DNA, 686 bp, Arabidopsis thaliana
  Intron number 4 from transcript AT1G14570.1 (locus AT1G145 70) derived from phytozome v7.0 (chr-ID Chr1; pos 4984746 to 4985431)
ggttagtgtctttttcggtcactttatttattttttcttaaatccggaatgtgtctctaggttgaagatttatcctcagaggccagagctgccctctttagtttcttgactctcatgggttggttgatgtctctgctggtcttcatccaagtgtagtttttggattaactattttttcagttagcactagccactaggtaggattcttatctaggtttagttgatgctgctgttaactcaaatcagacctggttgaatatctagttggctctagtaagttgttagcagcgtcaggttctggctctgttggaatttcagctgttggggagagcatgttacaattgcttctcccaaacagccaactgaaagcccagcatagagtttagtctttcatcctcaaggcacttagaagtttcaggggccttgagattagcatttgcgaagtaaacttatccagggaagctattcattagtacataaactatataactggtagaagtgtaaccacgtgccactaaaagttttgttttcttctgtcataggcccattagagtcagcatctccgacatatttaatcatgcgacattttgtatagatatcggttattgttttatgctgatgatacactattctaacaatacattcgggatgtaactcataattcacttgcatttgtgattagggct

SEQ ID NO: 2195 - DNA, 780 bp, Arabidopsis thaliana
  Intron number 4 from transcript AT1G14570.3 (locus AT1G145 70) derived from phytozome v7.0 (chr-ID Chr1; pos 4984746 to 4985525)
ggttagtgtctttttcggtcactttatttattttttcttaaatccggaatgtgtctctaggttgaagatttatcctcagaggccagagctgccctctttagtttcttgactctcatgggttggttgatgtctctgctggtcttcatccaagtgtagtttttggattaactattttttcagttagcactagccactaggtaggattcttatctaggtttagttgatgctgctgttaactcaaatcagacctggttgaatatctagttggctctagtaagttgttagcagcgtcaggttctggctctgttggaatttcagctgttggggagagcatgttacaattgcttctcccaaacagccaactgaaagcccagcatagagtttagtctttcatcctcaaggcacttagaagtttcaggggccttgagattagcatttgcgaagtaaacttatccagggaagctattcattagtacataaactatataactggtagaagtgtaaccacgtgccactaaaagttttgttttcttctgtcataggcccattagagtcagcatctccgacatatttaatcatgcgacattttgtatagatatcggttattgttttatgctgatgatacactattctaacaatacattcgggatgtaactcataattcacttgcatttgtgattagggctatgagggtgggtaactctcagcctgaaccaaattctttgattgctttccgtaacttcagtgaagagccaaaaagccctggaatttgggaaccag

SEQ ID NO: 2196 - DNA, 463 bp, Arabidopsis thaliana
  Intron number 1 from transcript AT1G14760.3 (locus AT1G147 60) derived from phytozome v7.0 (chr-ID Chr1; pos 5084621 to 5085083 reverse strand)
ggcttcttcttcactcacatctcaattgtttaaaggtacccctcttaatgcttccctctctctcttttttattaaagtgatgtatgagtataaatgtttatctcttatgtatttggacccaaccacgaccaggtgtgttccggcgactttgactcaccggagatcatgaacacggctgatgatcttgccctatccaaactctctctccaccctgactcttcctccgaagctacctcttcagaacttgatcaattcatggttcttttttttttttctccctgccaaaacatatttacacaacaaaaaacaacttttcacgttcttttattttttcctttgcaaattaatttgactttcaagtattctaagtttattttgccaagaaaaaaacagtagcacttatacttgtaaattgattcacataataggaagcgtattgctcgactctacgggagctcaagga

SEQ ID NO: 2197 - DNA, 237 bp, Arabidopsis thaliana
  Intron number 2 from transcript AT1G14760.2 (locus AT1G147 60) derived from phytozome v7.0 (chr-ID Chr1; pos 5084621 to 5084857 reverse strand)
ccgaagctacctcttcagaacttgatcaattcgttcttttttttttttctccctgccaaaacatatttacacaacaaaaaacaacttttcacgttcttttattttttcctttgcaaattaatttgactttcaagtattctaagtttattttgccaagaaaaaaacagtagcacttatacttgtaaattgattcacataataggaagcgtattgctcgactctacgggagctcaagga

SEQ ID NO: 2198 - DNA, 603 bp, Arabidopsis thaliana
  Intron number 1 from transcript AT1G15430.1 (locus AT1G154 30) derived from phytozome v7.0 (chr-ID Chr1; pos 5304408 to 5305010)
aaagaaaagcctcttttaattttctccggccagaggtatttaatagcttccgttttctttttctcttcttatggctgtgatttgatttactccttgggtctctctcgatccctccgatgatgttctgtcgttttgcggtttttgtggtcgtgatcagaaatttctggtcgcgtttgaatttgtttttcttttctttggcgataattatcgaattgcaatcgaattgatctgtttcgtcgtttgaaatctcctgatgaatcgaatgtttatgcgttgatccgatgattgagaacccctagaactgtttccgataagttaatagtttcaatttattttatcaataaattaaaaaaaaattgtctctttcttgtttgattatcatctgctgagaatgtagttttcagtgggattatgttcatgctcgaataccgtacaatatagactgatttgagctcgtccttgttctgtttccttgatctttgtttaacatttgggttgtatctattcggatgtaatggattatggattctttggctttcatattcatctgtgttattttgttgtgtgaattaacactcgtttctattgatttcagtgtgtggg

SEQ ID NO: 2199 - DNA, 649 bp, Arabidopsis thaliana
  Intron number 1 from transcript AT1G15660.1 (locus AT1G156 60) derived from phytozome v7.0 (chr-ID Chr1; pos 5381366 to 5382014)
atctacagcagactcatactctccttcaatctgtaagctcttgatctgcttaaaccttcgattttgatgcattagctagggtttggtttcctcagtgagtaattaattacggagacgattcgagtttgtgattttgacggttacgaaatcaatttcaaatctggctgatttaatcgtatccgtgctttgtttcttctcatccgcttctgggtgttcccaaatgaccaagatggatgctttattttttgggtttcttcaattaggacgaaaagtctgtggtaaactgcaaatacttagctgttactttgaaattttaagcagcatgattatactggataactgtaaggtttaggcgttgtgtctcaaggaggcacaatatctccatgtttgctcagtatatagcctgctaatgtacattggcttcttcctattcttttgggttaatgcttttcttagggatttagttgtgaagaattgcagtacgagagtttagtaaacaaactgcagatttttacattattctttgtcgcttgtgtatattttttctttactgacatatcaacttcagtatctcaaactaaataattgtcaaattcttggcttctatcttacagccttttgaaattcaaagtgagcatcaggagcaggc

SEQ ID NO: 2200 - DNA, 362 bp, Arabidopsis thaliana
  Intron number 2 from transcript AT1G15860.1 (locus AT1G158 60) derived from phytozome v7.0 (chr-ID Chr1; pos 5455093 to 5455454)
aactgaatcagtcaccacggatctctttcgctcaggtttttttcccaattcaatcaattccgtctagggtttatgtaattatctgctcaatagttgaactctttgttcttgcttcggattctgtaaaattttctgcgattggattgaaatctcagtaccctttgatgggttttggggttgatgaacgaattattgtatattcatcaatttttatgagaaagctttcaaaatcagtagaattgacttcttctgcaatattctttgtgatcactatcgccgtagcattgtatcaacgtttctactatgttttgacttttgttttttgttttggttcagcttcgagcaaggcctcgaataaagag

SEQ ID NO: 2201 - DNA, 358 bp, Arabidopsis thaliana
  Intron number 1 from transcript AT1G15960.1 (locus AT1G159 60) derived from phytozome v7.0 (chr-ID Chr1; pos 5484651 to 5485008 reverse strand)
aaaactctgattctaatcagattcttgtccctgaggtttcttctcgtctcttttctttttttgaaccccacactttattatttctcaactttgagtctctccacatcttacgcttaatcagtcttgttagtctccatgaattgatttgcaatcccttttgtatatactcttatcttatcctctgaaactcccattattggtaatcactgttattagtgttgatcatgaatttgattactgcctaaagggttgatagacttcataagtacaagagtgtttttgacttgtggttttgatgtttgttgctatatacataactgcagaaaaagagctggaaaaacttcttctcatacttagg

SEQ ID NO: 2202 - DNA, 632 bp, Arabidopsis thaliana
  Intron number 1 from transcript AT1G15970.1 (locus AT1G159 70) derived from phytozome v7.0 (chr-ID Chr1; pos 5487435 to 5488066 reverse strand)
tcgtaaaaggtgtgcttggatcacacctaaagctggtaagcatcaaactttcacctatcacacattgcatagtgagagagcttttgactttagatgcattcaaataaatgaaatgagtgaaaatgtgaatgtgagattgagtttagcctgattgtgtgagatgataaagttcttatctagttgaatcaaatgggactgaattgagacaaggagctagtgttttttgtttgatctaattatgttcttctgtatgtgaatattaagtaattcaatggccaacaaaatgtttcaattgctatgtattttattcagtgagcattgtgtagatcatttgctatgttgcataacttatgaagtagcttgtcctgaagttctcttataaatattttaacttctcagtgtccatgaaatttagatgaaggatgttttgattagctgatagatccacttcgtttatgcttttagtgtaagccaaacagcgttttctggattctctatactaatgagcataaatgtttccatgccaagaggcactttccattattctttgttgttctctcatgcttcatatctttctctgctgtaaattgactaataatgttgcgtttttctacgttgtaaagacccgtgct

SEQ ID NO: 2203 - DNA, 149 bp, Arabidopsis thaliana
  Intron number 1 from transcript AT1G16225.1 (locus AT1G162 25) derived from phytozome v7.0 (chr-ID Chr1; pos 5551772 to 5551920 reverse strand)
aagaatcttcttgctgaaagtcaaggaaaatctatgtaaacttgatagtttttaagtttaatgtttgatatgtgaatggatctttttcttcctttgttttttattatcaatctgaaaacgtgacttactgaaacagttcagcaaaagag

SEQ ID NO: 2204 - DNA, 410 bp, Arabidopsis thaliana
  Intron number 1 from transcript AT1G16420.1 (locus AT1G164 20) derived from phytozome v7.0 (chr-ID Chr1; pos 5613084 to 5613493 reverse strand)
aatctaataaagggtatgagatcaaaagtaatccctttttgtatgggtttgacgtcttttttttttttttttattgtttcatgtttctttcttcgagtacatacgcattcatccaaacaaaattcttggttaaaacatagccctcagctgcataaagaaaacagagcgctctgtttcttgaaacagagcaatacgtttttgatcgcaatttcgatttacctcaaatcttttgcgtttttggataagttcatagagtttgaaaataacaagtcttggtcgtttttgtgttaccactggttttacatcgatattatgaattttagtgtttacgattatttttttgttttttctaatcttttttttttttttttttttgcacaaatgtgtttgtagaccagcaatttagagaa

SEQ ID NO: 2205 - DNA, 913 bp, Arabidopsis thaliana
  Intron number 1 from transcript AT1G16530.1 (locus AT1G165 30) derived from phytozome v7.0 (chr-ID Chr1; pos 5651750 to 5652662 reverse strand)
ttgcaggtgaaaattcacttctctctttgtttaaatttgggattttagccactttgttaaaaaaattgttgtatatatattttccttttggtcactattttgttgttgtatattgcaagtttataaacattatggtttctttattttggtttttcttttttttccttgtggtcgtccatgttgctaaactcttcaatttatttttgcttcttgaaattaacgtttaagacaattagggcatttggatcttgtcagatgtgatatttgctttttgtaagattttttttgttgtttttggaaagtatcgaaaccgcgtgtaaagaatagtgtatgaagtcactttcgagttttctatcaaaagtctatattgcatgtcacgttaaaaggcagaatcatgacattatttctttttatttgttattttatgacaaattatgacgcggtgaataattaatccatgtctaaacgcaacttcttactattttctactattgaatattactataagatcattgacaaaatcattacaaacaaaccatcatctcttgtaagcatgcacttatttattacataaaataccatgtaataatacatcatatgacggtatgacccatcactaaaagttccaaataacaccatcaaatatttttctcaatagaattaaaccctaaaataaaatagtttccactgtgtatatataattgcatggttttcgtaaaaacttatagaagtgcaacatcatttcgttatttagcagattaaaaccattcataatctacatttcttgcaaaaacaactatttacaagtctttaaaataaataatagaactaaatattattaaaatccaaactaaagtatattaatttaacgaccgtaggagctgtcggagaaccaccggagcgacgccgtgga

SEQ ID NO: 2206 - DNA, 476 bp, Arabidopsis thaliana
  Intron number 1 from transcript AT1G16540.1 (locus AT1G165 40) derived from phytozome v7.0 (chr-ID Chr1; pos 5659533 to 5660008)
gatccgcgacaccgaattcaagagattagataaaggtctgtttttttttgttcttttttgaatcatgtatgagttgttcttctcttggatctaatagggttcgaaacttaagctttttgagctgaaatttctatgagtcaaaaactattgggttgggtcagtggtggatcagctccactctcactacttgagaatttcgaattgaattaaaattgagttacagtgtttctcgatggaacagtataacttatgtttatgtatgtaattgaagaggtttaattgatccagtactcatatgaacaattccgttattgctaagaatgggatcatagtgttttaatgatgttctatgtagtgattttgtggaaacaatgcttagtatccagacggatttaatcattttccttccagtacaatattcgaatttgatacttataagatttttgtggtatgtgcaggtgttgtatacttggatc

SEQ ID NO: 2207 - DNA, 854 bp, Arabidopsis thaliana
  Intron number 1 from transcript AT1G16740.1 (locus AT1G167 40) derived from phytozome v7.0 (chr-ID Chr1; pos 5727924 to 5728777)
tcgagcgcatcaacgccggttctcgtcagcacggtgtacgttttccccccaatattgattagatttttgcctatttgcttcccgtcactgctaattgcattgattcgataaatcatgattagtttataaataaaacttctgagatattggttggtttatttttgcaatctatgatgagtttcttttaggatggagcttgggatttagggttttcttttgttaaatttgggtgcttgatttctccagagtctgtggttgctagtataacaagttctagtttgatgtttcaaacagaacttgatggattacattatagtcttaacttttttgctgtattctagagatttttcttatgcagtggcactctatgtttgcatctacctagtgatagagttaaaacttgttggttataactagaagcgaaagaattagattgaatagttgaattaaagtgcattttagattagcttattttcttcagattttactgttgtatctttgatcaatttggagctttccaatatctgagtttgagatatttatccaatggagattttggatgtgaatgtttaatttgaaactcaaatatgcttaaagaagtgaatcatttcggattgattagaggaaaaacacatttcatgtcaatagttttgatctaactgaaacaatgattacttcctaattcaagtagagaaacatatttttctaactcggttacctcgttttagctttgtaacaagctaaatatatgctattataatactctgtttcttttgaataagatggaaatgacatgtttgattggaatcctaacatctaaaacttgaaacaggtgaactacgggaacttcatcc

SEQ ID NO: 2208 - DNA, 438 bp, Arabidopsis thaliana
  Intron number 1 from transcript AT1G17080.1 (locus AT1G170 80) derived from phytozome v7.0 (chr-ID Chr1; pos 5840909 to 5841346 reverse strand)
gatatcaaactgttccaggtagcttcacttcctgtattggatattctgatttcatattttagcagatttgggaatttaggttgaactgttgtaaaattaatagtgatcattcattgtcttcataagattctaatttgattacgggatcgtgtttgtttagctatagaaacaagttttggggttgttctttgttttaatcaaaatgttataacaagctttgatgagaattataaagtttggagagctttgattacttctaggaacagctcagttaattagttaggttgtattggtttgtgctatggaaaatttgtaaggcttatgtagtgtctcattttctcttcttcttcttgttcaaatccaagtcaagagcataaatagatgtgtgttcaaccgttcttatgtttactctttcttgattgttgtatttttcagtcc

SEQ ID NO: 2209 - DNA, 494 bp, Arabidopsis thaliana
  Intron number 1 from transcript AT1G17130.1 (locus AT1G171 30) derived from phytozome v7.0 (chr-ID Chr1; pos 5854427 to 5854920)
agttcaattcccgtaaagaagacgtcattggcgaggtaattgaatcaattggtttggtttcatagtgtaatttatttcctcggatgcttttgcgtaatctctgtacctcttagttgatagtgttgatgcagattattaggagtgtcttctaattttattagggtttcagttttcgataatattgtcgtcggtccttgaattgaaactaattacgaaaacgattccagatttggggttttagggtttcgagaaattgagcttttatgatagcgaaccagtataactgagtaccattaccttgaaggctcttgaaccttatatattgctgatttcgtttttggccaaggagatgcctttccataatctagttcagactgcttgaatagttattcttcttggtgttgtttttgtggcgtttattctaatcaaattgttcagaacttttcttttgatgtgcagacgtatctcgggattcaaatatttagattctactt

SEQ ID NO: 2210 - DNA, 562 bp, Arabidopsis thaliana
  Intron number 2 from transcript AT1G17210.1 (locus AT1G172 10) derived from phytozome v7.0 (chr-ID Chr1; pos 5883602 to 5884163 reverse strand)
ctttcaagccttcaaattggcttgggaagcccaaagtatgactcttgttttctcgttatttgctctttcacatgcaaattcatttttccactctcagcaaactatatttctttggaaaatccgtagtgcatatcctagcaaaaagtccagttatcctagagctagtgaatttagtgatgcgaaaaacaaaatttggactgaatgctgattgataaacttggcaaatatcctcctgtagttcttttttggctcaaataaatttgctataggtgaatccaacagtatatttaatggtcctttatattcagaattcaatctgagggactgatgtattaaagataacctggaatggaaacatgaggaagaatagctaggttatctcatttgtgggcttattactttttattctttctctactttggattggtcctttctatctcctttgatatttgttgcaagtttcaactggttcaatgaaatgctgtttgattaaaggggtgtcctgctttggtaatctctgtttacagacagctagttctttggcttgtgctcagaaaggctg

SEQ ID NO: 2211 - DNA, 666 bp, Arabidopsis thaliana
  Intron number 1 from transcript AT1G18360.1 (locus AT1G183 60) derived from phytozome v7.0 (chr-ID Chr1; pos 6318177 to 6318842 reverse strand)
gactcctgttgactccgctaagaacaggtcaattcttgttttgtctgttattgatgagtgattggaattggattgtttctctggaaacttagtaaagaaagatcttttaggcttcggctatgttgagtaaatcctacaagaagaggtccctctctgttttgagacttgtggttcacgagaatttgagcttaattatgacaagacaatgtcgttttctttggtgtgttcttggattgctatatcgttttctcagctggtcctaactattattaccttggcatttaccttgttaccttggattcaattctgccctacttagatttcattagttcctcaatgttgttagcgttcatgtgaagaagatcaaacaaatatctgagataatctttaggagaggattctgctaactgggggagagattttgaagatcaatgtattatattatacagtagtcggtttgctcttgaccaagtcttcagtgtttatgtgatacattgacctccaagatctcttgactatatatagctttgtgtcacctattttccagttttgtatctttaatctcttgtttatagtcttcttctattatttcttctttggtttcttatgttctaaagctgacatctttctgtgagcttgtttgtaggggacttgttgttctgcttc

SEQ ID NO: 2212 - DNA, 511 bp, Arabidopsis thaliana
  Intron number 1 from transcript AT1G18470.2 (locus AT1G184 70) derived from phytozome v7.0 (chr-ID Chr1; pos 6359434 to 6359944 reverse strand)
gtggttagtctcttttctctctttcaattctcttttctctgaaattgactgcatgattcaaattctttgcttctgatttgttcaatttcgattttcgtttttggtgtggaggagaatcatttccctgatttcataatttggggattttgaatttgaggaccttgtctttttgccccccgttgaatttcgaagctaaagattgtctctttttgtttaggcaaagtatcagtttttgtttttgagagaattgaaaaagcagatcctttaacaatttcccgattcattgtttctatttgccgttaatagcaacaaaagcaatcacgtcaatagtttttactgtataaagtttttgcaaattttggtaagtcatgtatgcattttgtatcctagtgtgttaaaaagttacatcctttagaggtatgcatttaccaatgactttcacgaaaccaaaaggattcagctttttacttgggtctgataaaaaatatttctgtatttggggttatgcagg

SEQ ID NO: 2213 - DNA, 379 bp, Arabidopsis thaliana
  Intron number 1 from transcript AT1G18520.1 (locus AT1G185 20) derived from phytozome v7.0 (chr-ID Chr1; pos 6375526 to 6375904)
cgttttatcacaagaacttgtctcccatccaggtattgttttggatcgattttctgtatgaacatatttctttgttgatatttttgtataaatatagtaaagggaagaccaatcaaagcttttgctttctttagtatatatatatgtaaagacaaatcaataaaaaatagtctaggttcatttcatcgttcttagtatgattaaatttcattgttaagtttttgcatatagtaacaaaagcaagacaatttttagccgaactaagataacacttatatgttaagccgttaaatttattgttcataatgggttgtgtaactcaagtattgattgtgtatgagcagtcaggttgttgtaagccaccatcggattgcaactt

SEQ ID NO: 2214 - DNA, 443 bp, Arabidopsis thaliana
  Intron number 2 from transcript AT1G18620.1 (locus AT1G186 20) derived from phytozome v7.0 (chr-ID Chr1; pos 6410820 to 6411262)
tattctcacaagccggcgtaaaagtcttactttaggtaatcataatccaataacacttaagtaataaataatgcttaatgctctagatcgtgtctcttagtcgttgacttgtacatggctatatgggttacaacgttcttaatatgtatgtcttttacaatctttcttcttctttagctcggtttcttcatgaactataaaggtcttgtctgattcttctgtggtgactagaaaggtttgtcctttcttggctgaatcttatctgatttgtgaaatgtctgttagttttgttaaattgattttgagttttatgttgctttttttcttggtagcttttgacttctcttaaccttaagactattgaagtttcaagaatctgtaatgtttagggggtttattggcaaagataattttgttgatgtttttttttttttttgcaggta

SEQ ID NO: 2215 - DNA, 688 bp, Arabidopsis thaliana
  Intron number 2 from transcript AT1G18680.1 (locus AT1G186 80) derived from phytozome v7.0 (chr-ID Chr1; pos 6432264 to 6432951 reverse strand)
tcttaagagctattcttgtggtctgcaatttacgggtatgttgccaaatgttagcttcttcttcttctaattacatgtgatgatggatcatagatttgctcatctgctataagattcaatctttccttgttgggtttgtttttcagtgttcatttctatgttattatgtagataagatgggacaatcttgattgtgatttgtagtatgttccatattctgtagagattaagatcattaatcgtatagatatagtctttcttacctctgttatgctttcgtaaagtgctgtgttgaatagcatgttcgtttagaagtaatgccaatctcatacatgtgggagatgcttttgctttagatcttctttctcttttctctgttggtttgatcatatcaagaattgctattgagccactaggaatctaaatcttctttaaacccaaaagccatgctgtgagttgtttttaggtgttgctagtttacgttttatataggagtgaagcaaagtgttaaatgctcttgggaaatgcattttcttttcaaaaagactcaaaagattatagagctcttggtacttgcaatgattatacacaagtgaactcaagtgtgtgttgtgtgtctattctctgcatatttgctttgactttcttaagatttcttctattgtaaacattgcagacaaggagttag

SEQ ID NO: 2216 - DNA, 1036 bp, Arabidopsis thaliana
  Intron number 2 from transcript AT1G18950.1 (locus AT1G189 50) derived from phytozome v7.0 (chr-ID Chr1; pos 6547167 to 6548202)
atactttaagtgatattcacattcctctgctaaaggttggtgctttggtcatccattgttgtgtttattcctactcatttagtgtacttctcgtctcttattgattgtttcctaattcttgttggtttcctttggtttctgtttgtattaacttcaatgtactactagaggttgtctcattgacatgaaaataacatgtttaggtgctctagacctgagtgttggctcttattagtactacaactagtgataagacattttttggcgtactgaatggttctagaatagaaaattgccgttttgagtgagaagattctgttaaagtttagatattatatagaatcctgggtgctgtacccagtgagaaatagaaggggacctggtaatgtgttagtatcctatatgttaactgcaatttgcttgcaaagtgatgtcacctctacttcatataaatttgcttctctttgaatcctgggtgcatcttcttctgcacttcaaattaaatattccaaggggtatgactaatttttttggtaagcccctttgtaatgcgacttgggtagactacaaccaacttgttcaacgatatcttgagcttactaagtctttctcagttcggatgaaagggactcttagtttcaaatcattttggctgagcggctggttgaccaagatatagcatctatgtttttggctagctttcctcgtaggcaccttataggcttgtactgcccagtatagatcactagtttttctggaacatcttcatgagttcttttagagttccctgattaaagtccttgatcattgtcatgatatcatgatttttgttgttgtttgtgcgtatttataattgccatttttctctaaagtgctgcagttacttttggtttatgttgatactaatcaatcatgatttggaatcaaatatattcttcactactatgagatgttcaaattgcttaataatttctctctgtgagcaatattcaattttcttcctttcaaattgcaggccattccgcctgtaactcga

SEQ ID NO: 2217 - DNA, 341 bp, Arabidopsis thaliana
  Intron number 4 from transcript AT1G19100.1 (locus AT1G191 00) derived from phytozome v7.0 (chr-ID Chr1; pos 6596232 to 6596572)
aggtgcgtcctttcttctgatgtgctttatgttttgatctgactacctgcttgttcattactgcaaattatttgaataagactccttagaaccttgtttctacaaatcttaatgtctttgcttaagcagaaatgttttgaatcttaaaattcttgaatactaaatatattcttgatagagaacttttcccttccggaacccaagtgcttactttctgagtccattctgtcatttgtttaattaaggtggaagtgtgcctaaatatttgtaggtaatggttctggatgataatctattaatatgttttgtgctctgcatcttcatcaccctatagatccaaa

SEQ ID NO: 2218 - DNA, 1043 bp, Arabidopsis thaliana
  Intron number 2 from transcript AT1G19230.1 (locus AT1G192 30) derived from phytozome v7.0 (chr-ID Chr1; pos 6645062 to 6646104)
agcttcgacgcacgtcttcaaattttcttcgacatgtacgtgtctctttgattctctctttctttttatttttaagtcaagtttttgggtttgtctttacgtttataactgttacgggaataacgcactgcaattagcaaaagcataagaaaacaaatgtattgatccaagtgcaacgaataattcagttgacgttaataattgaagaaagttttatctataattgatattccaaattctgaataacgccggcgaggtctcatcaacttgcattttaataagatttgagttgatttttgttttctggtggtattttatgaagtttagctgattaaattcacttattgagtaaaaatgttgttgattaaagataatgttagcttaccaatcattctttgattgtaatttgttatctctttagtgagaactaccgcaacttcacaataattttctacaattttgggaattattagccttaaataaaataacatgtgttggttaagaacttaagatgaattgtgattgtttttaaaaccaaatatcatatccttgtagagagatatagatagatacatcatttaaatcacgtggtgttcttagccgttggatctggtagttcacgcaatcaatggcgaaaatggtctagtgagtttaagtaatgggccgcggtttacttggcccagtaaaaaataaacttttaccaaattttcaaaaagtttcctctttcagctttctttttcccgcaataagtttcttgcaagtataagatacaatgactcttatatacaccaagctgccaaaatgagtttgcaattttttactctttttatggccaaacatttaattcagtaacattatggtttacactcaactcgttttgttattctgtcatttttatgacataactaaatatattttgttgtttaatgattctacaattctgttataatttgtagtgttactgaaagaaaaaaaaagattctaactggtaccggttttttgttacagggctgatagtaacgaagacgggaagatcactagag

SEQ ID NO: 2219 - DNA, 310 bp, Arabidopsis thaliana
  Intron number 1 from transcript AT1G19270.1 (locus AT1G192 70) derived from phytozome v7.0 (chr-ID Chr1; pos 6662990 to 6663299)
tattgggatcttatctgattcaggattttctcaaggtaaagggacgatctttagcttctttgcagctgcaattacttgataattccatgtctggattctaatttcatggttttttgaaaaaaaaaacaaaaaacaaatccgtttggaactcgtttgcttaatggtgacaggttttagggttgtttagttattgttgttagattcaaagtgctattgttctgtggcttttgatgtttggaagtgaaacaagtttgttttgggtttttgctaatcagagatgattcgacgattttgcaggctgcattgccgt

SEQ ID NO: 2220 - DNA, 392 bp, Arabidopsis thaliana
  Intron number 1 from transcript AT1G19540.1 (locus AT1G195 40) derived from phytozome v7.0 (chr-ID Chr1; pos 6765855 to 6766246)
agagattcaaagatctcggcgttaccatactctacgtacgtagtaatcctcttctcatgcttgtgcatgtcttattctaaccttaccttctcaaacactgtatccaatctttaagatcttaattaagttccgtttcatcttttaagcatttatggaaacttattcaattactagtagtagttaagttggcttgatttttgattatatgtgattttagatgaattttcaaaaaaatgttaggaaaagatattttaaattgttggaattatttacaaaaagtagttactaacttttaaagtttttttttaccaaatcatcacgtgaataatggtagattttactaattaatgacgacagggaagtttaagtgataaagagagcttagtgaaggc

SEQ ID NO: 2221 - DNA, 579 bp, Arabidopsis thaliana
  Intron number 2 from transcript AT1G19580.2 (locus AT1G195 80) derived from phytozome v7.0 (chr-ID Chr1; pos 6775439 to 6776017)
cgtattacgaggtgagctagctactaagcctcaatgtttggtgtttggtggttgactattttagtgactgaagttttgtttgaaatagtatctacttctgtatccttagctgtgtcaactcttacgatagaaaatagtgaacgaatatctgttttttactcttctggttaagcgatgaacaagactactactcaaaatggagctttctagctttattgaaggatcttaaacagatcattactacatatcgtatcttgatgatactggcagttgctctaatgggtgattgggtatatgatatccccaatcatatacagaatgctttcatgtcataacaccagaattagttgaacgatatcatatacagattattgagtttgagttgaatccttattgcgagtatgagttggctagtctggatttttatttaatggtgatgaaatagggttgtcctttttacagaatgctttcatgtcataacacattggtactgtatggctaagcctgttagtactttaccaggaaactgggataacatacaatctaaacttgctttctctctttttttctgcgcaggcg

SEQ ID NO: 2222 - DNA, 441 bp, Arabidopsis thaliana
  Intron number 2 from transcript AT1G19790.1 (locus AT1G197 90) derived from phytozome v7.0 (chr-ID Chr1; pos 6838754 to 6839194 reverse strand)
ctagttcttcaggtatgacgatgagttttcaattaattaacatagagaaaaaatttcaacaaatctagaaaggatttaaaaacaaatttatgtgaagatctggttatgaatgttttgtcaagaaagcaacaatatgatttgattgtgaatatatgtccaccggattttgctcctttctttttgctgtttgattttgattgtgaataaatgtccaacaaaatgattttagtcactgttctatggtaaacctgacgacacaaagggtttagtcgatttttattcaatatatgatgtaaaaaataaacaatggttaattatgtcatgtgttttaaagattttgattattggattcacgaaccaaaacgtttttgaattttatagtaattctttggttttatgaaattagggttagagactagtcacttaccaccggagataagt

SEQ ID NO: 2223 - DNA, 619 bp, Arabidopsis thaliana
  Intron number 2 from transcript AT1G19835.2 (locus AT1G198 35) derived from phytozome v7.0 (chr-ID Chr1; pos 6859514 to 6860132 reverse strand)
gattctgtttcactgctgcattttggatttttccggtgagtttttttctctctccatatatactctcctcctttcgattctacatttcttcggaattatgcttcgaaatcggagaactgtatatatcatgctctgttattagttcatttacaaaaaaaaaaaaaaaagaggaatcggcgtcggtgacttttggttttgtgatttgactgttgagaaaaaagcgtcggtgatttggttttcgaggtatttttttcttcgtctgccatttgtttggctttatatcctgaagttactgattctagtaatggcttttgtctccattttacttgatttttggaggtattcctttactagtttgattcctctcttcttttcatttacaagtgttcacagttcatcgaaatcagaaattttctagtcgattgcgatcgtcggtagtcttttgcctctgcatctctgattattttttactttctggcatttgctttctgatttgacttcaccacttcgtttcggaaagttcttaattatttttccgaaatcccaaaattgtatatatttggtttaatttttatgtttttgttttctgaaaatgttgaattgtttgttgattatgaag

SEQ ID NO: 2224 - DNA, 402 bp, Arabidopsis thaliana
  Intron number 3 from transcript AT1G19990.1 (locus AT1G199 90) derived from phytozome v7.0 (chr-ID Chr1; pos 6935964 to 6936365)
gctcagatttggtaagctcttctattcctttctctgccttacattgttctgcaactttaaaacacttacacttaatgttttgtgtttggtatgtatctgattatttgtgtttgatcactcaatctgcaaactgagtcctacaccttaaattattcttttgggacttgatgcatacttgcgtttgattttcgatggtctcttgtgttttgcgacacggtttaagctagttcgcataaattttgaacatcataattggactcacattgtatgtaagaaaggggagtcctttcaaaccagtcactcaaagcattgattatatgatctgtgatggttatgtgtaatatttgcttttagattgctttgtttatttgaaaacccttttgtggttttgatcacaggttg

SEQ ID NO: 2225 - DNA, 255 bp, Arabidopsis thaliana
  Intron number 3 from transcript AT1G20400.1 (locus AT1G204 00) derived from phytozome v7.0 (chr-ID Chr1; pos 7074852 to 7075106 reverse strand)
gcacttggtttcttgcggattcggaagctgaagcggtgcgtaggtaatcattgcgcctactcggcggcacaatgatttcctaggtcattttctcgcctctataaatgcgagaaacacgcttagttttctcaggattcttcgcagccaaaggtactttcttcttccccttctctattttgagctcgtaatttgtaatgccgtcgtcagatatttccatcagttctctctccgaccatcgtcgatctcgcaccccgg

SEQ ID NO: 2226 - DNA, 443 bp, Arabidopsis thaliana
  Intron number 1 from transcript AT1G20600.1 (locus AT1G206 00) derived from phytozome v7.0 (chr-ID Chr1; pos 7133724 to 7134166)
gtcttttgaagacttctgattttgtcactgtttggatgtttaggcacataaagactcgaaagctttgctttgctattcactacgttacattttctttaagaaattaactaatcgagtgggatgatcttgaagactactgctttcttgaatccaaattagggtgagatcttcaagaattaatacagtggtcaaatgtgaatagtctcaagtatgcaggtcttaaagcttcgtcttctttgcgaataatgtgctgtatgggttttgaatgaacctgtaattattgggaaagaactacctgtagttttttagttcagaaagtctttaactcttttaatgtgttattgttcataagtattcataaataatctgtcaacttaatgggtttgtttattaataattgtcacttaacttttgttttcggtttttcattgctatgttacagg

SEQ ID NO: 2227 - DNA, 561 bp, Arabidopsis thaliana
  Intron number 1 from transcript AT1G20670.1 (locus AT1G206 70) derived from phytozome v7.0 (chr-ID Chr1; pos 7166958 to 7167518 reverse strand)
tctccgccgccgcctccggatctgattatcatacggtagcaaattcaatccctttttccgatccaatcccaaattgaattttgattatcagaaattaggtttcaaataatttcgcgcgtctgttatcttcttcttctctgatttgagtgagtgggaggattgagtttgactgagtcattactcgtttttaattggtgggaatgagaattcataattctgctttttctctctgtgtaaattaaattttccctttttttgtcttcagcttaagaaaattcttttgtgtgtgtttatcgctttaatataatattgattttgtctgctaattaaaattgttaacttacctctgaaatataagatactgaaaacaagttccaattttatctttgctttactgcttaaacatgaagataaaacatgaacacatgtgtactttgttttctctgtgaatctatgaaagctttacattattaatggatatactttggagttgatgatgatgatctgttggttaatactattgcagggagaaaaggcttcgaaagcgacagacattcttca

SEQ ID NO: 2228 - DNA, 632 bp, Arabidopsis thaliana
  Intron number 1 from transcript AT1G20700.1 (locus AT1G207 00) derived from phytozome v7.0 (chr-ID Chr1; pos 7182728 to 7183359)
caactccctctcttcttaccatccactctcatcaggtacacttctctctgtttttgttcctgattaacaacaatcacttttctatgtatttgatttttttacaagagaccatttgatgagcttctttgtatacggtagaagaagtgtgtaagacgaaagtgtttaaacgcagcgttttttgcgatgcaaacgttgtttccattaatacacttgacccattgagactttagtgtaaaaatgtgaaaattgtgtttgcgtttggtatacaactaacgaaatccaaggctttttttttcccagtgttcgatgcataactttgaatcaaatttcataatgttttagacattcgaagacagtttacctaccgcttagatatcgatttatcattgctaaagatatttgttaatatagtttatgatttgcttagatcgaacaattcaatatattattaatgtttattttctctagacgtaagctgatttgagggttatcatgtcgtggccgatttttaagaagcttgagttattagtgctttgtggttttgataatacatattttgtacatggaagaaacttaagggtcacgtcacttatttttttataatgattgagtgtaaaaaaggagtgaggcca

SEQ ID NO: 2229 - DNA, 388 bp, Arabidopsis thaliana
  Intron number 1 from transcript AT1G20760.1 (locus AT1G207 60) derived from phytozome v7.0 (chr-ID Chr1; pos 7209621 to 7210008)
aaggatctggtttgtctaagcaggttctcgcccaggtgaacatttcttcttggatctctctgctttctgattgtttctcgctagaaagatctgatttcgttttctacgcagctgatttgggtttccaaaatgccgtgattttgattgttccatttgaattgcattctatttctgagattttgaattgcctatgaacttaataagaattcacggggtcagatttgagtacatttgtgtggaaataagctttaaatctttggtgtaccagtaattatgtatttgaatctggaaaaaatatctggcatacagtttccttgaaggggttctatttagcggtgtttgctatataaaattgtttactgatcagttgtgttttgcatttgtagat

SEQ ID NO: 2230 - DNA, 441 bp, Arabidopsis thaliana
  Intron number 1 from transcript AT1G20780.1 (locus AT1G207 80) derived from phytozome v7.0 (chr-ID Chr1; pos 7217371 to 7217811)
ctttgaggaggcgcttcttcaactggaacaggctggtgtgcttttttttttatctcttttggtatttttgaaatgcttcatgagacgttgtttctcttctttatctttttgacgaatattgctaaatttggtaatcttgctatataagggttcatgggagtgatgattttgggacactgttacttttcgtattttaggttatagttatgattgaaagtttgaattttgtttccttggctgtgaaagaatccgggaaccaaactgtggtactatccctttttgtgtttccaaaactttctcattcatttactatcaaatttcgacactttcttaccagactctcttgcattgatgtatccaagtgggttttcatctaggatcctatgtttcataacaatgaggtatttgcttgtacatttgcagtgagtttgaaggattaag

SEQ ID NO: 2231 - DNA, 409 bp, Arabidopsis thaliana
  Intron number 4 from transcript AT1G20910.1 (locus AT1G209 10) derived from phytozome v7.0 (chr-ID Chr1; pos 7279552 to 7279960 reverse strand)
aagtggtaattatccaaaaccatatcgtttttagttcgtcagtttataagtcttggttatttaagttggcccgtatgattatcacctacattttattgtttgaattgtggatggcatatgaactgtatatagggtataactattgaatccgtaagctaatttatgataagagtatctataacgatgtggctttcagagaagatttatgactttaagcgaacatatcaaacattaaagaatgttcgatattttcttgggaaactgatttattttactgttgttagctatatttggaattatatattcaatgttttcttaatcttctgctggacttatggtctttaagattcctttgttttttcatggtaatgtaggtcaccacaaataagctgtggcggcaagttggaga

SEQ ID NO: 2232 - DNA, 378 bp, Arabidopsis thaliana
  Intron number 1 from transcript AT1G20910.1 (locus AT1G209 10) derived from phytozome v7.0 (chr-ID Chr1; pos 7280636 to 7281013 reverse strand)
aacctttactcgccgtcgccgtcgctgcagaactggtaagcatatgtttttttttgctgctctctgtattctatggaagctgaaaggtcttctcggcttgtttatctgtggtagttttgattaggatgaggttttgtagtaatagagtgagtgagtttgctccaattcttaattgcgtttagagatagaagagagagagagagagaagctatagtttccaggcggagaagaaagacaattcctttttgtttaatctggaatcaccaatagttagttatatacagtttttttatcttcttcgtttttttcttctggatttgttcttttgtccttgtcttgctgtgactgactactccacaacagaaatcgaagcttaag

SEQ ID NO: 2233 - DNA, 684 bp, Arabidopsis thaliana
  Intron number 2 from transcript AT1G21080.3 (locus AT1G210 80) derived from phytozome v7.0 (chr-ID Chr1; pos 7381147 to 7381830 reverse strand)
atcctcaggctgctcataatttccaggcaagttctctgatttttgaatattgtcaagagaaagagtttaaacactatcgtttgaattggtatttaggaagaactcctttatctttagttgaattcttaggcttcttggcttatgatgtttggaaagtattggactggttactcttgtagatttaggatagaggatgctgtctacattttgtgtttaaccattatcccttgtgcatgagcactgggttcttctacaagatgcttgggtttgttgttttacctgataccatgtagagagctgatcaatggatcattgtattgattaggttcagggtacatctctatatatacatacaacaggataactatcgaatatttagagaaaaggctagtctaagattacaacagatattatatcaaagagtatatatactcttctgtatagtgtttgctttggatggtatagctgttatcatagtcaataaaagcatattagcaggactaacagtgacattagttttttggaaaatccggtttccaagaaattagtatgacaatgatctcagtattctttatctttcgtgatctgttttttttctttggtgaatctttctggatgaggtttttgaaaaatctaagttcttatacaggtattgggagaggcctaccaagtgctaagtgatcc

SEQ ID NO: 2234 - DNA, 596 bp, Arabidopsis thaliana
  Intron number 2 from transcript AT1G21410.1 (locus AT1G214 10) derived from phytozome v7.0 (chr-ID Chr1; pos 7497662 to 7498257)
atctcttttggcctcactcgtctccgtctatcttggtaagaatttctatctaacttataaaccctttttgtatttaggactcttctctgtgttggtgttttggatttgaagtaggagttgagtttctagagtctttattgtatcttgtgcttagggtcatgttgatttattgtctatttgtgtaagatcagatctttttttgttgcttttgttttgaggaacattttagcagtctatatatgattgatttggctagattgaagaaagtgaaaaagctgtttaaatttttgatggaactcttttaagatgatagatcagttttcaataggaggtgaaaccaagttctttaatccagaagagtggtctgaagatgactcttaaatctttgaaccactagaagcttgttcttgtcacttccagtgtattcagattgatctctgtctactacactctttgatgttgtttcttatttttatactaggtgcaacaacaacatgaacagcttgttcttgtcacttccagtgtattcagattgatctctgtctactacactctttgatgttgtttcttatttttatactaggtgcaacaacaac

SEQ ID NO: 2235 - DNA, 640 bp, Arabidopsis thaliana
  Intron number 1 from transcript AT1G21630.1 (locus AT1G216 30) derived from phytozome v7.0 (chr-ID Chr1; pos 7581593 to 7582232)
tccttgctcaggttcttcttcgaaatctgcatctattttcttcttttgtatggattattgagaaacggcggagaatacttgtagttcctataggttttgaattggatctttgatctatgggatcgttggttgtgaatgggatgtattttgtcaaatttgttctttgcggggtggttaataggacctctcttttcatttctggagcttgtagtcaggttgatgtagttctaatggagaatcctttttctaagtgtagaacgctaaatgtgtttgctatccactgtactgttatcagattggcacatattgagctggtatcagatcagacattgtatttatgtagatatgaatagttttaagctcttttgctttcaattggagagtaaaatttgaatgaaaatagcttgttaaatgacagagaagcaacctagatgtgtatacttgtctgtaccgtgcataagccaagaatattgcgtgcattgaaggaattctgcatattgaattttaacatacgtttctggactgtagacaacagcttcagattagttcggatagaagctctttctgagcgcctattatacaactattctttggattgttaatgctataacttgtttctgttttttaatctcttgtaggt

SEQ ID NO: 2236 - DNA, 457 bp, Arabidopsis thaliana
  Intron number 1 from transcript AT1G21750.1 (locus AT1G217 50) derived from phytozome v7.0 (chr-ID Chr1; pos 7645908 to 7646364)
cacgatttcatcgtcgtcgagttctacgccccgtattcaaattttgtgacttttcaatctttttactatttctgttgacatggtttttttttggtaaaaaattgacatgggttttgtgtcgtgttcgtgaatctgggggatctgaatctatcatttgtgtttttggatttgcatgccaatgatttcttattctctcgcttgtgtgatttgaattggcgtagctgatctgttttactaatcagaacttttgttgcagttttgtaatttgtaacgatttgatctattccgatctatgttactatgtaactgagttgtctgatttgaatagtggtctcattttaattttactctgtaattgatttgtgaaagtatttgatctaaatcttcatcatttggtaatccgtattattgcccatcttcaggtgtggacactgcaagcagcttgctcctgaggtac

SEQ ID NO: 2237 - DNA, 708 bp, Arabidopsis thaliana
  Intron number 2 from transcript AT1G21860.1 (locus AT1G218 60) derived from phytozome v7.0 (chr-ID Chr1; pos 7673190 to 7673897 reverse strand)
ttcaaccatctcgacgaacctttccttttgtcttggtatgtctccttttccttcgggaatttcttttggacgtgagattatatgacaaattgataatcaatcacataaaacttgttggagaaaaagtttaaggctctcataaaaaaaggtacacaattacaatttcgatataccgttcaatttgtttgtatgcaaagttaaaaagctgtttcattttcttcttaaactcgtctccctcttacttcgattgcctttggaacaacttcgttgttgggacttttacgacatttttcccgtaatttattcgtggtcgacttgtggaaaactcctgccaaacagtgttaattattatctaaacccaaagattagaaccgaatacggatcaaaccgataaggataagaaaaaaaaagatattataaaacctaatttaaaccgtttcattatagatttggattaaaatgttaatacctataattttaaaaactctaaagacaaactaaatccaatctgaaatcagattaaacgctaaatttggatcattaatactacaattataaaattagttttttagcaaaataaaataaaatagattggtttacttgctaatcagattagatgtgtttgacatttttagcacatgtaactcaattctcgttttttgtctttgaaaaggaacgggattcgaaattggaaaaattcgttccagg

SEQ ID NO: 2238 - DNA, 544 bp, Arabidopsis thaliana
  Intron number 3 from transcript AT1G21890.1 (locus AT1G218 90) derived from phytozome v7.0 (chr-ID Chr1; pos 7684294 to 7684837 reverse strand)
ccggccatcaccttcgtcttggccattattttcaggtttaagttatttcttattcttataaataaattcatcaaacattttatgcttttctttatgaaaaaaaaaagattttgctctaagctttatattgattccatcagaaaattaaattagtattgttaacttaatcaatgaaactactaatatatgttttactgtttgataattatgcaaaaaaattatactttgattcttatcttgagaatattttttgacttttcccaaaccgtgggaacaagattaatagaatcatacgacacagttagtatgtttcatggaacatgataccactaattaaataattaacttatacacacactgaaagaatatactgggtgagatcatcacttccacttacttaagatgtcattataagtctatatggaatctatagaacattactatttgttcatgcacatgtaaatttaatacagtaattaacgattttgggtttttaatataaatttcaggttagaaagcgtgaactttaagaaggtacgaagca

SEQ ID NO: 2239 - DNA, 490 bp, Arabidopsis thaliana
  Intron number 1 from transcript AT1G22050.1 (locus AT1G220 50) derived from phytozome v7.0 (chr-ID Chr1; pos 7772022 to 7772511)
gcctaaaggtattttatacttatagttatgcttttgcttctttctacagcttttcacggttttgatggttgagtctcatttgattcattgcttcatgtatttctttttactctccattgggtttgattgtattaaatttgtcttctttctgcaatgatttgaatgtatgatgaacttttttgggctagtctaggtgttgaactttgtaaagtatgaggctttaatagataattatagttttatagtgtgaaaggtttagttgttgttgtgttaagatcactctagttactgattttggctaaaactagtataagattgatgtctcaaattgtattgtttttgcctggatttttttggtttaggtgtttggtgtttcttggccttattgaatcttatgttgcatttactttctctacttaaggttgttttataattgcattttcaatgtttctctgtttcacagataaagaaaatactccaaaaactgtaa

SEQ ID NO: 2240 - DNA, 639 bp, Arabidopsis thaliana
  Intron number 2 from transcript AT1G22080.2 (locus AT1G220 80) derived from phytozome v7.0 (chr-ID Chr1; pos 7794628 to 7795266 reverse strand)
tagagctaagagaacaggaacaacgacgccaagaggtacatacatttatgggtcgtatcttgtgactctagtactgtagggcatgggattattatccgagaccatgggactaaaaaatgatttatgtatatgtccaatgtttgctagttgttgttttttttgctggtccctcatttgctgtctgaatgtctattctacttgaatttactttatttctgtacgttttgactttgaatatgcatctgattttttttgtatgtttcactttgagattgcctctaaaagtaaaagttctttctgtgtcaatagactagtagtggtttcggtttcttaaaaaacttaactatgtgtcactagactagtagtggtcttggtgtcttcaaaaactctttactatgtgtcactagactagtagtggttttggtgtcttaaaaaactctttactatgtgtcactagactagtagtggtcttggagtcttcaaaaactcttcactatggcttgttaagaataaatttcttgtgatgtcgtatgttacttgtattcgttttttggataatgccattgcaaaaaatattgaaacacttcaataatgtttgagacactgatatgtttgtgtttttgtatttgtttttcagag

SEQ ID NO: 2241 - DNA, 482 bp, Arabidopsis thaliana
  Intron number 1 from transcript AT1G22120.1 (locus AT1G221 20) derived from phytozome v7.0 (chr-ID Chr1; pos 7809120 to 7809601 reverse strand)
tcttcgacttaccagaaacttttggtgttctcacggtatatttcttcatctccggtgttttttaaaattttgtttttttcacatactaatattgttgtgtatatttagaagaaaatatatatatattttttaaagcaaaaccatagcaaaacatatagagtaaaatgcgtttttcaaaagttttataatatttagttaagagataaattataattttaaaaacctataaataattaattattaaatatacatatgtccggtcaaaaactttgctatatccactggtctcatcaaacggtttttgctttgactaactacattttgttggccaattaatatacctcttgttcttgttttctcattctgttacttttcatgtaaatggttgtttttaaaaaaagtcgcatttaaacaaagtagaatagtagtttacgtatataataatattgttaacgtataatgtgaataggagtgtggaggaa

SEQ ID NO: 2242 - DNA, 396 bp, Arabidopsis thaliana
  Intron number 2 from transcript AT1G22310.1 (locus AT1G223 10) derived from phytozome v7.0 (chr-ID Chr1; pos 7882175 to 7882570 reverse strand)
agcaatttgttgctggcttgtcgcagatacataaggtataataatgtttatgttcttcactggttctgtttctagttggattataaaatagacctagtattggctgtggaattggttatagcaaaactaacactttgttactattgaagatatagttttataggatttggtatatgatgttttagtttctgctgctagacttttgattgtccctcttgtttgtttctccatcttcttgaacatgataaaagatgtttacatgaattaagggctgctactgaaattgcttatagttcgtttgtgtactctctgccgttctaggattctagctgttgttatcacttttagttcaggattctgaaaattttctcttttgtttttgattatatagccctg

SEQ ID NO: 2243 - DNA, 767 bp, Arabidopsis thaliana
  Intron number 2 from transcript AT1G22720.1 (locus AT1G227 20) derived from phytozome v7.0 (chr-ID Chr1; pos 8044660 to 8045426 reverse strand)
gatcagaaagagtcagacgatcctcatttgtgtaggtacgtaaatttcagttttgtataccatcctcgaatttattaaaagttagaaaatcgaccttacaaaagtaacgtctacaaaaataactaattcagcatactactgtaaactgttatacattttaatatatgtttataaaaaatatatttgtaactaaagatgaaaagtttattaacaaactaagaatttgtgaataagaaactattccttcaaaaataataattgcataacaaaaaccaaaactgcttatattttattcattactatcaaatataaccactaatttttctttctctctaattttatgttatattaggtataacttcgagtggggtgtactttgttttagttttttttttaattatgaaattttctacgaacatcttttatatgataagacaagaatatgaataaaagttgtgaatatgtatacaatacaataatgtaaagtattttagaactagaattataaactatttaaatagtgaaagtgttgtttatttaagttagttttaaaattaatttgtttctttagaaaatctttgttgatatgttacggagagaaattactttggttatttatgttttagacgttggatgaggtataattcttcttggtaagattcattcgctgtttctggacttgattgtttccctgatcagtttactctaatcacctatgatgttgtgatcaagaaccaccatcggcgtcttgatcgtcttgcttgtta

SEQ ID NO: 2244 - DNA, 517 bp, Arabidopsis thaliana
  Intron number 3 from transcript AT1G22910.1 (locus AT1G229 10) derived from phytozome v7.0 (chr-ID Chr1; pos 8106626 to 8107142)
actcactatccccatctccctctcaatctctttgggtacactcttctatttccctcttttttcatgtaatgatgatgatgatgatagtacatgcatgcatcaaacataacatgataccatttgagaccaaaagaatgccaactcatatttgtctattaaactgaacaatgcaattgcattacatagctggctgtcctctaatgtttccattttctttgtggaccgacactattattattatcagtaatagatcgattaattttcacagtctatagagagatttaaatgactgacaaagtggtcaacggacagcttgtaaaactaaaaattatactgattccatctttcaccaatcattttactctctcatcacatgcttcctcctgtctcatgaccacgtgccacgtgcattcatatttgttgtcactcttaaagtgtaatttgttttgtaaaagcaaaaaacattgatttgatattcgcaggtactctccatactcgccagactactcatcattcc

SEQ ID NO: 2245 - DNA, 583 bp, Arabidopsis thaliana
  Intron number 2 from transcript AT1G23060.1 (locus AT1G230 60) derived from phytozome v7.0 (chr-ID Chr1; pos 8172150 to 8172732 reverse strand)
gagaggtccaagatccgtttaacctaagccttttggtaatttttgcaactttattgtttatttcatttccagatgatatacgttcaattcaattattattaattatgaattgaacatatataatctagggcacccagaatacttctatagtagcttgatatacacgaaacttatttccagtttatatatgcatagacgtttttcagcaagaagagtgttcctcatctttttctaaatgatttcacaatcttaaacatcttgaaagaaaaaaattcacttttgattcgttcggagctttctttattcagattagctaggagcggctgataagcctaacggttctaaaactattttgcaaaaacagtttattcgagtttaaaaaggaatcattttatttgtatgtgtgtgtagatcttttagtaactctgttttatgaaaaacagagaatgttttctattccaatagtatgatttccttttcaagtttttttatacaaacgaaaacattgtgtttgaaacaatgatatttattttgaatgggctctgcaggagaattctatacactcgggatcagtatcatttgg

SEQ ID NO: 2246 - DNA, 658 bp, Arabidopsis thaliana
  Intron number 1 from transcript AT1G23190.1 (locus AT1G231 90) derived from phytozome v7.0 (chr-ID Chr1; pos 8219989 to 8220646)
gccagaaaccaggaacttctggtcttcgtaagaaggttcgttgatcgatccttgtcttctgaatcaaacgaaatcgaattgttgcatctggatcagatctgtttagattttcttgagtgtgattttgaagtgagattgaccatctgattagatttgatctatgcattaatctatattgattagtgaatgatgacaaattttaaatttcgttttcgttattttatttggatcaagttcgagatcacgtttattatatttgatttgagtatatgtttgggacgcttctatgtggtgaatgttgatttgatagagcttgaaattacgttttttgagttggtgtagcgaaatggagactatatggattgaatttgtgtataattgaaactagggaagagcctagttgttattgtcagatcttcgtttaacgtatatacgatctgcaatgacgtttattgagactcactgatcagatctgtttcagatattttgataaaagaaatttgggttgatcattttatccaatcaatcgagtgtcgattgtttgttctactctctgcagatatcaaactagcatctttttgtatctctgattagtatttttttttttttttctaactgtgtaggtgaaagtgttcaagcaacccaattatctagagaa

SEQ ID NO: 2247 - DNA, 385 bp, Arabidopsis thaliana
  Intron number 1 from transcript AT1G23210.1 (locus AT1G232 10) derived from phytozome v7.0 (chr-ID Chr1; pos 8240768 to 8241152)
ctcctggaccgagcaacaagggtacttttctttaaagtttctttaatttcgtctttttgaaatgatagggaaaaaaaatcgtgattttgtcaaaaaagtgttaacaattggttatatactttgcttgtgtgataaatattctcttcattagtttctaataatgtttgtttccgtactttcgtgacccacatgcattagtttagacctaatatgaagtatggaactactttgtttttgttagaaacgtatgaaccatttcacattacttaatgtaaagaacttttgacttgtgtatattttcgacatctacgaaaataaactaagtttatggaaaatgtgaatggacataggtgtttgcgttcgcccaaaagtaccgaggagcgta

SEQ ID NO: 2248 - DNA, 857 bp, Arabidopsis thaliana
  Intron number 4 from transcript AT1G23640.1 (locus AT1G236 40) derived from phytozome v7.0 (chr-ID Chr1; pos 8368493 to 8369349 reverse strand)
tagattcagtacgtttgtgcaagcaaagggagccgaagagtctacaagaatacaaaaaatgtagtggcggacaaggaagggttggatcgaaagtaacaatggaccaatattttcagccatatcctccttttaatctgccaccaatttcttggttcattcgtgatatcaccatcaggaccacaaaaaccctgctcaaaatgcttcaacatgcgagtgttgtactacgagagtgagtctctagataacgatgttataaagacatcaagcaacaaagatgaaaaacgctaacctaaatggtcacacataagtatgttgtaagttctaacaaagctctttaccaatatatcttatacaacgtcaaagcatgtaaacggttcaaccggatgagtcgcgacgtgaatgagtcacgacgtgaatgagtcacgacgtgaatgagtcacgacgtgaatggtacggaaactgcttcttgtcaaaagcatgtttttaatgatcacaaaaatgtttcatctcaacaccctttgatctctatatactcaaataaaaccaactgaaattaaggacaaaactcttaattcccaaataaataaaaataaatagagttcaaaaacaacgaagaattctaaataacccaaaaacctataacctataaaccaattgtagtgatgtccaaaaaaaaaaaaaagtcaaaattttttaaaggtaacttcaatcatgggatgatagcttcttttgtgagtagacggaaataagtttttaaatcttctgaatattgaaaataaatgattccatttaatttttctaaattgtgaaataatttgacttgaagggacaagaggaaaatttagaatttaggattc

SEQ ID NO: 2249 - DNA, 307 bp, Arabidopsis thaliana
  Intron number 4 from transcript AT1G23730.1 (locus AT1G237 30) derived from phytozome v7.0 (chr-ID Chr1; pos 8396693 to 8396999)
tgtacaattcacttgccaagagccagacccccaaggttttgattctaccaatttacatcattcttttttctcctcttagacctttgacttatctagtttgaagattctctaattgcccccaaatgggtatgaaacaagggaaaaagcttttgatttagtaatgaatatggtaactttataagcaagcaagaaagaaaccctaaaattagaaacgagggttaagacttgaaagatatacatttatttcaatgtgattttttttcttcttgcagtttttggtgtttgcttgtgcggattcacgagttag

SEQ ID NO: 2250 - DNA, 531 bp, Arabidopsis thaliana
  Intron number 3 from transcript AT1G24050.1 (locus AT1G240 50) derived from phytozome v7.0 (chr-ID Chr1; pos 8507624 to 8508154)
gaggctcagagcatcttcgacgcgttgtctaagacgtaaggatcttctctttttatacgttttcggatcgaaaaataagctaatctctaagaaggaaacacagcttagagtatacggtagagaggtgggacgagatcgtaatctaatgttgtttagttgaactattagttctttgtaaacaattgcttgggttggaggattttgttttgtgcgtctaatgtgttattcccaaagataaattgttaggatctggacatgatttagtgttgttttgctcttggtttccggtgatgctagtttgcaactatatatatgtaaagtttctatgtttgtggttgttgtagattacatatgttgtgggctctagtgtcaagtatctttagtcttctttgtgatactgatacagttaagaagctgtctagatacatagttttagactacataaatccttaaactttctttgtttgaatttgctttttctctttcgaatgaatcacatgtgaattattttccttttaggcttcctgtgca

SEQ ID NO: 2251 - DNA, 488 bp, Arabidopsis thaliana
  Intron number 1 from transcript AT1G24300.2 (locus AT1G243 00) derived from phytozome v7.0 (chr-ID Chr1; pos 8619901 to 8620388 reverse strand)
tctcatcctttccaaatcttctgatcagttgaaaggtactttcctctcaatcttcgacttgtttctgtctttggatatttgaatttccttctctctcgatcgatttgattgcgtagaaacaaatgtaatcgtttagtttctggatctgaattccatatgatgcggcagccatgtatagctttgaattttgacctaacttgtgttatttagggttctacgaattcaatctatctttattaaccttgttatgtccgctttcgatgcattagaaccttcatgttggattaatacgagagacggaattctcttttgtttcttattctatactttgggatctggaattaagaacgaatgattagtttgtgcatctactagtggttttcttactttgtatctgtttgatatctctgatttccttcacctattgactaccttgtttatgctattctgcagaattggcctcagataacagcattccgttgtctccg

SEQ ID NO: 2252 - DNA, 497 bp, Arabidopsis thaliana
  Intron number 1 from transcript AT1G24440.1 (locus AT1G244 40) derived from phytozome v7.0 (chr-ID Chr1; pos 8662416 to 8662912)
gactgtgagtcatcctctgattctttctgggttctttgatttttactgggtttagggtctttagtatcgattgttatagttggcttcgatgatttagggtttagggccccacaattttacattttcggtcgttatcacgaacttagattattaaaaatcgaaactttgcagaaatggtcaaaaaattgctaaattttgtggcatgcgtggtgtggtcttgatgcatatgttgtctgaagaaatgggttaaatgtgattagaaggatggtaactgaatagtctcacaatttgtatatctgtggtgtggtattgatgcatatgttgtctgtggaaatggtttatgtgattcgaaggatatagtaactgcttagtctcagaattggtatctgtgtggtttgttcttcaggcatatgttgtctgaagggatgggttatgttagaaggattagtgtaatgactgattactctcaaatttgattcagggctgctgagattcca

SEQ ID NO: 2253 - DNA, 530 bp, Arabidopsis thaliana
  Intron number 4 from transcript AT1G24706.2 (locus AT1G247 06) derived from phytozome v7.0 (chr-ID Chr1; pos 8742684 to 8743213)
tgtcgggagatcaacgttctcgtctaatcaaattggtgagtgctagaatttattttacgttttgaaaattgatcattgtttggatttgttagtcttgaggaaagataattctagctctttagatattagtgatcacaaaaagtaacatcctatgaatagattaggcatgtggtgtatagctatcagtagtgtcctaaggttcaaccaaccgatggctcatcctgggcaggttgcaagaaagttcctgattgtaaaaggctacttcatcctaaggagctgaaactttgaccatagtgccttagatgatctattagcgtagtttggtattgaattttccttgtatgcttgatccaatgttctctgatgagctgcttacagaggagttgttagcatatgtcttattttattgaatttgatgattgcgtactttagtttcttccttaaaatattctttctgttctcatttaccatctcctcaaggtttctatgctcacagctaatgaaccaattgttcttttttggtaggcgaa

SEQ ID NO: 2254 - DNA, 551 bp, Arabidopsis thaliana
  Intron number 2 from transcript AT1G24764.1 (locus AT1G247 64) derived from phytozome v7.0 (chr-ID Chr1; pos 8762316 to 8762866 reverse strand)
tgtctgagagacaaagagagaaagctgttgaagaggtttgtttgtgtctgaattttgctatttttgtctgaagctttttcacattttaccaattcttaatcatttcttgatgttttggtaaattatctccatttttggttaagccaatcaataatggttgataaatttcacacatttagcaatttctcagggacgattattaatctctacatttttggttcaaccaatcaaataatggttgatgaatttcacatctgggtcactttattttactacaaagtcttagtttccttgttagttgaagaaataatttataatgaatttaggtgcatttatcgtagtgtggtatttgggcaatgtggttggagaagaacattcagaatttaactttgccttttagttttgatcaattataacatcatgtgtttgttcttgacttttatgtttttaacagtgggattttttatttacacattctcttcttgtggaatgaagtttcctctatgtttttttgttgttgttgtagcttactgaggagcttactaagttgg

SEQ ID NO: 2255 - DNA, 286 bp, Arabidopsis thaliana
  Intron number 1 from transcript AT1G25250.1 (locus AT1G252 50) derived from phytozome v7.0 (chr-ID Chr1; pos 8849565 to 8849850)
ccataagagaaaacggagacccgcagggacaccaggttcttaatatttcctcttttacgttttgaatttttcttattgtctactaggttttctataatctttttggattagttttctattaagttccaaaaagtgttgttgatattactctgtcaagatttctttttcatttctaatgttgggttgccaataatttagcacaagattttttatttttgagattgttttttaccatataatttagaaaatcattttttatcttctgtatcggagctaacagatccag

SEQ ID NO: 2256 - DNA, 715 bp, Arabidopsis thaliana
  Intron number 2 from transcript AT1G25250.1 (locus AT1G252 50) derived from phytozome v7.0 (chr-ID Chr1; pos 8850216 to 8850930)
ggtcactcctgcgactgtggccgcgttttctccaggttctttctcatatatcatcatctctaactgtgtgtatatctataaaaaaaagttttgttaacttagtcgatgttttgtggaaaaccctagctattctatcggctctatactgaggattagtttctcttgggttctccaaatcttttaattttctttgaaattttatttatacaatttaactttctaggtaagattataattggaaatatggaatccttaaactaaaccaaagaatgttttataggatggtgtgtaatgttgttacattacaggtatattttatctataaggcatatagatttgtttttttttaatgtgcatatatagattttgacacagcctaccaatagaagctcagcttgactgttgccagattattttaatttacatatgaagtcacgttgatacccattatggatttccattaccaacactttgttctattttgttaatacacaaactaaaaagtcttataatcacataatacctttccaaagatatctaagtccataactcaattttctattattgctttttcatttgattacgtacgtacaccatcaaacactattgtgttttgttttcaattcttttggttatccactactagctcattcttaattcttctcttgttcttttttcagggttgagagtttcatagagcatcaagatacttgca

SEQ ID NO: 2257 - DNA, 628 bp, Arabidopsis thaliana
  Intron number 4 from transcript AT1G26330.2 (locus AT1G263 30) derived from phytozome v7.0 (chr-ID Chr1; pos 9108506 to 9109133)
gaggtacgcatctcagtttctttttgttaccttcttgagaccatcttgcatgctacttttataaccaattcaaagtcaaacattcgtcattgcctttccaagaatgttcttgcatcctattgtgatgatttggtgaattttttgaaaagacacttgctggcaacatgatcactatctgtgtacttgagagtttcataggcacaattatttaatctgcattttgttgaagtcatggaacaatatagtataagtagtaaacggaccaagaagatatagttaagatgtgcggatctataacctgtgatcatacctctgttcttcctgataagaaggcctcttactgtcttctactgcatttctgacttctcaattctaagttgattcataggcaaaaccatagtacttgggatatacccgccagacaagttgagcatactactttaactaagatttttttcaaatgttttgctttccttcggtgttggtcactagaactatcagttggtttgtagtttattctaatcctaccactgtgatggggttaattaattacttcggtttaaaatgactatgatttttttgttttgttacagttttttggcttcaaaaacccgttggttcagaggtt

SEQ ID NO: 2258 - DNA, 510 bp, Arabidopsis thaliana
  Intron number 1 from transcript AT1G26330.1 (locus AT1G263 30) derived from phytozome v7.0 (chr-ID Chr1; pos 9107711 to 9108220)
ggataagaagtactggagttcatctagggttggttttctctgctctctatcctccattcgtcagtcgatagctcaattcaactctttctgtgttacttttctaattccttagaaattgagaagaaatatagaatcagattgacttcgattactgtaatttgaattattttggatggggctgatatgcctaacgatgcaatgaatcgcgattaattttgtgtagattggtacatttgcaactatcaggatcgatgatcagtagattctctgtttctgaatatttttgatttaaatatatacgttcagtgatactgcatagggtagagagtagagactagatccttaagctgagggtgtagattgggtttgactgttctcgttacttcaacagtgaacaacactagatctattgaaacaacttatgcatatggtgtctcagaatttctatttactttagcttctttttgttcatcagggaaaagatcgtttcccttatcctgtaggctacaa

SEQ ID NO: 2259 - DNA, 307 bp, Arabidopsis thaliana
  Intron number 1 from transcript AT1G26780.1 (locus AT1G267 80) derived from phytozome v7.0 (chr-ID Chr1; pos 9271395 to 9271701)
gaacctcatagctgaaaagcttcaaggaagatctggtaagttaaatcaaaaccttatttattttctatttcttttgacagcaagttaaatcaaaaccttatagatcttcaaaatttcatcaaaaccagtttgtttgattcatctggatctgtcaagttcttaagatccggtgataaaatcaatttttgtttttattagttttcttggtctttagccttctatgtccaatctaagtcctaacgtaattttttttgagttttattaacttaatcttgattgtttttaaagggaagagctgtagactacg

SEQ ID NO: 2260 - DNA, 631 bp, Arabidopsis thaliana
  Intron number 3 from transcript AT1G26870.1 (locus AT1G268 70) derived from phytozome v7.0 (chr-ID Chr1; pos 9313593 to 9314223)
ctaagagattcttcgactctcctgtctctcccaacgtaagctcatattctctcagtaattttttcttaggtattgtttattaacaaagaaaataggattggaagttatccggatcggacgacaagttaagctattattagttattaagatcgcaagatttggttagaagtttttgaagagtaaatacatatctcgaacatggtgcatttttgtgttgtaaagtagtgagtttgaacgagttaaatgagaaatttattgatttaattgttttgtatatctatctttaggtctgagaaagcaaaataaagtcttaagtttttggtagaagacatatttgacaaatattaaatgcgagagattttaatatatgtattttaggtactccttttatgtttctttgatattaagtttaaatcttaaattattgtgtgtgtgtgtgtttttttctttttgtactactaatctttcttttaataagtatgtttattcaaacaatttctcaaaagtaaaatataaaataattaaataaacaaagtgcaaatattattttgaaattagtggacttctattttctataaattaaactcatttgttattaacattttgaatgatatggaccactgcaggattc

SEQ ID NO: 2261 - DNA, 370 bp, Arabidopsis thaliana
  Intron number 1 from transcript AT1G26910.1 (locus AT1G269 10) derived from phytozome v7.0 (chr-ID Chr1; pos 9321712 to 9322081)
ggacgaagtaagcagattgctaaataatctatttctctgaatgtaatcgatcttctatggatagatagattcgttctctgcatatcgtatttgctagggtctctgtttttcgatctcattggagacgagttttgtcgccggaatcgtaaattagacttgcttaagctcggaatttacatgtggattaggttcgttttgttaggttcagtgtcaaaaatggatttttctaatcactcaagtcgcattattagatttgcttaagctcggaattttacatttggattaggcttttgtttgaattgcgtatcagaaaggattcaacttgttattgaaaatgtataaatgtattcaaatgtgtaggacctgcgag

SEQ ID NO: 2262 - DNA, 472 bp, Arabidopsis thaliana
  Intron number 2 from transcript AT1G27020.1 (locus AT1G270 20) derived from phytozome v7.0 (chr-ID Chr1; pos 9378869 to 9379340)
tctcttacgaccacttctttttcaggacatttaaggtatgaatttactcttcaaaaatttggtgaaattgtgtgcaggaggatctaaaaccttaacaaattggtcaaatatattgattagcaagttctttgcaaatacgattatagtaaatctacctatttaacaattaaaaaagtggttttatacttttaattgatgcctttgcaaatatatacttttcttcaagctcatcttgtaatccttgagatcttctaacattaacggcatcaattaaaagtataagcgctaaatggttttaattttatacttttatgtcagcaatttttgagacctgttttttctattttaccagtgtatttgttagtgggctcaaattttttaatttttctttaggcccgaaatacttggggccggcctgattgtataaattgattttttcttttttgctttgggggtgtatgggtttaggtcg

SEQ ID NO: 2263 - DNA, 518 bp, Arabidopsis thaliana
  Intron number 4 from transcript AT1G27030.1 (locus AT1G270 30) derived from phytozome v7.0 (chr-ID Chr1; pos 9382600 to 9383117)
gaccgacttcaagcagcttgccaagtatatatattaactttcaattaatagtcatatatctttacttgataaatttcagaaaagtaattcattctatcaaaatctaacagctagctaattgtaaatacattaatttattttaaataaataaaaatgaatactcttacacgaactatactgtattactctactagtacatatttagtaactaactatttattaaataagattttgggtgataggttcgatggtattaaggacaagttttgatgaacaagtacaaaaaaatggtagtttctaacaaagctttgagaaattgatagatcagcacttaaacagaaaaaaaaatgatagatgaacactatttttttctgaaatgtttataaaaaaagaagaagaagtaagaattgagttttgtttttgtttttaaatttttttattttataactattttaatggttagagctaattatttggaattgtatgtatgaatgatgcagagaaagcgaatttgcggc

SEQ ID NO: 2264 - DNA, 880 bp, Arabidopsis thaliana
  Intron number 1 from transcript AT1G27080.1 (locus AT1G270 80) derived from phytozome v7.0 (chr-ID Chr1; pos 9400705 to 9401584)
acttggaggctggagagccattacgttcatcctaggtatgttctttctttccatttcgtttcttccaataatgtttttttctttgaagagaattattaatcttccatttgcctcaaatattcatatggtccattcaaaaaaatatatctaaacatggtaaactattaaatgaatagccattttagccatgcatttaacaaattatggtggaccgaccacattgatgcctttcaggttctatcgatttatgattaggtatttgttgtcttgtaattcacatctttgtttgttttagatagagtacttacacaatatgacattttcttgaaatatcaccccaaaaaaaacacatttttcttcatatatcaattttcttgatatctaaagataacaaacagtcaatcaaagttaaaaatatatacgtttcataactatgattctctaaatttaaatttcattgacaatacctacaatgatatgccatcacttttttctttcctaatcggtagttgtgtccaacaccatgctaatatcatgactcatgagcacactaaacttcttttgcgagtcatgcaattcaataatctaagaaaatatatagtagcaatagaaatggaatcagaaatcaaattatctgatttcaagtttatattttcgaccgtttcaagtttttgtttaggcataaacctttgcatataacagttataagtttcagacagatcttgagtttatacattaattgaatatttgtatttaacggtccaacttaagttataccagaaccatccattcataataaaagatgcttcatattttggacaccatatatatgttattatctgctgagaccaaaacttactaaatgatgagaataaaggta

SEQ ID NO: 2265 - DNA, 668 bp, Arabidopsis thaliana
  Intron number 2 from transcript AT1G27090.1 (locus AT1G270 90) derived from phytozome v7.0 (chr-ID Chr1; pos 9404549 to 9405216 reverse strand)
tggacgtggaggcttcagggcattaccagcaaaaggtatccactttagattaggttttgttgatttcctgaagtctctgactttcatcaaattggtagtgaatttcgcggactagttgttctgattcattacatactatatagttcagggctttgtggtatgcaaagctcttacttaatctgaaggaggaaattaacaatcacatttctttagttgtggtgagattgagcttaattttcaaggattcagagtttattattgtttctcctataaagtagaagatgtctgaagttgaattatgcagcattagagtgagatgtggtatgagatcattagtgagttaagttgtttggataggatggagaagtacattcttaatttttgatatggcctgttgcttatttgatttttcgactgttctcttggtatttggagaactctatcctggttagaataatctttgtggtgggtctacgatatgagctgtcaatatatttttgtttatacatgtgatcgatgttaacaaactgtgacaatatgtgtcttcactgtagtgaatgttgacatgtttcggtgtgtctcattatatgaattagagaacataaatccctcccatgtggtctctaatgatttatgtgggtctgatattccctgtttacaggaagaag

SEQ ID NO: 2266 - DNA, 719 bp, Arabidopsis thaliana
  Intron number 1 from transcript AT1G27620.1 (locus AT1G276 20) derived from phytozome v7.0 (chr-ID Chr1; pos 9608829 to 9609547)
agagtttcttggatattcctcctcttgtcatacaggttcgtaatcatttattttatttttttcttgctgggaaacttatgatttcaatttcaaaagtcaaaaccatgactcgtattgtttccatattagttaatttcgtgaaagaattatattcgaatttgttttggagggggataaacgtagctcgaatattttaggtttcttaaagttagttggatcgactgttctgtttaaatataattcgtaggaataatctaaattgtttttaaattcctaactcctaaattgattcggccactttgttcttttcaaattagaaatgcatacttttactggtcgtgcataagcattcgatgtatcaataacataaagttattttctactcttaaaatacgtgaactttaataaagagattatatggaagaaaaagaagggcgcatagagaataatttgtctgttcaatcatactctttttcttttctcgtttacacgaaaaacaaaaccctttttttcttgcattgaattagttcattctataagtcgttttgttcaactcatgttatgtgttttattaaaactgcgtttctatgaacttacgtataaagtatcagcaagtttgattattaacgcttgaaagctagtcgaatgtaataataaatcgacattttgatatcttacgaatattaatgcctcaggtgacgtatctccgttgtgggggt

SEQ ID NO: 2267 - DNA, 847 bp, Arabidopsis thaliana
  Intron number 3 from transcript AT1G27752.1 (locus AT1G277 52) derived from phytozome v7.0 (chr-ID Chr1; pos 9663147 to 9663993)
aaggtggccttttgctctttgtctattctaatcccattcagttgttgttacttatttcgttctgaaaaggacatgaacatagaatgaaagattaacatgcctcaatgtttatattactaaatcttaggctataattcttttgtgtctcatcctcgatgtaagctgcctttcctaatctaaactagagaatgactcacaatgttcttttcttaccaagtctctgggactattataccatctaaagcttaagtaaaattccattactcactcaggggtatagttagaagtaggactgttgtaaaggtgatatgactattgtgattattttcacacagtgattttttaactcaaggttagattcctttacatgttccatttggattttggataagctttacgagtattatgtgtagacgttgtgtgcttatgttggttgactcctttacatgtaccatttaggtttttgataagctttacgattcttatgtgtaaaattatgcttatattagtcgacatttgttctcgggtagtttgattatatttcttagaccagctcaacataggtaactgattagagttggttagtcttgggcagggtaaaatagagctagcagctgaacatgtggttcttcttgaatatattggaaattggtattggttgtacgaatcaggtagtgagagtagtccgctcactgatcaagactttctagaatgaattgagtttttcttcttttttctttacgttgcacattttgtaggaaattttaaagattattttctagcttacagctattcaccagttttgtttgtagttcttctgcaggacaagaagttactggacttgcca

SEQ ID NO: 2268 - DNA, 858 bp, Arabidopsis thaliana
  Intron number 3 from transcript AT1G27752.2 (locus AT1G277 52) derived from phytozome v7.0 (chr-ID Chr1; pos 9663147 to 9664004)
aaggtggccttttgctctttgtctattctaatcccattcagttgttgttacttatttcgttctgaaaaggacatgaacatagaatgaaagattaacatgcctcaatgtttatattactaaatcttaggctataattcttttgtgtctcatcctcgatgtaagctgcctttcctaatctaaactagagaatgactcacaatgttcttttcttaccaagtctctgggactattataccatctaaagcttaagtaaaattccattactcactcaggggtatagttagaagtaggactgttgtaaaggtgatatgactattgtgattattttcacacagtgattttttaactcaaggttagattcctttacatgttccatttggattttggataagctttacgagtattatgtgtagacgttgtgtgcttatgttggttgactcctttacatgtaccatttaggtttttgataagctttacgattcttatgtgtaaaattatgcttatattagtcgacatttgttctcgggtagtttgattatatttcttagaccagctcaacataggtaactgattagagttggttagtcttgggcagggtaaaatagagctagcagctgaacatgtggttcttcttgaatatattggaaattggtattggttgtacgaatcaggtagtgagagtagtccgctcactgatcaagactttctagaatgaattgagtttttcttcttttttctttacgttgcacattttgtaggaaattttaaagattattttctagcttacagctattcaccagttttgtttgtagttcttctgcaggacaagaagttactggacttgccaaagttattgga

SEQ ID NO: 2269 - DNA, 525 bp, Arabidopsis thaliana
  Intron number 1 from transcript AT1G28030.1 (locus AT1G280 30) derived from phytozome v7.0 (chr-ID Chr1; pos 9772141 to 9772665)
cacaagctttggcctcaaggcaacatcttcgtcgggtacccttcttatcacttgaaacaaacttttggcaatgaatgtttttgtaggcttttgcagaaatatttagcttttggtttggctttaatctattcaaaaatgtgagtggtaactggtaggttgtttagtatttggttttaagaacttttggaaagaaaaaaaatctgagataagtttatatattaaaatattagttttgtctttaagtttctggaacaaaacaaagctcttatactgtaataacttgcaaaatatatatatttaattctgtctttgagtgacacctacgattttttatctacaaatatttttataataacataaaaatattttattttattatttggttatctaaaatgttctcattggtttaattttaaaattgaatttgtatcatgaactatggtatcttaataatataaaagtgtcaaaacagaatatatatcgattataaatactaaaatatactacatatatatttcaggaaga

SEQ ID NO: 2270 - DNA, 681 bp, Arabidopsis thaliana
  Intron number 1 from transcript AT1G28100.4 (locus AT1G281 00) derived from phytozome v7.0 (chr-ID Chr1; pos 9801366 to 9802046)
gatttcatcctccggagtgtttcaacgaagcttgggtattgtttccatttctcttttttgggttcaatttttggttctggattagcctttgtaatgtagtagttctgcgaatatacttagtgtaattaatcagcttgcattgttgataatccacgcttaaatcgattttgggcaattgctggttttttattatatgattggacagatgaatgcaacagtttctgggttatactctgtttgatttttgttttaataagagattcctccaaaagttttgctgggttttttttctctcctacttgttttaaaaatatcccacttgcaagagtgtgaatttgaagacaaagatgagtcaatctctagtttttggtttgatttcatttgacatttgagtctgtgtcctcaatatccgttttctatatttctttttttgggatttatttcttaaaattttcttgcagtttaaaagttggcaatttggatatgatgattgtgttgtttacctaccatgtgtttatgattctgtctctatcttcttcatggttatataaacatacacatccttttttgataatagtttcattgattgaatgtgatgctgaagattctaaatgctttgatgtcaattttgggtctttgctgattggttaacatctctgtcattaggtacataagtctgat

SEQ ID NO: 2271 - DNA, 645 bp, Arabidopsis thaliana
  Intron number 3 from transcript AT1G28110.2 (locus AT1G281 10) derived from phytozome v7.0 (chr-ID Chr1; pos 9805582 to 9806226 reverse strand)
ataagatcactggttaatcttcttaaacccttcattaagtatcttctttttctttaattctcaattcttgattaaagaaagcaaaaacaaaacccttcagagaaactgtgttttgctgaatctattgatttagactttgcataaaggaacccagacgtttgtgtctttttccctttttcaaaattcagcaacaacagaaaaaaacaacaaatcaaaagtaagattttgtaaccaccagaaatgaaaacagacatctttttacacaccacaaaagctttggctttcaagtttttttttttttttttcattttaataagaattttctgattgagtgagaagttatgatgatggtgttacacagtagtatgacctgtgaatgtcatttcttttgtttgttcttccttttacaggaaagtgaatattattaatattttcctaaaaataaaagattcattcagcttttgtttctttgtccagtctgagactgacaaaaagaacaaaagaattcaaccttttgtgcagatcacatctgaagttattattctcttcttcttgtttccttctgtttgtctttaacactctcaaactctcttttgtcttctttatttccacttcagcaagagacaaccttgtgttcttgcaaag

SEQ ID NO: 2272 - DNA, 503 bp, Arabidopsis thaliana
  Intron number 2 from transcript AT1G28290.2 (locus AT1G282 90) derived from phytozome v7.0 (chr-ID Chr1; pos 9889607 to 9890109 reverse strand)
tttcaacacactcttaggcgctaaacccatcgaaggtttgaactattttctttgttaattactactatttcttccacttcattattcagtttattcactcatacatgagacatacctcagtaacaatctctcaaacaactcaacttggctctgcatacgcattcaaacagtgtatatatctataaaataatacgtacttcatatcttaatcatgacgcatatttcagaaaataattcaaatttgaaaacgttacaagtgggacctttgttacgtaagtagtcaatgtttcgaaaataggtgtgaaataaagagagtgactatgtacacttctgcactcatcagtcactgttttttacagtctggccaataaatttcactacttcccacaaaaataattaaaaacacataactatatccttttattctataaacatatcggactaatatttttttatgggtttgtgcaggtgctacggtgaaactagtgtgtaagagcaagaag

SEQ ID NO: 2273 - DNA, 967 bp, Arabidopsis thaliana
  Intron number 2 from transcript AT1G28395.2 (locus AT1G283 95) derived from phytozome v7.0 (chr-ID Chr1; pos 9970138 to 9971104 reverse strand)
gctctcagtttcacgccgtggttggatcgttggtacttcactctcttctcattgcttattattctctatattgtttagtttcttgatgatagaataaagtttacatgcttagttgtctggtaaatgaaatgcacaaacaaaaatgcttaaagacaaatgtgtttcattttttcgataggtctcttgattgaattgaattgaattgttaccgagtttgatttgatttgagtgtttagtgtagtctttcgtgtgcatgttttagtggagagcttgctaagaagaaacctctttgttgttgaagatgtcaatcatagtaggattattgattagacaaaatgtctgcattcttaagtttgttgcataatagtggtaaactggtaatgatcatatgcttgtggatctccccacattacggttgttgttgttatgggctaggtttagagttgctctgttttacatagaaagttaaaacaagatcttaactttatttagtgtagtgaatgtggattttttatgtgttcatttattcaattaattctaaacttctctggcatctctcagttttcattatgtgtgcattgttgattgggaggtagctctattaggctttttctttcctgaactcaaatttttttggatcctgagttttgagtttctcgtgcaattgtgttattgaactttccttatgcatggtttgtcccagtattaagttcttaggtatatgcccttaagattttggtttttacgaacagaagtcattttttacagatctttttggcatctagaatactccacctctaaataattggacagtctaggaaaacatactactctaatagaaaaatcctttagcagagtctgtcctgtgtcatctttttgtacatatctttacccagttaaatccaatgtcttgaatccattgagaaaaaatcaattttttttgctttgtagggctagacgagactag

SEQ ID NO: 2274 - DNA, 644 bp, Arabidopsis thaliana
  Intron number 2 from transcript AT1G28470.1 (locus AT1G284 70) derived from phytozome v7.0 (chr-ID Chr1; pos 10010708 to 10011351)
tggaatttgttatacgcatcctgagaaacttcctggtatgtaaccctctctttttttttttttttttttgtattatcaatacagagctaagtataaattacagaaaaataaatgaatactattgacgatatttctttctcaattagcaccatgaaaacaaggagaattatccaaaaatgactattttggttatcgcgatttcatttcatttaaaatttacatcttcttcttttcttggggtcaaaagtaagtaacgcatgtttttgcatacggagtctacacaaacactcttggctttaccattttatattagagttttcggtttaaatttttttttgtagaggcatagatattttggttagttataaaataaaaaatcttgctagatttgatatataatatgtgttcagaagatttgttcagaagtgtaatggttggttttatcccaaaaacaaatgatcacatattcacatgcatatagtaaagttttgtgaaataaaattgtctctacaatttggtgtaagattataaaagtgaaatcatcaaatccgatgtgattgatgatcagatcaacatatgcttaacttaagtacatcttgtcccaagtaggagtaagcaaggacgggcaagtacggcacttcttc

SEQ ID NO: 2275 - DNA, 716 bp, Arabidopsis thaliana
  Intron number 1 from transcript AT1G28540.1 (locus AT1G285 40) derived from phytozome v7.0 (chr-ID Chr1; pos 10036007 to 10036722)
attccgtatctgcgttttttctctggtgagattcgtttttttcaaactgagtaactcaattgttatggtttgatatttgttcttgattatgagagtttaggattagggaattggaacgaagttcgtctttgttctagtgtaactgatattaagaaaattgttgaatttgctctagtatgccattgacattttaggattgttataactttatgtagatccttggttcttattgaactactctttgcttgatcctaagatatcgaaatctgtatggactctgttttgtttacttatagatgattaagatcagaatctagttttctttgagctgaatattatccaactttatgcagaaaaaaaagcgaagacggttcatggttaggttcattttgctactcacatatatagaatccatacaaagtgatattataaatgagttccatagtcctctgttttcgcaattggtttcagtacattagcatgaaatatcagaatatggaaggtccatttctcaagtaccaagtatgtttggataattcctaagtttgtgttgcactcaaaatctgcaattcttcttcttctgcttccatgttggctttagctttttcattactagacaaaactcacagttgaaagaaacattttgaagtacaatttttaagatttcacgctcatatgatataaactgattaggctgttttaacctctatttgcag

SEQ ID NO: 2276 - DNA, 657 bp, Arabidopsis thaliana
  Intron number 1 from transcript AT1G28570.1 (locus AT1G285 70) derived from phytozome v7.0 (chr-ID Chr1; pos 10043229 to 10043885 reverse strand)
tttctcaaacggccgcctcatcatcgatttcattggtacgttttctttagttgaagtgtgagtgagagagtgtgtacgaaggtagagattcagatcttagttaatacggtacgaccagagactttcctgaaataattacatccacacaaaaatagttccaaaaagttgggagcatgtactattttggattagcatgacctgttcaagtctagctccatagactttctctattttggtttcacccttcttacaaaaacacatatgaataattgattttaatgtataagcacgtggaaattatgtagtttgttgttaatctaaacacctaccacgcaattagctctgtagtatgtgtgatacgtattacagtggataaatgttttttgcttcatgttgaaaattttgtgagaagaaaccaaaagatctttggctctttcttatgtaactcttcccctgtcttattgcttgtgtgtaactcttcctttaacttcttcttcttcttgatgcttttgcttgagtaacaagtttgattgttgaaaacctaggatcatctaaataaatacagagaagccttattgatgatttctcaacttatagttcttttctttggttctgttcacagctgaatttttgggttttccgcttgtgcctcctttt

SEQ ID NO: 2277 - DNA, 385 bp, Arabidopsis thaliana
  Intron number 1 from transcript AT1G28600.1 (locus AT1G286 00) derived from phytozome v7.0 (chr-ID Chr1; pos 10052446 to 10052830 reverse strand)
gactttatcggtacttctctttctatatgactcgagatgtgagtgaatatcaaattatggtccttgagaagaatccaaaagataataatcaaactgataattgtgtttgaacctatgtgagaagaaaccaaagagttattaattagttatggctctttcttcctctttgtttttgttttatctaaactcttcctatgctttcttgttttgtggcaactttttctacctaatttgtattataatctgaaaatatggagatatttattgcgttacttatgtaaactctttctctgtttttatttttcttgaactgcaagttaacagtatgagaccttaactgattgtctaatttttcctttaatagctgaatttgtggggcttcctt

SEQ ID NO: 2278 - DNA, 563 bp, Arabidopsis thaliana
  Intron number 1 from transcript AT1G29050.1 (locus AT1G290 50) derived from phytozome v7.0 (chr-ID Chr1; pos 10138211 to 10138773 reverse strand)
tactcttggcaacctgaatcttgcaccatcccaaggttttttcaacttttttttttttcaacttaatttacttaaaacttcactctttacataattcaaaatgttttgtttaactaaaacaatcactttagttaacaagaattttggttggagaatatttcgagatctcatgatctttgcatgagttagcacaattattactattttaaaatatattttttcatatatatatatatatatatatacagtatatattgtataataactagaagttggtgatgatatgtttttcatgcactttgttttaaagaaacgtggattgtagagcatttcatttatattatttttacaaatgaaatggaggggtttaaatcagtatattaatatcaaaagtgattaagtggattattatgtgatatcaagaatagtaaaaaaaaggagaagataccatcaagttgtatttaaattaaataatagtatatgcaaatgcaataatgcatgatgatggattgttaattacgtaattaggttcgacggtggggcatttctgaggaaatacagag

SEQ ID NO: 2279 - DNA, 868 bp, Arabidopsis thaliana
  Intron number 1 from transcript AT1G29070.1 (locus AT1G290 70) derived from phytozome v7.0 (chr-ID Chr1; pos 10150063 to 10150930)
ctcgtcgcctgtttccctagcgtctccattttctggtacatcttaaattggttcgaattattgtttgtgtttagcttctggtgatgtaatgtatcaagttcttttacccaattttgatttttttttctggttctttgggtttggttgatttatcactattctcgtgtgttaggctctagcttactttgcaaacacatatattcgaagcttttttagaagaatttgggaattgtgaaacatagttgtcaatggtgaattcgatttgggagtgtgagtgaaagaagccattttgtttgtttctgatatttcttgttaagtttataacaacaagtgaagataacattttgcaacttaagcctcaatttctgatatcttagctcatgtatttgtagccgcaagtaaatgttgtttgatttttagtacaaaaatcttttagctcatgtcgattatttaggtacaatggttatagatttgcttcaatatgtcacatgaacttgttcctcctcctttgatcataattttcttgtaaagtatattgtacgaccattgtagctaggctaagatttgagcagtgaattataagctttgccaatttagcaacagacgttatggttatagctcaagagttaaaagggtaacctaggagaatgcattaaagtcattttggatttgtctgggtcttgattctgagcagtgtgttgagagtttggtattgtatggtgagttctttgggtaattaaaggaaggagtttaccggttccaatattatcagcttgatacactatcaaacctataatgtcacattgatcaaaatggtgttgctgtcttttcaggtttgtccattgcgtttgatctcagcagtcaaact

SEQ ID NO: 2280 - DNA, 529 bp, Arabidopsis thaliana
  Intron number 1 from transcript AT1G29170.3 (locus AT1G291 70) derived from phytozome v7.0 (chr-ID Chr1; pos 10194270 to 10194798 reverse strand)
gttggggtcttgcgtcagcttggtgatctcgctgagtaagtattcaattcgagctaatgttgcgtctcttttgggtatctctactgttgaatgattctttgagctagtggtgaagttaaagatgagaatcattactttgtgtgaaagtaattgcctttacttgtttaaggtaatctaattggtgtttgtagctacaaatttgggaacccattttgattgcatgatcctttgaagtttttgagttaagctttagcaaaaaggaagaagctttattcatttatgattctatgattgttgtgatgtttctatcaatcattctccatttttgctgtgtttagttttgtttcatgagcttagtttatgtttcttagcaactccttatgtggtgactctttatgtcggctctgatatcaagcttagtttgggtttggagtgatctctggttgataagggtcattttagcacaaaggaagaaactttcttatcgattgctttttctcttgattaaggtttgcagcagagatatttc

SEQ ID NO: 2281 - DNA, 452 bp, Arabidopsis thaliana; identical to SEQ ID NO: 1165
  Intron number 1 from transcript AT1G29350.1 (locus AT1G293 50) derived from phytozome v7.0 (chr-ID Chr1; pos 10273016 to 10273467 reverse strand)

SEQ ID NO: 2282 - DNA, 719 bp, Arabidopsis thaliana
  Intron number 1 from transcript AT1G29400.2 (locus AT1G294 00) derived from phytozome v7.0 (chr-ID Chr1; pos 10293697 to 10294415 reverse strand)
tgatcatcgtcggtgttggtaactgcacatttcaggtatttactcttacctcctcactttcgcaacaaattttgatttctgggtttttcatgtttttcttcttcaattgattgggttttctactgaaaattttcaactttttttctgggtttttgtctaaagtctaaaaccccttcttaaagggtttcttctcttttgttatgtcggcgatttcgatcaatagtgtctctgaaagttttcagctttttgatgatcggagattataagaagtaaattgggttagtttctttttacctagtaacctagttctgtgttggtttgatcttcttaatgagtttaatcatgttatttgttcaacgatcttcttaattttgatgttaattgagttaaagcttcatcatttgactattgtgttagtcaaatgctcaacttttagactttcgaaaaaaaaagattactttcacgacttttgtttgatcaaaacttgtggttttgtattgatcaagcttttttgttggttttaggttatggtttcttgcttgcatgttaatttttcagcacatgacttgagatttcaaatgtgttgtctactcttgtatctcgattctcaaagtttatctgacctgtgaagattttacatgtgattattataaatgtgagctaatgcgtttattctcttttaattttgcaaagcagatcaaaagaaagaagttgctaga

SEQ ID NO: 2283 - DNA, 719 bp, Arabidopsis thaliana; identical to SEQ ID NO: 2282
  Intron number 1 from transcript AT1G29400.1 (locus AT1G294 00) derived from phytozome v7.0 (chr-ID Chr1; pos 10293697 to 10294415 reverse strand)

SEQ ID NO: 2284 - DNA, 472 bp, Arabidopsis thaliana
  Intron number 1 from transcript AT1G29550.1 (locus AT1G295 50) derived from phytozome v7.0 (chr-ID Chr1; pos 10330793 to 10331264)
ttgtatacattcggtactatcgaagagttctggaggtgagatttatgtatcctttttcttgttgtatgaaatagtttcttcggtttcactgagaacaaatctggagtgaatatgaaatagttttgaggcagaaccagtagattagggattcgatagctgagctccatgattcgtttgtgccttgatcttagatttatagctatagaaagcgttgtttctatccataaacctgaatttcttcaagttttgtattggagaatacttgaattgtatctgtacataaacctgtaatctttacttaagattgtttccatctcagaagctagtttggtttttgtgtgccttctttttctgcgttttagattatttctatcttcaggtgtcctgtgtatgttatggatgtgtttaaagggctgcttgttgatttcttgatgcagtctctacaataacattcatcctccaaccaagtggg

SEQ ID NO: 2285 - DNA, 499 bp, Arabidopsis thaliana
  Intron number 1 from transcript AT1G29700.1 (locus AT1G297 00) derived from phytozome v7.0 (chr-ID Chr1; pos 10386907 to 10387405 reverse strand)
ctcaccaaacagtctctcttcaactctaaaatcaggttctttcttcttcttcttgtgttgtgtgtttttgattagttgagctactgatttaatacttttctgggtttttactgttactgaatcaatgtttgaaagttttaattttggatttttctgttaatttgctcatcccatatgatgttgtatgaatttctgggttcgatgttgattagtgcaaattagcttaggtggagaatttaggctattaccgtcttcttcaaagctaattgtatattcgtaagctaattagaaaagaatttcagaatcttgttgtatataatcccaaggctaggactaattttgattcatagatagatgcttaggtttcagatttagagaaaatgcaagctcatttacaagccaagacacataactaacctaaggctgatcatagcatattaataaggctgaaaaatctcattttgttgagaacatttctttaggtggcaaaacaaaatca

SEQ ID NO: 2286 - DNA, 638 bp, Arabidopsis thaliana
  Intron number 1 from transcript AT1G29750.2 (locus AT1G297 50) derived from phytozome v7.0 (chr-ID Chr1; pos 10419717 to 10420354 reverse strand)
ctatcaaattaccgcagcaagaaggttggttttcaagttacttcctttctgtttttgggtaaaaaaatttgaactttatcgtttctctttcctttttggattctgggtttacagattctatgcaaagtttgctcctttttctcattttatttgtaaagtttccttttttgggttttcattatctgttggaaatgggatttcatgattggtagccgcaacaattccggtgacgttggggtttttcatttttttaattgaagttttttgagtccaaaatctgcaggtgttaattgggtgtgattaggtccattagggtttattaaatcattttttgattgattatggtttgaatccccttgaccattgagttaccttgagaaagaacttgtcatatttttgtattaaactcttcattaggccttctttcacatgatgatgatgatgatgaattgatgatcctataaactgttgaagcaatcattcatattttgttgtggttgatgaagagttctagataaattgtttatcctgctttagtttgatgattgttaaggccaagaagagtgtaattcttgttgttgctcaagtaattgaactgatattttatgatgtttgcttctgtgtctgttccttagtcg

SEQ ID NO: 2287 - DNA, 637 bp, Arabidopsis thaliana
  Intron number 3 from transcript AT1G29810.1 (locus AT1G298 10) derived from phytozome v7.0 (chr-ID Chr1; pos 10436260 to 10436896 reverse strand)
tgcttctggagctagaacattttgctccctcgcaggtataaattagtcattccgctgctctaccatttgatatttgaatcaagaattccttgttttgactgaatcatgacatgcttcatttgtttggtacttgtgtttattgaggcagtagccaccctaagctttttctatgacataaaaacagcaaatgatttcactcacctctacaatattagaacaacttctgttggagaccccttagccttttcccatcgtccgtggtgaattaggggcaagatgatgacgagtctgtaagaataagtttcaaacaagtgtcaatcttccattgtgtaatgggaagacaaaagttacaccagatcaattcatgtatcagtatccatcattctcatgtccatactagcttaagtagttttctgctgtcttgtagtaaattccaacttcttttgtcatgtcgtttctaaagttttgaagttttggagaatattgctatgatttccttgtgtcgcccttgtaaactacttcttcagcatttataaccaaaaactctaaaaccatgtaaattggttattaatatggtattcttttcgctctgttttcatatctttgtcctagatttatcaaccaaaaagtgtgtgcc

SEQ ID NO: 2288 - DNA, 878 bp, Arabidopsis thaliana
  Intron number 1 from transcript AT1G29850.2 (locus AT1G298 50) derived from phytozome v7.0 (chr-ID Chr1; pos 10447837 to 10448714)
ggaggatagagacgaagaagaagacagctccggtgagttttttttgtctctaattcattacccttctttcaattttcccctatatacgttttaggaaactcgaatttttcttagggttttgggcattgagttgatttcgttcctgcgtaacaataatttgaactgtttgttgattggaaactgggttcgcttgaattatatttaagtttgatatcgcttagagttttgaaattcatgattgttactttagggatttggatcagtggttccgtcttggtggatctgttttaattctaggtggtgcccttttttctgaatctgttttgtttgaattggtgtgtgattccatgttaaagttcttcatctatatttgtaaattattctattggattatgttgcttttgacattgatctttgcttttaatgatctctttgttgatttggttttcttcacaggattctcttctttgttcatggtttattcatggttcttgagttgtattaccgttcagtgaaatcaactcattgctttcactttgatataattgaaattgatgatcaaaattatattcatctctctaatattaatattcaactctggctactttcatttcattgcactttagtgtagtgtgaattatatgtgcttccatttagtagggcagtggttgttgggtgtattatgaaaaaatggtcctaggaaatgacggagtcgactgtttttttagatgcagttgatagattaatcttcagtataatgttagccaaagataattcatcttcaaatgttaaaacactgcatttttatgtttatatttactccttttacttcctgttctgtaggctgatcctgaactagaagctattagacagaggag

SEQ ID NO: 2289 - DNA, 581 bp, Arabidopsis thaliana
  Intron number 2 from transcript AT1G30040.1 (locus AT1G300 40) derived from phytozome v7.0 (chr-ID Chr1; pos 10538723 to 10539303)
ctcttcaggtcccttttcctctcttttttctttttttttatatatatttaaaaatctaaaattagtttgataattttatgtatttaagatttgatgtttgtgtttgtgacattctctgcggtttgtttggttggtcaaattcaaaactagaaaaaccgtatatactttttttatcttaagataaagttattaaattaggtaagtgatttttttctttggttgctaaattgggatattcaagagagtgactgagatcggtgtggagggtcgacaaaaattctcacatgcgatttcttctcgtctcttctctttttccatttttataaaaagagaatgggttttaaagttcctttttcttgtgtgtacgtctagaaaatctatgtagacactgagactcacgtgacaattactattacactatggacatgtacgcagtactactattcttttataagtgacatttcaaaaacagaccaaaaaagtattagagaatgtcttttatcttaattttgactcctacaagattttcaaaggctaataagacgcatgtattaacaatatatacccggtgattacaggtt

SEQ ID NO: 2290 - DNA, 744 bp, Arabidopsis thaliana
  Intron number 3 from transcript AT1G30120.1 (locus AT1G301 20) derived from phytozome v7.0 (chr-ID Chr1; pos 10585321 to 10586064 reverse strand)
tagacgaaggaggcggatacgtctgcgagcactgggtttgttttgcacctttttagctttgcaaattcgattttgattttactcttttgtgctcattgaaggatttagacactgcttgaacaaatctctaattggatctttcatgttctgttctaaatgattagattgtttcagtagttttattacattttagtggggattcaaagttggataacgatgaggaagtttttaactatgtgctattgggtgtggtgatgtaggatcctagccagttctagagtagtcaaaacactaatctatagttgatagtgatggcaaaagcttaatgtgttgcatgtctgcttccagtaatcattctagtgatgcctttggttgtgcttatgatgccaaatgtttaggttaaaccgttaaaccatttagttcattcccatgaacatagtttaactctcaagaacatttctggacatcatacggcaattggttaggcttctgttacatattatgcgactttccatttagtgaatgtttctgttaggggtttgtgtgttgtcttcattttcacataagcaatccatgatgatgtcaccatggcattttctttcatgtattagtcgtcacaaatagcacattttctttatctacctttaaacttccatgctcatattcaatataagtgtcatgatgatgccttttttttgtcaaaaatacaaagtgtgaccaatcttctcgtatgaatttacagac

SEQ ID NO: 2291 - DNA, 516 bp, Arabidopsis thaliana
  Intron number 1 from transcript AT1G30210.1 (locus AT1G302 10) derived from phytozome v7.0 (chr-ID Chr1; pos 10629729 to 10630244 reverse strand)
cactgagcttagacagttgacacctgtaatccaaagtgagttttctcttagcttgttggtgatttttgaggcaaaccctttatttatattttaaaatctctgctttatttaatgtatcaagattcttattttgcaaactgccatgtaatttagggcaaagcttctagcaagaacaaaatcattagtcttgttcatcttcttcacttaaaaatctctcctttaatttctgggtatttattattttcaccaaagctcataatctttaataaattcctataggtttcataggttttatataattaatttagggtttctgaaaaaggctcttaagctataggtctatgaacatgaatagatttggcagatctacaaatttttattatttttagcctttgagcagtgactttaatttcttcttactttaatttttgcagattcaaaagtttatcactgcaacatactcaggctttttacttaattatcatagctctgataaagtatgagagtagcgttaca

SEQ ID NO: 2292 - DNA, 379 bp, Arabidopsis thaliana
  Intron number 1 from transcript AT1G30410.1 (locus AT1G304 10) derived from phytozome v7.0 (chr-ID Chr1; pos 10738978 to 10739356)
tttgggtctttttggaacaatcacgaagcaaaagtgtaatccttttctttcttcttccccccctaattcatctctctcctcttctctgttgctttgggtcttttaggatcactaaagcgtaattgaactttagtaaaggttttagctttttggaaccttataaaatctcacttactttgagtggcttataaaaaaaataggcccctttttttattctactggtcaattcttgctattctgctgataattgttgccttggttaatgttttgaatttgggcatgaaagtgtgtgttgcatagacttttcaaaagtatttaagtaaatgcttctttgttgtttttttccagtttgagaattcaaggtttgagtgaaaaagag

SEQ ID NO: 2293 - DNA, 1040 bp, Arabidopsis thaliana
  Intron number 2 from transcript AT1G30460.1 (locus AT1G304 60) derived from phytozome v7.0 (chr-ID Chr1; pos 10773481 to 10774520 reverse strand)
agaacatctcatcctttgcctcaaggggtaaataggtgtgttcagagtcctaaggtttttaattgggttctgtaaattatgtttatcaattcaagacgttgttattggttcagtattaaaatattggtttcttataagagctttgaaacaatttagaatgtaactggttatttgcaagttcagaatgaactttatatatacagatatattttcaactttatctacctgattttaggataatttttctttgatagctagttaaatttctgagattttatttgacctcaactgttacaaaaacaataaatcgacctgcattgggctggctttaccctcttgttttgcttttgagtattattagtctccttttttccatcaggtacccttcccccttcagctaaaatgtgggaaataggctttgcaaatggtggtatacatatactggtttttgttgatatttttatcttatagatgatcatagtattttaagatttatgtcaaacagaagcataccgattattctctactgtttctgtaaggctagaatacatatagcaccattttgtcatttatttagtgctgtgctcaatggcctaattgccagtggttttcagcaggactcctgcgaccctaagagtcatgttttctttatttcagattggtcaccaagagttgattgcctattcttgtgctctagtgttgctattttgcctataacgtaattttattcagatattagtaagagattgtgtaattcatgtagctatatcttctaaaatcccatacaattgatctaaaatgagtgtgtgaagaagaatgggattcttcaaacgttgtctagtatttcggctttcgaagatgctcatcttgactgctcgatattaagtttgatgtaactcttgtatgtttgattttatggattcgttaactgtatatataccttgtggtatattattactcttcataggtaatcccttacataatttaggatcttgtttttttcaggtattttgtagttaaaagtaacaatcgagaaaatt

SEQ ID NO: 2294 - DNA, 764 bp, Arabidopsis thaliana
  Intron number 1 from transcript AT1G30470.1 (locus AT1G304 70) derived from phytozome v7.0 (chr-ID Chr1; pos 10779438 to 10780201)
gctggattatcaacggcgtctgccgtgagttttcttctccctcaccttttcttttaacggcgtctgccgtgagttttgggagaataagtcactccattgagatgagagttttagctgtttgtttgaatcctgtacacgtttcttattgatggatttagctattagtgtttcatttctggggattttggcagcttcctctgtttttatagacgaatatgttggaaggtgaagagattatatatcttgaccagtaatgaagtgtcttcttgatgatatatgaacactgtcttactggaaagtgggagactatcccttgttgtcgaagggattgattgtttttttgaattctgcatttcatagacaagggaggtgagatgtatagagtgacgagaacttttttgatgtgattagagaatgtttttagttgatggaaatcctcattcttcgccaatattctagtgataacccagaatcatcaaaagaacatcaaaatatgcatggatatgtgttaatgaaataatactgaatacattagtagaggatgaggaggtaaacactaattttgggttctttctggtgtttcgaaggggagtttctttgtggagttccatgtaacttgtgtgtttctgataatatgttgggacgttattcatattctacaatattttgctggctgcttgcgattcatagtcttatgtgctttctggaaatttcgaattttgtttgcaggttgaagcaattttggataaagatagtttcacatt

SEQ ID NO: 2295 - DNA, 996 bp, Arabidopsis thaliana
  Intron number 1 from transcript AT1G30480.1 (locus AT1G304 80) derived from phytozome v7.0 (chr-ID Chr1; pos 10791153 to 10792148)
gtgaaccaaccagggttttgcttcttagaaacgtatgcgtttcaataacatctcttatcagcttatggattcttcagttcttgagtttggatgccacagtcttagttgaatcagtattagtaggccaaagtcaatttagaacttattcaaatcaaacgtgttgttatactaggacacactttgctacaatgatttagaacggtctgttagaatgatattaatgtattccaacatttgatgtggtcttagttaagaaattgttactgctaattgttggcagcatgtgagggcgtagtattgaattacggttgacaaagatgtctctgtggaaatggaattgagtaatgggatgccattggaaagtaggaccttttgtgactatgttgattttttcaagctatcgtgaagttaaaagctttggcagttttgtgatgataattctttgttggtgaagcttgtagcttagagtgttacttatgttatggtagcctagtacactgctggattgttatagaatttagattgcctactctttggaaacaacagtttaagttacagtatctttccctcaaatagtcaaataagcatttggaaccgtactttggtttttggggatagcctaacctgaggctttaagcttggattgccaaatactagagagttgacaaatgaatccgtaggggttggcatttgatgaagtaatttttatggttcttggattactgtaataactcgcaagatctattctttctgtgtttttttttttcatttcttgactaatttttgatggaaattccaaccatgtagttattggtatgtgaatgaatgcatcttcacattgattgtcataaacgtaggcacattcttgttattctgattgttttcaccataacaagtacttgttggaaaaatcgtatcttccttgtctcatgtatcaattctggttgacccatcacctgttttctctgtgtctgaaggttgggccaggacaagtag

SEQ ID NO: 2296 - DNA, 328 bp, Arabidopsis thaliana
  Intron number 3 from transcript AT1G30500.1 (locus AT1G305 00) derived from phytozome v7.0 (chr-ID Chr1; pos 10805273 to 10805600 reverse strand)
tagtctactcagacccggggactacaaattccgtaaaaatggaaatgtttgatcacacctctcttgattattgctaatgagtttcgtccaaatctttgattgccttgcctttgaagctagctaatttgtatttttttgctcttcatatgtagcaccttctagttgataatttctaggtttaactacttcttggcaccatgactaatacaatatcacctttctgcattttcagacgatatacaagtaacaaaattttgttcatgttttatgtatgtgtattcttataattaaaggcacctggacaatatccatatccagatccttacta

SEQ ID NO: 2297 - DNA, 384 bp, Arabidopsis thaliana
  Intron number 1 from transcript AT1G30510.2 (locus AT1G305 10) derived from phytozome v7.0 (chr-ID Chr1; pos 10808598 to 10808981 reverse strand)
tctcactctgctgtttctcaggtcagatcctccacacatttccttatttttttagtcaacgattggattttatatcttcttgattatagtgattatagctggagagtttcgaatcctctgttttgtttaggggtttgatttgggtcttaatgttccatttgtctgttttcggagaaaacgagggaatttttaaaaactttattgatttgaggttttattgatctttaatctgggtttaggcttgtctttaattcgattaacgatcttttcttagtgatcctgtatttgagtttcatttgttatcagaaaggagttttaatctgatggagtttaaatttcttctatacaggctggtgctgtctcagtttcaattgaaaaccaacg

SEQ ID NO: 2298 - DNA, 522 bp, Arabidopsis thaliana
  Intron number 1 from transcript AT1G30510.3 (locus AT1G305 10) derived from phytozome v7.0 (chr-ID Chr1; pos 10808598 to 10809119 reverse strand)
cctttgaggagattcaaaggatcgtgttgcttactgtatttaaaaaccctagagttcatcatcatcttcctctcattattgattgctctaatcaggttccgacgagactaataatcctttctcagatcgataacaatgtctcactctgctgtttctcaggtcagatcctccacacatttccttatttttttagtcaacgattggattttatatcttcttgattatagtgattatagctggagagtttcgaatcctctgttttgtttaggggtttgatttgggtcttaatgttccatttgtctgttttcggagaaaacgagggaatttttaaaaactttattgatttgaggttttattgatctttaatctgggtttaggcttgtctttaattcgattaacgatcttttcttagtgatcctgtatttgagtttcatttgttatcagaaaggagttttaatctgatggagtttaaatttcttctatacaggctggtgctgtctcagtttcaattgaaaaccaacg

SEQ ID NO: 2299 - DNA, 477 bp, Arabidopsis thaliana
  Intron number 1 from transcript AT1G30540.1 (locus AT1G305 40) derived from phytozome v7.0 (chr-ID Chr1; pos 10818499 to 10818975 reverse strand)
cgtcgccggttgcaccaatcgcaacagcgttggaggttccgtctcatattctctattcaattttgaattttgaattcagctttttgggttgttgaacttttctggagtttgttgaattgcgataattttagctccgggcaatagatatcaatgaatgtttggctttgataatcattaataggagtgtgtctgatctaatttaatcaagttctgttgcaatgtggtacttgctcttagctgattctggaattgaaaatggatttgttcttagctgaatataataaccattgtgtgtgtgttttggttctagttgtgtggaattaatctattttgtgtgtgcggtattggttttgcttgcagcaaatatttggatatagctgtggcaccacttggatatttcttccatattaaagtcacctttcaatgtgcatcgtgtatgcagaaactgcagcaagggattcactagagcaagtgatt

SEQ ID NO: 2300 - DNA, 432 bp, Arabidopsis thaliana
  Intron number 1 from transcript AT1G30600.1 (locus AT1G306 00) derived from phytozome v7.0 (chr-ID Chr1; pos 10844295 to 10844726 reverse strand)
cttaccgctacttcgtcccaaatttacagaacattgtatgtagaaaaaagttaccattctttctttttgttcttcaaagtttcaatctttatccagggtttgatttcttcgtggaatcgctgttgatttttccgggagggtttggtctttttctcaatcttcatagaccgacattagttgaaattcgtcaattttgggtcccagattacttgtctcttgtgtctttggtcttttcctgaaagtctaaacggatatataggcatgcctgttgaattcgtgctccaagttgaaacctttatgttgttaaacgaagctattaacattaatgtctaatgccttcaagctgaaacctttatgctatagtatgattataatctctttgtttatacatatataggaaccgaagtgcttctattattagagttcacgatt

SEQ ID NO: 2301 - DNA, 449 bp, Arabidopsis thaliana
  Intron number 2 from transcript AT1G30620.2 (locus AT1G306 20) derived from phytozome v7.0 (chr-ID Chr1; pos 10855016 to 10855464)
atctttcagctgaatttcactttgattttatttaggttagtcttcattttcattttagatatttatgtttctttttctgagttttttgcattgtcatttgtcatgggaccgacattgctccgacaagcgtttcccaatctggggttgatttttatatgtttccaagtgttttaattcaaataaggtttccggcaaattttgaaacttttcatcttcaaattgctgcttttgggaaaaagtttcagcatttggttcttgtcaattcttatcaatgctatcttaactcttctttgtgcatttctgtttgagttctgtggctaaggttgtttttggagataatttaatctcgagaaatttctcagttttgtttttgggattttgtagaatattaagtcaaagtttgctcttttgcagctgatttaggaagttggtgatcaaattacatctag

SEQ ID NO: 2302 - DNA, 613 bp, Arabidopsis thaliana
  Intron number 1 from transcript AT1G30620.1 (locus AT1G306 20) derived from phytozome v7.0 (chr-ID Chr1; pos 10854852 to 10855464)
cccctttgttttcttcttccaggtacgttttcttcaaaagggcctttttttttttttttttttttttttggcgttttctttcttcttccgtttctgcttcttctgagaattcttcttcacattacctttgtcttctaggattttctatttcctctaaaatcaggatctttcagctgaatttcactttgattttatttaggttagtcttcattttcattttagatatttatgtttctttttctgagttttttgcattgtcatttgtcatgggaccgacattgctccgacaagcgtttcccaatctggggttgatttttatatgtttccaagtgttttaattcaaataaggtttccggcaaattttgaaacttttcatcttcaaattgctgcttttgggaaaaagtttcagcatttggttcttgtcaattcttatcaatgctatcttaactcttctttgtgcatttctgtttgagttctgtggctaaggttgtttttggagataatttaatctcgagaaatttctcagttttgtttttgggattttgtagaatattaagtcaaagtttgctcttttgcagctgatttaggaagttggtgatcaaattacatctag

SEQ ID NO: 2303 - DNA, 720 bp, Arabidopsis thaliana
  Intron number 1 from transcript AT1G30650.1 (locus AT1G306 50) derived from phytozome v7.0 (chr-ID Chr1; pos 10869146 to 10869865)
atatcttcccctcggaatctaggccttaaaagaaggtacaaaatttagtttatcaacttttctcgatcttggatcaaatgattcattaattgttagctttacacacgatatattgaattaatcaaagatggttttgtgttatgatatgtataaaataattgggatccaatttacattatttttatgataccatatagagtagagtgaattagggttctataggccacttggtagctaggtttataggaatctatcaatcgctattaacattcggaaaaagtcggatgcatgcattgctaataatagaatgaattatatatggtttgtttgtttgtgtgacacttccctttattgagttttatagggggttttattttatttttgtttgtcttttatcaggatcaatatcataatcatgaatttgtgtgtatatagacactatatatataattatttagattcataagaagaaggagggttgaggttgaagacacatgcaggagaatctatgaactgtcacaattaaaagaacatataactgcgttacatcatatcttaaacccaactgataataatgtcccactagtccactaccaaacttagctttcataacttaatgtacacacgtgtcttgtatatagatcaaaaaccacacgtttgtaagtatgtatgtacttggatgcaggaagagtcaggcaaagaaggtggtgtgtattccgg

SEQ ID NO: 2304 - DNA, 804 bp, Arabidopsis thaliana
  Intron number 3 from transcript AT1G31070.2 (locus AT1G310 70) derived from phytozome v7.0 (chr-ID Chr1; pos 11085515 to 11086318)
gcaaattaggtgttgtgcttttatctggtggacaggtaaaattaattaataatgcaatttttcttaagctatataattaagttgctacttagagtgctaaatgattctcttgttgatggttgagattgggagttttggaataatgctgctactacctaacttaaaaagttgaattaattagattataagactttagtgtagtgttgtgtactttatataattgctatatagtagtttgaaatggaaataaaagtgttgtttagataagtagggttattaaaagagacaataatgggttctattatattggcaaacaataattcatgattagttttcagacaaatcactgtcggtggtgtttttgagtaattgcgttttctaggaggaaccttctgattaactataacggtgctgatgttgatcacgtgatctgaaagatgctttataggattccgtaactttttattattatattaggaggatgctctgtttcgtgtgttgtaaggaagcttgaaaaaaaatctggttttaaagatacgtgttgcttgatgtattacttagtttcggagattcataacttgagaagatcttttatacatcccagttaacttttttgcaacaatcctcaagtgatttgataatgaacatggtttggtttgattacttagtttcggagatttgagaagatcttttatatatcccagttaactgttttgcaactatccttgagtgatttgataatgaacatggtttggtaatgaaactaatgtagggaacaaggcttggaagctcagatccaaaagg

SEQ ID NO: 2305 - DNA, 599 bp, Arabidopsis thaliana
  Intron number 1 from transcript AT1G31140.1 (locus AT1G311 40) derived from phytozome v7.0 (chr-ID Chr1; pos 11118184 to 11118782)
aacaggctctacgatttctgctccaactctaccaggtttatatataaaatcatgcatatgtgtgttcttgttttggtaaaacaaaaagaaaagaaaatgaatgctctttaatatggacagaaaaaaagagttattgaagtttttttttctagttgtaattaatcaataccatcatcacttggtttcatcttttctttttcgttggtttacttctttttttttgtgaaactttcgttgatttacttaagagaaataaaatgctgacaatcttgcctaggaaatgagatgattaatcaaagtgttgcttcatttagttttttctgttcactcgtacgcaagtttgaaatgcttttggtcatctttttttttttcatataatttggtattgtatcctttatatgctttcttgggatattttattatgtaccaggtttaattctatggaaagttatgatctatgtaggaaaagttatgatcttttgtattatggatccaaaagaaaattcatattaaagttcattcagaaataactcatcttgatataaaaaatttcttctgttttctagttcctaagtttatttaatttttgtaacatcagc

SEQ ID NO: 2306 - DNA, 391 bp, Arabidopsis thaliana
  Intron number 1 from transcript AT1G31440.1 (locus AT1G314 40) derived from phytozome v7.0 (chr-ID Chr1; pos 11258064 to 11258454 reverse strand)
cgaagctcagagagcaagtcgcgaggcaacagcaagtgggtttctttctgcttgtaatagatttctgtgttcttagatttatatgtctggttactgagaagaatttgttgtatggatttctaataaaggtggaatctttgaagtggttgatggttaatttatagtcttgggggtagataggattgttgaggtatgaattggttatagttaggtgaaaagtatgggacttttttcttgttttagacatagattttgccttttttgttttgattttaggtttagattaccttctaataatatcagacaagattgtgttatttgtgtaggtttctttatttgtattaaaaaaataatctggtttttgtgcaggcggttttgaagcatttagggc

SEQ ID NO: 2307 - DNA, 1060 bp, Arabidopsis thaliana
  Intron number 1 from transcript AT1G31670.1 (locus AT1G316 70) derived from phytozome v7.0 (chr-ID Chr1; pos 11337791 to 11338850)
tcctagccaaggcatcggacacaaggatccacctggtgctccataaaaaaacaaatactcgtatccatatttggtttgagaaactgatgttcttggtattgatccttcttttgtgtttctctttatgcaaacggttttattttattttatatggagtggttatgaatatgaatcaattaaaagaaggatgggttatatttttgttcttacttaccaaaaaggtgagatcaatctcccattattttattttttctagtccgcacaccactactttgttacaattaatatattgataatttaacacaattactaaaattgaagtataactagatgtgaaaaacatcgtccagaacagaagttaattaaataccacttgtacgtctgcatcttcaaaggcagatatcgacattttgatgccttgatgtcaaaggtatcgacatatgtgtataacacctcgatttacttgtcaccctcaagataggtttactcccttggagtatctttctaactctcttcccaatgtataacaatgcttcccgatatctctttatctttaaatcactctcttctttcccgtctacgtttctaaacttttttatatttatctcaacatttaaccttattcataaattaatgtctaggaccacaaaacctatttcacaattatttttttggtaaataatccaattaacaagtttattatgtgtttcaagtgcaaaagaaagggatatatttggttatgtaataaaagtatacatggaccaccaacccctaattaacatgtttacttgtgtgttttgtattatcgaaagggtaatatttagctatctaataaagtatttgcatatttatttcgtttgtttaatgtaatacaatatacatggatcataaaaccctaatttacatgtttacttgtgtgttacaagtgttaaagaacgcgagtgttttggctatataaagtatacaaagcccaagtccatcaaatcacaaagtaatgtctcaattacttctcttcaccatcttagtattttcttccgtttttgtaatcggatccttaagc

SEQ ID NO: 2308 - DNA, 659 bp, Arabidopsis thaliana
  Intron number 1 from transcript AT1G31690.1 (locus AT1G316 90) derived from phytozome v7.0 (chr-ID Chr1; pos 11344749 to 11345407)
gacacgtcgtgaggtaaaataattaacaagtataattaaaaacatggttttaagaagaaaaaaagaaagaacaattatggctatagatcaaatttggcaaacaatagttaagcctatttatggaaatcaaagtcttaaagtcggtaaaaggtgcaaattagatatgcggacaaaattttgaattaaaatgatatgtcaaaagttgtaggaactgaaactttaacagtcaaatatacctttaaattatttttctctaaattagccaaataactgaggagctcaacttttgaatctacatctttcttactatcttactaatattatttgaaaaaaattatttaatgggcatttaagttcaaattagatttaatagtgaagaatttgtacatatcattgttaggtgatcatttatgtggtattgcaaaatatggtaaaaaccaatgtcttcagatctgacgcaactccgcagttgaacgtaaatccgatgatccaatcactaatccggttccggtctaatactaaaattcgttaattataaatatggcttctgctatataaactctgtgaaagaaacatggagaccgacactataactgttaaatatgaaaataaaaattacaattttcttttattgatattttcgatgtgatggtgaatag

SEQ ID NO: 2309 - DNA, 356 bp, Arabidopsis thaliana
  Intron number 1 from transcript AT1G31830.1 (locus AT1G318 30) derived from phytozome v7.0 (chr-ID Chr1; pos 11420363 to 11420718 reverse strand)
ggagatctcaagacacgaccctcgattctctcacggttcgtgcttcttcacctctcgtaaagatttattcttttgtcatcgttcactaattttgacttttgagtgatctagttctgagatcttttagtctaagctcctttttcgttcttttggattttgttaatgcatattgaagatacccatctgagaaaagtaataaaaaactgtccttttttgctttcccaattacaacgaaccctaaattcaaaattcagaatctgtagcaaatttgagtaatttataaggattgttgcagataacgaaaaccttattgggatgtgggagagttctaatccgtttaaaatctggatgacgtt

SEQ ID NO: 2310 - DNA, 404 bp, Arabidopsis thaliana
  Intron number 1 from transcript AT1G31830.2 (locus AT1G318 30) derived from phytozome v7.0 (chr-ID Chr1; pos 11420315 to 11420718 reverse strand)
ggagatctcaagacacgaccctcgattctctcacggttcgtgcttcttcacctctcgtaaagatttattcttttgtcatcgttcactaattttgacttttgagtgatctagttctgagatcttttagtctaagctcctttttcgttcttttggattttgttaatgcatattgaagatacccatctgagaaaagtaataaaaaactgtccttttttgctttcccaattacaacgaaccctaaattcaaaattcagaatctgtagcaaatttgagtaatttataaggattgttgcagataacgaaaaccttattgggatgtgggagagttctaatccgtttaaaatctggatgacgttatgcagaagcggagaatcatcactgtgaacccctccgcgtctattgag

SEQ ID NO: 2311 - DNA, 564 bp, Arabidopsis thaliana
  Intron number 1 from transcript AT1G31880.1 (locus AT1G318 80) derived from phytozome v7.0 (chr-ID Chr1; pos 11445652 to 11446215)
ttacataatcagattcgaagaagaagacatttcaggtgagtttataaaaattctcttttttgaagatttttctcgggaaaataagaaaacagagagattcgttgctctgtttctgttcttctgtagaaacgattagtcactggtttttttccgatcgatcttttcaatactattttttcccggaaaaaaaaagattcagagatttttttttttttttttgcgttacctttttctgcaaacatttgtcacttgattgatttgatttagacagattcgattcgtcatttttttctgattaataccaaaattttctcactaaacccaaatcagaaacttcaccgaaaaatgtgtattcattcttcaatattaatataaattttcattttcattcaaaagtttcccggtatttattgttcttttacttttttgagaaaacgccgaattttttctcaaaaacattaaaagcaaaattgtagtatcataaattgttttcgtccttttgtaacacatttattacaattactgtctgtaacactactacactaatcttctctgcagccattg

SEQ ID NO: 2312 - DNA, 952 bp, Arabidopsis thaliana
  Intron number 3 from transcript AT1G31880.1 (locus AT1G318 80) derived from phytozome v7.0 (chr-ID Chr1; pos 11447883 to 11448834)
atactaaagaagccgtcaaaagcctaaccattcaggtctctctcttctttctttgttgatccttcttctgcttttattttctttcactttattttattgcttttctctaattgccttgctcgtgaaacaaacaaagacacaaaccccaattaacgtatcttagaggacttaaaaagggtccatatatttgactattattcgttttctttaccaaagaatagagtttgaagtcattagtatatagaggttactgttgtttaggacagagatcttacaatgaggtaacttcacttcattttttggaatctttcaccaatctctctttaatagttttcatgtcagtgtttgcttcctctctatgtgactagacatatgaaagtcaaaaacaactactgaaacaatttaaaccctcattgtacatatccttgaattatgtagccagttgaattatcaggactatcattaaagcttatattggggtcatactttgatgaatattgctagtgaagcttgatctaaatacctttctctcaaataagctttagtggattcttacctagacaaggaaataaagaaagggttttttggggtgggggtaactattttagtaaatcaaaagaacataaacaaaagaaatagtgggccgttatgattgtggtgcaggctaagaagacaatatgaagtttctttttttaatacatatgtttaattatgttagatctcatagctttattgttgttcttttaataatgatcatagtagacctctttttacttcattgggctaaaaagtatacttagtcatacttaaaaaggcttgaaactacctataatgtttgtgtaccgttatactcaacattcttgtgtgtttaaatggattactttgataaacaagataaagtttttgaatgtaatcggtctttttgggtgcatatgttacgcagattaaagat

SEQ ID NO: 2313 - DNA, 143 bp, Arabidopsis thaliana
  Intron number 1 from transcript AT1G32350.1 (locus AT1G323 50) derived from phytozome v7.0 (chr-ID Chr1; pos 11668054 to 11668196 reverse strand)
aaactctgaaaataccggttcaactattttttcaggtaatttaatcagaaattttaaatcttcttcatttgttcttttatttttaacatgattttgttttttcaaaaattgaataatttgatttttgagtatagaggaagcac

SEQ ID NO: 2314 - DNA, 349 bp, Arabidopsis thaliana
  Intron number 1 from transcript AT1G32370.4 (locus AT1G323 70) derived from phytozome v7.0 (chr-ID Chr1; pos 11677125 to 11677473)
cgtcaatcgtcttcttctcaggtatatcttcttcaaacccttttaacgcgtgctcatttagtcaccgttggattaaataggatctaggttgaataattagggtttggtttgattctgatgatagaaaatgtggatttggtgaattgtttcaaacataggtgcaacagtttcgtagttgtcctatttcattggaaactagttatctcctcctgtttcatgtaataagaccacaatgaaacacaatgtgaggttattaggatgagctttagatgttttttttttaatctctaattatgagtattcgctgtgtgtaggctcagttggcaaagctcccgaagaatctgttggc

SEQ ID NO: 2315 - DNA, 376 bp, Arabidopsis thaliana
  Intron number 2 from transcript AT1G32540.3 (locus AT1G325 40) derived from phytozome v7.0 (chr-ID Chr1; pos 11768090 to 11768465)
actggctccgtcgtacaacactcctccggcaagtaaaatctttcttaaatggacaagctatttttaatccaaaaagatcctctgttttcatattcttttacaaaagttttagtttcttataagattgattttttggctttattaaacaagattgtttttggtcatgcatacttggaaaaatcaaatattttcagattcccaatttgttttactcttcatgggaaaaaattgctcaattattttcccagaaccacatttatttatttcacatgtgttcataatccatttgaatgtactttttttggttaaaaaaataaataaaaacaacttgagatttgtaggaagtacaagtgggcagagccagttagtgtgttca

SEQ ID NO: 2316 - DNA, 796 bp, Arabidopsis thaliana
  Intron number 3 from transcript AT1G32700.1 (locus AT1G327 00) derived from phytozome v7.0 (chr-ID Chr1; pos 11828450 to 11829245)
ttgattccttcagattctgctctcttggttgcaaggtaacaaaaaaaaaacgttttatttgttggatttgagtgaaaaaacattaatgtctttgatcttaaatgctttaggagttagttgtgtgttggtttggttgagagaattgagaaagtaaaagaaattttctatgtttgggtgagaaaatgcgggaaaatcaagtatatcccggtaaaaaaactaacattagtgtcaaaatttttggtcggtaaatatatatttacttgtggagaaagttaactcaataaatattgtatagctattttggggtttatgtaatgaaccaaatactatttgaagaagaaaagtataaacttagttgaataggtaaactaactactattcaataattttccttattaatgttgattttgtaattagaccgtcatttattctttaatccttgtttgatggggattgaaaaaaaagggattttttcgtgttgggtgggcgagaaaatgtggggcaatgatagcaacttcaagaaattgtgaagtagaaaaataataatagcatttgggttgacgagaaagtatgggagaaaattccaagtcaattaaaaaaaagcttcgtccttaagcaacacttcgttttaaaggtcttttcattttcattacttttctaatggatggtaacatcttcctatttgttgtttataggaggtaattactaagatatccttagcaagagcttgaaacttacgttgatcttgtaatgtttttgattagatctctggaatatcgaagaagaagagaaagga

SEQ ID NO: 2317 - DNA, 172 bp, Arabidopsis thaliana
  Intron number 2 from transcript AT1G32710.1 (locus AT1G327 10) derived from phytozome v7.0 (chr-ID Chr1; pos 11833509 to 11833680)
tcaatttgtcccgaagaattggtgagcaaaatttggtagattttttttttaataagaagcttaagattgaagaataatatatgatcactccgataatattctttgattctatttttcgatgttttttatttgtgaaggttgaaaagtgggaggaacaaagaaagtcagggac

SEQ ID NO: 2318 - DNA, 546 bp, Arabidopsis thaliana
  Intron number 1 from transcript AT1G32850.1 (locus AT1G328 50) derived from phytozome v7.0 (chr-ID Chr1; pos 11902740 to 11903285)
aaagagggaaacttgtatttcgttatctcaaacaggtctagttcttgttgcttactacgagttgctaaattctactacttgtttgattagaaatgcaaaaattaaacttgcttgtcttgtaatacccaacagattaaccattgctttgtactaacttgaaaggaacgttacatgcaataacggctttgattcatgaattaatgttgtaggtacaatgtcgtctaaatacattatattttgattcatgattttttgtgaattcttaagcttcctgtagattgacagagatcagatcgatcattgctgttaattttcttctagcgagtgatttcttggcttagtgttagacaatgtgtttggattttaatagtttttggtccatgaatttggatagatgttatgagagtatagctgacatggtgataagtgaatatttgtgctcatatgaagattggattttgtgttttctttctcggtgttgttatccttagcccatttttggctgtgttttataatgtttatttgttattgtaggtggtatacaag

SEQ ID NO: 2319 - DNA, 547 bp, Arabidopsis thaliana
  Intron number 2 from transcript AT1G33060.1 (locus AT1G330 60) derived from phytozome v7.0 (chr-ID Chr1; pos 11977353 to 11977899 reverse strand)
gtactggacctggtcaggtctgttttgttctcttttcttgtctactcaaggtcaattatagcttcttgtctggttcaagctactctatggttgtgaggtctttggttgcttcatatagtaagaaatttgtttcttgaaatggcgataatagagttgatgttgcttagtttaagtattactactcttagattaatgtttttgtctttgatagtgaccttttggcttgttggtctctgttttggtaataatcgttaggcttgtttgtgtgtgtttgttacagagtcttcttcataccagttctagcttcttgtctgcttcaagctaatctatagttgtgaggtctttgcttgcttcatatagtaagaatttgtttcttgaaatggcgataatctagttgatgtagcttagtttgagtattactactcctacttagttgaacattttgttaatgatggcggtgaccttttggcttgttcgtgtgtgattttttaaaagtcttctgcttatatattttctttggttgtgtgtgctttgtaacagaatccgt

SEQ ID NO: 2320 - DNA, 757 bp, Arabidopsis thaliana
  Intron number 1 from transcript AT1G33090.1 (locus AT1G330 90) derived from phytozome v7.0 (chr-ID Chr1; pos 11993723 to 11994479)
gtatcttggtgagtttactataacgatcttggaaatggtatatacttcatttataacaattttcccatttttattcaatctcactaatcccttgattattatggactaagagtttgtgggcaaatttatgttatttaaatttttaagtattttatatatattagaatatgaaacatttgattagtgtactatgaatttttaatactttgaagataataaattgaagtgtttggttttagtactatatagatttacagttttgtatattggattgttgaatatttaacattatgttttgtttaattttcagcaccaatgtttcctttttcatatatagaggatatataatccttgaatattatggaataagaaagagctttaacatgtttgacttttttttgcttcatttaatacactgaaaacaattaattatgtgaaagaatacaattgagttgtttaattcttctgtgagcctgtgttcaactagttagttttgggagaacttctcttatcaatttcagtattttccaactatttagatagaccgcttaaaaatatatatatagagaaccaaatttgaacctaaatcgctttaaggaattaaacccatcagcctaaaacacggttaactcaattaaaatttggttcagtttataatatatgattttggagtatttttcgaatatatgttatttcatgaaactacaatgtaactgtctcaacattggttataactattaatctaatgcagttaggt

SEQ ID NO: 2321 - DNA, 339 bp, Arabidopsis thaliana
  Intron number 1 from transcript AT1G33260.1 (locus AT1G332 60) derived from phytozome v7.0 (chr-ID Chr1; pos 12065086 to 12065424)
cattgttaagcttcttggttactttgacgattcaggttcctatccttcctctcttaatccgtttttaaattcttgaaattccctaatcaagaactggtcctaggaattattaacatccatgaaaagtcaaatactttaaagaacagagctttattcttgtcttgtcctaattacaattcttttgtagattcgtttcacttttacactagttggttagcttttccttgttgcaaattgtttatcttttgagtggattcttagtgtgaatctaatgttgttgttgtttttgttgtgtatttttcagaagaaagtggagcactattactagagtaccttcct

SEQ ID NO: 2322 - DNA, 342 bp, Arabidopsis thaliana
  Intron number 1 from transcript AT1G33260.2 (locus AT1G332 60) derived from phytozome v7.0 (chr-ID Chr1; pos 12065086 to 12065427)
cattgttaagcttcttggttactttgacgattcaggttcctatccttcctctcttaatccgtttttaaattcttgaaattccctaatcaagaactggtcctaggaattattaacatccatgaaaagtcaaatactttaaagaacagagctttattcttgtcttgtcctaattacaattcttttgtagattcgtttcacttttacactagttggttagcttttccttgttgcaaattgtttatcttttgagtggattcttagtgtgaatctaatgttgttgttgtttttgttgtgtatttttcagaagaaagtggagcactattactagagtaccttcctcaa

SEQ ID NO: 2323 - DNA, 836 bp, Arabidopsis thaliana
  Intron number 2 from transcript AT1G33790.2 (locus AT1G337 90) derived from phytozome v7.0 (chr-ID Chr1; pos 12257174 to 12258009)
gtctctcgcgtaaaggattcacgcaaacggtatgtgtttctaaaaaaaaaaaaattaactatttttcagtctacttaactattttcattttagaaaaaagcattctcataatctattctcttttttttttcttttacttagttaattaactagaaagtaatgaaatgtgacttctaaaagtctttttattaatataaactaaaattaaaaatatatttaataatacatgtttttaaaagagaaatttgggtcgaagagtagtttttatgtgagagctttagacaaccttacttctttctacagcacttgaatagtaaccaaccaagctatagcttataaagtgaaatctctataaattaatattcataaattaataacctctataaattaataaatttttctattttaaacagatataacataaatcattataacactatcataataaacccaaaccgatatataattcttaacactgacattaaaccctcatttagatttttaattaaatgagattatatatcggtttgagtttataaaaagtggttagggattagatttaataattaaataagtttagcgcattttaatgaatttatttagatagtataaattgttttaatttagttaattaaatgatatagcaaattttaattggttaattaagaggggtgaatgaaagaggttcatccctaggggtgaacccaagaattgttcaatatcaaattctttaaaaatttatatcatctccgcgtttagtataaacattttgtaattgtttttatcatcttttgattacagtttgagattgatcccaccagtgagtatattgtatc

SEQ ID NO: 2324 - DNA, 1049 bp, Arabidopsis thaliana
  Intron number 1 from transcript AT1G33810.1 (locus AT1G338 10) derived from phytozome v7.0 (chr-ID Chr1; pos 12265277 to 12266325)
ctcagcttcgttacagcttcaatcgcaactatcaggtctacccttctctcattactgtaattctaggtttcatatagtgaatttgctcctctctgctctgttcttaggaaattgtgaaattactagtaaattgtggcaatctttcttctgtcatttgttcacacatctttagattattgggtattggagaaatgtgaaaaagattttatcttttatgtttctgcaccactttggtactgttctgtgtcttaagatattgaaagcttatgtgaagcttgagaagaagtaattttagctgcaaagaatggatttttagctctctctgttacataaagctttgatttttaacacattgtatccagttttagttttgaatgaattggaaaattctgcaatggttgatacacttgcttggtgtctatacatcattcaaattcgaaatcttgagccttttgcacattggatagaatctcagatagcagattcacatttgttaaagaactataccgtaactgtaaaactggtttaaagggatctttgtattttcacatgtattggtttcgttattgggtggtatactttcctgtaaacactctgtgtagttcgatgtagacctacttccccttcgactatagtatatttattagttctggaaatcgtatgaatagttggttagtcagttatgtaaattcctctactattgttcatggtcacattggccatagactacttagtgatttagtatcttggttaaggaggtactttatagcctctgctttgttatatagtcatgttgttataatccttgggtatggaacaacttgaatcatgacacattgcatgcatctcgaaccgtctttacacagaaacatgttttatgcattcacaaagtgttcacatacaagcgatttttgaataccattgatttcctttcgatagattgtaacatgtgtttatatttttatattgttaaaacgcttttcctaagctgtaaagtctgcttctctattacagttcctgcaaagtgtattcactatagacactttggt

SEQ ID NO: 2325 - DNA, 519 bp, Arabidopsis thaliana
  Intron number 3 from transcript AT1G33830.1 (locus AT1G338 30) derived from phytozome v7.0 (chr-ID Chr1; pos 12279961 to 12280479 reverse strand)
caccgtaagatcaaggtaaaaaaaaaaatgtgtttgatatgtgcataaattgatcgtgtatgcttttcctttatatataagttatatcactaatttttgcacacaaatttttataactacacttcccatgtttaaattgtttatattaaaattgaacctcttcaccagctcctcaacggaagtaaaaacaattaatgatataattagtgaaacggtcatttccatctcatttaaacatatccttaagctttcatgttttcactaacaaactattttctagaaattgttactatttacatttttcactaacaaactattttctagaatttgttgtactacatacataataatggtaaatgttctcagtaaagtggacaaatctgaatcaaagcattaaattatatgttacttgaaccttccaatgagtaagcttctaggagaaggttgaaaaactggatagactttttttgaggggaagggtttgtgaaacagcccagtttaagaatttaaaatactcaa

SEQ ID NO: 2326 - DNA, 260 bp, Arabidopsis thaliana
  Intron number 1 from transcript AT1G34010.1 (locus AT1G340 10) derived from phytozome v7.0 (chr-ID Chr1; pos 12360866 to 12361125 reverse strand)
ggcattctctccggtacgtctctcagatccatccggtaaatacttcaccatcctcgtttcttccccatttaattacccacagtctcaaaaaaatattatttctttctaaatctgaagatgaatcacactaggaagtgttttagatcccaaagcattaatcctgttttctgtaaaaatgccttctttgtcatcctaatgatttttgatttatgaactttggtatagggatttggagtttgtgtacaaaaagactgttgttg

SEQ ID NO: 2327 - DNA, 326 bp, Arabidopsis thaliana
  Intron number 1 from transcript AT1G34046.1 (locus AT1G340 46) derived from phytozome v7.0 (chr-ID Chr1; pos 12388919 to 12389244)
tccagctgctattccgtgagtttttttcttgctctcttaatttctgtatggaagcttaaaagacatttaggtttattaaataaattgagcggagttgactaaacttaccaaaaacgagagtgcattttggcacttcgtacttttttggtaagattcgtttgctcagttccatatgatcttattcttatcattcaaagaagagtaaatgatacatgggaccatagccactttttataatcattcaaagcagatataattaatcattctatttttataatattaattagtaatttttgattaaagcgtaggtgatactctacatcact

SEQ ID NO: 2328 - DNA, 331 bp, Arabidopsis thaliana
  Intron number 3 from transcript AT1G34350.2 (locus AT1G343 50) derived from phytozome v7.0 (chr-ID Chr1; pos 12535536 to 12535866)
ataatcctggtaatgtgttcagcaatctttccctttcttctctgcattaatatattagaatctacttgctagctcttaataaattgttcccaagtaaaacatactttgattgagcagtcatattaactgagaaatcgaggatatgtttcgtgtttgatttggttttaactcttaagagtatttgtagtccttaactcaaaccatagtaccatactgatccatgtcttgtttaggattttaacgaactatgtgtagtgaatgtggaaaatctgatggaggtgttgtgtttttgacagataaacacactcttttcgctttgctacttaatcgt

SEQ ID NO: 2329 - DNA, 911 bp, Arabidopsis thaliana
  Intron number 3 from transcript AT1G34650.1 (locus AT1G346 50) derived from phytozome v7.0 (chr-ID Chr1; pos 12693704 to 12694614)
aacttcgtacaaagaacgtcattctcaaaacagaggtatgtgtttatgcaaatacttatccaaaaaactatattttttttcttttgattaatattaattttatgagctcatatgtcactaaatgaatctctaatttttaacactaataaatttagtttgtctactagtaatgttttgaaataaattgtctaattagttaactgaattcaaactttgtgattacacgcttattagagagataatatgatttattacttttttggttttacaaaatactcgttcattttcgcacgcataatattttttaaaaaagttattgttgttgtatacattatatgatataaaattaaatattaaaatattttaattgctcataacttatataattaaaaatacttctgatattaactaaattttaaaggaaaagattgtctaatgaattcaaatatttagggaccaaatatttttaagcaaatttatttttggtactccagaaaagtaactaaggaagtaaattattggtagtgtaatacttacttaagaatcaaatattaagaaagaattttcttgaggtgataccctaaatatggagtattacatcaaatataggtaagattatttctatatgtataaatttagtcaaacttattattcttctaattaaaatccagttggaaaaagtgttagaaaattaataatttcaatgaaatttcatgttaattatattcttttacaataaaaaaataaaagttgttgaggtggcactctagtcagagagtgatcttttttggcactctatgagattattttttcactaaatctctaaattgaaaataaaaatcactaatatctttgttgatcaaaatatgaaatcagtacgaaagactctcaagctacctaaccaagcacgg

SEQ ID NO: 2330 - DNA, 660 bp, Arabidopsis thaliana
  Intron number 1 from transcript AT1G34790.1 (locus AT1G347 90) derived from phytozome v7.0 (chr-ID Chr1; pos 12764401 to 12765060)
gcttcaagacattcaatcgctacaacaatcttcaggtacgagtcaatatatctcatgcgcattgcttttccatgcacaaacatatataataaattcatcttatagagttatatctccggatctaatgttatgagtttattcatatctatatatatacatatatatatatatatatatatatatatatatataattctgaatttatttgataaaagctaaacaaccaggatttaatagatgatttacctttggatcttattatacaatttacaaatttaatcaagtcaactaatcgtgatttaattacttttttttgtaagaagagttggtaatatatatttttatggtaatgttttcatgaaaataattcatcacaactctttacatttatttaatgccttaactaaagctgaattcgaaaaagttgaaataaattatctactaagatttgattgactatagtttttaatagttttcttttctcatatatatattatcatagtagtcaaaacatttgattcaaacttaaatacacagatttcttgaatgaaacattactatgctcggtcaataatatgattttaaggaaccatgttatttcattttattacttaaggaaacctttttgttttttgttgactctaaatattatgaatatag

SEQ ID NO: 2331 - DNA, 200 bp, Arabidopsis thaliana
  Intron number 1 from transcript AT1G35150.1 (locus AT1G351 50) derived from phytozome v7.0 (chr-ID Chr1; pos 12865808 to 12866007 reverse strand)
agagatttattagttgaaaagggtctagcgacaaggttatcaactaattaccggtttcgtaaagatagtattggtaggcatttttctcaaacattttacataagagaaatgaggaatggggagaaacaagatagaagatggttgatttactcaaaagcattagattaaagtcttttgtttttgttgtaagttgttgagac

SEQ ID NO: 2332 - DNA, 176 bp, Arabidopsis thaliana
  Intron number 1 from transcript AT1G35310.1 (locus AT1G353 10) derived from phytozome v7.0 (chr-ID Chr1; pos 12956706 to 12956881 reverse strand)
agttggaagcatactcttgtggaaattaactgttggtaatgaaagtattatttttatatatgtactttatgcaagaagattaacccttcaactatggtatatatactagacaactggatttcacgggaaagaaaaaaaaacatgatatatttgatttgtaaacttttctggtgtag

SEQ ID NO: 2333 - DNA, 773 bp, Arabidopsis thaliana
  Intron number 1 from transcript AT1G35880.1 (locus AT1G358 80) derived from phytozome v7.0 (chr-ID Chr1; pos 13340420 to 13341192 reverse strand)
actctatcgacacatttttggttttcaaggattaggtttatggtgagcagctgagagcttattgattgtgtatatatagtggttgggattctctttttttttttttttgcaaaacattttgtgtatatcccatgaaaatattatttcttaaaacctaatcctactaagaaattcgtttttaatattttagcaattagaaaataaatgatcccaaaataaaataaaaaatacctttaaactatatccaaatcagttcaagaaaattataaatctaactaaactatcatgccgttgaagacaaaaaaaagttaaactattatgccttccatacattacttatttcaaatataattttataaaataacaaaagcattatatgatccactaaatctaactaaactacaataccgttaaagaaaaaaaaacaaaactattatcccttccatacattacttatattaaacataattttataaaataaaaaaacattatatgatcaacctatgccacaaacagaacctgattaaatattagtatttgttagtttggcaaaaaaacataaagaattgtttcactataagtagatcaaatatgatgttaagagatcaactcaggcccattttcaaaaaatatggccgaacacatatatgtatgtatcgcaaaagtggtataaaccatttaatactactatacaattaaagacaagtctaccgaaaacaaaaagtttctagctttgtctgcaagtcaaaacctttttctttctcctctccgtc

SEQ ID NO: 2334 - DNA, 583 bp, Arabidopsis thaliana
  Intron number 2 from transcript AT1G35900.1 (locus AT1G359 00) derived from phytozome v7.0 (chr-ID Chr1; pos 13347583 to 13348165 reverse strand)
gtcggtggtgagctactcggagctgccagggttcaagtctcctcggccggatgtgttttggacttattatttccaaacggccggttcttgacatgtcttcactctttgggtcatatcttccaaacggcttcatagattgctttgattcgacttcgacgtaaatcttgactcttctaactttccatacatatcaaaatatctcgtttccgtgatggggaagatctcggtcggatgctaaacttttgaagtactggaatgattgtcttttgatacttttagtttcaaaactcttaaaaccttcttggcacctagaatacgtgtttctcctcttagctctagaatgacaccaaattctctctgaaacataagaaaacaatagataaaacgggctaaaacgtcgtgttatcaatacttcaaagctatcccgtcttggactgcatctagaagtagttttttctcgccattgtagatttgtattgccaaaagaggacgaaatcctggcagcgtctcttctactatcaactttgtcccaatcatgagatctagaggggcttagagggtatttcttgcctctgttctctga

SEQ ID NO: 2335 - DNA, 794 bp, Arabidopsis thaliana
  Intron number 3 from transcript AT1G36240.1 (locus AT1G362 40) derived from phytozome v7.0 (chr-ID Chr1; pos 13615246 to 13616039)
gcttgctaaagttggagttcatcactacaatagaagtaagttcttttcatgaacaaagactatacatttgtccttactggtttagtatcattgtacaacagttttgtttgaatgtagttaggattgtttagtagaaatagttgtggaaatgcaaattattctgtgggatttgacagtgaagctcttctcattcaccatttgaaatgctccaatactgaattgatctgttcccaagtttgtgtacgtattgtatagatagagagtgtagtgttgcaaattatttagtagaaacagtttggtgtcattgtattagtttcctttatggtctatgattgttctgtgtgtatgtggtattagtgaccaattctttacactgtttgcacttccccaataggaatgcacttaatacttaaatgatatgttcctgaaagtcttgtatatgttggattgtgtagatagagtgtgtaattttgcatcttacaaatccattagggtgatccttgtagttgttttaatgtaaggactaaatggtgtaaaagcctgaactcacttatatcatatcagtttcctcctgcaccagtgattgtttgttttatgttttctggtattagcgaccaatttcagtgagaaccagtgattcagaagttgttccttacttgcttttttctttgagagtcttgtaaaccttgattatgttacttaagactacagaaactgtttatttttgatgagtctctgcaactatgttattttattgcctgattttttttttttgtacttgttccttttagaca

SEQ ID NO: 2336 - DNA, 801 bp, Arabidopsis thaliana
  Intron number 5 from transcript AT1G36580.1 (locus AT1G365 80) derived from phytozome v7.0 (chr-ID Chr1; pos 13816582 to 13817382 reverse strand)
catatattgagaagaaaaagaagaagaagagagtgagacaaatcattaagagagcatctataattaatactacattctttgtataatatgcatgaaagtttgcatatgtaatttaatttagtatgaattggaaatatattacgatttatcatctgatccatataatatattaatagatagcacttggagtatgacgataatccacaacattaggaagtttgatgaattgaatttggtttttacagcgtcacaagtatgggatattttctggctcggtccaccacctaagaatccttggcttagacaataaattcatgtactgtgtacagaagaaaacattattgatgttttagatctgtatttatgtttggctgaaacaaattgtttatctacagagttatggactttagcaatccaatcttttttttttcttttcttatacgtcgttttattgatcttagcagtctttttgtccttggttattttctgaagacaaaatttgtatttttcatacactattctttttggcagctactgatatcacctcggaaatataaaatatggcctctttgatattatcatatgatcctaattacagtaataatcttttgttcttttgtaccaatgcaaaacataaaagaaaaagtacagatcaaagaagaaaagaaaagaagataaacataaaagaaaaagttttattaaaaaaaaaatttgaaaaaagagaaatcaattctttcgattttttagacctagaattgacctcttgagttggttaaggcgactagcgcttgcgtcccaacc

SEQ ID NO: 2337 - DNA, 644 bp, Arabidopsis thaliana
  Intron number 1 from transcript AT1G36730.1 (locus AT1G367 30) derived from phytozome v7.0 (chr-ID Chr1; pos 13900026 to 13900669 reverse strand)
agagattatcctcccttcttttctcatcttacaaggtaaagcttcttcctttttaattgattctttgatccgatttgtaaatttagtttctttatcgattttatggattgcccacatgattatttcttagatttgattggttttgaataaaaaagagatgatttgattcgtttatgctgaattaggttttcagattgtaaatattgaaacttttctctgttctcttatgggttcttgattcttttcaagatttaggattattgttgttagatcttttgaattagtgaatcttgtgtattgaaaaggtcaagtctttgtttctcttaagcagagaatgaaacaataactttgaatatgtctttttaatacaggaagttgggcagttaaagctgctgggatcaccagttttgtcaaaagtggagtgtgaagaatcttttatgtctgaacaggcttctctctttcaatcatctatccggcttttaggagagtactgtcctatatctaggaaaaagtccactcataaagttggtggtttgcgttttgaggaggacatcacgagctgtattggatttcagtttatgcaactgagtgattatcactgcctcttctgacatcccttgtttgtttacgtttgttgaatcaag

SEQ ID NO: 2338 - DNA, 542 bp, Arabidopsis thaliana
  Intron number 2 from transcript AT1G37113.1 (locus AT1G371 13) derived from phytozome v7.0 (chr-ID Chr1; pos 14137341 to 14137882)
tctggtatccaagcaactcgactcccacaaccccagatatataagatatccggttgagctacatgtttggtcccccaccaagtttaggaccatcattcccatcacaagactttgaagaaaacaatatcaaacactcatggaagataagaaatccgaacacaaaaaaatctagatgggtcgataaaacaagttagaatagcagaaacaacactaaattggcaatgagagaacgcagcagccggaactatctcttgagccaaattaataaaaaggtatccatcatagacctttatatcaaagacattaccaaacaaatttcctctctacacaaagaactccttcatctagccaatacagttttcataaattcacccctcatgtcccaaaaagaatcagaactaaaatccctaagagcccagttaaattccatacaaaactagccaaaaaaccagccaatacaatatgatcttttcacactttaccccatttatacttcgccttatgcagttcaaacacaacctttatctttttctcaagatcca

SEQ ID NO: 2339 - DNA, 885 bp, Arabidopsis thaliana
  Intron number 3 from transcript AT1G37140.1 (locus AT1G371 40) derived from phytozome v7.0 (chr-ID Chr1; pos 14170493 to 14171377 reverse strand)
agaagatttgcgaaattacagtggctaagtatcaggtttgtgttcttttgattctttggttagccattgttgttgttatttagagttaatcttttggttttgatttgatttagggttaaagtcttggttttgacatatttagagttaattagtgcaatctttgtttctggtctattttgttacaagactctcttttatctttggttcatcatctgttgttgctcatttagggttgtattgtgcaatttggtgtttgagtctctttctttcttgttttgaactctcaatatcttgtttttttccttcttctttgtataatttctcaatttctgttttcgtctctctttttattttattttgttgaaatctctctttaaatcttgtataagtaactgttattgcttatttagagttgttaaattgtgcaattttgtgtttgagaatctctttcttcttgttttgcttattaatgactctttatattcttggtttgtaattgttttgtccttctttttatatgatttagagttgagtagtgcaattttgtgtttgagtctctatattcttgttttgtttgttaaagactcttttattcttggtttagtaactgttgttgcttatatttgaatagtgaaattgtgcgatttattaaattttgggtctttttgttgtagttcttggttttgtaatggatgttgcttatttagagtcgaactcttttttcttcatttgatatgacttagagttaaatagtgcaattttgtgtttgagcctatatctgaagctcttttattcttggttaagtaacttctgttaaattgtacaattttgtgtttgacttttgtgataggggaaagaagagctgactcgacatttcaggaactc

SEQ ID NO: 2340 - DNA, 327 bp, Arabidopsis thaliana
  Intron number 1 from transcript AT1G37140.2 (locus AT1G371 40) derived from phytozome v7.0 (chr-ID Chr1; pos 14171453 to 14171779 reverse strand)
gttaagaatatacctaactgtctcgggtcagattttatctcttctcaacttttttataattttgtttttggggatggatgaattaaaataagagtttgtaagaatttgcagacgaatggatctcttgaggattttggacaatcattgtcggaaacacaatgaaaaatcttcctacgactttctttatctgcctatggattttgggtgagttaatgcttatttttctctattttgggatgaaattaaatgcttcttgcaatagcggtgatgatggacatttaatgtgtaacaggaaacgagccaatttgggttacgccttcgttaact

SEQ ID NO: 2341 - DNA, 932 bp, Arabidopsis thaliana
  Intron number 1 from transcript AT1G41820.1 (locus AT1G418 20) derived from phytozome v7.0 (chr-ID Chr1; pos 15584122 to 15585053 reverse strand)
actcgtttgaagaccaaacttctcaaccaagctattttggactacccaaacacttggacaagaaccatgatggttgcgatatctttccaagacgattggtaatgggctaagtgttgctttgggtgctctttttccctactaaggttttgtcccattgggttttccttagtaggtttttaatgaggcctaagtaacacttccaaatccccccttatcaatccggcccaagcccactaagaggaccacaaatttggaaaaccatgggtctattttgtgttcaaaatttcaattatgatttctccttttccgagttgtcttggagtttgttccaatactaactcttccccttctattcttctctatttaaactcttgtattttctcattgtaaactcatctatctttttaatctcaaactcttttaagctagatcgaaggtatatcaaaggccatccgcatcctttgtgtgaccattcgctccatatcctttggtttgagtgatctcatgatctcttagatgcaaagtctatcccctactcaacctcaagagtgtcgatcttagggaaatcatattaagtggtatcagagcacattctgaagttgagtactctatcctttcatcacttcatcatttcgttttattctattcatcatttcatcacctcatttcattttgttcgttcatcttctcatctgtcttttcatcttcgctgtcatcttgctttaattttcataaataactggcttgggataaaattgcgaaatcaattggatctgaatctaggacgagtctagtaatttatacaattgtttctggaatttttgagcatgatttgataatttattttgttcgatctagtttgcctgttcttagaaaaacgtttgatattctccttgaactagtgactggtttagtgttgtttgttggcagga

SEQ ID NO: 2342 - DNA, 1010 bp, Arabidopsis thaliana
  Intron number 2 from transcript AT1G41920.1 (locus AT1G419 20) derived from phytozome v7.0 (chr-ID Chr1; pos 15682902 to 15683911 reverse strand)
ctccaaaaaacaatcaggtatgtcccaaaattcagaaagacatcgtacattgctttgcggaggaagttattgaatctataattcaagaagttgatcatgatgtatattgcttgttggtggatgataagtgtgtattttgcatgttttgagcatccatttttcatcattttagcattatattatcactgttttataccattcacatcatttgtcatcactttgcatgtttaggatagttttgcatgcatgttgcatatttgtgttgttttcaggtgatttggagctgtccacgagctaactggaagaagcggacctgatcatgacaaaccactcgacccagaggtcgagtaggagcttcaagatctcaagagaccactcgacccccaggccaagtagaagacaaaaccactcgaccacatcactcgacccccaggtcgagtgacttcctctccatcttctgacaaccactcgatcacgtcactcgatcacgtcactccagctactcactcgacctcccactcgaccacatgggtcgagtacagttcttaatccgtcccaatacttcgtcgttttgagtattagggtttcagaatatttggctataagtagcatgtacttcacattttcgcaaacaagaagtttttatctagttttattccgcagaccttgtgttctagaccttttgtaatccggatttctctttatctattcagtattcagtattcagcttttgttcttgatttcgtttactgttgttcattctattatcatcctgctgttacactgttgttatcatgttttcaacctgttcaacgtttatgcttactgttatgatgtctgagtagtgaataggtttctgaggatgggttagagtagtgtagaattctaagtatgctaggtgattgagtatttgttgatagatcccttctgaattagttgttcttaatgcctattgctttctgatcaactaaaatttgagcccagacatttccgcgctcaaaaggtgttcg

SEQ ID NO: 2343 - DNA, 683 bp, Arabidopsis thaliana
  Intron number 1 from transcript AT1G42480.3 (locus AT1G424 80) derived from phytozome v7.0 (chr-ID Chr1; pos 15936371 to 15937053)
cgccgcttgtaacgccgtcgctgtacgttggaatctctaactttcctctctttgatttctcaaaattttctgacaaattagagcgagttatatagcgatggcaaatatatttacgtacatgagatttgctagattttgatttgattctattaataaatttcgaatttctggtcattggcattttctgggggaagtaaagtaaattcgagctgatgttgttgttttgaagctttattgatgtttgatttaggacaaaaatccattagttctgtactaattgtattggtttttctaaggttaatttctgctttttgaaactgttatagtgaaaggagttcaggataattttccgtggacacatttttctgtatattatctctgttgtgattgaattagcactctggagattcaagtttgagtctttattattactattgagctatttgttcggtttctgaggttgtttcgtaagaattgcaatctagaacttggttttgtttcaatatatgaagatgttctttttcaaaatgttacttttcccccagttcatgcatttggtcattatgaaaagaagacttgttttcgtgattttgagaatgatttaatccttcctttataatactaataagggtggttgatgttgtgcaggaggaattagagttacagcttttaaaggtaagaac

SEQ ID NO: 2344 - DNA, 529 bp, Arabidopsis thaliana
  Intron number 3 from transcript AT1G42525.2 (locus AT1G425 25) derived from phytozome v7.0 (chr-ID Chr1; pos 15967023 to 15967551)
ctgaagacacattctctaatcctcaagtacaacaggttagtgaagtaatgactatcgtgttgtcgtcaattgaagaccaaattaaaatttggatggtggtactgctagcgggagacgggtgactcaactagccggttatcaaaaacctccttatgtagggaattccacagtgaagcgcgttatcacagatgtatcatcatcctctttcatacccgagcatcttcaaccagtttcagatgaaaaatttcaaagtttcatggattggctaggatttgatgagtaagtttctgttttgcagttctaatatccatgttttcggttctcttttatcattctttttttttccagggaagaaccatttcaaacaagcaattttgatgctcgattcttttggcaaattataactccaagaaaagacttgcaaaatatggttggctgaaagactattccattttatagtttacaattttcaacttgtgtagttgtaaacatttcgcttataaatgttgtttgaattattttgcagcac

SEQ ID NO: 2345 - DNA, 517 bp, Arabidopsis thaliana
  Intron number 2 from transcript AT1G42560.1 (locus AT1G425 60) derived from phytozome v7.0 (chr-ID Chr1; pos 15982553 to 15983069 reverse strand)
agctttgtttgaagctcttgagaagattaaaagtaacaatatagaaattattttttttggtttcttgaaatcaaggaacaattgttttcgttcatatatatatatatatatatatatatatatatatatatattttctttattaatttaaagacgataatacaaatatatcagtgagcacacagattgaagctctacaaaccacacaaccaatatatgagtttaacaaagtaatcaaaaaagtgaaaaacacgttgatttccgtaatagataagcctcacacgctaacagaataaatcaatctgttattttctttgaccgtcttcgtcttcaatctattttggtcttctggttggagtgctatcttttcttttatgtagtgaagatggaatttttcgtgtggttagcgtatggttagggatgtaactgatggatcgtatccctattattttcatgaaaagttttggttcctatatatatatatttaactcaaaattatgttacatattgtagagctt

SEQ ID NO: 2346 - DNA, 350 bp, Arabidopsis thaliana
  Intron number 5 from transcript AT1G42980.1 (locus AT1G429 80) derived from phytozome v7.0 (chr-ID Chr1; pos 16134041 to 16134390)
catacgataatcgctgctactaaagaggtatgcatagagacagacccggttcagttaattattgggctcagttttcaatagtttaaaaaaaaaaatgatgtatataaacagaattcaaattttttgagccttttctaatttgtttttaatacaaacgggtctaaattctgaagaaaaatgtcaaaattatattagaccctctttaactggagcagttgaacagcccaataactggacctgagggtgacatttttctgtgcatggtaatatatatagctatgtccatcttggtaattaagtaatcgtatttcatgtactagataacgggatctgtgaagttgtttcggatt

SEQ ID NO: 2347 - DNA, 247 bp, Arabidopsis thaliana
  Intron number 2 from transcript AT1G43080.1 (locus AT1G430 80) derived from phytozome v7.0 (chr-ID Chr1; pos 16214843 to 16215089 reverse strand)
gccacaaaaacactaattgtcctaaactagctgtaccgtttcttcttaagcttttctttttataatatatttcttgtttgagaaaatatgattatatattgtttacattgaaactgtattatacaatggtaacaagtatattttgatcatttattttttaaccatatatatttattatatacaaatgaattgaagtatctactctttgtttctagtgatatgataaaatttgaaatgtttacagact

SEQ ID NO: 2348 - DNA, 334 bp, Arabidopsis thaliana
  Intron number 1 from transcript AT1G43080.1 (locus AT1G430 80) derived from phytozome v7.0 (chr-ID Chr1; pos 16215356 to 16215689 reverse strand)
ccaatgtatgtacacaataacttttctaatcaatgttaatagttatttatttagttttgttgattcccaatttatattggcttccaaatacattgaaataagctcaactcaatatcaaaatacatttaaataatctaataatatatgttgaaaaaacattttgatatgatagtatatataaatcttcttgactttctacataacaatatatggattggtattatattaaccaattaaatttaactaaatcttttatcaacttctatggatttttttgtttaataattaacctatcttattcttaacatatacaaaattaggcattcacaagtgt

SEQ ID NO: 2349 - DNA, 247 bp, Arabidopsis thaliana
  Intron number 2 from transcript AT1G43090.1 (locus AT1G430 90) derived from phytozome v7.0 (chr-ID Chr1; pos 16218165 to 16218411 reverse strand)
gccacaaaaacaccaattgtcctaaactagctgtaccattttttcttacgcttttctttttataatatatttcttctttgagaaaatatgattatatattatttacaatgaaactgtattatacaatggtaacaagtatattttgatcatttatttttgaaccatatatatttattatacacaaatgaattgaagtatctactctttgtttctagtgatatgataaaatttgaaatgtttacagact

SEQ ID NO: 2350 - DNA, 334 bp, Arabidopsis thaliana
  Intron number 1 from transcript AT1G43090.1 (locus AT1G430 90) derived from phytozome v7.0 (chr-ID Chr1; pos 16218678 to 16219011 reverse strand)
ccaatgtatgtacacaataacttttctaataaatgttaatagttatttatttagttttgttgattcccaatttatattggcttccaaatacattgaaataagctcaactcaatatcaaaatacatttaaataatctaataatatatgttgaaaaaacattttgatatgatagtatatataaatcttcttgactttctacataacaatatatggattggtattatattaaccaattaaatttaactaaatcttttatcaacttctatggatttttttgtttaataattaacctatcttattcttaacataaacaaaattaggcattcacaagtgt

SEQ ID NO: 2351 - DNA, 248 bp, Arabidopsis thaliana
  Intron number 2 from transcript AT1G43100.1 (locus AT1G431 00) derived from phytozome v7.0 (chr-ID Chr1; pos 16221487 to 16221734 reverse strand)
gccacaaaaacaccaattgtcctgaactagctgtaccatttcttcttacgctttttttttttataatatatttcttctttgagaaaatatgattatatattgtttacaatgaaactgtattatacaatggtaacaagtacattttgatcatttatttttgaaccatatatattttttatacacaaatgaattgaagtatctactctttgtttctagtgatatgataaaatttgaaatgtttacagact

SEQ ID NO: 2352 - DNA, 856 bp, Arabidopsis thaliana
  Intron number 1 from transcript AT1G43130.1 (locus AT1G431 30) derived from phytozome v7.0 (chr-ID Chr1; pos 16230221 to 16231076 reverse strand)
ctcctcccaactctccaaattcttctactcgcaaggtactgtctctgccgaaacctccgccgattttatcgagcctgtgagctaaagtttctgtgcttactcgttgctaagtttgggttggattcggagaattttagaagcattcttcgattttgttgctcttgaatttgaattatagcgatcttatacatcactgatgatgctttagtgggaaatgttaaaatcgtagtgaaacaatgagtagcgatttgtaaattttgatgaatcaattattattagatgtcgaattgatagaaattcgagtacaattgcgaaatcgttgagagatttagggttcttctagtgttgttgttatagtttctgtttatgtaagacaactctgaattgtgaaggttaagctgggtaggagaatgatatagcagaatcgataagatgatgatcttgtgaagactgcgaaactatgagtggcgatgtgaaattttgtatgaatcaactaattgacgtttcttgacaaaaattgcaaataacgataagatgatgatcttggtccttggatggtaaattttgtgctggtgaggagagttttgagttgtcatatcttacttacttttgtgaaattcgttgagagatgtttagggttctggtgttgttatagttctacttctggtttgtgaaagaactccgaattgtgaaatttattgtagcatttcagtttggcaaaaatgacaagtataattgatcttagggagcctaagatttagaggtttaagcattttcacttctatatgtttgtgtttgattcaatttatttgagatacttacagtgttttctcttttgtatttgagcaggcttgtt

SEQ ID NO: 2353 - DNA, 580 bp, Arabidopsis thaliana
  Intron number 1 from transcript AT1G43330.1 (locus AT1G433 30) derived from phytozome v7.0 (chr-ID Chr1; pos 16359114 to 16359693)
actctgcaaaagggtatttttctcttgttcgttccttaattatattgtgtggtttggtgtatatttgttgcaacttgatgaatttgggggtgagttgtgtgtgattaaggtttttatgtgtgatgattaagattaatggaaataaaataatgttgggaaatttgtaatatcagttttaagtatatatgtttatatgttattagggtttgatcttatgattgctttgtgatgtttgttttgtgcttaaagatacagaagagtgagtggtcctactagaagatcaactaaaggatgatggacatccgaagaggtatatatattgctcttgttcagtcttgtcttttgcaagttacataaatgtgtcactgaaatcttttttccatcatatgcaggacaaaattttgacgaatgctgtgaagaagtaccaagggaggaactgaaaaaggattggtaaataatattttgatttgttagccatcaatatttgccataaaaccaatatacactatatagtgtttttttttttctcttgtctttggtttagctgaatgccttcctcggtcggaagagaataggagga

SEQ ID NO: 2354 - DNA, 541 bp, Arabidopsis thaliana
  Intron number 1 from transcript AT1G43640.1 (locus AT1G436 40) derived from phytozome v7.0 (chr-ID Chr1; pos 16441255 to 16441795 reverse strand)
agaacagagattcttttgaactaacgaagacatatgtaagtcttctttgatctgtgtttatatctctttgttttgctacccactcaaagatatgattttgcaaagaaagcttagtcttttgtgttcttgaaatcttaggtttgtgttcttgaaatcttcttaggtttatgttcttgaaatcttaggttatattcagctttggaattcagtgaggtagagaaaagaataagtttagtacggttgtcaaaagacattgatttcttgaaaaacaattgttggaattttaagaatttctgtggttgcgtggtgattttggttagttctaaccttaatttttctcaatgtttcttggtcttcacatttctataattacatttcttctatttcctattctctaatataattcataaaatatatattatgtgttgaattagtgtttctcatagagatttgaggactatatgttaagtttatactaagaaaatggttttggtatgtttttgcagcgtttctctaaagtagaatctttggtattcggaaa

SEQ ID NO: 2355 - DNA, 498 bp, Arabidopsis thaliana
  Intron number 2 from transcript AT1G43700.1 (locus AT1G437 00) derived from phytozome v7.0 (chr-ID Chr1; pos 16485173 to 16485670)
ttacaggtaatgttttgtattactttgtcattgtgtttatgcaattggtgtgactagtgaaggttggtgagtagattactaaatatctttaaagctttgtgttttacgaagctgatgtgattagtgaagattactctaaggaactatttctgatatcttgatttgagcttggcagcttgtaagcttgtattgttgcttagtgtgtttaagattgcttcttggtgtatagagaggacatgtgtttgctactaggaacaagtatagatgcagtgttataagatatgttattctcatgttaatttagctgattaatcaacatgtgagatatgtcaatagtgtaatgtatacacttgcaagagtgtaagttttgtttccactttagtgataaaagcaacataggagtaagataaaatgattcatgtctcttgcatctctaatctgtgctttttcttatattgtgtagagaggaacatcagagctgaacactgaaaataaaca

SEQ ID NO: 2356 - DNA, 780 bp, Arabidopsis thaliana
  Intron number 1 from transcript AT1G43860.1 (locus AT1G438 60) derived from phytozome v7.0 (chr-ID Chr1; pos 16623484 to 16624263 reverse strand)
gcggtctggcgtgtaagcttcgaaatctttgcttatctccactataatcgcttcaatcgatcttcgtcgctgcttgattttgtcgaatttggttacgggtttttggttgtttatcactgttaaaagtgtagttagatgaatattgtgtttaaatggatcatgtgtttgacctaatttgataaatcgcatcatcaatctttgtttgcgttgttcttgacttgtcttgtgttgattttggcgaatttgattttgatattgaggtcttaagcctaattttagctgtttatctctgtaaataatgtaaggaattggtatagtgtgatgaatttggtgttaaaatgacctaatctgaagagaaacgagtatcatcgcattatcaatctttgtttgtgttgttctttgactgaccctgtgttgattttgttttccgaatttgacgaattcggttatgatgtggaggtcttatacttaattagttgtttatttcttaaaataatgtatggtatgataagtttggtgtgatgagggatatgagttaatggcatcatcaatttttgtttgcgttgttcttgactacttgtcttgagttgatgtttttgaatttggcgagtcgattctaatgtggaggtggtaagtctaatttagtcgtttatctctgtaaataatgtacgcaaatggtagagcatgctgaatttggtgtgaaagatggacaatgtgtttgacctcttagaaaagtaatgagatttgagtcaaaatgtttatgcagggagaaggatatag

SEQ ID NO: 2357 - DNA, 469 bp, Arabidopsis thaliana
  Intron number 1 from transcript AT1G44100.1 (locus AT1G441 00) derived from phytozome v7.0 (chr-ID Chr1; pos 16766685 to 16767153 reverse strand)
gtcgtcccaagcgaaccggtaatttctctttttttctctaattttatgttttatgtttctctaatctgttcaaacaagaatcaaagtaaatataaaattagtctctgtttcctataaccggggatttgaacccgaaacccggaatttttttaattccgggtttcgggatacaaaccgaaacccggagtctgttgaacttgcaatttaaaacatctacagtaaatatatgcataggctttgtttgttaaggggtgacaaattcctacttctttttttgtgtggatgttatggaaaagtatgatttttgttactaaagtgtatgaacactattgttactacagttgttgtcttaaaattaacggttaaacaaaacagactttattgttactacagttcttgtcttaaaattctgtttgaatgtgattggtgtttagggacggtgtggacagcaagtgcacacataataaca

SEQ ID NO: 2358 - DNA, 359 bp, Arabidopsis thaliana
  Intron number 1 from transcript AT1G44180.1 (locus AT1G441 80) derived from phytozome v7.0 (chr-ID Chr1; pos 16809244 to 16809602 reverse strand)
cagtttatcttaaagctggaactccctccactactgtaagagcacctcaagtcctactctatttttctctgtaataatatattttataaactcactctatattccattttaaacaagattggtaaacaaaataaataggttaattaacatttttgattaataatggatattttaaagaataaacaattaactagagaagaaatttattcgaaataatttttagaatagaaaatagaggaatagattggagtaaaaccaaactctgttatacagtgaaaattagaggaatgagttggagaatgttctgttatataagactttttgttaaacagtttatttctttttctcagggatttgtg

SEQ ID NO: 2359 - DNA, 536 bp, Arabidopsis thaliana
  Intron number 3 from transcript AT1G44575.1 (locus AT1G445 75) derived from phytozome v7.0 (chr-ID Chr1; pos 16872446 to 16872981)
aaacgtccgatctgccctcggtctcaaagaacaaggtatctctcaacatttctatttctatctttgttacaatgacattgctctgaacaaccaatgcaaataatataacctgatagagtactatagtaactagtataactgaattggcctaagtgtagtgtccggatcggctttatgtttatttatcgttatcctaagatacaaatgtgagacaaaagatactagcatggaactgtcaatctccaaaaataatctctaaatgtttatttatttatcgttggcctgatagattatttatcgttatcaatttctatctttttcccccatgtaagcacattggttcctgaatggctttctctagcagagagtctcttcccgttaacttaaataaaatagtgtttctgaaaagaaaaaaagatacaaatatgagattacttaaagagttgcttggtctaatgttttgaataaatttgaatatgtttgttgttttgttgtgtgaaggtccattgtttgggttcacgaaggcgaacgagtta

SEQ ID NO: 2360 - DNA, 850 bp, Arabidopsis thaliana
  Intron number 2 from transcript AT1G44800.1 (locus AT1G448 00) derived from phytozome v7.0 (chr-ID Chr1; pos 16915706 to 16916555 reverse strand)
atattctggaggcttcttgctcttggaatattagagtaagtctctttcattagaaaaccatcttttctgctttacaattagaaagttcggttcatacaacttttaaaggttttcgtaatatttatcaaacaaaaaaatttggatatagtaaggctttgtatatagaaaacattgttttcgtacatgaagaaatcttataactaattaataataaatacggtgtaaaaatcaaaagttactttttatagttgtgatggcaaattcatgtgttcgggtacgttactttatcatgctaattcgggtacgttacttatggagatggaatacatactcacatatcgtacccaaaaaaaaactaaactcatataaaatatgattttggtttaggtattcgtcagtcataattagagttatagtcagagattgtttaacgtttaaacaattctactattacgataaacatataccaaaattcgtctagagttgaacatacaaaatagatttttttttcttgtttgaaaaattgatttacaagtaaaatatataattatctattatcacatagtatttattttgattaaaaaatttaccgtgaaaatgtagaaacaaatgaatgaaattggtaatatagtattgattattgattgggaatgagatcagcacccacaacaaacatctttaatgtgaatgtttggcctacatgttatcctacgtacacgtttaccttttgatctttggaaaaagcatctacttattattgcacaaacaaaaagatgatgtgaaaaggctatgtaattaaaaaaacaacaataataatttgtatttatttgtgaatgatttcaggcccctc

SEQ ID NO: 2361 - DNA, 753 bp, Arabidopsis thaliana
  Intron number 3 from transcript AT1G45010.1 (locus AT1G450 10) derived from phytozome v7.0 (chr-ID Chr1; pos 17014003 to 17014755 reverse strand)
gatacaaagacaccaaactcaatctagctgccgatgtgagtatacatatatcatctttttgtgtgatctaaacaagttttaaatggatagatattaaaacatgttaatgtagtctttactccatcatcaactcctagttaaatgcaaacagaacgattgtatattcttttagaaaatggaataatgcacaatcatcgagtatttttgacttaaactgtctacactaggtcactagttcgatgacggctatacttattatgtagttggatagtataaaaccgggaccaccgttggatatgaagaaaaaaaaagtctatggtcgttatggttttaattccattgaatggcaactttcaattgcaattgttaaatttttttgacgttttgtttaatggagagatggtcacacctgcattatccctaagttatgttctgtttttgcttctaatagcttagatacctgttttagattatgacattttaccttgtacatagacctatctttcgatctataaatttcacactttattaaagaaaaagaaaaaaaattgacgttgaagatttattagtttaggtcttcctgtaaaacccaaatctacttctctagatttatttataatatttcattaagtcaaagttaaatctattttattgtatgaaggaagcttctaaaaacttaagcaccgacatgctttatattaactgatgatattgataggtgtgttttgccactatattcacattggcgagaat

SEQ ID NO: 2362 - DNA, 531 bp, Arabidopsis thaliana
  Intron number 2 from transcript AT1G45191.2 (locus AT1G451 91) derived from phytozome v7.0 (chr-ID Chr1; pos 17116286 to 17116816)
gaaacctagcgtctgggatactttccttcactgtcgtaagtcttttcgcatatttgtttactatagtaagaaatcattagaaatggcttacgtttatgctatgacttcatttcaaaggactggactgtccgaatttctcatgtgtatacagaggttaatcgtcttgccgataaactagctaactatgcattttcgttacttttgggttttcatagatttccccttagacctgattttgctacttcgattatttttgaggatgctaattgtacggtgctacacgcccacgtaatgttcgtgtgtaatttcttttattttgtttttaataatatgggagactagtctccctcattctaccaagaaaaaaatggcttactgcagaatataaataatcaaaaaaattaaatacattaaagttttgtatgaagacttggaaacatcacttaaaatacaaagtaaaaaaaaaaaaaattcatgacacatcacttaaagtgaaacggagagagtaaatgtttgtacttggcaggtaaa

SEQ ID NO: 2363 - DNA, 389 bp, Arabidopsis thaliana
  Intron number 3 from transcript AT1G45191.1 (locus AT1G451 91) derived from phytozome v7.0 (chr-ID Chr1; pos 17116428 to 17116816)
tgtatacagaggttaatcgtcttgccgataaactagctaactatgcattttcgttacttttgggttttcatagatttccccttagacctgattttgctacttcgattatttttgaggatgctaattgtacggtgctacacgcccacgtaatgttcgtgtgtaatttcttttattttgtttttaataatatgggagactagtctccctcattctaccaagaaaaaaatggcttactgcagaatataaataatcaaaaaaattaaatacattaaagttttgtatgaagacttggaaacatcacttaaaatacaaagtaaaaaaaaaaaaaattcatgacacatcacttaaagtgaaacggagagagtaaatgtttgtacttggcaggtaaa

SEQ ID NO: 2364 - DNA, 577 bp, Arabidopsis thaliana
  Intron number 1 from transcript AT1G45230.2 (locus AT1G452 30) derived from phytozome v7.0 (chr-ID Chr1; pos 17170454 to 17171030 reverse strand)
attcttcactccggaaagtaagctttaagcatttatgaggcaattggttgcaaaatttcataagtttttgtaattttgttgtctaattgagtgttttactggttgatttgaacgaaattggtgctctagatactctctgttccttggaaaattggttctagttcttatgagttcgaaatagttagtatctgatgatatgatcatgtattggtttatgagttcactactgcgtgagctcttagcatttaggaggcaatcgattgcagaagttcatagtctataggggaaatttaaaaattgttgttctaatagagtgtttataggttaatattatcatgtaatgggagctcaagagtctctctataccctgggatttggttcttctgagtcagtataagtcataactagaagcttttttcttgatttgctttatgaatgagtctaaagagattagttgctttcagtatggattaagatgtgatatggcaaagaagatttttgaatgttgcgcttgtatattcagagaattatacttttgattcattggtagctctgtgttgcattttgaattgcagat

SEQ ID NO: 2365 - DNA, 289 bp, Arabidopsis thaliana
  Intron number 1 from transcript AT1G46480.1 (locus AT1G464 80) derived from phytozome v7.0 (chr-ID Chr1; pos 17237457 to 17237745 reverse strand)
caaaatttgaacacaaacgagaccctcctcatcaagtcagttccattattgtacttcgtacattttacatcgtttctttcgtttgaaaaaagaagaagaattcactctagaagaattttgataattgcggcatacctaatactttgacatttataaattataacgactggagtggttccttttattattaattttatttatttattttaatgtatgattcctaacaaatgtaatgaaataatgtgtgggttcagttggagacgcacccgggagggacaaggtggaaccc

SEQ ID NO: 2366 - DNA, 503 bp, Arabidopsis thaliana
  Intron number 2 from transcript AT1G47350.1 (locus AT1G473 50) derived from phytozome v7.0 (chr-ID Chr1; pos 17359557 to 17360059 reverse strand)
tccaaaccctcgaagacactgcgttcgtctcttaggtgagttttaaatagtcttaaaaattctctgttttttttatttggtgaagaaacaaaaaaaaatcatattttgattccttttattttcaggtatggtctctctattttcatggtagctaggtttgtcttgttcttaatataatacgttttaacatatctctctctttgtgttcgaccagcaaataaaacgatcatgatttcagattccatccccaatgaactcatcctcgagatattgttgagattacaaagtcaattgctaggtttcattgcgtgtcgaagcaatgggcatcaatgcttagtcgtccatatttcacagaattgttcctaaccaggtcctcaactcagccgcgtctcttattcgccatcgaaaataatggcttgtgaagcttcttctcgttgcctcagcatcttactccatatgagaagtcttcatcgtcgtctcttgtagaaaccgctgaatttcat

SEQ ID NO: 2367 - DNA, 997 bp, Arabidopsis thaliana
  Intron number 2 from transcript AT1G47370.1 (locus AT1G473 70) derived from phytozome v7.0 (chr-ID Chr1; pos 17367043 to 17368039 reverse strand)
ggtttgtccctgggagacggaaggtattttctaatgcttcttttgttttcctataatttgtttttcaaaaacatgtaatatcttatatatttaattagtgtatagaaataacccagtttccaatatgcgatattctaacattttaataggtttcattgagatgtgaatgagaaacgatccaacataaacagtccaaactcattaaaaacctcccgatttctttttaactaaggtttaacaacaataatataataattaattcccacagagacggccagatataattactaaggtaattttagttaaatttgtttagttaattgatttttatcgtttaatttgggctgcttgttctgaaagctagaaagattatagtagtttaaaactttaggttaaatcgttttgaaaatttgttttcgatggaatttgtattttgaaagcttgcatgagtagacgaatacccattattttttggtaaataagaatgcatggagtcatattttggttcccgaaggcttaaaagaataataataggtgaatttccaataggttttatctcatctatctcttccataagtttgtcacattatttttgtcgacttgtggatcacattttaatactactattatatatatatatttttaaaaatcgaaataatgtttgggagaaaagtatgccaatggatttgagtctctagatctgatttgtgtttgtgtgacaaacaaagataatgtaaaagatgtgtggagcttagggaattatagaaaaaacattttctgtagttttatgtttaggatcgaatgttcaccctttttgtacttatatctacttcattaatttctttcgttgatcctttcatcttgtggttgagaattcctcgattatatcacgtgaaaatatttagtttctctgcactttagaaaatatccattaattgagttacaatatatatatatggcaggtctgaagccgattttattaaggaaatcgttaaag

SEQ ID NO: 2368 - DNA, 428 bp, Arabidopsis thaliana
  Intron number 1 from transcript AT1G47786.1 (locus AT1G477 86) derived from phytozome v7.0 (chr-ID Chr1; pos 17598088 to 17598515)
atatcggcgagacaagcgcaaagtaataataatactcacacattctttatttaattaaatttattggtatatattcaaagatcaaagagatatacaccataaacatgttttggaataaattcaattaagttatattattaaacttaaaaaaaataaactaataaattttggcattttctacaagtactattttttttgttgaccttttatttttatataaatggttggcaccacaaacaataataaatatcatctattgtatctttctattgagttcatcttttcttatgacatattaaactcatttcactaaaaatgtatatactttgaatcttgttcttctttgtattcgaagttttcctcactatatatataggtctattatgtctgcagttcggttcgatttgcgagacagttgggtcttcgaa

SEQ ID NO: 2369 - DNA, 968 bp, Arabidopsis thaliana
  Intron number 1 from transcript AT1G47990.1 (locus AT1G479 90) derived from phytozome v7.0 (chr-ID Chr1; pos 17698967 to 17699934)
aacgaccctgcctttcgctctcagctctccttcaggtagacgtatagtaactgtatttctagatatatacggttcgggtttggtctcattttaacctaatcattattaatattttaatgaaattatattgaaatagtttatatatagttgcatgtaaaatatacaactgcatgtatagcttggatacgttcaaaagcttatactatatatctaccaaacttcaaaaatattaatgtgataaatgcacatgattattatatgtaggcaaagtgcatgtttatgttaattattttttaatgcatgctaatatgtcagcataacagtatatataatttaattaagtgttaacttgtaggtctacatttatgtaaaaggagacagttatagctcatggaagcattaattattgatactaaatacaaacagttcaccttttatgtatttaaatagatataggcttgtttttcatttattttggaagcttttaaacaatactagagtctggagaaaccaaacgtaccagacatgtagtaaactaaaaaaatgtaatagtctctctcaataacagtgtatggataagaattgtgtatctactaatctacatgatacatgacatgtactattttatatttgagcttttagaaaaacttatatatactacaatctgctagtctttgttctcaaatatactaactcttacgaagttgtataattgttcgtactaatgtttcaacagtttttttttgtacttaactcaataatggctcaataatgattcatttttgtctatctttttttttctttgatagaaaaaaacccaacttctttctgaaagtagaaatattaaggttacgtggatatatttcgtatatttctataagtaaccaaaaataaatgaatctcgtgctgatgtgtgacgtatatgtttgacagctcggcagtgaattgttacatagaagcagttaagc

SEQ ID NO: 2370 - DNA, 680 bp, Arabidopsis thaliana
  Intron number 1 from transcript AT1G48010.1 (locus AT1G480 10) derived from phytozome v7.0 (chr-ID Chr1; pos 17711849 to 17712528 reverse strand)
gagttttcagcagtaagggaaagcaagggtaaaaacatcatttgtccctctccggaaatgccaaattttgtaaagacggaaagaaatactcttttcaaagattgagtccaaagtatgagtaaaagctttatttgtactttccaagaatgcccaattttataaggtgtgaagattaaaaaagagctcacaaaaggcccaaaccaacaataatcccattactttgcatataacttattttttataaaaatatatgcagactttaaatgacatctttaatttttaaaattaactaccatatagattagccaaaaatagaacaatataaaaaaaatatttgacataatcttattaatttgcatcatcttatattgagaagaaaaaattctataaatctactaattgaacctatataactctatctctcacacaagaattccatcatttgggattctcttcttgaaactaaagatatataaaatggttagatacccaaaagacaacctttctttttctcttctaaaagtgtttgttcttcttgttttatttacagttatacaattaagcctcgcagttacacaaagtgaagtccatactatttgctcatctccaacatcaaatcctttattttgctacaagtttttcaagttagatcctaaaattggaaaacttgatcttcctgg

SEQ ID NO: 2371 - DNA, 763 bp, Arabidopsis thaliana
  Intron number 5 from transcript AT1G48090.1 (locus AT1G480 90) derived from phytozome v7.0 (chr-ID Chr1; pos 17756651 to 17757413 reverse strand)
tcaaatctggttttgttggaaccatcactttgaaggtaactttttttttttttttttttctcttggtagaattttgatgattttcctcaagatcactgttcccgttctgtactcttgatagatgaagtatatttcttctttctcaaaagtttacgtacttgagctgtgagaactttatgctggattggtaatcctttacagagttacttgcagcttctttcttcatatacatatactcatttcgatctatgttaaagttatttgaggatttagagagccgaaaaatcactttgtgattacatagctctgaatgctcacgtgaccagaactgtttgcatgtgtgacggtctcatgtattgatatacaatagcaatgttggaaattgatttcattttggattatgaagaacatgttagttggtaatagtgatcaaagtggaaaattttaggtcattgtttatgaattctgggatacaagttaaaatgtttaattggaatattggataaaaatgaaatatatatgcatgtgattctgtttgttgcatatattgaagcttttgatacgaagtcaaatgtcacggaggttgcaagtcagagtgatattctaatttttgaacttggacttgtgtttaatgccagcaaacgctacttttgtcaggaaactcttgtagttatggctaggtattaaatctaaaatttgaaagtgactcatataaacttttgtttcaggtcccttggaaaagtttaggcaaagagccagtcat

SEQ ID NO: 2372 - DNA, 491 bp, Arabidopsis thaliana
  Intron number 2 from transcript AT1G48200.1 (locus AT1G482 00) derived from phytozome v7.0 (chr-ID Chr1; pos 17797088 to 17797578 reverse strand)
gtgaagttaccaccacaaccaatcaatctggtgattactctcagccctctcttttgcttgtatcagcaattatctgtatagaattgttctcttagatgtttgtttattacatatctatacaaactagagtagtcatgtttgtctatatgtcacttgtagaacaaacaaatactttccctagatttaacaacagaagagggcttactggtttgagaatgtgtggttaggtatcactgtttgatacatcaatttacatctgtgcaagtacaaactaggctagattggtggggttgataaagaaaacctgacgcacgtattgaattcaaagagaaatggggttagaatcgatatgatttagagtgtaacatgaagggaaatagatatgaacatgattagaagccgcctttcggagattagctgtgtgttcactaactggttttatgttctttcttccaggtgacacagccaaggaagattctaaagtgtccact

SEQ ID NO: 2373 - DNA, 379 bp, Arabidopsis thaliana
  Intron number 1 from transcript AT1G48350.1 (locus AT1G483 50) derived from phytozome v7.0 (chr-ID Chr1; pos 17867435 to 17867813)
acagaatcgcccgccactctcgtatccgtaagaaggtgttctctttcttctcgcttttaatttcatctccaatgtctctaatattctcttgaagatagtgtttaatgtagaattgcgatgaaatttgggtgtttcattagagttcgaagaacacattgtaacgataattgaaatcgtaattcgtaaccacttctattcaattttaagcttatgtttgggttttgcatttattcaaagttgattgtaatttgacaatgaaattagaaatgtgattcatcagtttttcttgatgttggtgctattgtggcatgtttgatgtgtctctatttgttaccttgagttctgtctcattaccgttactcgatgcacacataggtta

SEQ ID NO: 2374 - DNA, 950 bp, Arabidopsis thaliana
  Intron number 2 from transcript AT1G48610.1 (locus AT1G486 10) derived from phytozome v7.0 (chr-ID Chr1; pos 17971395 to 17972344 reverse strand)
aagtagctgcacagcctgtgcgcaggactaggaaggtatgtttctctttaatttcattatctttattcacaaaatgtcaaaagaaatttagaaatggtctgataccaattatatgattgttcttgactgtttgttctgtatagtgtggaaataattcagggtaatgtcttatttgactctggtctcaaatgtggtctacttttaggattgcagtatctgaaattccccgtatttttagaaaaatgtgtatcttatctggattttggtgtattttgggaaaatgtcttatttaatattgttcttcttgactgtttcttctgcatatagtagataaagttcagagtaatgtctttatttgtctcaaatgtggtctattgtgagtgtgaagtatctgatattattcgtaatttctttgaaaagatgtgcatcttatctggattttggtgtatttcattaaatctttttttgtataatgtggaagtgaaagtgattggtctatttggtaagaagttatcatgtaatttgagtccaaataaatttcacaagtgtttagttcatgttagacataacaatgcttaatgtataattttaacaaaaggtatataccaattatacggttgttcttgactgtttgttctgcatatatagtggaaaaagtttagagttgtatgttatttgtctctggtggtctcaaatctggttaattttaggttctgcagaatttgaaatgattcgtaatattttgaaaagatgtgtatagtatctggatttggtgtatttcttgaaatctatttggttagtcattatcatttcatttgagtcaatatctacaagagttcatgtaagacataaccatgcttatacaactgtgtgtatacttatgtcaaagtcgggttttctatgcatgaacaaaagagcacttcagtggcaccggtagctgcaaacgtcgg

SEQ ID NO: 2375 - DNA, 294 bp, Arabidopsis thaliana
  Intron number 2 from transcript AT1G48640.1 (locus AT1G486 40) derived from phytozome v7.0 (chr-ID Chr1; pos 17986665 to 17986958)
gcccaactcgggtacacaattttgattgttttcaacacattatcttttaacttgtttgcttttgcatttatttgttaagttttgttcacagaagtaagaagatatatattatttttagttttcatcaaatctttgcaaattttgaacatacaaaaagatgtaatttgaatacatatgtagttttttaatttcttactacataaatttacttttgatttgattagtaatattcgtgatattacaaagtcttgttatatatgttaggggaccaggcatagcagtcctgatactatc

SEQ ID NO: 2376 - DNA, 877 bp, Arabidopsis thaliana
  Intron number 2 from transcript AT1G48800.1 (locus AT1G488 00) derived from phytozome v7.0 (chr-ID Chr1; pos 18050441 to 18051317)
gtcacaacatttcttctggtaaggatttctaactaggtttgtgatcacatggatccggtttagatcgatggatccaaaattttattgtccggagatggatccatataatttttcaaaatagattaaaacagatttagatcccggataatcattatttcactccaaaagtatttttatttggtgttagtaaaatataacaaaaaaacaatgactaaattacgaaattttgaagttgcttatgtattttaagttatagagtatctcttggagattttctaagaatatttaaagaaactttaaccaatttagttaaaataatcaaatgaaaaagccttacatatgaaaagaaactatatgttattcatacaaaaatatatatatatataatttaagtgagtgtaagtgttggcataaacaaaaaagcgagtgtaatctcacttcctccaacgatcgtccgtgattgaaaataaaatactatactaaagtctcttttcaatatatctatataattatactaggtttgaggggaaaacaaattatatgaggtcctcaaatttatttattatgaaattaacgcataaaaaacaaagttgtaactcctaaacttttttcattgttcaatatagaaaataatacaaggttactatttaccttcttaggaaaaaaaaaacgtttaaaagaatatttggatatgatgtaaaaaaacatgagagagtcctgcttgtgagcatgatcgatgttcgtacacaagtctttcgtacacaagtctttttttttaattttgacagtcttataagttataactagattcgtatatataacaaaaggttattatcattttggtcaatagatatttttaacagatttaaaggacaca

SEQ ID NO: 2377 - DNA, 686 bp, Arabidopsis thaliana
  Intron number 3 from transcript AT1G48900.1 (locus AT1G489 00) derived from phytozome v7.0 (chr-ID Chr1; pos 18086407 to 18087092 reverse strand)
gaaggtactcatcaacctctttgtggtgttccttttttatgaagatttatcttactatcagttttcttcttcggtgctctttagaactttggtggtatttccagaggatttttgttagcttacttataggagtgtatgtaaaaaaatgatttgaattttctttggaacggtagaggcaagttatgaaataggtttagtttagactcgaggtttggtttaggtcagtatcttcatatatctggactgaaaaggacttctgttacttatatgtttctttgtcctatcatccagtaggtttcgtcagatttctctagttctctgcgtgccacttacctttaggggttcttttaagcccttttccctcttttttcttgcgcttttatcggaactcatttcactgtgccactctaatttttttttacatctttgtcgaatagttcaacagtatgcataaatgaatcttttgaggtcttgtggtctcttctttttctatttgcaattagtgctactgtgctatttgtagagttggatttacttcaatgacagtaacacaaagaaatgaaaaaagaagaagacattctggattaaaaccatgctctagggcgtactgtggtagcagattgtgctaatactgagttgtgattcttgcagctacacggaatccgatcctgtgaaaattgctgttg

SEQ ID NO: 2378 - DNA, 484 bp, Arabidopsis thaliana
  Intron number 1 from transcript AT1G48980.2 (locus AT1G489 80) derived from phytozome v7.0 (chr-ID Chr1; pos 18118771 to 18119254)
ccttctctccaaacgaatccgctctcaagaacaaggtaaggatttaaccgttggttcagcagaatattttttttaatggtaacttggaatttgtagtgtaaagagagattttctttataatttctcttatcacactattttcttcatggaaaaatagaactctaaaaggaccagttataatattgtgggattcaactatctgctttttgtattgggatttagattatccatcgtttgatttgagtttcttatgacgaatcatggcatagtagctagtagtagcactaatcaagctggtataaaggattaagtaaattgattcatattcaatggtggttattatagactcaaaataaaaccagtaacaaaatgatttgatgattatatatgtgcattgtctatgatggtcattcgccaagtaattcgaaagacgctgatattaatattaggatctttaacagaagttgctgtagatttttctcat

SEQ ID NO: 2379 - DNA, 484 bp, Arabidopsis thaliana; identical to SEQ ID NO: 2378
  Intron number 1 from transcript AT1G48980.3 (locus AT1G489 80) derived from phytozome v7.0 (chr-ID Chr1; pos 18118771 to 18119254)

SEQ ID NO: 2380 - DNA, 575 bp, Arabidopsis thaliana
  Intron number 1 from transcript AT1G49040.2 (locus AT1G490 40) derived from phytozome v7.0 (chr-ID Chr1; pos 18148113 to 18148687 reverse strand)
ctccttaccctgcccctcctcctcagcttcctactgttaagtttttcacaacatcttttgtaattctcgtcgagattaggattttgattgggtttaggtccatgctggtaatttctttgttgttaaacggcgatgaaatgtggaatcagcgttgtctagttgttaggtttcttctgtatttgctaaacgaagcatttcgaagttattaactggagataaacgtgctgaattggattgatgttttctaggtacctctaattaggtctctagattagttaagttggaatattgaagttgaattgccttctaccaataaggagcttttgaaatttctctcaaagtgtggttatatttctttgcttttggtcttgtgcttgtagtttgcttttgatgctccatggtgaaatgagtcatctgtttaagagtttaacttgcttgattaggttaagccttttaagagtttgttttctttcgttagataagactagatatattaaacaagcggatttttatgattacgcttcattttcttttggacagtgtgttcttcctgctggggtggagttccattcttc

SEQ ID NO: 2381 - DNA, 604 bp, Arabidopsis thaliana
  Intron number 1 from transcript AT1G49320.1 (locus AT1G493 20) derived from phytozome v7.0 (chr-ID Chr1; pos 18246463 to 18247066)
ctattagcttcctcactctcatcctcttctctctggtatgtttatctctccccatatatattgttaacaattttacacttatatgtatatgattctttatgcatatgttcctctatatgtgtgaggctcaaattgaaagccttattctttaaacatatgtacctctatatatgtatgtatacatatgtatatgattaaaagtatttaatataagacataagagtcctggaaattaatcacatatgtaattgtggcacacaaatttacataagtttatgcatcataatgttttaagaaccttcttttctctcttcaatcggataaaaaaagaaactagtacttgtataagaatctacagcatatattcatgaaattgtttgtaatgaatccaaattgtacctaagtttttgcatcatggttcttaccacattcttaggaagaaaaaagtcttcttttccttctggcaactttttcaaataaacaaatctattttaatgggaaaagaaaactttgaatctttctgaagtttttggtatctaatttattggttttgtgtttcttgaatgtagtgggtagtggaggcacacacgtctagaaagttgat

SEQ ID NO: 2382 - DNA, 990 bp, Arabidopsis thaliana
  Intron number 1 from transcript AT1G49410.1 (locus AT1G494 10) derived from phytozome v7.0 (chr-ID Chr1; pos 18285745 to 18286734 reverse strand)
actctttcaattttcaggtctgattattgaattctatcaattttgtcttcctttgtcatgatttagctttgatagatcaagtcataacgatttcaaattcgtttgaattagttctgtttgatccttaatactcttaggatcgagttatggtacttgcttgagtttgatcaaaagtatagaaactggaaatttggtactcttgttcattagagtattcttgtcattgatatgcttcagcttatgcctttatgactcacttattgatatgaaatatatatatctgtgtatgaagaagcattatatatacccaatgtgtagatttagggattgttgagtattgatttgaatatgcttagtaaaagctggtttggtgttaatcttcagtattatgatcatgttagatcaagattgtgtgttgttttgaatgtgtttttgaaaggtttgttaaaaaaatttcaagccaatttaataatgtgtgtgatttatttacacatagatttctcattgctctgccatactaagatctctctggtctgttcttaagtaagttttaaggcttgttcatgagaatgtgttcacaatcattaaagcatgatatgtttcagcttatgtctttaggctcacttattgatatgtgaatatatctgtgtatgaagttatcttagatactcatgtatcccatggagatttagggattgttaagtattcactatgcttaggcgaaagcttctttgcttgtttgctcctcttgtgtgtcatgagagagagagtcttcttgaagaaaccttcaaaatttttctgaacatcttagattaagattgtgtgtacttagaatgtgttttgtcgattaatccaagtattatatataatgtgtgtgacctcgatgctatgggttcccctgttctcagccatattgagatcgtcaatgtcttgagtttgctaagccgcctattgtcttttatctcgtgcagcgttgaagcggtgagatag

SEQ ID NO: 2383 - DNA, 404 bp, Arabidopsis thaliana
  Intron number 3 from transcript AT1G49590.1 (locus AT1G495 90) derived from phytozome v7.0 (chr-ID Chr1; pos 18355481 to 18355884)
gtacatccggtaagtatctctctctatgatgtcattagtatttgttcttcgacttatagctgctatattcagggttgttgcttagctttggatctgtttgttatagacttaacattactgaggtcgtagagtatgtgtgaattggatttgtgaattgctttcattgaccaaaagtatgaacaaaccaagcagcgtctgattcttcgattgtcatattacacatctttgcaaatgacttataagttttaatgcctataaccctatagagaatcatcacgaaagagcgaaacggttgcttcttttgagtcactctcaggttctttcatcattttgattgccatttttcttagcctttttcatttatacatataccatgtagtaaccatattgttatggcagattgg

SEQ ID NO: 2384 - DNA, 493 bp, Arabidopsis thaliana
  Intron number 5 from transcript AT1G49700.1 (locus AT1G497 00) derived from phytozome v7.0 (chr-ID Chr1; pos 18389054 to 18389546 reverse strand)
agaacctcctggtctacgatacgataccgattgtggtgactcgaatcttgaacaattcgctagagatttagaagatcaacaacaaaggatgcaacaaaaattccagagaggacaacaacctcaacatttaattaatcaaaagtgtacttgaagatcttttcacccaatgttttggtttcgtttctcagttcgatgaaatgttttggattcttcttcttctttttctcaatcttatatatttcattttgcttccaatgcaatttcagagatatgttactggcgtttgtgtaaacaataataaaaaagaatagccaataagatattttagataaatttcttgattgttttaaaaagtttgctaacaaaaatattagaagtgaaaaagcatcatgtattagagacactaaagtcccacatcggaaggaacaaacttttctctactctatatataagttcagcttgcattaccgcaacgtcgaacctagtaacgtgg

SEQ ID NO: 2385 - DNA, 409 bp, Arabidopsis thaliana
  Intron number 1 from transcript AT1G49730.2 (locus AT1G497 30) derived from phytozome v7.0 (chr-ID Chr1; pos 18405068 to 18405476 reverse strand)
gctgcaggtttctctttatcgattttcctctgtttctttctcttttaaagcttcattatttaatcctgttcttgcctaaatcaggataagattatgaatgttggattttgagcttctggattttgcaaattttgttgctttctttgactagatttgagtttcgatggaaattcgcataattttggttcattagttgcttacatgcaaaaatactctctttttaaattgaaatcagatcttgagaaaccataaaaattcaaactttgtttgttcttttcaagctattgtggttagaaagttaaaagcttgaaacttgcggaccaatctttataggttaccagacactaatgctgcattgtcatgtgtgtttgcagattgtccattagatttcagtggatcaaatttcact

SEQ ID NO: 2386 - DNA, 986 bp, Arabidopsis thaliana
  Intron number 1 from transcript AT1G49770.1 (locus AT1G497 70) derived from phytozome v7.0 (chr-ID Chr1; pos 18424858 to 18425843)
ctttgcttccccaacttcctcctaaggtatgattcaataataagagtgtatgctttaattgaaggattttttcttatttagcatgaaattcatatattaattaccatcgtttttaaccggtaatttatatgcgaaaattgtgtgtttataacacgattatctgtatgaattaccaatcatataaaattacagatatgcatatacatataactaaaaaaaatccaatttcatcctgaaaataacatttgcattcagagaatggtctaggcttatccaaatgcaaaagaatgacttatttttggtgaaacgacaggttataaactcatcaattttatttagatctgtagatttcttcttctattttttataccgtcattctgtttattaccaatcagaacaattttataacatagtttttatatatgttaagttagcataagattctcttatgtttcattcttttgccgattgacatgttttaagatatcatgcttacgcttgttccttttcaggttttgtttcacatctttgcgcttttaattaatataactatgtcacttaaatttggtgtgatttggcaaggtcgccatgctttcgatttctctttacttgcttgtctttctcacatttcttcttcctcttttcataattttttcttgtgggtgttatcagttatgtatatattatagttaacttagtaaatttttatgaaatgtatatttgataattttcttataggattataggatatagatctaatatagatcttagctaatacatctaatttataaaaaaaacaggagtcctatttgaatccaccgattacacatggtaaaaaggctccggttttaaagcactacatataataaataatatatgaactgatatgtacatttatgtgtcggatttcttacgttatatagaatcatatattctaatattttatgtatgatatgatcgacaggcagacaaatcaacaattgtag

SEQ ID NO: 2387 - DNA, 623 bp, Arabidopsis thaliana
  Intron number 2 from transcript AT1G49790.2 (locus AT1G497 90) derived from phytozome v7.0 (chr-ID Chr1; pos 18435619 to 18436241 reverse strand)
aactctagtattatgaaccatttccaattgtggttttggactaggccactggcggtttctaagcgagggaatcttttcttccatgataatgagaagaggttatagaaatattatacaaagactgacgaggttcgtatcctcgagagagacatatgtgttatttctccttttattgagaatttgctcccacttcgacgtccagattctgttaccaagataaggacatacggatttcagtttcttgatcacgcgccgagatcccggatatccaattttctaaaacgactcgaaaaccaaaataatttgcttaccaccgctgctgctgctgtggctcttgcgactcttgtatattttatacattaggatttcggtatctagatctcacttggcgagctagttcttgatattactagtttattgggacaatacttcaaaatttattgttcgtttacggattgaccaagtaaaaatattgctttgcttgttgtgtataactgtgtagctgtaggttggtgcaaaacttggagtgatgttatgaatatcaaaggtaatccttatcttaatcaaccgttgtgctccgctttgtagtggaacatactaggaagagtagtagaatagtaatc

SEQ ID NO: 2388 - DNA, 561 bp, Arabidopsis thaliana
  Intron number 1 from transcript AT1G49970.1 (locus AT1G499 70) derived from phytozome v7.0 (chr-ID Chr1; pos 18503702 to 18504262 reverse strand)
taaacaatttcgtggagacaatctcaaagacggaggttttcattttctctcatctttttttttcaccttctgatagatttgttctttgattctatttggtgttgaattgagtcacaaagctatgtatttgacctttgtttagcttaaaccaagtacctgataggccttagcgacccatttatctgcaatcatactaagtgtagcaaagcttgtttctttgggggtttaattccgtttgcagtacgtctatgttgtttatcatctgagtctaagtagcaaattaatgtgggcttttgccttcactaaagttttaacctggagttagtttcagacatactaatttcagtaaagtaacagtcttttgttcttgataagttgtcgctgtataatggaatggcgaaatatattagtttgattgctacaattcttaattggaactaaatttaagcttgaaagaacaaaattcgccaaataagcggttaaatttgaagaacgtgtttcctttaattctctaaatactatttgatctgacatactatattcctcgcctttgttatagtg

SEQ ID NO: 2389 - DNA, 842 bp, Arabidopsis thaliana
  Intron number 3 from transcript AT1G50120.1 (locus AT1G501 20) derived from phytozome v7.0 (chr-ID Chr1; pos 18563101 to 18563942)
tttacaaagactcaacacaagatttcattgaagtggttagtttacttgactttccgtgttttctgtaggtgttatatgtgtaaaacattgtgtttcggttactttggttgcttgaacgcaatttgttttctattcaccggtgtggaaaatatataaactgggataaacacaaacaatgtagctctgttgtgttgaaacacgtctcatggttcttactatagtgctaagtcaggctgtatccttggtttttagtctgcttgatgcctaattgataatagaatcacacaactttgtatgagtcattcaacattcttagatcatctagcttattgtttctctgtggcgatgcaatggagatgcaccagggtttatatgcaaactatgaagttgaagcatgaggtttaaagcgtagcttagtctagatcttcttggaaaacttttcagtgttacatgtagttagttttctttggccaatttgtcactgcagtgagtttagtagttcagtcagttgattataacatctttctaatcaagtataatttgatactttctgtcatcaaaataatcttgttcccctgaaattggatgccttgattctggagttggtctacgatttaatcatggtaatatgtcataactgaaggtctaattacatacctcctatggcctgatgcttgatagaaaatactaagtaaatgtattttgtgataagcctcttaatttttctgaaatataatatatttttcccttttccacttgtattttatagtttgctgttggcataaatttgactcctgtaatcttgttatttaccaacaggagactcgaataccattacaagt

SEQ ID NO: 2390 - DNA, 442 bp, Arabidopsis thaliana
  Intron number 5 from transcript AT1G50240.2 (locus AT1G502 40) derived from phytozome v7.0 (chr-ID Chr1; pos 18607816 to 18608257)
aaaacattcttattggtgctggctctgtcgttaaggtaatataacattccttttgctgcttccagtaattaagtttgaaatgctgtttctatgcttcccacacacatgagttgttcatattcttgtttcttaaagataaaatttaggagagaattatcgttacaatacgattcttctacttttttcctcttcttatgagtaccagattacgtgctaacttcttgaaaattgatttatgaaccatggatctttccgtctatgattatttcagaaaactaagttaatcatgtgagtactagaagaggatacggctagccaggaatctcatacacttagctaaatataagtagaaacataagtattttcaatgcggcttgattatatgatttctttaacttctctttgccatcaactaacttgtctcccctttgatttttcagct

SEQ ID NO: 2391 - DNA, 619 bp, Arabidopsis thaliana
  Intron number 4 from transcript AT1G50300.1 (locus AT1G503 00) derived from phytozome v7.0 (chr-ID Chr1; pos 18630202 to 18630820 reverse strand)
attgggcttgtccaatgtaagcattccgattaggtttgaaatagttagttcagtttcagaggataatgagcgtttggtacttgattaaaacacatcgcaagaaacaatttatattcagtagcaaaagagaacattcagatggcatatagcgttgctggatataaaattaatttgtcttatgtatggaaggaatatagcttgtatatcaatgcttttgatgatgtcagttgactctttacttagaaagaagtgatggcccgctctgctgtgctgtgtctcttaaactggtccaaattatgtgtggaggcacatattttttccttcttttttgaatgttgattctaatttcgtaattttccttcagatggctgttaatctgaaaaatgtaatttgaaacgtgggtaggttgtagtcttgatccttctaagaagttatatttgtgaagataggctgccttcaattttctgtgtctgatacaaaaaatggactatgttttagtttaattgcaagttatgctatgtgtcatcgagtagcttaactaagaggctgcactgtgtgaatgtgagttcttatgcataatgcactttttctttttgcgctaattctttcaggtgtggca

SEQ ID NO: 2392 - DNA, 546 bp, Arabidopsis thaliana
  Intron number 1 from transcript AT1G50410.1 (locus AT1G504 10) derived from phytozome v7.0 (chr-ID Chr1; pos 18672270 to 18672815)
tcttttctcaattttgcttcttacttctttccccggtactcactgattctccccaattttccttatttcgtcgtgcccttagggtttcttacatcgaaagtttggtttttgattatgttgtcccgccattgcatgacgttgttctgttttgttctgtcctaattgcttatttgggtttctgaataatcttcaattggagttttttttttgttcaagctgaagagtttcggtgatcgtcctctagagattgatgctaattttttcaaacattacaaagtttccaaagccaccgcccacttgaaacattcttttggtgattatgattgtttatatcgatttagcattactttacaataagcaagtgattctcttcataaagtatgtagctttactttgtttgatcctactcttttggtaatcttagtttcggatttgcctttctcgcaataacagagcgctttgtaaagttttgcgttttagatgattaacattcctttcttgcgtatttcaggctgattagaaacttgaccgcttgattctcttaaa

SEQ ID NO: 2393 - DNA, 566 bp, Arabidopsis thaliana
  Intron number 3 from transcript AT1G50410.1 (locus AT1G504 10) derived from phytozome v7.0 (chr-ID Chr1; pos 18673492 to 18674057)
acgagaggctgatctatcaggctgcactacaggtgttcatccttatcccaacttttgacttttgcgattctcatcttagtttttcttttgtgcaatgcacttctctttttcgccagctgtggggttgttgaacttggccattgaatgattggaataggctcgtttcttcctgtttgttttatgtcagaaatgagtaataggtttttaaaggttcggatgtctcaatttctcaatgatgcttgagaccgggtaacatgctgaatttctctgttttagaccatgtgtatggaagcattgttgttcttcctttttgacaaacgagaaggaataggaacattcactattgttgcattcgtctcttatttcgcactgttgcatcaaggttatgatttccatttgaagagtttggtgtttttgcataattcccctggtatgaaatggtgtgatttaaaaataaagacttttgcccacaatatgaattggtgtgataagtgcttaaacttctgataattaagtacatgttttctgcaggaactgaatcaacccaagtccgaggtcgatttacc

SEQ ID NO: 2394 - DNA, 413 bp, Arabidopsis thaliana
  Intron number 1 from transcript AT1G50420.1 (locus AT1G504 20) derived from phytozome v7.0 (chr-ID Chr1; pos 18679626 to 18680038 reverse strand)
aaaaaaaaagctttagacattttctctaaatccatgtaagtttttttctttggttattgttgtttgttatcttctttgatcatttgctattattttgttttgtttctttcttagtttatcaaattaggaaagttttaattcagctctctgtttgtgtttcttcgtctatatctatttcaaatagtttaactagattcaaaggtttttaaaattcagtactttctctgcaaaccctagttcctctgttctttaacccccttttttgttaaactgcagattctctgcatctttcaagaaattccgaatcgtgggtttggttcttctcgttacgagtctctcaaagtttaaatctttctttacaaaaaaggttacttttggttctgagtaaatcaaaatcaagcttttggccttca

SEQ ID NO: 2395 - DNA, 957 bp, Arabidopsis thaliana
  Intron number 1 from transcript AT1G50460.1 (locus AT1G504 60) derived from phytozome v7.0 (chr-ID Chr1; pos 18694290 to 18695246)
atttgcccactgggtaatgatttctttccccagtagggatttctgtttttttttattcttcttagattagtgaacattgattgagtaatgtgtgaaagatgagtcctttattttgtttgctttttgatttaacaagatttagtgatctcaggttctttatgtttctctacattgcatgatccaaagtccttatttttactctttgtaaccatcaagtatcgtttcgttgcttgattcatgaattacaatctttagctctaaaatgcgagtaacgagctctatcctggtcgtagtggctgtgactttgagctttagttggagccagggaattaaagaagtgtcagtgggtaccattttgcagggacagatcctttgattctgttctttctctctttttgtttatgtgaaacttacatatccggttaaagctttaaggacttctccttcttttttttttctctcttatctcttacctttactttggtatcttgttcctatccactagattgctactgctcaatgaatatgcactggtttcttcatattgtagccattggattctctctctttatttgaggagatgtatttttcataatatttgcaggttttaactttcgtgtagactcatcattgtcacaacaagtctgtttgttcaaatgtttacatccaatcattgctgttatctcttacctttactttggtatcttgttcctatccactagattgctactgctcaatgaatatgcactggtttcttcatattgtagccattggattctctctctttatttgaggagatgtatttttcataatatttgcaggttttaactttcgtgtagactcatcattgtcacaacaagtctgtttgttcaaatgtttacatccaatcattgctgttatgtgttggattgcactgactgacttgcttttatttcaggagggagaaaggtacttatt

SEQ ID NO: 2396 - DNA, 443 bp, Arabidopsis thaliana
  Intron number 1 from transcript AT1G50490.1 (locus AT1G504 90) derived from phytozome v7.0 (chr-ID Chr1; pos 18705780 to 18706222 reverse strand)
accaagactgttgacagccaatctgttctcaaaaggtacttttcttttcctcgatcttgtcccaacatttcgataccaattcaaatgtaatcgccttagtcttttgcctcgtttttggatatatcgtcgctccaatgtatcttctttaaatccatttcatggtttgttattatttggctattacgcatatccagttctcgtggttaatgtactgttatggatccgttaaatgaagtgggagacttctcatatatgtttgcatataaactgtttgttagaatgtctctgagagaattaaatctttaagatgttctttgtattcatcttgaatcagatctacattttattgctcaaagtttcggttttttaatcatgagttcagtaaatcccagattcctaatctaggcttttctttgattaaacgcagactgcaatctgaattg

SEQ ID NO: 2397 - DNA, 428 bp, Arabidopsis thaliana
  Intron number 3 from transcript AT1G50590.1 (locus AT1G505 90) derived from phytozome v7.0 (chr-ID Chr1; pos 18733286 to 18733713 reverse strand)
agctcctgcaggattcccagatcatccacacagaggttggttttgttatcgttattttaaacgcagtttacacgttaagtttgcgtttacacgagaaaaaacaaatattttgaataataaatttcaactttcataaagatgttagtatatacctttcatttgacgtttatgtttataattacttaaattaacatatgtataatttttctttaagatattttaagtcatggtttcatttggaagcacatttaatttatacacaaacctaagttgcaatgctaattaaaaatcaaggcattaatcttcaccttctgataaaagcagaatacatatgaccacactaaccaaagctatcactatatcatggttcttcttgtttactatttgttttttcttttccaaaatcaggatttgagacagtcacttac

SEQ ID NO: 2398 - DNA, 373 bp, Arabidopsis thaliana
  Intron number 3 from transcript AT1G50730.1 (locus AT1G507 30) derived from phytozome v7.0 (chr-ID Chr1; pos 18796219 to 18796591)
aagatcgagtaacatcgttgaagttatcaataaaggttaacatactaactaatcaaattgctttgcaacaaagcatggagaatttgtttgtaaaaatttcaaaaaattggttgtgttctattcctctgtatcatttttatccgtatgaataagtaaaaaggattcatttgattgatatatccaatatagagtgctcttaaaagctcgtgttcaattggagttgtatttgaatacttttccgccatagaagcagtttgcttggaaataaaaatagatatgtgctttggctgtagatatttattcctaactaactagattattattattttagggttcaataatatcttccattctgcaggtcacaaagcttctg

SEQ ID NO: 2399 - DNA, 782 bp, Arabidopsis thaliana
  Intron number 1 from transcript AT1G50800.1 (locus AT1G508 00) derived from phytozome v7.0 (chr-ID Chr1; pos 18827037 to 18827818 reverse strand)
acaccactgaaaagagatttcaagagctcaaggtgctggaatcatcgatagaggagcgaattcttaaagcagaaagaactgtggcatggctgaaagaaaagagagccatataacagaaaaaaaagcagcagctcgtttgagttaggtgcttttttgggtagataaagaaatgtgaagtctaatgcaagtagaatatcaaagttcagtctcatatagtcatatctatatgatcttttggtttagtatcctttgattttcctgcttaatctcttttgaggactggtttgctttaagtgttttatttaaatcttttgaactcagttatgagctagtagcttcttggtgtgttgcagatcagatttttcttacaagtttgataaatcaatgcatttgtttcttacaggtatgatagatcttttttttaatccagaaaatgagctctcaatctgatcagttagtatcctttgaagacttctttgctttaagtgttcatttaaatcttttgaactcagttatgatcttgcagatcagagttttgcttacagaagatagcttcatccttaagtgtttaatttgtattttccgaatttactaagttatgaatgagctaattaatagcttcttggtatgttgcagatgagaattttcttacatagacagcctgattccctcatgtgaatatctaaccatagtataccagttctcaccattaaatatctaataatctatactaaaaacaacgtacgatcgtattattgcatttaaactgaggttaaaggcta

SEQ ID NO: 2400 - DNA, 340 bp, Arabidopsis thaliana
  Intron number 1 from transcript AT1G50950.1 (locus AT1G509 50) derived from phytozome v7.0 (chr-ID Chr1; pos 18880471 to 18880810)
tcaacctccaagatcaagtccgttgatttctacaggtgggaaccctctttcgtgtaacaattccaatgataattctctcgataatggtttttgacgcacttgcaaaagtttgtacctttctatacattttcgactgtatgtgtttgattttgcctttttgataattcgaaattggttctgtcttctcgtttttcatcttgatgatgaactgtgcatcggattacggataattactctgtgaactgtgtgtttgtgttgtctggagttagagctgagagtaatttgagttccatttgtttcttcaggaaaatcccaagagatttgactgaagcatctctct

SEQ ID NO: 2401 - DNA, 362 bp, Arabidopsis thaliana
  Intron number 4 from transcript AT1G51130.1 (locus AT1G511 30) derived from phytozome v7.0 (chr-ID Chr1; pos 18940218 to 18940579 reverse strand)
aggtaagaaatgttttgcagaccccattttgtttgagtttatcaaactgattccacttatgttgtacctgtagtcctattctcctttgagactgcacatcttaacaccttgcctagattcattgaatgcttttcttatcccagcctgatcgatcagtggtgtttaatagtcgtttgcatgatatccaatgtgaaattgtatatagttgatttgagtacaaaaaacatactgaagttaaaagccctcgccatctgtgaaatatgatgcgatgctttgtgtggagcttgttgattgttatgtagttagggttttaataagaaataaacaagctgatttgcatacgcataataataaccaggtag

SEQ ID NO: 2402 - DNA, 968 bp, Arabidopsis thaliana
  Intron number 1 from transcript AT1G51200.2 (locus AT1G512 00) derived from phytozome v7.0 (chr-ID Chr1; pos 18984722 to 18985689)
agggaccgatctatcaaggcttcaagggcaaacaggtgaattagcttttgggatttggttttatttagggttcatttgtaagctgttgatgtgaattcttttttatggttctcgattgtttaatgatttgattgtttggttatatttgcatgtgggttttgtgtgtgtttggaaatttgaatgaattgatgtgaaaagttgtaactcttgtttttgttgatttaaaaggctaagttttgaaaattttcatttctgtggagagaggtagtgttggatatgagtgatattagctatgtgggttttgtatgcttttgaattttgaaatgaattgctatgaaaagttgtaacctaagaaaggtagtgttagatggaaattagattagtatgtgagttttgcatgttttagaagcttgaaatgaattgctttgaaagtttatagctttacgctgatataagaggctaatttctaagtagtgttggatagaaataagattagctgctctaatgtttttaaaatgattcatttatgattctaatttgcctaatgaatgtggtactaggtgctaggtaacctagacacttctgtttggttgggtagcttattgttagaaaacaggtcagcaagatttgtttgtctgtttcaggttctagagttagcagagaaatggctctaggcttgcttttgttctcttctttctatttagttaaagatcctgaattataggaaggtgcttataggtagtgtggttataaactatgaagatcatgtgtaaggtatccagataagttatttcatgaaaagaattgttcatctgcttattttcatgtgtatgttttgcactgattttctaaggcaactgatgatactgattgggtttaaatgtactcatcatcgtgaatcttctgcgaatttttgttttatttttccatgtcactgagactgaagatggctgattttaaatgtagaa

SEQ ID NO: 2403 - DNA, 880 bp, Arabidopsis thaliana
  Intron number 1 from transcript AT1G51402.1 (locus AT1G514 02) derived from phytozome v7.0 (chr-ID Chr1; pos 19052479 to 19053358)
gtcattgacgccattgcaattggtaagttggattcccacgtgtgatctctttatctctctctgtttcttgtttatctgatgacttggtgatggattgtgttttaaaagttggggatgatccagttccttatccaaaatatgaatttatagcaaatgggtttttgccacgtgtctctgtgctatccttattttccaaacaaaatgaacactagaagctttctttcttgtagtgtccggaagaactaggtccattcttgattcttgggcaaaaaaggtcaaaagcccaattcacttcttcgaaagccaaaacggacgagtagtcactttagtcagtcagtggtcacgacctttttctggcccaaacagaaactaatagaattaaattaggtaggtgctattattccattttcaaaacaatataaaaaggggttattgctaaaataggatctttttagacaaaaaatttgaaattaggcacttgtctatttgacttacaagaataggtattttcatgtatttgaattgacgaatttgcccttgagtttttcttcttcttcatgcttcttcttcttcatcgttcttcttctttcttctcttttttttttttccagaaactgtaaatccattttaatcattaaaatttagagaatccaaacaaaatatttggtggatcttccgtttcgattcgtaatagtgaagacaagataataatttcggtttgaaattgaatttaacaattgaattccaatcaattgaatgaatccagttaaaggagttttcataaaaaaatctaaaccctaagataatgtatatggaacccatggattctaatcatagactttcatcaaatcaattttgtgatagagaagagaagaagaag

SEQ ID NO: 2404 - DNA, 679 bp, Arabidopsis thaliana
  Intron number 1 from transcript AT1G51480.1 (locus AT1G514 80) derived from phytozome v7.0 (chr-ID Chr1; pos 19093412 to 19094090 reverse strand)
gaacgtgataagagttttggtgttttgattcattggtataatttaccctcagattgagtgatgtatctacctaactccatatcggaaaccctttctggtagctacgctcaatgtatttaaaagaagaagaaacaagaaaaaaaaaaacacatagtattaaatattgatttatgaaaatccagttttaatcacattcataacaattatttacgtaaggaacaaaagattacattattcgtaataattatttactagattcccttcactagcagaatgaaaatttgaatctaattgtatagatttaatgtttgtatgggtctcttattaaaaccatgcatgatgagcttttagagttaaattgagtgaatatgcttagtattttatggctgactaaatttcatctttgtggatatcaaacttctgactttttcttgaagctaccactacttttaataaactatttaatctcatttcaacaactattggtgacggttgcagtttcttggaagctgccactctcaataaactaatagtaattgttgtctgacttttagtttttttgatacagtacatgtattcacgattgtattcctctttctcttctgccttctctcgtgttgtttcctgcatcgccttgtggcagtaatctttggggtttctttcttgaagtttttgcaaa

SEQ ID NO: 2405 - DNA, 518 bp, Arabidopsis thaliana
  Intron number 2 from transcript AT1G51510.1 (locus AT1G515 10) derived from phytozome v7.0 (chr-ID Chr1; pos 19103520 to 19104037 reverse strand)
tcaaggtatggagttttgcctttgtttcttagtggctcttgatgtcattatgccttttggttagttattgtgaagctaatttttttgcttagttatgttgatatcattttgccttttggtttgttatagtgaagcttgatttgttggattgttgtcatgatgtaatttagagatgaatgcaatactgttttgtcgtagatgttgactttactctttgacatgctttgtgttaatcaatgtaatactgaatatctgaaattgagagccaaaaatgataaatttatctttgcaatgttacattgcttttaagagggagatgtaatattctgtaaagtgcaatgctgttccctaaggacacttcgtttaagttacttcaaagtgtcagaaatgacgggtcgaataagataagctgtcttctagatgcgagtttaggaatcaaatattatttttctttagtttgcttgagttctcatggaagtggaagtaacactttgcttttgttttttttgataagggat

SEQ ID NO: 2406 - DNA, 464 bp, Arabidopsis thaliana
  Intron number 3 from transcript AT1G51530.1 (locus AT1G515 30) derived from phytozome v7.0 (chr-ID Chr1; pos 19110684 to 19111147)
tcgaacatgtaagattgggatttttgtttgatttctcttgatatatgtttggctactagtaaagaaaggcagagactttacgcaacaaatgtagagtagcattgtagcttgaggccaatttgtttaacttggtgtttgtttgttctggtgtttctgtataaagaagaagttttgagctctggggcttggttttgcttatggtgattcttcttttacacaaggatctggacaattcggagtacaaggaaggcaggaaagaagatatccaccagcctctcattagattttcttgacatttccacctgaaagctccttcactgatcaacacgtctcaacttatttcgggtaaaacatttatgcatatgtgttatttatgtgaggaaggctctgttgtttgttttgacagtcatgttttttgttaatgtatagcaattttggacctgtgctaagcgtaaggattccaa

SEQ ID NO: 2407 - DNA, 468 bp, Arabidopsis thaliana
  Intron number 1 from transcript AT1G51690.1 (locus AT1G516 90) derived from phytozome v7.0 (chr-ID Chr1; pos 19164198 to 19164665)
tctaggagtcagcaaaagaatttttcaagagacaggtaacacttttcaatcttgataaattcaaatctcattttcttgcaactaaactcgaacacattgcgaaaaccttgtttcaccttttatgaacgtaaaaaatgttatctactcataaaaaaaacaaagtcagcaacaatcttcataaatatgcaacggttatcagtcacctaatcgtatacgaaatcatcaacagaggccacttgacctagcgagccaccactgaaaaaggccaattaaagtaaagcatcatagttcaaaagtcaaaactgttacaagatactgatttttcacctttattatatttttgatagtccttcaaatcattacagtttattagtctctgtttgtattcttaccttaaagctctgcaactaaactgctaccagtggatggacaataatgcgaaaaatctatgttttgtgttcagtttta

SEQ ID NO: 2408 - DNA, 425 bp, Arabidopsis thaliana
  Intron number 1 from transcript AT1G51690.3 (locus AT1G516 90) derived from phytozome v7.0 (chr-ID Chr1; pos 19164198 to 19164622)
tctaggagtcagcaaaagaatttttcaagagacaggtaacacttttcaatcttgataaattcaaatctcattttcttgcaactaaactcgaacacattgcgaaaaccttgtttcaccttttatgaacgtaaaaaatgttatctactcataaaaaaaacaaagtcagcaacaatcttcataaatatgcaacggttatcagtcacctaatcgtatacgaaatcatcaacagaggccacttgacctagcgagccaccactgaaaaaggccaattaaagtaaagcatcatagttcaaaagtcaaaactgttacaagatactgatttttcacctttattatatttttgatagtccttcaaatcattacagtttattagtctctgtttgtattcttaccttaaagctctgcaactaaactgctaccagtgg

SEQ ID NO: 2409 - DNA, 719 bp, Arabidopsis thaliana
  Intron number 1 from transcript AT1G51720.1 (locus AT1G517 20) derived from phytozome v7.0 (chr-ID Chr1; pos 19180965 to 19181683)
tttctctttttcggcgacccgtcgctacaggcaaagtaaagttgtaatctttttttctttttttttgggtcttcttcattttagctttacgaaattatctgctaaaatcagcaagtatctctcactatattgaagtttccaacctctgggtatgccaaagttagcttattgattttgtgaaagatgttagatttgatcaaatgtttcaagtgctgcggcttgttaggtattcagtaaattttggtgtgattgaagtttttttgagttaggaattgtttcttgtggcaaagattcatactttacgagctggttctgaatttttgagtcttgatgtttggatgattctccaagtgataagttcattgtctggaacgaattttcccccaaatatgttcacaagcttagatggatgatcaaaatgatttaactcattggatttaactcaaaatgatttaactcattggtctctgatttgatttcacatcattttctgggaaattttcctttgtagtattcatgttatttgcttgatgcctctatattgtgcatttcttggtagatgaagtctagtatgccattgctatctgctgaaaagtactgaaatatggctggtgttttttttgtatctatattaatttttggctttgttctgatggtggaccgtttatatctgttgcgcactaggttgtcatttcgagcatcgtaccaagtgtaagata

SEQ ID NO: 2410 - DNA, 472 bp, Arabidopsis thaliana
  Intron number 1 from transcript AT1G51840.1 (locus AT1G518 40) derived from phytozome v7.0 (chr-ID Chr1; pos 19250151 to 19250622 reverse strand)
cggcattctgaatctttggttagttttgcacttcaagaatttgtgttttctaggagttgaaccccaaacctagagtaacaatattaatccttgaatcttgatcaactactggaccatggggatttccatgtttcctctgatatcttatacaacttcttattattattcttggttttagtcttttagatattcatttttaccttaccatcatattatcatatgtaatattatgaagacaagtactctcttcattgttgttaacagataagattttgttttttaaaacacttgttaatttctcgcaactctctctatcaaatgattttgtaccggtaaggaaatattctcaattatttctttattcaattctttaatcttataatgagttgactatgaattttgatcatatagttgtatgcatagtttggtatcgtaaaaacaaaaagctctcatgtggacagtcaggagaacc

SEQ ID NO: 2411 - DNA, 428 bp, Arabidopsis thaliana
  Intron number 2 from transcript AT1G51870.1 (locus AT1G518 70) derived from phytozome v7.0 (chr-ID Chr1; pos 19265875 to 19266302 reverse strand)
gtatattttccatctgattcaacatctatcgtcaggtaagaaataataaatcttgttaggcaaccataatttttgtcttcgttttgttctttgtgtgtgatacaagactggttaggatgattagggtagtcttagaacgtttaaattaatttgttttggtggtttctttttaatttaatagcaattacgtatttctttttgacattaggtttagggttggtgatttttctttttgacattaggtttaggtataattctttctgatgattaataaagaattaaactccaacaattaacctaattctcaaagagggagtggggttaaagggaagcttttgcttaactcattcttgtcttttacctttaacaaaggttcatatataatagtgtgtttcgagttaacttaaatgagcatttcttcaggtacg

SEQ ID NO: 2412 - DNA, 680 bp, Arabidopsis thaliana
  Intron number 1 from transcript AT1G52180.1 (locus AT1G521 80) derived from phytozome v7.0 (chr-ID Chr1; pos 19425176 to 19425855 reverse strand)
aatttacataccttgaagctgttccaacttccaacgtatgtcttagttactactatcatactatattactatgtattggaaaacttttggttagaacctgttgggaggaaagggtttatgttctggttcattttacgtgtactaagtacttataattaagattaaaagaaacatttacagcttcaccctctggtcgatgtatgtgggctgtgggcatgtggccaatctctgaagcgttaggtagagcaaatatagagttgagagttgcttaagttagtgaacgtgaatgactaaaaagatatgttgcatttaaatcgtattgggcctcatcccatctaaaatatagtaggtgtaggccttttaggttaatttgaataaaatcaacctttttgtaagcaacatcgacgattgtcacatttttctcatacacataggtgtaatctagctttgaatgttttctcatacacataggtgtaatcaccgtaattatcatttgtgaagatatatgttttaccaagtggtttgtattgtccatatatactttaccactttcatattaacatataatgtttttgtaagtattataccataaaggattggtttcttaatattattaacaaaacgcaaaaattcttttaaacgcaggcgattccaatccacagcgttgcggttagagtagg

SEQ ID NO: 2413 - DNA, 368 bp, Arabidopsis thaliana
  Intron number 2 from transcript AT1G52191.1 (locus AT1G521 91) derived from phytozome v7.0 (chr-ID Chr1; pos 19440157 to 19440524 reverse strand)
ttttggtaaatttattctaccctttttctgttagttttttgttttgttttctgtgttcttttcatttgctggtgtttatgtttttccttcatatgattttaatgttttaattgcttttggtggtaaatttattctaccctttttaatgttttttcttttcaatgtgcattattactcttataagctagggagaacaaaacaatatccgaggacatttaagcaatatgttctagtatcagtttattacatgatacggtattttaaaataaataaaaaatttatgtaataaagtatctttgatgacaaaacattgtttttggtcatagtattgacgaatgccataattgtattatacggttatattcaga

SEQ ID NO: 2414 - DNA, 825 bp, Arabidopsis thaliana
  Intron number 1 from transcript AT1G52191.1 (locus AT1G521 91) derived from phytozome v7.0 (chr-ID Chr1; pos 19440573 to 19441397 reverse strand)
tttctgtaacatgtaacatctggattcttcagctttaatgctttcgtcttgtagaaaatttggattgcctggtcaaaccgacctatcttgaaacactcattcaccatgatatttagcgtatattcacccatatttttcatttcctcgctatacaaaacctcgtcgaataaggaccaagcttcttttttcttaccatacttgagaaaaagggccaaaagctagtgcgttaatagcggattcaatgattaataactaaatctaagatagattttcagggaaatatatatatatatatatatatatatatatatatatatatatttttgggaaaattggaaaataaaagatgtttaaaattggaattgtttctatacattttttttaaaaactaaattgtcacttattagtattaaaacaaaatttaaaccagttttaagagagattttttgaaaaaacactttgatatatgaagaaaatttaaagaataaattttgtgattatatcgaaaataaatagcttttagattgttgagattccatatgcaaagtttagaataagtttttttatatatttcgaataacttctacaaattttagattatatattctatacattttatatgttctacgacttttagaattgatatatgttccaaaaaatttagaattcataattttatatgatatattaactgaatcttctgttttgttggataacaatatcaactgaatgtaagatatattttcgattctatatatattttcagccttaattaaagccattctcactttccaagtttcatcctcgaaggccttcaagtcatcc

SEQ ID NO: 2415 - DNA, 256 bp, Arabidopsis thaliana
  Intron number 2 from transcript AT1G52460.1 (locus AT1G524 60) derived from phytozome v7.0 (chr-ID Chr1; pos 19549790 to 19550045)
agcatttctctgagtaacgtttatatcacatgatttgttttgtattattacatatcttacatttcttctaatccaaaagaaaaaaaattcatctcacatgaacggaatattattttttgttaggtactttaatcatagaaactttatcttcgcttcttaactcttacttttgatttgtattttcgttgttttctcttattatgtttatataatttttgcagttcagttcagtttgtgaaaattttgaatcttaata

SEQ ID NO: 2416 - DNA, 267 bp, Arabidopsis thaliana
  Intron number 2 from transcript AT1G52470.1 (locus AT1G524 70) derived from phytozome v7.0 (chr-ID Chr1; pos 19553873 to 19554139)
agcatttcactgagtaatgtttatatcacatgacttgttttgtattgttacatatctttcattcttctaatctaagttaattatgaaattaaagaaacttttttcgtctaacatgaacggaatattctgttttgtaaactaagcataagagcttcatgatctttcgcttcttaactcttatttgaatttgtattgattttcttactcactgtgtttattaatttgtttgcagttcagtgcagtttgtgaaaagtttaaaacttaaaa

SEQ ID NO: 2417 - DNA, 294 bp, Arabidopsis thaliana
  Intron number 1 from transcript AT1G52530.1 (locus AT1G525 30) derived from phytozome v7.0 (chr-ID Chr1; pos 19568751 to 19569044)
atctccggtcagaatattacaaactattgattccggtgagtttatgaactgtatacttgaaacgattctaacaattcacgattctccaatcgtttaattatttcaatttcatacaatccgatgttttgattgcattcgaatttaacctaaatttgaatagtcttgtgtttgattgaatctggtcttttagttttgaagaatcgctttttctccgaaatctgtgccaaaatttgagttcgtagagtgatttctactaaagattcactcatcgtcttgtttctttgtaacagtgaa

SEQ ID NO: 2418 - DNA, 799 bp, Arabidopsis thaliana
  Intron number 2 from transcript AT1G52690.2 (locus AT1G526 90) derived from phytozome v7.0 (chr-ID Chr1; pos 19620736 to 19621534)
tttataaattggacactagttatttcgggtgattagtacggaaattacataattggtattttataaagttttcgttttaaactttgcctaatacgaagacatttacatcataaattttcgcaacatgcacttgttttcgttacttttttttatttttattttattttacatctttcgacctaatttattagtccatctctattacgttttaacagagtcaaactctggaagacggagtcaaatttaatcactattcacttgactaaaacatattcctgttacttctcaattatttattcaatcatttctttaaaaaatagttttctctgtaacgttcgtatgggggtaacggttttcaatactgttacttcaggaaatttcacaaagttttgtttgaaagttaatttgatttatgcataccagtattaggatttccgaagcaattttgattccttgagaatttgctggtcagataaggaaattgttttactaagatatataatggagaaatataattcacctttttaacggtttcgaacgaagaataatacattaactattgattatgaataacaaagacaaaaaacgaaagctcaaaactaaacactttattatattgtacgataatagttttgctccccatttgttttctttatgcagaaattaaccatatcctcaaagcccaaggtttgtgagccagacacggatctcattaattacatgatccctgcacacatggtatataactcaaattcagtgatgtatgttaagaaaatagtaatcaaaaaaaaaaaaaaaa

SEQ ID NO: 2419 - DNA, 500 bp, Arabidopsis thaliana
  Intron number 2 from transcript AT1G52695.1 (locus AT1G526 95) derived from phytozome v7.0 (chr-ID Chr1; pos 19622663 to 19623162 reverse strand)
acgtaggaaacacaggcttcaagtaacattctcacatgctatattgtttatcgttatatatgctcttttgttttgaacaatcaaagattctcattaaaattagaaatatgatttggaagtacttcaacttttaagttttttgttattaaacataaaaatagatatatacgtacttttaaagtcttttaatatgtgaaaagttgatttttgccatgatatgcaaatactaattttgtcagttcaacatttttttggatgaacatttctttgtatatataaaggttatggcgctgcaaagaataatgatttttctctattattttacattcctctgaacttttattttcttgtaagatattgagttcatttcactaaaattttacaatatatacattttttttttttttttgtattcgcaatagacttcccattatatgtatttttaactgtctattatgactgcagctcacttgagcctctgcaaaatttgcgtcttccca

SEQ ID NO: 2420 - DNA, 613 bp, Arabidopsis thaliana
  Intron number 2 from transcript AT1G52700.1 (locus AT1G527 00) derived from phytozome v7.0 (chr-ID Chr1; pos 19632411 to 19633023 reverse strand)
gctctaggttacactcttcacatggctctttcgattattatgctttttttttgtgtcttaaaagaatcaaactaacatcttgaagcataaactcctccgtggtgcttgctttccttgtcttaagtataaatatgttctagaaaaacacttcaacttttgcgtgtgtttatatggaagaaaaaaaagagttttcaaaagttgaattttggcatgttctctaataccaactttagagaacaaaatgtatgtgttgcttcttttttctctattgaaatttttgaagcatcatttgtagataaatgttgtagcgccgcaaataattaattgatattaacatactgaacttttcctgtcaaatgtcttctcttatgtgaatattaagtttagttcattaaagtttgtaactaaaaaaaaaaattgtatatacttttgagggaccactaaactagcctcacttaactagttctgttgctggtagacaattaacaagacaattatctcgtgtcatataaaaaagaatattccatgttttgtgtattaatcaaaataaaaatttgaaacatacatgcgtttctcacatttgtctctgttttgccacagttcatctcagctc

SEQ ID NO: 2421 - DNA, 478 bp, Arabidopsis thaliana
  Intron number 1 from transcript AT1G52740.1 (locus AT1G527 40) derived from phytozome v7.0 (chr-ID Chr1; pos 19645482 to 19645959)
agcctatcactcgttcttctcgagctggtctccaggtagattataatctccctcacactctaagtcttccgtgtctgtttctttgggaatcgaaatggtcttatacacctgaacgattagtagatcgcgtttaagtggtagatcgatgagattctgagctagatttggtaatttcagctgagaattagagacattgggatgcgagatttggttttctattgtgttatctgctggagaattgtttcattaagcttttatggttgatattgaacccgatctttgatttcacggagtcttgttgttacagctaccttgtgaattgaattcggagttttttttgtagagatttattgtcatatatgaaatgtttctgggagcaattgagatttgagtattcatttaggttccattgttgtggctaattgaatttacattgtgtgcagttcccagttggtagggtgcatcgtctgttaaagac

SEQ ID NO: 2422 - DNA, 478 bp, Arabidopsis thaliana
  Intron number 1 from transcript AT1G53210.1 (locus AT1G532 10) derived from phytozome v7.0 (chr-ID Chr1; pos 19845192 to 19845669)
ggtatgtcaaaatgtttattaatttttttcaaagtttcaaatttagatcctgaggtttcgtatgattcaattcgatctataaagtgtcatgcttgtgtgcgagttatgtagcaaatgcgaaattgaaattcattttgagtgaaatagacgaattttgttttgctttgatgaagattctttgaattttgagagagcaaaaaaagtgaatatttgattggttctgtgaatcaaatgatgatacagggattaacaaaaagtgaatttttgttgggttttgtgataccaaattgtgaaaagatgatgatgatacactgatgttaaccgatgaactcataacttgtcactttgtgctttttagtcaaaatcttatcttttttttctgtggagttgttatcttgatgggttatttattatgtgtttggtgtttctttggttataaacaatgtcttttggctttcagtgtctggactatctggag

SEQ ID NO: 2423 - DNA, 478 bp, Arabidopsis thaliana
  Intron number 4 from transcript AT1G53280.1 (locus AT1G532 80) derived from phytozome v7.0 (chr-ID Chr1; pos 19865935 to 19866412 reverse strand)
ggaaagagaaagctgttgaagtctctggccccttggtatgtcttatccctgactcttctatcaaccttaatttggtctccaaataatcgacagatcttagaggccagtttctgttgagaagatggctctccgcaaagaaggatatatttagtagctgattcgaggggagcacttatttgatttaacactctttaaagcaccctagtattgttagttcatgtaaaaaaatacaaatacgtgttttcgacctcactaatactgtgatttccttgaagcctaggcctgtggctgaatttttcagcattatttcccctgtccactgatcagtgactgttcttgtgagattacagacagttgaaagctatataggacactgaaaaatttaggtttccacaaagaaacaaccattccttggtagcataggctttattccatggtaacctcttagtctctattcttcccctttgcatatcaggtg

SEQ ID NO: 2424 - DNA, 585 bp, Arabidopsis thaliana
  Intron number 2 from transcript AT1G53320.1 (locus AT1G533 20) derived from phytozome v7.0 (chr-ID Chr1; pos 19892109 to 19892693 reverse strand)
atcaacgttttacttgtatcttgctctaacaccatgtaagttatttcaaaagtattacttttccttttgcttcattcttattgttgattcagtcaaaattagaaaagtatatatggcttgaaatgaaagttttagataggctttttaagtgtgaaaacgattgaattagtgacttcctaaggttgtctcagtcttttacctagtaatgccttgtctttgaaacaacttaccaaccaattgccattaataagtattgacttttttgttgaccttggttgatgatgaagaaaattctgagctgcagtctaatataggagttgacctgtgaagtagtttgctaggcattgttaatccttttatctatattcgggtatcttgacatcactgaatgatattttgagttatattttcattccaaactcaatgaaaatatcattatattaaatttaagagcaaactgctttggaacaagttaagtaaatttttcctttgctggcaaaaggatcattttcaggatttattaatttagtttgtattttctgttcaccagcattcactgataagggaaagtttcttctggcggcg

SEQ ID NO: 2425 - DNA, 725 bp, Arabidopsis thaliana
  Intron number 1 from transcript AT1G53480.1 (locus AT1G534 80) derived from phytozome v7.0 (chr-ID Chr1; pos 19963915 to 19964639 reverse strand)
tccctgattcgagattgacacaaaccttagaaattgtaaagagcttaggtatagcaacgaaatcgcagcaggaatgtgaagatctaagaagaaattgaagaagcttacctgcgattttgacagagcgatagagagagaacgcgtcgcagaaagtgattgaagaacaacaaacggcgattaagcttaccgatctgaagtataacaccaaaaacagcagcgaaggatctcaaaaattgaaaatcgaagaagaggcagatgcaaatccgagagaaaacacaagagtttccaggatcgttacctctctcgctgatttcaatgccggcgcgagaaacgaagatttcaaatttccagagataatcagcagtagcaaaatgacttgagtgagcaataaaatgtcaaaacgacatcgcagtttgttgaaatgcacatcgctaaacggcgtcggtttgttaagctaagacttcctttttttggttcatttaaacaaaaacaacatcttaagtaaaatacaacaacaaaaacacaaactaaacaaaaaaccctagttctctctctctagttagccgccgcaaaccagatcaaatcttcaaacgccgttttgcctctttggtggtcggtttcggccggcaccgtgagagggcctctcttctctttttagttttttttttcctttgtgtcgattttttttagccggcggcggctcctccttctttgtggcttaatca

SEQ ID NO: 2426 - DNA, 286 bp, Arabidopsis thaliana
  Intron number 1 from transcript AT1G53580.2 (locus AT1G535 80) derived from phytozome v7.0 (chr-ID Chr1; pos 19992760 to 19993045 reverse strand)
tcgccgacgtttctcatcctgataaacctgctttggtatgtttttgcttcctaaagattgaatttttcgacatgggttttggttttttcgtgtctggtctttgtttttcgaatcctagttctgatcttcatgatgaataataggaactggattcatttagttttgaaaagatcatcaattttggatcaagttatgttctttgttcatctgatttgttgaatttggattgttttatgtgatgtgatgagcagttgattgatccggtggacaagactgtggatagaga

SEQ ID NO: 2427 - DNA, 423 bp, Arabidopsis thaliana
  Intron number 1 from transcript AT1G53730.2 (locus AT1G537 30) derived from phytozome v7.0 (chr-ID Chr1; pos 20061856 to 20062278)
catcagacagtgagtttcttcttcttctgagaatcttcttcactttatttcgcttttgattgattttaagctgagtgggttgttcaaagtctctatctttttcgtatatccttcaattgattctcttcatccacagtttcaatctttacctttctcaaaaatatgtactttgcgtaatggcttttctccaaatctcaaatatgttcagtctttttgggctaaagcttgaacctttcacttctctgtgtgtttcctaatcttgagaacaaaacattatagagtttatatataatcttgatgatctcaagtggactttaaagcaggaactgatttgtggttaaatttgtgttgattggattgtggtttaatggtctctgttttctaatttgtgcagcttcagcattgaacacattgttcagtggt

SEQ ID NO: 2428 - DNA, 422 bp, Arabidopsis thaliana
  Intron number 2 from transcript AT1G53990.1 (locus AT1G539 90) derived from phytozome v7.0 (chr-ID Chr1; pos 20151461 to 20151882)
gcgccggagctttagccgaatcctttcttggagtaaatatcatcagttttttactactgttccatttcactagaaatgttgttttgatattcttcatgcgcaaccttaaatgtttctgtttttatgtacttacaaaaactattaactcttggaattttggtttatttcataattgatgttaatgaattttcattttgactttaatagatattgaaatattagttaatggtatttatttgaaagagaaaaaaatttagaaagatatttaaattgaaataaagggcgtagaaattaaaacaattgtgtaatttttattactttaaccgatgatatatagtgttatttgattaattgatatgttccacttcttcttttttatcatgtaaggtgataaatttgggaacacagttaaacaacttcaa

SEQ ID NO: 2429 - DNA, 323 bp, Arabidopsis thaliana
  Intron number 1 from transcript AT1G54100.2 (locus AT1G541 00) derived from phytozome v7.0 (chr-ID Chr1; pos 20198431 to 20198753 reverse strand)
ctcttgtttcaactctcaatcctgctaacaatcaggtttctccgcggtttcttcttacatgattttgaaaatgcctatgaaagttttatataattgaatgtttctggagatcaaattggtttcaatcattgagtttagacctgattcttgtgaactttctaaggttggtttgtttgtggattgaattttggtttcattttgtttcgatgatgtgaattgttttctcttccatgtctactatgatattctgctcaataatcatttttttttggttttttactgatgcagccaattgctcaagttgtggaagcttctctagagga

SEQ ID NO: 2430 - DNA, 312 bp, Arabidopsis thaliana
  Intron number 2 from transcript AT1G54140.1 (locus AT1G541 40) derived from phytozome v7.0 (chr-ID Chr1; pos 20214332 to 20214643 reverse strand)
ttaatttcagcttctcacagcctcctccaagagaggtatgcattgttgacgattccatgtttcttcttcttcattgtctgagaagagatgcgatatgatcggtcatttggtatatgtgaatcattagggaattatcactcttacttatgacttatgaactgtgtgtgaccctcttgcctcataaattgtatcactgagaacctcaagtttttgtctgtcacatccatgccttttggttcctgaatcttgaagtttctgtttttgatgtttgatttaggttctgcttgagcttgctgcaagtaggaacaagat

SEQ ID NO: 2431 - DNA, 944 bp, Arabidopsis thaliana
  Intron number 1 from transcript AT1G54380.1 (locus AT1G543 80) derived from phytozome v7.0 (chr-ID Chr1; pos 20299210 to 20300153 reverse strand)
taatcgtgttcgtgggcgaacggagagtggcagtaatctcgataacctcgcagatgctttgtttgtctcttattccttgcattcttcacctgactgttttgtttttcttgttgttggttgagaataactttaggtgtatcaaatttagatagataggtctaagaaataggagtaaatatgttgcacttttccgggttttgtggtgttttctttctcaaatgggtcatcacatacaaatccagtctgctttagtatcagtgagtttcggcagtggtttttcctattaaacaacttcaatggtttcttgttgctaagcatctttttcatggtttggatgtctgtctgttttcctgctcgagagctcttttcgtgtttcttgatctgttcttcatttttaattcttccgtcagttcgagtacataacttgtcgttttgataggggcctcttattttcttttccacaggtcccatatctgctgtaccaagacgtaactgtgtgaatatatttgtacattgagctgtcagctgaagagatttgtcaaagtccatttttcaccaattttctcgtttcttagacacaatacaagtccctttttttctttcttttttctatgagctaacagcctaatacctcatacattcattctgtatatagattgttttgttcaggttataaaggacataggagtttcttttggttcaaattatatagggccattagtctttggctaaagttgtacatgttcatacattttcaataaaaatagtgcattcacactcagaaccttaaagttattatgtattttgatggacttatttcttctctgtttctatgcacgctcatttctgttgtgtttagaaatccttttgtttgttcctgttacttaccttgtatgattatttcttcagaagaaaatttggggactgaagaaggaacggaggac

SEQ ID NO: 2432 - DNA, 695 bp, Arabidopsis thaliana
  Intron number 1 from transcript AT1G54470.1 (locus AT1G544 70) derived from phytozome v7.0 (chr-ID Chr1; pos 20345007 to 20345701)
cacgactctagtttcacggctagacttgaaaacaggttcaagcttctatagtatacgaaatagatgttaaatcttatctataatgtttcaattctaagtggtaacatgcacacgttttagaatctatatagtggatattttctcaatcaagatttaattttatgcattttattgactaatcttttaaaaaccaattatgcaatccgcatttgcttgatagatttgattaaattatatttaattaaaataaaatgaaaatgtaaaatcgataaaaaacataccgtagaaaatttgcgcacatccaataagaaaatagtgtgtatcactgtatccttttctatatttgaatgtcccaaactgaagtttgtattctttcacttgaattgacttgacttacttattacgtggtatatacatatatgagtcttcaaccataaacatatcattcgatgatgggtgttttctacgatctacacttggcctatcataaacaatagcaatcacttacatgtgccacaaaaacttctgactcattcacatacatatcttgttgaattcttataaccatggatgtatttgcattgaactcacactctcaaatttctttggagtttaattcatttgcttctctttttctttcttttttaaatgttatttgcaatgaaagggaagcgtttcttgggccaatacttgat

SEQ ID NO: 2433 - DNA, 470 bp, Arabidopsis thaliana
  Intron number 1 from transcript AT1G54510.1 (locus AT1G545 10) derived from phytozome v7.0 (chr-ID Chr1; pos 20362007 to 20362476 reverse strand)
ctctcgccatcagatctttttctctgatttcttgggtcagtattcttcttcatagattgtttcattgtttgctctgtcttgttgcgttctaggttttgtttgttctgtctacctctgtaatttctctgttttgctctctagggtctttttaatttgatgctaattacattatttttgcttctaagtggatgcaattagattattattttcatagaatgtaatgatttcttcggagtaacagcttgtttagttgaacaaatggttttgtggaataagtatttgattctttggccttaaagttaatctcttttctaatgtaacttaaagtcatatcttgttattttcatttgcttaatcaaaaatagaaacttgacttggggtttacattcttgcgtctttctaatgttatcatgatgtatcacactgttatttgtattttccaggtgagaaaataacaaagctagctagaa

SEQ ID NO: 2434 - DNA, 535 bp, Arabidopsis thaliana
  Intron number 1 from transcript AT1G54510.2 (locus AT1G545 10) derived from phytozome v7.0 (chr-ID Chr1; pos 20362007 to 20362541 reverse strand)
tttgtcatcttcgtccccactaatcactctcgcaagtatctttcttctttccttaaactcttaaactctcgccatcagatctttttctctgatttcttgggtcagtattcttcttcatagattgtttcattgtttgctctgtcttgttgcgttctaggttttgtttgttctgtctacctctgtaatttctctgttttgctctctagggtctttttaatttgatgctaattacattatttttgcttctaagtggatgcaattagattattattttcatagaatgtaatgatttcttcggagtaacagcttgtttagttgaacaaatggttttgtggaataagtatttgattctttggccttaaagttaatctcttttctaatgtaacttaaagtcatatcttgttattttcatttgcttaatcaaaaatagaaacttgacttggggtttacattcttgcgtctttctaatgttatcatgatgtatcacactgttatttgtattttccaggtgagaaaataacaaagctagctagaa

SEQ ID NO: 2435 - DNA, 644 bp, Arabidopsis thaliana
  Intron number 2 from transcript AT1G55205.1 (locus AT1G552 05) derived from phytozome v7.0 (chr-ID Chr1; pos 20595022 to 20595665)
tgttgagtctaagagctggggtttagttcctcaaggtcagtctttttcctctctctggctctattacctttaagaacattagtgagaatatcattatgtttgttttgagatggaagaatgaggaggacttgttacgttttgtataccaagaagattcacattatgttgtttctcggtgttgcaactttgatgttgattccttgtgtgccagttttagacatttggtggggttctatggcaatggctgttatcagttcttgattgggaaagtatgttttagctggttatcttagcagttgcatagattatgttagcgccttttcaatctgtttgtaaatctgatgaataccttctcgttccatgcgttatttatatcaaggatagttcttgcctcttttacattcttagattgttgttacttgtcatgaaaactctacttgtgattgaaattgttgtctttgttggcttatagtttacttgtatttgcagttttggttatgtttaatactttggcatatgcatcatgtttagttcttgggcattggtttcatcttgtggagtcttcttatatttgatatgaacttgttgcttatctttatgcatttaaaagttaaccttttctatctgaaaccgcaggaatttca

SEQ ID NO: 2436 - DNA, 503 bp, Arabidopsis thaliana
  Intron number 1 from transcript AT1G55530.1 (locus AT1G555 30) derived from phytozome v7.0 (chr-ID Chr1; pos 20730528 to 20731030 reverse strand)
ctcggtttctgctatcgaacaacaagactcaaaaggtttgctaatttctgttacttttatcgtttctttaaaacggctgatttatggttagggtttcaagatggaacgcagattcttctttcgattttgaatccgaccaaacaaaagctcatatctttgaatcgatgactttgttgtaaacttttacgatttcgtctactttgataaatgttctggtttgcgattgacgatttcaaaacccttttcatttctcttctataaagtcattttcttttattgacattttgatattattgggtttttcagtgtcttgatgattgggttttattctacgctttgatgttccttattcgctcttaggggttcgatgaacttcattagctgacagatgtatattagtctcttcaacgagatttactcatttagctacaagttcttattctgtgttattttattttttttaattattctttgtggttatttctaggtagaaagaatcggac

SEQ ID NO: 2437 - DNA, 772 bp, Arabidopsis thaliana
  Intron number 1 from transcript AT1G55650.1 (locus AT1G556 50) derived from phytozome v7.0 (chr-ID Chr1; pos 20796485 to 20797256)
aatcttcggacaaaaaatttaagtgagttatgcatgttcttttagtgtttttggttttcttaatgaattttattgtttataaaattacaattgtggatgaaaaatcctactctacatcgggttgataaatttattagagattctacaactttattcacaatccattgtatggtgggttataaatataccaaaggagtcagtagacagtagccttgttctccttggtttgagaaacactgggataagtggcaatttttttgtttaagggaaaaaaatcttcaaaatattgttattggaaaaggtgactttgagctttggccctgaacttcctcttaaaataaaaatgactcgtattgtcgtagatttaagggcttgataaaatttatttggctagatggaagcataaaccaattaggttatcgaattgtgaaggcacggaagtgtgtatggcttattgaattggatctggtttgctcttaaactgtagtccaaaatcagtctttatttggttttgacaaaaagatttgaattgataagccacgaagagctgtaagattttttttaattttttttttggttaccgttaatgctaaattgttttaaaagtaaaaatgttgggaaatggaaattgcttttatgctcttctgatatgttcaatgttttgtgcttcagttgatctattctcttgactaaatttcattacattaaactgtttctgattttttccgtttgtaaaggattcctattgtgggtggaaaaagtcttgatctgc

SEQ ID NO: 2438 - DNA, 750 bp, Arabidopsis thaliana
  Intron number 1 from transcript AT1G55690.2 (locus AT1G556 90) derived from phytozome v7.0 (chr-ID Chr1; pos 20811902 to 20812651 reverse strand)
ttggagagttatcgaagagatcgtgtcacattaaggtaaaaacagagttttaattagagttctgtttcggttctgttttttttttggtttgtcggtgggtttactgttaccccttccgagaatcgagggttgagatctcatccgtattgttcttcttcaatcggcattactgcgaaatctaacgtttttattgttttttccgaatcactgattcagcggaataacagagtatgatggttttttgatttcgacgttttctgattactactgtttctttttaacggtttctgtctcatttaaagtcttgagatttgcatttatggcgatagctaaagtaatgtcttttttttattaggattgaagacaagtctttaatgcagagaaatcgtgtgaaaatggattcttaagccccacttttagttgcagatctggagctttttactgggtttctgctaatttatcgacaagaacaaaaaaaggtttacacaagtttttgtttttatgtttctgttttgtggttaatggcttaggcaaatatcttgtgggtttggtactgctttagttcttatgttcacgaggaatcctttgctttgaaagtctatggccgtgtaaaagagatatgtatttaatgtaatcacaggaagatttacttttgattcaaaacccaagaaagttatgatgattcttggtttaatttgttttgacaagttttgtcttttgtttctccaggtttgttttgtctcacaagtg

SEQ ID NO: 2439 - DNA, 597 bp, Arabidopsis thaliana
  Intron number 1 from transcript AT1G55810.1 (locus AT1G558 10) derived from phytozome v7.0 (chr-ID Chr1; pos 20860676 to 20861272)
aagtccagtttttgtctgtgcatcgagtttaacaggcaatgctcgtgtctctctctctttatatgtttagattctttatctggaacttggaagctcttttgttagctatatctaatcggtgatctcgaagcttattcaatccctctttcttttttcgtgagtttttatcttcatgttgattcggtttatattggtttatatgatgatgaaacgtttcttataattcttttgcatgtattgatctaaaaaaatctagctttcttctcttctgatctctgttttctttttgttctttcccttttttacccgggaaaaagttacggtttcatgtttaggattggcgttactattatctggtggcctatcatgattggttgattgttttgtgtgttatactggatttgagaaaatgggtatcacggcattggcacttgtggcatctaactaatatcactaaaaagtttgattcttttgaggaattgttttttgactggaaagtgttcctttttgttcctggatggtgacaacaaaggtagctttgctttccttattggcatatttcatgtgaatttagatttgcatatttgtgttgtagga

SEQ ID NO: 2440 - DNA, 476 bp, Arabidopsis thaliana
  Intron number 1 from transcript AT1G55810.3 (locus AT1G558 10) derived from phytozome v7.0 (chr-ID Chr1; pos 20860797 to 20861272)
atctcgaagcttattcaatccctctttcttttttcgtgagtttttatcttcatgttgattcggtttatattggtttatatgatgatgaaacgtttcttataattcttttgcatgtattgatctaaaaaaatctagctttcttctcttctgatctctgttttctttttgttctttcccttttttacccgggaaaaagttacggtttcatgtttaggattggcgttactattatctggtggcctatcatgattggttgattgttttgtgtgttatactggatttgagaaaatgggtatcacggcattggcacttgtggcatctaactaatatcactaaaaagtttgattcttttgaggaattgttttttgactggaaagtgttcctttttgttcctggatggtgacaacaaaggtagctttgctttccttattggcatatttcatgtgaatttagatttgcatatttgtgttgtagga

SEQ ID NO: 2441 - DNA, 673 bp, Arabidopsis thaliana
  Intron number 1 from transcript AT1G55940.1 (locus AT1G559 40) derived from phytozome v7.0 (chr-ID Chr1; pos 20924555 to 20925227 reverse strand)
tttagtccaagtagacattatattcaacgtaaacggtacaagtcaaagtggcaagcttgtcttgataccacaggttttggtttctccctttcacattctttgttatgatctacaaagaaacgatatgagaaagattgaaatcaaaggtataccggacaactggtttcgtaaacacaaattagattagacattttgacgtcatgttcatggatcacagtgagagcgtcatctacttggagtcttgaatttaatcctatcttctttactatctctactaattaatgtatgcttttttagtttgtgtgttttagaatcaatcagtgtttactaatagctaataataatatcaaaagaaatgtgagctgttacgtacattgtgtgttgttatatctttggtggtcgtcgagatctcatagttggccaactaacttgaattaaaatttctatacaaatatcaaaagaaacacagagttaaaatcttaacagtttaagttatgtatttctcttacttatttctagtgtattagtatataatatagttaatcttgtaatttgaagatataataataatagaattacagtagtaacttgtaagatttggttttcttgcatattgcttcctcaaaatatgtagctatttataaatatgaacaatctcattagtttagatatt

SEQ ID NO: 2442 - DNA, 161 bp, Arabidopsis thaliana
  Intron number 1 from transcript AT1G56210.1 (locus AT1G562 10) derived from phytozome v7.0 (chr-ID Chr1; pos 21035800 to 21035960)
ctccgaccataccacctcttccacttccttacaaggtaagttatttagttccccttcatgcacataactataacatagtttcccacattttacatattatttttttcttatactcttcgactcaaaagttttgagttttttttttgtttgtactcgtagtc

SEQ ID NO: 2443 - DNA, 556 bp, Arabidopsis thaliana
  Intron number 1 from transcript AT1G56290.1 (locus AT1G562 90) derived from phytozome v7.0 (chr-ID Chr1; pos 21075341 to 21075896)
gccggagtagctgtcttcttcttcttctttttccggtaagtttcctgagaattagttctttattcttcattaacgaagataaaggagacatatttgcttaagattgctctctgtttcaattctctagtttcttaaattctccaatttggttccaatcgaagtacagtatattggtcgtcgtgttgcatttcgattgaagtttgtttatgggttttcttaagatctctcaatcagtagggtttagaatctataggatcaaatttagtttcaaactttcaatctcgttgctttaagctttaataacatctacctagtgacctacaagcttagcactagtaaagtatgatcttactgatcagaggattgtaatttgtaaatattgtggctgaggtttgcttagtcaaataatgtgcttgcatcttgcttttggtattgctgattttgttgatctctggatcttgttctgtttacagtagtatcatggctatgacatggtctaatttgttttctgttttgtgtaggtttgaagtttgcttcgctctgcctttgaagtctg

SEQ ID NO: 2444 - DNA, 881 bp, Arabidopsis thaliana
  Intron number 2 from transcript AT1G56420.1 (locus AT1G564 20) derived from phytozome v7.0 (chr-ID Chr1; pos 21123065 to 21123945 reverse strand)
ctcttcgccaagaactcgagtaaaattttctcctttagatatctcagctcttattacattgattctggattactggtttctgtatattatggttaagtatttgcatatgtagtagaagcctttgtttttatcttgcaaactgatagattttcagtagtttactaacatgtacggcaattgtatttgcataattctggttcatactcttagctatagccccagctaattgtacagctgatttaattatataaaccattcatgatttgtaatgttttaaattcctcggcattgcagtatcgatcttgttctgctttctaagagcatttatctagtatatatcttgttctcctttctttgaccatagttctatgtttcattcttagagatgattgaattatatagaaaactcattagtcatgataggtaatacaagtacatatggtgatatggatatcggttttgcataattctacatcatattcttagcttatagcccccacctaattttgagctgattgaacaatataaaggaaaaaccattcataagaagcaatgttctaaactctttggaggcgcagtatcgatcttgttctgtgtcatattcttagagcatttatggatatcagtttttttccatatctctatgtcacattcttagagctgattgaataatataggtcaggtaggtaatgttctctattcctcggagttacctgtatgcatactaacatacacagatagtcttctgttctgtactaccaatttcttggttttattttgttgtcggaaaaaatatgtgttgatgaaataatttttgtttgttgttgttgttgtctttgtgggcagaggtccagtgctagagaaggcatcaaaatcagttt

SEQ ID NO: 2445 - DNA, 989 bp, Arabidopsis thaliana
  Intron number 3 from transcript AT1G56450.1 (locus AT1G564 50) derived from phytozome v7.0 (chr-ID Chr1; pos 21142330 to 21143318)
ggaggtatgtctcagctcctagtttcagctctttatttggttaagtatttgtattggtttaatgtatgcacaaatttttgcaatgtatgtttagatttacatctgttataagcttgattgcttgaatcgtttgttttgcctctcttggtgtttgtttggttaaatctgtttctttttctctgtgagagatcatcacaagtcagtgaatagatcatgtgtttcagatatgctcgtttcatgcgtatgaatccttcaaatttcatttctctagtgtcttttctgctacatttttaagtatggtttgattcttttggtcaaatttgatttttgcatctttatagacgattcagtgaattagggtcaaacactattatgcagaacaggttttgttatgtctattagctgcttgattgataataatatgtattttgggctaaacatatagacaagcaattgctttttgttttttatgagattagtttcacatcccccttgcatttgttttcttagctacgttatctttccaacatagaatgttacagttctttggttgttcctgtttcgtctctttaatattgttagatttagggtaaactaagaattgaggcttcttttatgaatgatccagagaataatgttgaaaagtcttgactgtttctagatctttttgcttttgtttcggttccctgtgtgccatccattgttaattaggtcaagagatgacaactgagaattaacgttacaaccatcaaccagtacttagctatgttcattgaaatagtttgatttctcatatcttaacaccgactcacaataagtaagagctgtcatttgtttgtacggttaataattttgatggtatatctatgtagcttggattattcttttatgttctaatggtgtgatcctggtttcctgggacttatgcaccagggaaattacgatattgtgccatcaactcactttcaaatttttgcatgcaggttcat

SEQ ID NO: 2446 - DNA, 515 bp, Arabidopsis thaliana
  Intron number 2 from transcript AT1G56555.1 (locus AT1G565 55) derived from phytozome v7.0 (chr-ID Chr1; pos 21191440 to 21191954 reverse strand)
acgtcagcaatgatgtcaaatgatgtttaacaataagtaataatgtaagttccaaatcaaaattaggctatacatcaacatatggagtgaagcgaatgataaaacttaaaacataaattcaattatatatatatatatatatatatatatatatatatatatatatcttcaagtataatgaaaggatcaaattattccaaacttgtttaatttcttccgctgattcttgatcttcttcttctccctaaagtcgcccactcttacaagttaaccatatcttcatcattgacgatggattattatattgctgcttgttttttgttttccttacattttgagccaaagataaactccaaaaaccaaaacatgcttttctctttagtcgatcaaaaaaagaaaaacacagaacgagaacttcaatgtcctatcaatatctggagacgattctacgattgcttggtgaaattattagccacacaggccttgaagaaagtaacacttggccaaccacagaa

SEQ ID NO: 2447 - DNA, 634 bp, Arabidopsis thaliana
  Intron number 1 from transcript AT1G56630.1 (locus AT1G566 30) derived from phytozome v7.0 (chr-ID Chr1; pos 21226041 to 21226674 reverse strand)
tggcttcttcaagatattcctaaatcttgtcaaaggttatattttcttttgactttcttgtttagaacttatagttcggttagacattacttttttttgctaaagggttttcaaagttagacattacattatacatagtgaatatagaattgtatacatactaatttcttcatttcgatagtgatggttactctgaattattcttcaaatcatattatgcgtgactgaggtctgaagtagtaagttgctccaaaagtttttttttttttttttgtcataatctttttaattgattgaatatacagaaacaacatctaggagataatcaaaatgagggtattacttaattatggcaagacacagccattttttaaattcattttggttgtaaatggattacttacgaaaatacaaccatattttctgtgaattatcttcttcttttttttgttgattaatctgtaaattatctttgtatgtatatagcaaattcacaccacttaggtttaaattttgtgtgcatgatctgtcgaataattatcgtatcgtgggtcatgtacctttgtttcacatttatattactttcgtaattttttcaggaaggtttatttggccggaaaaaacatcagcgaca

SEQ ID NO: 2448 - DNA, 894 bp, Arabidopsis thaliana
  Intron number 1 from transcript AT1G56660.1 (locus AT1G566 60) derived from phytozome v7.0 (chr-ID Chr1; pos 21237915 to 21238808)
acaacttttgcagctacaaatttggataatctaaggtacctaaagttcatttttctcgttcctttcttgtttgatctctgtccaaagaattttgttcttataatttccatttttggaatagtcgttttcttgatagatctgagattttgggttttttatgatttagtgcccttgactttgtagacttttttttttttttttggtctcatcttctatatggtgaattaatctgtttgctctagcctctctcttacaagaaaaggaaacaattgttctataattgactataattggtgattttcctctttatcattaggaaaaaaaaaaaataacattggagaattcgacattcttgtttttttttttttcaacgagtagtagtgcttgctaatatatagtgacctacatttagtttattgaatctcggtgcagagaggattgtagagtataggtgtataacatgttcatttagtcgttgtaattatgttttgtataatagtcgttgagctaccagagatcaccgatcatgtttttattgtattggttggttcaacaagacatttatgtgataggtttccacgcctagctaccaaaaaaaatcaaatgtagtaaattctggtttgacgatgttttgtctaaataaaatggtgaaccaatgattataaaacactgaatatgatttggttatccaaatatgtggttgagccataaccataaaacgaagattattttggttgttggtcgctagcgctaattgctggcaaacgaaaaggaccataggcagaaactattagtccacttgcttttaaatagaaaaagtgtagctctttttcataatgaatttcgttataagaaaagtgtttttttttttgtttcattttctagcagagaatt

SEQ ID NO: 2449 - DNA, 378 bp, Arabidopsis thaliana
  Intron number 2 from transcript AT1G57570.1 (locus AT1G575 70) derived from phytozome v7.0 (chr-ID Chr1; pos 21321778 to 21322155)
ccattgaggttagatctacaatcctactgattctactatatattttttgcttgtgtgataatatatactctagataaggcgcaaagaaacttgagtcaatgaaaacgacaaccatcagctgataatggatgggaggaaattttgtagtattcatcattttttccttaggaaatttcgtagtaattcacaatgttttcggtttgacaaaaaaaacaaaatcacaatgttttcttatcgtaggaaaaatttcataggaaattttgtagttattcattacataatgtgagaaatgatgaaaataaatgaatggagaattaatacaatagatactcatcctccatgtatgaaaattcaaatcagttggccgcggtacaaaaa

SEQ ID NO: 2450 - DNA, 934 bp, Arabidopsis thaliana
  Intron number 1 from transcript AT1G57620.1 (locus AT1G576 20) derived from phytozome v7.0 (chr-ID Chr1; pos 21343032 to 21343965)
aggaacattctatcttccctactgtctccgttaaggtaaagtaatttcgtaaaggacttgctttcatgttcgttgattggaatctgaactctacgaaattagtttctaaaaatggtgtcttatcttcaccttgaatccatgcttagttctagtttccttatttgttcatgatgtgaattcaattgttaggttacttcatgatctttcatgtaatcaatggcaaagtagctgattcatagaataagagatcttgaagtgaaatgtgataagagatcgttatgtgaatattgtttcctcagttctggatcctaagcgtttaggttttgtttgaatgagaagagaagatgagcttttctagtaaggccctgtgagcattgatttgtataatgtaacaatgcattaggttggtctgttgaggaagtttgatcaaagagtcaaaatgtttggaaagagatgatgattagttatgacatcaagttctctatttgcttgcaaagatgtcttgttgactctacaatggttatatctctcccggctaccacatagtttgatggatttttgtagaaagtttactcgaatgtgttttaggttaacagatttctagtagtcgctatatgtttgtgagtgttttacgtcaacatagtagtgaccatagcttgctctgttaaggaagtgtgaaaaagagtaaatatgtgtggaacagtcattacttggcgacctcaagttcttaatttgcttgatattcttctgtgttacaaggtctctgttctcccatgctttattagttagatggtagtcaatgactctcccagctaccacatagcttgatagattgctgaaaatttactcacatttgtcatgaagacgtgcaccaactctttgaaatggtaaatgactagaagtttttatgttttattgcaggttacagcacctt

SEQ ID NO: 2451 - DNA, 369 bp, Arabidopsis thaliana
  Intron number 1 from transcript AT1G57660.1 (locus AT1G576 60) derived from phytozome v7.0 (chr-ID Chr1; pos 21355769 to 21356137)
ctaagcgtgccgttggtgttgaagtcaacaaacaggtgttgattactcaaatctctaatctgtttggaaaagttttgattgttgaaattagggtttgaatgtgattttgattctttcatttggggtttaattcgtctttgtgtgagctatctgttttgaattctgagatgttggattggtattggttcgaaagattcaagcttttcttcttgggtccttcttttgctatttgtattagttgcaatcaatctactatgattcttatttttgaaagccttctcttttagtttattgtatttcttggtgggctaattatgtgtttgggtttggttttatagattgggaacagaatcataaggaagaggatac

SEQ ID NO: 2452 - DNA, 347 bp, Arabidopsis thaliana
  Intron number 1 from transcript AT1G58025.2 (locus AT1G580 25) derived from phytozome v7.0 (chr-ID Chr1; pos 21461804 to 21462150 reverse strand)
cagtagaagcgccggtctacttaaaaattcaattggtaaaatccactttccctcctaactttttctaattttttgaatctccctctcttctcttcttcctctccaccaatctcttcgattttctctggtaaattacgacgacgacgtagatttagggtttcttattctggtaaatttcgctctgctcttgtctctgaattcaagcttgtttgaatcttcttaatctcgactatatatagattgtgaatttcgtgatctgcaatttgatttatttaaacgattttgattgattcagattttaagattttgtagccctttggttgttgcaggagtctcttctagcttct

SEQ ID NO: 2453 - DNA, 364 bp, Arabidopsis thaliana
  Intron number 1 from transcript AT1G58025.1 (locus AT1G580 25) derived from phytozome v7.0 (chr-ID Chr1; pos 21461787 to 21462150 reverse strand)
cagtagaagcgccggtctacttaaaaattcaattggtaaaatccactttccctcctaactttttctaattttttgaatctccctctcttctcttcttcctctccaccaatctcttcgattttctctggtaaattacgacgacgacgtagatttagggtttcttattctggtaaatttcgctctgctcttgtctctgaattcaagcttgtttgaatcttcttaatctcgactatatatagattgtgaatttcgtgatctgcaatttgatttatttaaacgattttgattgattcagattttaagattttgtagccctttggttgttgcaggagtctcttctagcttctctctgtgtgatatctac

SEQ ID NO: 2454 - DNA, 318 bp, Arabidopsis thaliana
  Intron number 3 from transcript AT1G58200.2 (locus AT1G582 00) derived from phytozome v7.0 (chr-ID Chr1; pos 21551955 to 21552272 reverse strand)
tgccacggtatcatctgtgctcatagcattgttcaatggtttagtgcttctttttgattttcttcaagcaatattggtgttgtggtggaactctcctcttactttaggacccttttctgttagttgtttatgcttgtggatctgtttttattgtatttcacttttgtgtgctctacgcgtctgatagttatgtatagttctcactctcaattagaatagatgataagttggcggttgttagccatgtgggcttctattaatttttcctttcctgttgtcttagagacaagacgtttggagtcttcagctactagagag

SEQ ID NO: 2455 - DNA, 457 bp, Arabidopsis thaliana
  Intron number 2 from transcript AT1G58220.1 (locus AT1G582 20) derived from phytozome v7.0 (chr-ID Chr1; pos 21561876 to 21562332 reverse strand)
ctcgagttctggttcgttaatgacttctggttcaaagaattttgattgtgtagttttattgacttatctgatgttacagatgtatattgatcttgttgaaagattcaattttgcatcagagttttttccaattagggtattgtttcagcttcttgaaatgttggttctctctggatgtatggaaggaagatggaaccttgtttgctagttctgtttcttgttattcacaatggatgcaaacttttgttccggggattcttttgttgtacctagggagatagcatctgatgagtgattattgttctcaatattgttgtgtagagtaaaagttctatttgttttgattttggtgaatagcatttaggtcttaaggtggaatgaatttatgtatcatgtgatagctgttgcattacaagatgtaattttgcaaatttgaatgaactcttgcttgtgcagg

SEQ ID NO: 2456 - DNA, 408 bp, Arabidopsis thaliana
  Intron number 1 from transcript AT1G58340.1 (locus AT1G583 40) derived from phytozome v7.0 (chr-ID Chr1; pos 21653308 to 21653715)
gccaagttttctggaggtaaattatttctttttttttcctatacgtaaatgtttgtttttttctacatagatatgaacataataattcaagaatctagttcttgacaaaactagattgtacgaactataccaaaagcatatatacatatacatatatataaatagaaacaacagtttcgcaatcctttttatatatatacctaaatctttggtcccggttggtgatttggttttgtcatttttttataaaggtttaagataagctttatttgattaatataattaaccattaaccagggaaaagaaaaaaacgatctactgacgtggacggttcttggtcttgacttttcttttcttaattatctggcggcagggcttagaggaagtgaaggcgatcggaaaaatctc

SEQ ID NO: 2457 - DNA, 348 bp, Arabidopsis thaliana
  Intron number 1 from transcript AT1G59580.2 (locus AT1G595 80) derived from phytozome v7.0 (chr-ID Chr1; pos 21884173 to 21884520)
actgacgaatctgattcgtccccaacactcaacgggtaagctctctctgcaaaattcagatcgttctagctcaatctcaacatcggatcaagattcaacttttgttcttttctcttaaacaaagcttttgatcattagtgaaatctaaaatattaacctttgaatctgtaaacttaagcttagagaaccctaagatcaaaactaaaaatttgatctttcattgtcacttgttggaagcaattcaaaattctgtgttgtgtatattttcaaatttgtggattgttccaatttcgataaagttttgatttttattccttttgttgtgtgtttttataaggaggtagaaga

SEQ ID NO: 2458 - DNA, 348 bp, Arabidopsis thaliana; identical to SEQ ID NO: 2457
  Intron number 1 from transcript AT1G59580.1 (locus AT1G595 80) derived from phytozome v7.0 (chr-ID Chr1; pos 21884173 to 21884520)

SEQ ID NO: 2459 - DNA, 411 bp, Arabidopsis thaliana
  Intron number 2 from transcript AT1G59660.1 (locus AT1G596 60) derived from phytozome v7.0 (chr-ID Chr1; pos 21925132 to 21925542)
cccttcatttggcagttcaaattcaccttttggtggtaagtaccttttatttatgttactgcattaactataccagggctggaatatactatgtgtttatatcatgtgagagatacattgataggcttcatggaataggatctactttctctcagtaggacttggagggtagcaatatccaagttttttggtcttcaaaagatttgttactacttccaaaattagtagtcttttgggttttctttgtgacagtactagcagctcctgatttggtctagtttgtttgttttctttaggctacaatttctcattagtcttttgatgtatctcctttgtgcactttttctaacgaagactgatcaatcttttcttacaggcacctctacgtttggtcagaagtcttttggcctc

SEQ ID NO: 2460 - DNA, 1025 bp, Arabidopsis thaliana
  Intron number 1 from transcript AT1G59750.3 (locus AT1G597 50) derived from phytozome v7.0 (chr-ID Chr1; pos 21979389 to 21980413)
aaagggttcgtgtcggcttcaaccaaacactgacggtgtgtgtatacacctttacatacacacctttatctctctctctctcacatctttgttacaaatcaatcttctactgttttctttttcctcttcttacattattttttgacagcaattcttagtttctcttctatcccctttctgggttttgtttgaaccctagctcgctttggatccagtggttttaagttaaaggttcgatttttatttctgggttttgcttgttttgcttggttctgcttagtaaatgttggaaaaggaggagactttagaggatctgtagtcagatttgagctgggtttgtcgattttactaggattttgattttggggataatctagatcaggaatcgttactttgtttcatatccaaaattcaactctttttctcgttcctgatctaaaaatcgttccttttcaagctttctaaatgaggtttctctttggtggttctgaaattttgtctgtagctgttgtgttcttctcttagatttgattctgtatgataattttaggttctgagtttgaagtcttgtcattgtagagatggttttagtaacagttttggtgttgctttgtgtgaagttattaaggactaaaatctgttcatttttggtatgttattgagcaggttcttgtcttgcttttgctttatttgttctttctttttacctctttgtttgagtgattattggattttctcttcaaattgggtaataaaattttgagaatctgagtcttgtgatgtgctttagacacaatgtagaacaaagcagttacataaatggcccacatttttgtcagtaaatttatgaatggggttttaaatgtttctacataataacatctatcagagttttgtttgtctaaattagaggaggataggtccatcttcttcttttctctttcagaataacatttcaatcttatagttttctcttcttttgttttgttgcccaggtaaatttatcgaaagtaagtagattccta

SEQ ID NO: 2461 - DNA, 610 bp, Arabidopsis thaliana
  Intron number 2 from transcript AT1G59890.3 (locus AT1G598 90) derived from phytozome v7.0 (chr-ID Chr1; pos 22044368 to 22044977)
cgaggacctactgtttcctctcgaggagaaacgtaagctgtctctctctgttgtcaattcaaatcgtattcgttttgaattgtgtgttttttataaggaagtcaaaagtgtgtaggttgatagagattcttattgcttgtttttgcttgtggggatttgaaattttcatgctttggtttgttttctaggttgagtttttatttttgaggtctatgattgttcttaagttagttatccttataggctaaaacataattactgtataagtgtaatgaatttgattttatgacctaaatgcgtattaatatatgttggagtaatgcagaaatggtaaagattgatggaggatatatgtatcgaaattgtgttatcaaatttgcagactgatagatattcttattgtctttctcttctgtggggatttaaatttccatgctctggtttgttttctaggttgagttgagttttctctttgaggtctataattgttcgtggtttagttatcctcctaggcttaagcaaaattattgtagcttcgtaggggaaaaggaatttaatatttctacgtaggtgcgaaaagcaacttaatatatgttcgtgtaatgcagaa

SEQ ID NO: 2462 - DNA, 624 bp, Arabidopsis thaliana
  Intron number 1 from transcript AT1G60140.1 (locus AT1G601 40) derived from phytozome v7.0 (chr-ID Chr1; pos 22180117 to 22180740 reverse strand)
ccgccggtgatcattttttgtgaacttcacttttggtaagcagctttgacttttgttcataatccttcacttttccttttcaattttgctttttcctctgatctgatcttagttattaagctgttgaatcgcatgatcctttcttctctgattgattatttctaatccttcatgggttttatgacgaatcgtgtcttagggattggttttttctgggttgggtttctaaatttgttggtctaagaacagtgaaattgttgtttcagtgatctcagattctacacttctagtgattgaactgttatggaaaattacaaaatatgtggctctgctttcatttaaattcaatcatcatcatctctgctacttgatgatcaggtcaccttctctgtgttttgtaatctccataacgtaagagtttgtttgatattgcaattttgaataagatgattagcatccaatccaatagctgatgttgaaacctaactctgtaaagactttaaatttgttttctctggctttgtgctcgttgaagggtaacctaaagatttgacctttttgatccaacacttctctttttgtactgtaggtgtataaagcatagttcgttgggaactttttttt

SEQ ID NO: 2463 - DNA, 491 bp, Arabidopsis thaliana
  Intron number 4 from transcript AT1G60440.1 (locus AT1G604 40) derived from phytozome v7.0 (chr-ID Chr1; pos 22267861 to 22268351 reverse strand)
gttctcttgttggtggtgttaattttctactaaaggtttgatttttttttctatcctatcatcatcttctattcatttttcctcaaacataacccacatgaggatatatatgtactctgaatagtctaggctacacgttgctatcactcatctttgtcaacactttttgctaattctttatgagtgaagttgtattatgtttccctgatagtgatcttggcctgagtgttgttgcagactaacgtctataagactgaaaatatagctacattaacatttaggacattataaatttgaagatggtgatcatttgcaattttgattaaatgagctgtgctccctgaggttttttaaccgatagtttcttcattgcattaaaagcatctgtggcagaatagtttttgataaacttcttatttctgccattttaaattaacaatagattattgcatgattgcagactgtcccaagggaagcttttacctacttag

SEQ ID NO: 2464 - DNA, 478 bp, Arabidopsis thaliana
  Intron number 2 from transcript AT1G60610.2 (locus AT1G606 10) derived from phytozome v7.0 (chr-ID Chr1; pos 22329201 to 22329678 reverse strand)
ggcaatctctaacaggtacaaatcttctcttagcttctctcttacaagatctttaggttatgtcttgttctttggagttgctatctttcttccatgttccagaggtttgccttattttatcacttttgacataataatttattttgcctgttttttgttacttggtttaatattcagatgaatctttgaccatgatctctaaatttggttcctaggcaagatcaaagaaagttcatcacataggagttgatcatgaaccatagtttcctcaaagatctcaactttgtctctagttggattgtaatctgtattgcttaggacagttaaatcttattacatcttggctcgtcatgtcaaaagctgaagatatttgagctttcatatcttacaactaattagtttcgtatgtctacaggtttcttactgtaatttttctgtttcagttctttacgggtatatatatacacataaaacggtt

SEQ ID NO: 2465 - DNA, 473 bp, Arabidopsis thaliana
  Intron number 1 from transcript AT1G60610.2 (locus AT1G606 10) derived from phytozome v7.0 (chr-ID Chr1; pos 22329687 to 22330159 reverse strand)
ctattcttgttatcatcatctcccaaaaaaaaaatgttagtattattttcgagtctatttttcaagtttttgttttgtttttaatatctcgactttgccacccaactcctcccactccttcacaactgtgtcctgtcctctgctgatttctcacctttccatcattcatttcattctttcttttttcccatccgtttcttttattcttctttctccttaaatttaaaatctttgaattaaattattggattttattgtttcaaagcgtttctatcatcaaaacccatcttcttcttcttaagattctgaatcattcattgattgatttagcttctcttcgacttcttaattttacagttttttttgttttttaaactttaattgatgcaaataagcaaacttggatcgctgtgagcctgtgataatgatttcttttaggtttgtaggatctgaaggaagctacggtttatttt

SEQ ID NO: 2466 - DNA, 478 bp, Arabidopsis thaliana
  Intron number 1 from transcript AT1G60610.3 (locus AT1G606 10) derived from phytozome v7.0 (chr-ID Chr1; pos 22329682 to 22330159 reverse strand)
ctattcttgttatcatcatctcccaaaaaaaaaatgttagtattattttcgagtctatttttcaagtttttgttttgtttttaatatctcgactttgccacccaactcctcccactccttcacaactgtgtcctgtcctctgctgatttctcacctttccatcattcatttcattctttcttttttcccatccgtttcttttattcttctttctccttaaatttaaaatctttgaattaaattattggattttattgtttcaaagcgtttctatcatcaaaacccatcttcttcttcttaagattctgaatcattcattgattgatttagcttctcttcgacttcttaattttacagttttttttgttttttaaactttaattgatgcaaataagcaaacttggatcgctgtgagcctgtgataatgatttcttttaggtttgtaggatctgaaggaagctacggtttattttttttt

SEQ ID NO: 2467 - DNA, 375 bp, Arabidopsis thaliana
  Intron number 1 from transcript AT1G60620.1 (locus AT1G606 20) derived from phytozome v7.0 (chr-ID Chr1; pos 22331349 to 22331723)
ctcgcgttgtctgtaagaaggattctaatattcatgtaagtactattctcgatcaaaatttacactctttttaagctatgtataagttcagctaactagaaatttattggcttttctcagtgtgtcccatgtgggtttgctatgttcatcgatttcgtgtagatttacagagtaaagtttaaaacttgcttgtagaaagctgtgaatttactgagtttggtcttagcaatttaagaagattacactgtgggtttgtcgaaatccgaatgatattgagtgatgattgtttgaaatttgaagtctttaatgttcttccctttctttttgtgttttattgtagcctacggctatcactttctcgggtgcctattcctc

SEQ ID NO: 2468 - DNA, 364 bp, Arabidopsis thaliana
  Intron number 2 from transcript AT1G60980.1 (locus AT1G609 80) derived from phytozome v7.0 (chr-ID Chr1; pos 22453529 to 22453892)
aagcattggtggtgaacattggcgacactttagtaactttttttttgtttttctttcgtttaagatccagcatggatgagcgcaatttgtttttttaaaacacgtttgaaaattggagtcccaaatttcccttaattttattttacaaaacattcttttgatataaatttggtagaaaaccttcaaatagtttgagaaatcgagacagatttaagaagtttgatcaatgcacctctcgtttgacaaaaaaaaagaagatcaatgcacctctctaagtagtatgtgagaattgagaactaataatatagaagaagcctaattttttaaaattttttttgggggatttgaccataggctctaacga

SEQ ID NO: 2469 - DNA, 593 bp, Arabidopsis thaliana
  Intron number 1 from transcript AT1G60995.1 (locus AT1G609 95) derived from phytozome v7.0 (chr-ID Chr1; pos 22469838 to 22470430 reverse strand)
ttcagcaggtaatttttgactctcgtattgaatcctttaatttataggtcgtttttagtgcaaattgcctttgttaatgacttcattgttgaaattttaagtctgagatactacaatttgaaaaggatgatgtagcatttttctgtgttaggagtaatctgatatgaattgtggagcttaagctaattctgtagaacatgttcgcatgagcgtggttaggagactactgtttgtatctttactaaggttgcactggtcataattatataaatccgacggaagatacttttctgatttctttgtgtttatgtttatgtaaacattagtacactttccaataggaattacggcctatgcaaatgcatttgaatacttctaagattgcaaacttcaaaaatcaaatatctgttggcttagctctcttctactttaagagtttcgtgtagtgtgcatgccttcctaagatttatctttgctagactctcctaagcttctcttatctgaccattattgtttctctctaactaatttcgttaatttttttgattattattaaagcctggttgttcaagtgagctgactggagttgagtt

SEQ ID NO: 2470 - DNA, 480 bp, Arabidopsis thaliana
  Intron number 1 from transcript AT1G61040.1 (locus AT1G610 40) derived from phytozome v7.0 (chr-ID Chr1; pos 22483320 to 22483799)
caacactttccgacgatttctccgtctgatctcaagtgagtctccttcaacttttctcttcttttctatacccttccctctctctatttccttttctccgccacaaacggcttctgcgttccctgtttccgccgtccttacctcttccaatcaaattgaagatccataccagaaatcgatccttctccgtctccgaattcgcttgattaacctcagaaactcgtattggttttcgcaaaaccgcgatttggctttagacttcaccgttacctgattgggtgaaaagttttccttaaccctattaatggcttatctagggttagaatccaaaggattgttttgctcttgtagttagctatctactggttttttgtggtatacaccgtacttgaccaatgtggtgaggtcttttgcttctctaactgtatacttctcataatttcaggtgacagtgaaaaccatttaaattcgttacttgtg

SEQ ID NO: 2471 - DNA, 408 bp, Arabidopsis thaliana
  Intron number 1 from transcript AT1G61250.2 (locus AT1G612 50) derived from phytozome v7.0 (chr-ID Chr1; pos 22586060 to 22586467)
ctttcgctgaggaagaagaagtcaatcctttcgctgtaagcttcttgacttttcgattcaactcgtaaaaactagagattgatctttctccgaattgggtttttcaattttggttgattcgttgaatcttgttaatctttgggttttacttagggttttattttgttgttgatttgatttctactggcttgtaacttagaaattgaaaatgggtttaaaggaattggaaattatgagagatttgtaattcatggggttgataaagtttctacctttatgttcactaaaacttgggtttgtgatgcttttatctactatttgtcatgaatcttgaagacgtttctcactgaattttgttttttcttaaatgatttgtaatggttgtgaatctattttacatgatgtaga

SEQ ID NO: 2472 - DNA, 933 bp, Arabidopsis thaliana
  Intron number 1 from transcript AT1G61320.1 (locus AT1G613 20) derived from phytozome v7.0 (chr-ID Chr1; pos 22618244 to 22619176)
ttactgtcctcgcaacgacaaccatctttcttgaggtaaattatttatgaatctaatataactttttttcgaaattcctatttcgagcgcttattagaatcgtggtcaatccgtaaataaaaatatgcttttccatattctttttccgttttttaaagaatgagtatattattttcgcgctcttaataaattcgatttttaaaaaatatatacttttgaattttctttccatattttcaaaataaattattttttcgctctattgttttttttacttagaaggtaacatcttatgtatttttgagattgtgtatctaaattatctagattatcgggattaatggagaataactacttatattactatctctatttttcatgagaaatggtgcatctttaagaaataagatcagatgttgatgttcatttgtttgtatttgtattacttttttttcttactaattgatatttagataagattcttagacttacatggtataagaatccaatacattctcaaaaggtataaatcacatcaatatatatatatatataggacttagcaagaattataatcttataccaacataacagtgcatccaaatattatttgtttgactaggtatttgatcgagaaatttcactaaatcttataccttaaaacttaagatacttttttttgttacaagcattattcttaaagtggttggattttagagtttgcacaaactctcttgatgatcatgatagaagatgatatctcatcgatatcatatataacgtatggaattttcacatgattttgtcaccttatggttgtctccattttcttttgttcataatctttcattcttgatttagagcgagttttgatggtatttttaacatgtatttataggctcttacgaagagatacgtcggagaaggaagact

SEQ ID NO: 2473 - DNA, 627 bp, Arabidopsis thaliana
  Intron number 2 from transcript AT1G61340.1 (locus AT1G613 40) derived from phytozome v7.0 (chr-ID Chr1; pos 22628758 to 22629384)
gtcgagagcttgaagatcttcccctagatattctggttcgtttcttcactaactctttcttttaatctctttctggttttgttaattagttgtcatttcttcttaatttacaaagtatcaatcatattgagctgaaagttgaatccttttgtttttaatctgagattcaaaattcgttttggaaatgagaaagtgtttaaatttctggttcatttcatcagaaactcattcttaatcatttctgatttctgggttctgttaattagttgagatttcataataatttactgagtattaatcagatttgagctgaaagttgaacctttttggtctttgagattcaagaatttcatcacaacttatttttatctgtttgtgatttctgggttctgttaattagctgagagtctttgttaattcagcgagtgtcaatcagattgagctaaaagttgaatcctttttgttctctgagattcaaaatcgtaatggaaatgagaaaatgttcaactttttccatatctggaaaacttttgtcattgtgcgtaagatcgtttgacatttcatagacacgtgttgatagatcttgtgattcattattacaggtgaggattatctgtggggtcgagc

SEQ ID NO: 2474 - DNA, 484 bp, Arabidopsis thaliana
  Intron number 3 from transcript AT1G61360.2 (locus AT1G613 60) derived from phytozome v7.0 (chr-ID Chr1; pos 22640879 to 22641362 reverse strand)
taacatccaggtaaattctgcaaatgggtcctgtttaattgtgttaatctctttcatggaatggaaggtgacaagtgtgaaagcttaaaagtatttttcagaggttggagaaaaagttgacttctttttagacttaatgcaattggaatgtttcaatgttttattgtttattctgtttaatattagaaaggaacatattgcattattgtaccagagagagagctgaactttgaataagtcaagttttgtgaacaaaagcttggtcaacttattaggtgtcttaagtagaagcagaccccatgaatttttatgtatatacatgaaacttgaggaagattgttctctcaattctttgagttcaccaaaataacgttttttttttgtcaacatgcgtattgttgcatgcttgctcttgataacagccttattctcaagctatggctatgcagctattaccacgtcaagtcctttgtcgataggggta

SEQ ID NO: 2475 - DNA, 513 bp, Arabidopsis thaliana
  Intron number 1 from transcript AT1G61590.1 (locus AT1G615 90) derived from phytozome v7.0 (chr-ID Chr1; pos 22725070 to 22725582 reverse strand)
gcttgtaagaacgtttaccaataattgcatgctaattattgtgttatttttcttgttactgttcagtaattattatttagttatgacatacatttgattacgcatacgtatatggtttaagttataggacatcccaaatattattctaaaattacaaaccactcctcatggtttttatattttgaagattctttggactcatttatttttaattactttaggctaggaaactatattaaaaaatgtgtttggtcataatatggactaattaagtacgcatacgatacgagcttgttgtttctttttttggtgtcacgtacattgtaagagaatctttttcttgttagtctgatatatgtaagagttggttagaccactttcgtatactcttatatacacctatcatcttaatttagtctctaagaatataattaattaaaaacatctgatacataatatgtttttggttcatatgcagtctgaggtcatatttcttggacagctaaaacaccc

SEQ ID NO: 2476 - DNA, 750 bp, Arabidopsis thaliana
  Intron number 1 from transcript AT1G61750.1 (locus AT1G617 50) derived from phytozome v7.0 (chr-ID Chr1; pos 22804760 to 22805509 reverse strand)
tcctagctccgacgaatcattttcattcaagttaggtgagaataaatatatataaaatatagttctacgctagggtttgaattttttttcatttatgtttgtgtcttcactgaaaattacctaaacatgtaagtgtaactgatgtgaaattagggttaatagcaacttatgcatatgataatataattaggtgtttgactaatcatcaagaattagaagtaacggactcttttgttttgtttttgtccaaactgaatttaccgactaatattcatattcaccctgataaaagatcggtagcaatattcatcgtgttccttgacgaacacttaggattggagcaacatattcatgttatatatcatattttttttttaattaacattaaaacatatcttatatatataacgtggatcatttatctctttcttttgtcaacgattggaactatttatcaaaatcaacattttttacacagattgctatggataatacatgtaagcgtacttatataaattttagctaagatatggtagttttgatgatatggaagtgtaatttaaatatattgtacttgacgaaattttctctttataacaactgctatacatgtatgtaaatatgaatttaaatattttatgaaccttgaaatgctaatttaaacaaatttcctttgatagtctttataacatagagttttgttttatgtgtgtaggtaaagtgtttagaagaatcatagctccggtgata

SEQ ID NO: 2477 - DNA, 217 bp, Arabidopsis thaliana
  Intron number 1 from transcript AT1G62045.1 (locus AT1G620 45) derived from phytozome v7.0 (chr-ID Chr1; pos 22935109 to 22935325 reverse strand)
ttctcctccaaagaagacctctcaaaacattacaggtaatttttcttttctcttctattttcttagttatgaacgtaagtcatgttttgatccaatatgaaaaaacgaataatttgtatctctagatgtttttattatgtttcttttgattggttgaagaattcattttgatatctaactatgattttctatttagtttgcgaaaagatatcgcaat

SEQ ID NO: 2478 - DNA, 764 bp, Arabidopsis thaliana
  Intron number 1 from transcript AT1G62530.2 (locus AT1G625 30) derived from phytozome v7.0 (chr-ID Chr1; pos 23147416 to 23148179 reverse strand)
atctaacaattgaaagctgcaattttattttctgggtaatgattcttctctcttgttttccctattaaaattatactgtctttgaattagtttttgaattattcatagtaggaatatattgatttttcctcattatatattaattgttcttttgtcgataattttggttagtcatcattgaaatctccggtaaaagtcatacttaatgatcaaaatcatttctttgttagtgtcacgaaatttgcatgtttagaatagatgcataagaagagaaattgattctctctgtctatgtatgtgaatgatcaatacaagttcagtttttcatgaaattttctgcaaattaggaaggtttttcaaaggattttggattcagaacctttgaaaatctgaatatatttacttttaaacaatgattaatggttttagttacttctaattagatcagtacctgataaaaatcttagtcaaatttgttattcgattttagttcttgataatggttctgtacagcaatattcaatagttatttatatttgtcatgttagaagttatgcagccatagattatgtgtatacattttcatagctagttttcttttgtaaatgaaatcatttggaatctgtaaaggcctgattctagggtttaagctcgattctctgttccaatttttgtggcaatgtcacagttctaacgatttagttgatgttttgagtatggattgtctcattatatatccattgcatttgatagagagacgtcct

SEQ ID NO: 2479 - DNA, 352 bp, Arabidopsis thaliana
  Intron number 1 from transcript AT1G62610.1 (locus AT1G626 10) derived from phytozome v7.0 (chr-ID Chr1; pos 23182336 to 23182687 reverse strand)
caggtgccatttgtgtgttctttgattagaatctatgaatcacaatcacacacagttgttacaatttatgattacaatgtttttaataatcaatttggtgtgttagaaacttacacgaatctgttattacagacgtagattgccacgttttggttgatagagagaaatgcttttattatataacttgtgtcattgtatttcttctccaccgagacagtgaaacatcaatcaatatgagcaatcatcaaactgtgagatttcttttctctcatttaccattttgcccttccactttcttgatgattgtttgttttttttgtggacagaagcaggtattgaagcaattggagcc

SEQ ID NO: 2480 - DNA, 352 bp, Arabidopsis thaliana; identical to SEQ ID NO: 2479
  Intron number 1 from transcript AT1G62610.2 (locus AT1G626 10) derived from phytozome v7.0 (chr-ID Chr1; pos 23182336 to 23182687 reverse strand)

SEQ ID NO: 2481 - DNA, 352 bp, Arabidopsis thaliana; identical to SEQ ID NO: 2479
  Intron number 1 from transcript AT1G62610.3 (locus AT1G626 10) derived from phytozome v7.0 (chr-ID Chr1; pos 23182336 to 23182687 reverse strand)

SEQ ID NO: 2482 - DNA, 931 bp, Arabidopsis thaliana
  Intron number 1 from transcript AT1G62990.1 (locus AT1G629 90) derived from phytozome v7.0 (chr-ID Chr1; pos 23337724 to 23338654)
atcgtcacgagctcgataatttcttggtacgtttgaatataaatttattagttatattttaaaaaataatcttgtttggttaaattacttacaagttctgtttctatcttttttcatttgaaagtttttttttgatggtttctagtggactaactttgaatgaagttatgattactaaccaatctctgttgggaaattatgtttcaaacaaattatgtttttttcaatgattttcgtgttttactttttacaagatcgttgggagttttatcgatcgaagatgtaaaccttttgtcaatatatcaacaatttctataaattttataattactaattcctcttgtgggaagttatacttcaaacaaattatgtttttttccaatgatttaagttattggtatttttttacctgatttttgtgaagaagtggttttgttcaactttcatggaaatttatgtatcttcacacgaatgttcaaatgtataatacacacacatagatgtagatatggttttttgtatagttaggtgctaaatttcacatagagtgagtcaatgttaaatgtcattttgtaattaaattgaaattctatttaaactttgaatattatcatgttagttacgattgattttctactccgacctaaaatttgcaattgcattaaagttggaattgatattgcaactataattttggaattagcttgtgaaatgttccaaaaaaattcggttttatttatatttatttaagttaggtagaaaataggactatataatgatctaaccgctcaaaacacaccacaccagaagcacatatttatatgtgtgtatgcatatatgtggaaaatgtttacacattgaataattatatgaaatgtgagaggatatataaaacatttaacaattataattaattggaaacaggcacaat

SEQ ID NO: 2483 - DNA, 498 bp, Arabidopsis thaliana
  Intron number 1 from transcript AT1G63000.1 (locus AT1G630 00) derived from phytozome v7.0 (chr-ID Chr1; pos 23342928 to 23343425)
tcaccggatctttctactctaaaaccaaagctgtgagtaactttttacattttcaatccttttatttatgaataacttcagatttgatctgtatctttagtttcttctttgagtaaaccccaaaatctaagattttttagtaaattaagttctgatttgtgtgaattgttgaggttttgacttttgaatgtaagattagctctcaaattgtttcagatgattgtagattagacttgtgagagcttcgttaatttacattttgacccctttagttacttaggacattattcagatttgacctgttgctaatttggtttcaatacttgtgattgcttaggtcttagatgttaaattagcaataaaaatgttccagatgaaatactttgaccagaacttattgattcatataatcattatcatgataagctcgtgtattgactgttggaatctggttttgatcttggtgaatcattcaggtggaggagctgctcaagaact

SEQ ID NO: 2484 - DNA, 584 bp, Arabidopsis thaliana
  Intron number 1 from transcript AT1G63120.1 (locus AT1G631 20) derived from phytozome v7.0 (chr-ID Chr1; pos 23409902 to 23410485 reverse strand)
aaagagaatcctctctttggtccttcttcttcaacgtaagtattactttaaagttggagattcatgtttcatcttctgggtatctccaaagtctcaaactttttgggagtccaattcgcaattgaatttgatcactattgtctgttcttatggaaattgagctcaaagttttcatttttctgcagtaattaagattacccaattagtgccttactgataacgtcaatgaatttgtagttgaagctcgagattctagaatttgttaatctaagttactggcaaacaagtttgatcttttgggtacctaaaacgtctcaattttttttgttttcaacaaactgaaaaagtctcaatttttgtgttttcaacttggcaattgaatttgatctttattgtctgttagtggcttggaacatgagctcaaacttgtagggtttctcaaagtttttatttttctcctggaattatgtatttagcttggtttggaattatgatttgtaaatttcattggcaattattgtagtgatggtgtttgtgattgatttggttttactcggatatgtacttgtatcagattggagaaa

SEQ ID NO: 2485 - DNA, 699 bp, Arabidopsis thaliana
  Intron number 1 from transcript AT1G63270.1 (locus AT1G632 70) derived from phytozome v7.0 (chr-ID Chr1; pos 23470354 to 23471052 reverse strand)
ctcgttatcaccaccaccaccgtctttcctctccggtaagttgtcttgggttaattttgttcatcgccgatgggaatatcagatttgagcattcatactctgttttaatcttcacagtaccgtttatgttctccaattcgagcttctgggatcattggattaatggaatctttgaaaatagtctgaatttgttatgcttaagtcttgtatttggtattttctcttagcccaaagtccaaatgataaatgggtcacgatttcttctttttaaaaatctttggatcttcatagctttacaaaatcatatacttgcattgttatcagctctaggatcataaccaaataatttttatcagttttgttaactcagaaacttgtacaaagcttcgtagattcttctatggatacagatatgcatacaagcatgtactatgagtctatccttccttatagctttgctttttggagtcatccaagtgaaaacttgtgttttttcccccttaaatgttaaaaccacttaccacaaaatggttttacttagtagactaacaattgtttttttctctttagctgttccttgttgatcctgtttctgaacttaatctgtattcataagccttttgttcattggttacttaattctttttgatggctgctctgttgtttctttagataccggtgcggaagtcttgtcccaaa

SEQ ID NO: 2486 - DNA, 673 bp, Arabidopsis thaliana
  Intron number 1 from transcript AT1G63660.2 (locus AT1G636 60) derived from phytozome v7.0 (chr-ID Chr1; pos 23605882 to 23606554 reverse strand)
gattgcagtatcatcctgaggtattgaaacttgtagtctttgtagaatctgaaacaagttgatgtagtgtttttggatgataaagtctggatctttagcgtgttagctgttcatatcttaatgaatctgatgagacttgggagaacttagttcatattctgtgactctctaataagtgaaaaatgtgatacatttcttaattcggactactatttgattgacatagctattttattggttggttagtgtgattctagaggctgaagaatctgatatgattgttgtttggattggggttttagtggattttgggtttatggatgataaagtctggatctttggcatactggactttggagaatttagttcatgttctgtggctctctcctaagtgaaatttttttctgaatcgtaactaaggacttcaattttattgacatagctatctaatggtaggctagtttgcttctatagactggagaatttgatgtagtatcatagtttggattggatatttagtgaatatagtacttctagttgatgttttgttagtccattgattgagaattactcgtgaacgtctgtaaatgatgtgctggttaagtgttgatttctagcttatgacgaaatagctttttgttggattttgcaggtgacacattcaccaaaagga

SEQ ID NO: 2487 - DNA, 405 bp, Arabidopsis thaliana
  Intron number 1 from transcript AT1G63770.5 (locus AT1G637 70) derived from phytozome v7.0 (chr-ID Chr1; pos 23664244 to 23664648 reverse strand)
gttgtgtctctttcatctgatcatcggatctatcggtaatttacttcttcgtcttcctcagatcgatttgatctctgtgaaagtcgcgaaatcgaattttaatttcgtttaatcatttgcttgcttcccagttttatttttgttttttgttaatattatatcgaattttctcggccatatttttcattttaaattctatccattagttttataaaagtccataacttactgctctgtgttttctcttttgattcttctctgtttatagtgagtagagagagttatcatctagggtttatagattggagattttagccgcaacaaggaggaagtgtttttaatttaattttattgttaagagttattgttgctttagggatttttagaatttgggtgttcttttaa

SEQ ID NO: 2488 - DNA, 820 bp, Arabidopsis thaliana
  Intron number 1 from transcript AT1G63770.4 (locus AT1G637 70) derived from phytozome v7.0 (chr-ID Chr1; pos 23663829 to 23664648 reverse strand)
gttgtgtctctttcatctgatcatcggatctatcggtaatttacttcttcgtcttcctcagatcgatttgatctctgtgaaagtcgcgaaatcgaattttaatttcgtttaatcatttgcttgcttcccagttttatttttgttttttgttaatattatatcgaattttctcggccatatttttcattttaaattctatccattagttttataaaagtccataacttactgctctgtgttttctcttttgattcttctctgtttatagtgagtagagagagttatcatctagggtttatagattggagattttagccgcaacaaggaggaagtgtttttaatttaattttattgttaagagttattgttgctttagggatttttagaatttgggtgttcttttaaatggctcggttgataattccttgtcgaagttcgtctctggcgagagtcaatcttctgggtttgctctctcgtgctcctgtgattaccctttaactcttttttttgtttcttttggttatagatatagaatgttgtatttttgattgattctgacaatagaaatgatataattaaaatgatggagttctgttcgaattgtatgtttttgttgagagtttagtttttacatgttttacttttgaattcggttgtgtacacaaaccttggaaagaacttgtgtaagaataagaaattgttcttgattcttgtgttcctatgacttctgttttgttttgttccatctttatatgtttataattatgttaatttctcttttacaggttcctgttagaagcagttgtcttcgtagttcggc

SEQ ID NO: 2489 - DNA, 492 bp, Arabidopsis thaliana
  Intron number 1 from transcript AT1G64040.1 (locus AT1G640 40) derived from phytozome v7.0 (chr-ID Chr1; pos 23759640 to 23760131 reverse strand)
tcttcttgaactcgaggctcctattaagatttgtggtattcattcatcaattttgttctctcctcttcaaattttcttttctacgaggatttgcgtagattatgtttgattatccatagaactagagattgattagctaaccagagttgtttaaatttagataaattcgtatgaatgatatttgtagaattgcatatgaatctgttgtttacttgatcagttatcattagtgagatactaaaagaagttagaaatgatcatttgtctccatatcagagattcagagctgatagtgtattgttctgtgcatcttgtgtatcattttgatgtataatggtatcagaaagttgctaatgtgtttactaatacataagtttgttctgcttcattttatagcaaccagtagtagcatatgcttgtgtggcttgtgtttctagtgaaatagcacttctataatgggggttggtttcatgtttttaataggagatactc

SEQ ID NO: 2490 - DNA, 251 bp, Arabidopsis thaliana
  Intron number 1 from transcript AT1G64050.1 (locus AT1G640 50) derived from phytozome v7.0 (chr-ID Chr1; pos 23762739 to 23762989)
tgagcgttgtagtagtgcttcaatcaacaagaaaggttagctaatttctcttcactttgacttcaaatttcatttggggattttgaaattattcttctttacactgagtacagtttatagttgtagatccaaatttgtgtttttgttcttggtaaatttgcaaactttttcaagtttggttggatgggttttgatttagtcttgttcttgatttaggagcaggaagtagcagtggagcgtctgattcatcg

SEQ ID NO: 2491 - DNA, 253 bp, Arabidopsis thaliana
  Intron number 1 from transcript AT1G64050.2 (locus AT1G640 50) derived from phytozome v7.0 (chr-ID Chr1; pos 23762739 to 23762991)
tgagcgttgtagtagtgcttcaatcaacaagaaaggttagctaatttctcttcactttgacttcaaatttcatttggggattttgaaattattcttctttacactgagtacagtttatagttgtagatccaaatttgtgtttttgttcttggtaaatttgcaaactttttcaagtttggttggatgggttttgatttagtcttgttcttgatttaggagcaggaagtagcagtggagcgtctgattcatcgtt

SEQ ID NO: 2492 - DNA, 830 bp, Arabidopsis thaliana
  Intron number 1 from transcript AT1G64180.1 (locus AT1G641 80) derived from phytozome v7.0 (chr-ID Chr1; pos 23822004 to 23822833)
gtattgagctcactgatcaccaggtctctctctatccttctctttctagagattggatttttacccttttctggtaattttgccttgatttaattttgttttttttcgtttgattatcccatgaagctgattggttttaggattgggcattgctcaagtttgaatatcttgtgacaatgtatcgttttgccttttaaagtttgaattttgtgacatgggttgtgatgaatttctgaatgtcttagccctagattgttttgtttctgtttctggttcagggttttggccaaatttggattctcatattggtgataagtgttctaggtttacccaattgctctgttctttgttaagaattttgcaagtcattggttggagagagttaacttttgtttatttagctgatttttttcgctcaaatcacccacaccaaagcccttaatccgattcgccagacacgaacctcgcaagctgaaggcaatactattgccattgattctgagctcatttgtgtttggttctaagttactagattttggtttcttagtcctgcagaggattctcttttacgatgaggtcaagtttggtaacggaggattctatttaaaaatgtgatcgttagttcaactgcaattacttgtttctctcattagtttactctcgcatcactgagcttgaagagaccttttgctccggcttttcattttgatcaatgcagttgtttagtagaaaattctgtttgtttggttttggttcttctatcttaacaattctgctatggttcttgtgtcccagccagagagtgcgggaagtataaggagacagatcgg

SEQ ID NO: 2493 - DNA, 286 bp, Arabidopsis thaliana
  Intron number 1 from transcript AT1G64200.1 (locus AT1G642 00) derived from phytozome v7.0 (chr-ID Chr1; pos 23829650 to 23829935 reverse strand)
aaaaggctaacgagatctccatctcctctgaagaagtaagtccatacattacatccactctcttttgatctcgatctttacgaatacgtgactctgttgacaattgcgtgactattttggtttgttcttttgaaaatatgttgactgttgttttacattgatcttcggatcttaagatcctctgtgagattatttctgaacatgaaaaaatggttttgagtctaaaaccgattggtcttttgatgtgacaggaattcaacattgagaaattgcagcttgttgaagc

SEQ ID NO: 2494 - DNA, 582 bp, Arabidopsis thaliana
  Intron number 2 from transcript AT1G64740.1 (locus AT1G647 40) derived from phytozome v7.0 (chr-ID Chr1; pos 24050567 to 24051148)
tgcagccaataactttgctagaggccattacactggttattaacattttccacctctcttgtttttttatagtattcttcttagccttactagattgatccaccttcaggggttaccgaacattgccattttaaactgaaaacatatgttctttcgttttgttttacggtaactagcaaaacattggacattcttaagtatgtatgtctgagttttgagttttgtactagagagtctaacaaagctaagacaaaatttaataacgtaattgtgtgagctttaatgcaattttattcggttgttgtaaattgtgtcatgtgttttcgtggtaataccgggtacttcatatctagataactattcatgtataagctaacaagtagggtatcaatgtccaaatgattgcttgccattgtaacaaagaactctgtcttctttatttgctttgctcaaaatggctctgtttcatccattgcttatgacgagaaacggcatatttaaccatgactggttcatatggtattgaaatatttttccattgatgcagttggaagggaaattgttgacacctgccttgaaagg

SEQ ID NO: 2495 - DNA, 801 bp, Arabidopsis thaliana
  Intron number 2 from transcript AT1G64770.1 (locus AT1G647 70) derived from phytozome v7.0 (chr-ID Chr1; pos 24058438 to 24059238)
acactccaccttccaaatttgaaactatagatcaggtaccattcgtttatattcagtatgaccattcgtttctgcatttggatgcaacatcaatttggtatatatgttccaagttgcatctcgaatgaaaaccaattacataaaaaaaaagaaaaaaaaaaaagttttggatgcaaaaaacaaaataaaaataccaaaaggaatttccaactcatttagtactaaaatatatattaataaatcatacattttgtaaattaataatttccaaaaatttatgaatcgcatcttgacacaaaatatcagaatttcggtttgacgctagcggaattatgtattctcaccaaaattggtccaaaaattgtaaaactctatattggtgataaaactgtattttaacgctataatttaagcgtaacttaaatcatcaatatcataatttcataagtttttttttcagattttctagcaaactcagaaagaaaaagaagcaaaaaacaactgtttatccaaatacaacatcaagatgcaaaaaaaaaaaactattttggtagatgttgaatcttgatatagagtctcaatgtgtggatgtaacatgttacttttaagttttgttttatctacgatgtcttacacaaaactttcaatccaaaaactatttcaattaacttctatatcttatatataattttctctctctgtttattgcttaaggaagattttctaatgctaactatgaactcaatagaatctgatgagtttggaatttgaatttttcaggggagaggattgtttttcagg

SEQ ID NO: 2496 - DNA, 544 bp, Arabidopsis thaliana
  Intron number 2 from transcript AT1G64790.2 (locus AT1G647 90) derived from phytozome v7.0 (chr-ID Chr1; pos 24082030 to 24082573 reverse strand)
gggaggctccaccactgactacatcgagaattgatgtaatctgttctttgctcctatgacatgagcaaaaataagtgacgaagatataattccacaaaagattagagagatcagacgagatttggaagtaaaacagagggcttcgacatcgcagttgtaaaagagatctaaaccagactttgccggtaaggaaatccgatctaaagtcggaactttatttatctcgcacagagacgagaatatgtacaaatccggacaaaccggaatcaaaaaggatgaacgatggtgtctcctctctgaaaggtttggggagagagaagacaggagaaaacccctaattatattttgtcttagatctagtttttttaacacacaaattcttcccaccaaaaaacacacacaaattccaacattaaaagtgaatccattatccatggactttaaaagcccgaatgaacaaaccaaacttaaatcgaagcccaaaaacaaactttcagattcattttcagtttctttcactcttcatcttctgcaaactaaccca

SEQ ID NO: 2497 - DNA, 668 bp, Arabidopsis thaliana
  Intron number 1 from transcript AT1G64790.2 (locus AT1G647 90) derived from phytozome v7.0 (chr-ID Chr1; pos 24082721 to 24083388 reverse strand)
gtaagtatgaatttagtttcggcgagcatgtaagcaaaagaacaatatggaagtgtcttttaagacaaggtcaatatcatcatatcttatggaaagcatatagaggagcttctaagcggcgatgtcgtcaaaaacgaacatggattgcaaaaattgatgggatttacttagaaaaaaatagtggaccgcaaacacgtatgcatgattggtttaaaaattattttgtgttttttttttgtaaaaaattaatatgcatgtgttattaaatggatttaagccgttttaagtgatcttaagaaagtgtatttttagtgtattttctaatatctaactatacagacataaatctataacttttaactcaataatatacatatttataaccgtttatatgttgtttgatgtgatttaagtgagtgttgttgtctaatttttgtttagaatttatcatttttaacacacaattttttatttattttttgtcggccattttgattgataaagcccaaattgggcagattacagaaggtccaaagaggattacatatggaaattaataggccaggcccaaaactaaatcaaacagagaaataaaatacaattaaagtatagttgatttagggttggacacgtatatgatacgtggtcttcacattgccacgcgtcag

SEQ ID NO: 2498 - DNA, 368 bp, Arabidopsis thaliana
  Intron number 1 from transcript AT1G65010.1 (locus AT1G650 10) derived from phytozome v7.0 (chr-ID Chr1; pos 24149546 to 24149913)
gcatctagaaccaagtgagtacttttagtctttcttctactttcattacaagtggatctgatatgattcttgattttgacagttggatctgtttcttgtgatgaattgttgagttgatcattttaatcctaatttgattggaatgtagttgatttagtctagtaaatgtaactgaattgatttgagtctagtaaatgttttgacttttgggaacttagttgatttagtcaggtgaaaagttatgatttttagcaacttaattactcttgttttggtaaaataatgttagatccacaaatttaaaacttttttttattgatgtttagtgtaacattgtcttgattcatgtttactgtagaactggtttg

SEQ ID NO: 2499 - DNA, 639 bp, Arabidopsis thaliana
  Intron number 1 from transcript AT1G65030.1 (locus AT1G650 30) derived from phytozome v7.0 (chr-ID Chr1; pos 24157432 to 24158070)
gccgcaagcgtattctctgtgctactcctggagaggttgtgtttcttactctttggaacccacaattgtaactttagtctcttaattggaacatttggcatgttcaaactattgtctgtgagtaactttgagattgttggcttgttgttgagtattggtttactaagctttctctgtgagtaactttgagattcttagcttgttgtgtattggttttgctttgattgctgattaaattgttctagagctgcgtgatttggtttgtctcttttaatgcttagtcctatgttacccatgtgtgcatattgcagaagattccaccttggaaccttaaaagaggttaatttaatactatcaaagtatgcaaccctagactctgattactcttttgggaaaagtgttataatcagataaactaaaggttgcttcttttgctcaactgtgtgttcggtttaagtttataaagcctctgagagttatctcgcttaatagagtttctcttccttattgatgcggtgcttgtgttttatttgtggaaatggtgataaatttgatttagaggatttgttctttggcttacaaatgtttgcttaatttgcaacagagtggaactctgttcacaggtggtgaggatcgggc

SEQ ID NO: 2500 - DNA, 307 bp, Arabidopsis thaliana
  Intron number 1 from transcript AT1G65483.2 (locus AT1G654 83) derived from phytozome v7.0 (chr-ID Chr1; pos 24342808 to 24343114)
cgtgtattgcatatttagtttataggtaaaaaattgtttattgcgtttcacatttaatgatgtttagtttcagtttgatttcacatgttgctctttggcttcagatttgtagtttcattttcacttacacttagcttgctttgattcgatttgctatattgttcactcactcttgtttcaaaattgttcatttttagtacatattcgacgaattctccggtgtggtatgagagagtcttagcttgttttgtgtttttttttaattagcacatgtcttctaactcatgttctgtttttaattagcgtc

SEQ ID NO: 2501 - DNA, 616 bp, Arabidopsis thaliana
  Intron number 2 from transcript AT1G65650.1 (locus AT1G656 50) derived from phytozome v7.0 (chr-ID Chr1; pos 24416848 to 24417463 reverse strand)
tcttggtgcacgattgagtcggatcctggtacgttggtctcttcttagtgtttaatgtctcttaatggggtttgggtttgtgctttaattgatttctcactgcattgaatggtttattagaacttaaactcgatgctttagatgttaagtccatgttttttgtttgtttgatgaaaagttgtgaaatttatgctcctagtgaatagtgatgtgagaatatctgaagtgatctgtgtgtgtgggtttggtactattttaaacattgaagattatctcaaagttggggagtattttttaggggtctaaggttattttagctgcatctgttgaagagttcatagtaacctgtagatagttcatatccggcttgaatgatatttgagtttatatagtaaacaaaagtgttggtatttggtatagatctcttgagtggttttctgcacactttaactgtctgtagtctgttttattgagattctctggtgtagtcaattacaatgggaatatctctatgtatgatttgccgcattacatgtatatcaatcttttgtgttctgattatatctatgtaaatatttatgcaagtgcaggtgtatttacagagcttattcaacaa

SEQ ID NO: 2502 - DNA, 867 bp, Arabidopsis thaliana
  Intron number 1 from transcript AT1G66070.2 (locus AT1G660 70) derived from phytozome v7.0 (chr-ID Chr1; pos 24597535 to 24598401 reverse strand)
ctgcgaaaaacccttttggattcagactttcctcggtatgttttcttatcaaagggttttcctttctcagttaaattcgcttctagatcttaattttcgattgattctctggtgggtttctatagaattgctccaaattatgattttgatttgatttgatttcttaatgttgggttctcgaattcatggttaatgattcaaactttatcatcaaaacttctctgtgtgtagtgtagattactatgaccaattcgttactttttctctgctctttgtttgcatgatgatgttcaagttgaatcctttttttattgaaacaaggacttcttaaggttttaaccattttgattgatttcgattgaggaattcatatcgatgttgcaaatccataggattggattaccaaaatcagaaggaaattattagttatgtgtttaagattcttgtgttttggggactgtttttgtttggtatctctctaagagttcatggaacttgtgttcaggtttagatagctgacatgcctgtaatagttttaattgatataagatatcttgtcttttgtaagcattagatttagctgtttttcctgggtgtgaaatattaggcctatgtgtttttgttagctgtgaaaccttgatttgtaaagtaatagtatcagtattctctgtctatgatgtgaagttagcaagcttactacaagtagtttaagcatatttacacatggggatcagtgtatttgattatgtggattgaatgattgatcagtaatgtagtttgatcaaataagcgtgtttctgatgcttacgcgtatgtttggcaggtttaccagttggactcagatagaagcttatatctgtacctgat

SEQ ID NO: 2503 - DNA, 858 bp, Arabidopsis thaliana
  Intron number 1 from transcript AT1G66070.1 (locus AT1G660 70) derived from phytozome v7.0 (chr-ID Chr1; pos 24597544 to 24598401 reverse strand)
ctgcgaaaaacccttttggattcagactttcctcggtatgttttcttatcaaagggttttcctttctcagttaaattcgcttctagatcttaattttcgattgattctctggtgggtttctatagaattgctccaaattatgattttgatttgatttgatttcttaatgttgggttctcgaattcatggttaatgattcaaactttatcatcaaaacttctctgtgtgtagtgtagattactatgaccaattcgttactttttctctgctctttgtttgcatgatgatgttcaagttgaatcctttttttattgaaacaaggacttcttaaggttttaaccattttgattgatttcgattgaggaattcatatcgatgttgcaaatccataggattggattaccaaaatcagaaggaaattattagttatgtgtttaagattcttgtgttttggggactgtttttgtttggtatctctctaagagttcatggaacttgtgttcaggtttagatagctgacatgcctgtaatagttttaattgatataagatatcttgtcttttgtaagcattagatttagctgtttttcctgggtgtgaaatattaggcctatgtgtttttgttagctgtgaaaccttgatttgtaaagtaatagtatcagtattctctgtctatgatgtgaagttagcaagcttactacaagtagtttaagcatatttacacatggggatcagtgtatttgattatgtggattgaatgattgatcagtaatgtagtttgatcaaataagcgtgtttctgatgcttacgcgtatgtttggcaggtttaccagttggactcagatagaagcttatatct

SEQ ID NO: 2504 - DNA, 645 bp, Arabidopsis thaliana
  Intron number 1 from transcript AT1G66380.1 (locus AT1G663 80) derived from phytozome v7.0 (chr-ID Chr1; pos 24757511 to 24758155)
gcatcaagttcctttaagagctggtatgtatctaaacacataatcatgaaaatttctttacactgttcataaaatcatacttagactttgactggttgtgttgtatgctctatattagactaatgatcagaccaacattttgatatgttaaatagtaatattttggtatgcatttactgttcattacgtattaacatatatagaccggggttggtccgaagttgttccggaatatatcggagtgaacgatgaaataatatacagactcgttagattttgatccggtattcaatataccgaccaactattggaaactttaatgttgaacttagaggaagatttttttttttttttttttttaaaatgttctatgtttatctacgttacatattctaaaaacaaaatgcgaacttccgaaaagtcgtttaattctacgattggtttgtcttctaattcataaatgaatttagtgaaagtttttatacgaacacgtgcgtatgtgtgtatagtacattgtttctattggtgtgcatagattctttatgataaaattatagaaagagacagcaatcttcttaggtttaactaatgtcaattattggttttgtagggctaaatcggtgcaggaaaagttgtagactaaga

SEQ ID NO: 2505 - DNA, 550 bp, Arabidopsis thaliana
  Intron number 1 from transcript AT1G66390.1 (locus AT1G663 90) derived from phytozome v7.0 (chr-ID Chr1; pos 24764150 to 24764699)
gcatcaagttcctttgagagctggtatgttacacacacagatatattcatgactaagaatattctcttctctatatataatattcggaaatctttattttacttttctttttgttttaaggagcaaattattgattcatatgctagtgtatggtaaaacaaaaaaaaacaaaaaaaacaactggttattcagaataattctttatgcagtttatttaaacgaagagttttatataaataaaaaagttatactattttttatttacgtagcatatatatatatatatatatatatatatatatatatatagcttattcttcacaaacaaggaagatgctaagctcatgtaaagttgttaaactatttcactgggctgtcttctggtgagtgaagtcagtgaaaatttatgaacaaacggttactgtgttgaaacagtttaatctttctattggtgtgcttagattcttcaagatgaaacatagaaaatgacccaaaagccgtcttggttggtataattaatgtcaactattggttatgtagggctaaatcg

SEQ ID NO: 2506 - DNA, 502 bp, Arabidopsis thaliana
  Intron number 1 from transcript AT1G66590.1 (locus AT1G665 90) derived from phytozome v7.0 (chr-ID Chr1; pos 24841194 to 24841695)
agtacaggtgcgttttcttctcttctcattatgatttcttttcttttttttctattccgatttctctggaattgaagatgtgatgatgattgaaattggattgaaatcaccttaaataccagatttatgagatagcttttggaactaatcactgctaattgatcatcatcatctgcaattgtgtatgtactgattagtcctggaattaatctttagagccagtaaattctctctgttgttggagacaagataactgtgcttgagtttggtttattagtaaaacccaaaaccctagatcaacaaaggttcatactttatagatttcccactaatgttgtatcttgttttgtatttaatcaaatacactacaacctatattgatttagttagaagagaggaaaaacaggttttaatgatgatcactataaagttcgatctgaatcgttactcgtgttcatggggggcaggtggagcatttggaggaaacagaggattaagacca

SEQ ID NO: 2507 - DNA, 412 bp, Arabidopsis thaliana
  Intron number 1 from transcript AT1G66590.2 (locus AT1G665 90) derived from phytozome v7.0 (chr-ID Chr1; pos 24841194 to 24841605)
agtacaggtgcgttttcttctcttctcattatgatttcttttcttttttttctattccgatttctctggaattgaagatgtgatgatgattgaaattggattgaaatcaccttaaataccagatttatgagatagcttttggaactaatcactgctaattgatcatcatcatctgcaattgtgtatgtactgattagtcctggaattaatctttagagccagtaaattctctctgttgttggagacaagataactgtgcttgagtttggtttattagtaaaacccaaaaccctagatcaacaaaggttcatactttatagatttcccactaatgttgtatcttgttttgtatttaatcaaatacactacaacctatattgatttagttagaagagaggaaaaacaggtttta

SEQ ID NO: 2508 - DNA, 437 bp, Arabidopsis thaliana
  Intron number 1 from transcript AT1G66960.1 (locus AT1G669 60) derived from phytozome v7.0 (chr-ID Chr1; pos 24989027 to 24989463 reverse strand)
caagtaagttttcttccatcagtaagatttatatatcgaacatgaaaataataattaaatgtatagaccatattgtttttttcgagtcagaaattgtaatttggtaggttccattaaagtctatcaccatttttagtttatcaaaatcaaaaaaaaaattctgaatattttcatcaaaataaaagttatcacaaaagaaaagcgaatgttacttaaccaggctgtttaaaaaataaaggatttaagaagtttaattagtatgcactatgacaaaatgctataagactaaaataactttactaggataaattttaatctttcttattatagaaatagattaaagttcaaactcatcaacttaatcgtattggtccttttccgtctgggtgatcatgtccacagtttctaaaagaggcaaaatttgagcaagtgattcc

SEQ ID NO: 2509 - DNA, 486 bp, Arabidopsis thaliana
  Intron number 1 from transcript AT1G67025.1 (locus AT1G670 25) derived from phytozome v7.0 (chr-ID Chr1; pos 25013947 to 25014432 reverse strand)
agtgatcaaattatcaagctagaaggtttattattagattacctatcttagaaaaatgcaaagttaaagcctttttagtttgaattgttaacttatatatgcttatggtttctctcctctaccttgaaattcatgaatttccaatatcaaaatggatatttcttcactctagcttggatttattagttaaaaagaaagtttattgttgatactgacacctaaaatttggactaacaatatttgtggaactattcttctcaacgcatttgttgaaaattagaaacccaatatatatgagtatgacaaaaaaaagaaaagaaaaatagccctactacaattagattgactctggatctttttttgtcaatctcttattaaatccatgctagataaagtccatatcatttttagtctgctcttattattgcccaattctcgtattagtacgcaggtccgaggctgttgccaaacgtgacgtatcctttc

SEQ ID NO: 2510 - DNA, 767 bp, Arabidopsis thaliana
  Intron number 1 from transcript AT1G67150.3 (locus AT1G671 50) derived from phytozome v7.0 (chr-ID Chr1; pos 25122690 to 25123456)
cattccaagaaacctaaagttcatacggattcaaggtacgcagacatagcctggacgacctttgtagcctataatcaatttttttttttttgcatataatcatcttcttaacatttatttcatacaacgtatttttttttaatcgtaagaaagaaaaaaagaagaagaggacttttgttaagtttttggctgagttttaccctctttgttttgttagcaaaaaaaaaagtaaaaattctgcaatataccactttcagtttgctattgttcatatatttcgtacaaatttgtataatctatatatatgtaagtattcatctctattgttttgtggtacttttgagaatatctcaaaacataacaacgaaagtaacattaaatccggtaatgtcaggattttaattttgttccgagagctttttacgaactacattttacaatcaaattaacatttaaaccaaacaaaaacaatttgcagttatataaaacagaaaacgtaaacagattaatgagtctcttcaagaaaaagtttagtaaaatcttgattaaagtagaatccaataacatcaaaatttaacagagcttaataacatattgattgaataacaacaaattcttcataacattagaacactctgtaaatcacaaaccaataacaccactttagtctctttagctcctacttcatatcttttgtttaatgattaattacttacacaatatagatattaatgtttagatgctttattaggtatctagaatataag

SEQ ID NO: 2511 - DNA, 739 bp, Arabidopsis thaliana
  Intron number 1 from transcript AT1G67150.2 (locus AT1G671 50) derived from phytozome v7.0 (chr-ID Chr1; pos 25122690 to 25123428)
cattccaagaaacctaaagttcatacggattcaaggtacgcagacatagcctggacgacctttgtagcctataatcaatttttttttttttgcatataatcatcttcttaacatttatttcatacaacgtatttttttttaatcgtaagaaagaaaaaaagaagaagaggacttttgttaagtttttggctgagttttaccctctttgttttgttagcaaaaaaaaaagtaaaaattctgcaatataccactttcagtttgctattgttcatatatttcgtacaaatttgtataatctatatatatgtaagtattcatctctattgttttgtggtacttttgagaatatctcaaaacataacaacgaaagtaacattaaatccggtaatgtcaggattttaattttgttccgagagctttttacgaactacattttacaatcaaattaacatttaaaccaaacaaaaacaatttgcagttatataaaacagaaaacgtaaacagattaatgagtctcttcaagaaaaagtttagtaaaatcttgattaaagtagaatccaataacatcaaaatttaacagagcttaataacatattgattgaataacaacaaattcttcataacattagaacactctgtaaatcacaaaccaataacaccactttagtctctttagctcctacttcatatcttttgtttaatgattaattacttacacaatatagatattaatgtttag

SEQ ID NO: 2512 - DNA, 456 bp, Arabidopsis thaliana
  Intron number 1 from transcript AT1G67530.1 (locus AT1G675 30) derived from phytozome v7.0 (chr-ID Chr1; pos 25307773 to 25308228)
aaccttcctccttggccggtctctcaatatccccggtatgtaaatgtttgacctctatcttatctcttctgttctgttctttgttttgtctttgtttgtccatttttggttgttactggttccacacgtgttctccgcagctttatttttagtgctctcttttatttttaatgtaattcgcaattttttctattaatcgtagaatttcccggtttttgtggatgtgtttcagttccgttattgcaatttttccaggatttgctgtttgaataaaaaattctgttttttttttctttctcttttctgggttaagatctttttctcatagcaaaggtaatttctgtgattgtagcatgattcattgtttgttttaataatttctctgaattcatgtattgattcctttgtttctgggagatttttgtagttttagagttgttttggtgaggtttgatc

SEQ ID NO: 2513 - DNA, 901 bp, Arabidopsis thaliana
  Intron number 1 from transcript AT1G67560.1 (locus AT1G675 60) derived from phytozome v7.0 (chr-ID Chr1; pos 25320270 to 25321170)
gttgattcagcttgtcagtgaagaaatcgatcctggtaaattatctaaaattcaagtttccttttttagattttgagaaatcagtttgttactattttgagctagagaacaaagctaaactgatcacttagattttgagttacggttaccaattttgttcgtttcttctttggattttattgtgttagatttagcttttgattcttgctagcattttttgttttcttgaatctttcttgattttttttttttttttttttttgctaccttcaagatgacagctatttactagtacataataattgattagttaaaaggcccatcggccaatcataattctaattctatccttcctttgctatcaatgaccattctgcttgaacaagttggtcattctaaagattgtatatttcattactatattacgaccaaatgataaaccgaatctttcttcttacttgctagatctgaaattaggcatagcttacattacaccaatttttgtacattattattttcttagattgccttgttcatttataaggcagatcatcaaatttatcaacccggttgttctttttcggtagtatcctctcggtaattggcccatagtttttgagtactttgtaacacaattattaaatcaaatgtaaatgcgtagggtcggtataaagttattgagagttttaaataatttagaaagaaaaaaaaagactcttgacttttcatagtttcatcatcccttttcttaatcccacgtcaccgaatgtatttaatgcatatttgttttgcttaccacattttttagttacatgttacgtatagagattagatatgtatatgaatagcttcttgatattttgcagaaactggtaaaggcagaaagagtttagaatctcct

SEQ ID NO: 2514 - DNA, 455 bp, Arabidopsis thaliana
  Intron number 3 from transcript AT1G67620.1 (locus AT1G676 20) derived from phytozome v7.0 (chr-ID Chr1; pos 25341276 to 25341730)
ctgctgaatcctctggtactgatacttcagatcaggtaaacaattgaacgccttacatatagattttgtatggctgataagtggttactgctaatttcgtgaataaaagctgaaacttttagcttggggttatgtctataatggagataagagatttgattatgtcatgagcattcgacaaggactgtctctcgagtatttgattgaacctagccagttattaaatgtcatatctgatgcttctcttgctactacagaatctcttttagtattgatttacatttatctcctgatctcttgaagctctttacattcttctgtttcttttgtctacctttctcatcgattcattgagaaaacaattcagtagcctaggttaatgtctttattgattccaaagacacctttttgttcttgcaggatctccaaaacgtttttgtaaaggtccgaccaaa

SEQ ID NO: 2515 - DNA, 731 bp, Arabidopsis thaliana
  Intron number 1 from transcript AT1G67785.1 (locus AT1G677 85) derived from phytozome v7.0 (chr-ID Chr1; pos 25416178 to 25416908 reverse strand)
tctggatcgctcttcatcaagacgagaaggtttcgattctctcttcctctctctgccctagtgtgaaatactgaaagctgacactttcttagtcttggttttggtttgaattgcatggatttcgagttaatgtgtcactggatttgggattgacgtcaaatcctaggttatcgagaattttgtataatttgtatcctcagaattgatcctaatttctcgattttaagaaatcattctttttggttcgtttctcatatgctaatttgatggtagagcgacatagaatctggattttgtttagtggcttttgtgttcttcactctctgcaatgttcttattgcctagcttcaagctttaccttgattagagcacttcctttgactctattagattatgcaatgttggattatgtagataaacaatttctttggtctatctgattacaaactttgacagtcatattatgaagataagatgattagaggcttaagcttaacttttgtttgattgcttggtttaatgttgatatatgaaagcacaaatagagcctcttatcatcattactagttattcgaaaagctttagcatgatttgacttcttgttaagaagtgatgattagaagctaagctaagcctaacttgtgtttgttttgtttcatttagttttatagaatatgaaaattaaagtggtaatctgactacataactgtaactacgtgtagcaagaaaga

SEQ ID NO: 2516 - DNA, 739 bp, Arabidopsis thaliana
  Intron number 3 from transcript AT1G67790.1 (locus AT1G677 90) derived from phytozome v7.0 (chr-ID Chr1; pos 25418551 to 25419289 reverse strand)
tgcagcagatcccttatttcaagcaaacgcagcaggtgcaaattttcacccttcttatatcttctctgcaaaatgaagaaccagacacacagaaattgtttccagcatattagcagtcaacattgagttttctcatgactaggaattctctgaaatacgtaggcaaaaaaatcaaggaaaacagcagcggaactttcaattgaatcaaggagagcagcaggagaactgtctagtttgggatatcagttgctgaacatacacacccgcctcaacaagcaggtagaagattgcagcacacaaataggtaactttcaaatcttctgatgttaagttccataatcacaactttctactaaaagcaaaactcgatctctgatattgctcctctgttgttatatctaaagaggaagaaatcaatcaaaggcttagaaacattaacatagagactcatcaagacaaccaagacgtactccacctacttttttctctacaagatgatttgccacttcaacaatactccagacaggtataaagaactatctatttttctttttccatgttccttcttattgtttctttcatgtctcgtctttaactttacataaagatgagctccgacattccgtatgacgatacatagaccgattcttttatctttgcaaaattgcaatagcattgaatattctttattcacccaatggcagatatctataactgaggtacaagataaggtaacact

SEQ ID NO: 2517 - DNA, 822 bp, Arabidopsis thaliana
  Intron number 1 from transcript AT1G67850.2 (locus AT1G678 50) derived from phytozome v7.0 (chr-ID Chr1; pos 25438238 to 25439059)
ttaaggatctcgttgtgctttctgattgatcccaggttcgttattgattataaaggtgattcctttttttcttgttaggataattctgttttcacttttgttttattgagaaaatttggattatatgagagattttagcctatgcatttggagaattgtcattttggtaccatttacttctctttgatattgaaacattggctctttgagtatttagtcttatggctgcttttgattgatttcgatattcgcgtttgaaaacctcaacattcatggttagtgttctttaatcaaaggtgataattttttacagagtttaattgtttttttgtttctgtcttgcattctaagtaaagtgttctgttttttagtagacgactttgtgattttcatgttctgtgattgattgattgtattgttttgctcctagttttgaggggtttgttttgctttttccaaaggggaagcacatgatttcttgcttgtttgctagcattgcttgcaattgtgatcatcttgtaagggaatgatttaatggtttgttttgacttgtagatatatatttctggtcaatagtttgttattgaatggttggtttagaagcactatattgtattcgtctgtgtaggttctacgacaatgacttgcttttgacaaagaattttattgaaaagtgtggatgatgaccagattttccatttaaagagtggtcctattctgtttgtcatgtgtgtcttcttcttcttggtattggatcttatttagaagcctcatttttcttctctagataacgactcgcggggttacgcatagcaggttcct

SEQ ID NO: 2518 - DNA, 894 bp, Arabidopsis thaliana
  Intron number 1 from transcript AT1G67850.1 (locus AT1G678 50) derived from phytozome v7.0 (chr-ID Chr1; pos 25438166 to 25439059)
gaatagggtttgaagtaatcgttttgtttgtgagggtacgaaacgattatctcgtgttcttcttcactggttttaaggatctcgttgtgctttctgattgatcccaggttcgttattgattataaaggtgattcctttttttcttgttaggataattctgttttcacttttgttttattgagaaaatttggattatatgagagattttagcctatgcatttggagaattgtcattttggtaccatttacttctctttgatattgaaacattggctctttgagtatttagtcttatggctgcttttgattgatttcgatattcgcgtttgaaaacctcaacattcatggttagtgttctttaatcaaaggtgataattttttacagagtttaattgtttttttgtttctgtcttgcattctaagtaaagtgttctgttttttagtagacgactttgtgattttcatgttctgtgattgattgattgtattgttttgctcctagttttgaggggtttgttttgctttttccaaaggggaagcacatgatttcttgcttgtttgctagcattgcttgcaattgtgatcatcttgtaagggaatgatttaatggtttgttttgacttgtagatatatatttctggtcaatagtttgttattgaatggttggtttagaagcactatattgtattcgtctgtgtaggttctacgacaatgacttgcttttgacaaagaattttattgaaaagtgtggatgatgaccagattttccatttaaagagtggtcctattctgtttgtcatgtgtgtcttcttcttcttggtattggatcttatttagaagcctcatttttcttctctagataacgactcgcggggttacgcatagcaggttcct

SEQ ID NO: 2519 - DNA, 823 bp, Arabidopsis thaliana
  Intron number 2 from transcript AT1G68170.1 (locus AT1G681 70) derived from phytozome v7.0 (chr-ID Chr1; pos 25552195 to 25553017)
ttactagcattactctcagggttactcgggtacgtaatagtcacacacacacacacacacacacacacacaaaacgaaaaatcatttttcgtttttttggatgtcctcttgtgtcctaaggttatatatatgttaacttttttgtgataaatttctcaaaataaaccattttataatatacgaaattgaaaaaaataatctatatacatggtttgagtgttacagaagtttaatgcaagactataaaatttatatattcctatatatgttcaaattcgatttcctattggttttcaaacatattagccactggctaggtaagtcgtcggatattttagcttaggtagcatgagttgaatttagttcttaccaaaatctcctcaccacaaaaccacaatccagagcacactggttttataaaacgtaattaatcttctagagtttaattttacttaaatttactttaaagttaaaaaacgtatacttagtctgaaaaacttaaaatgtaccaaaacatagagaactctagaagattatttgaacgtattcaatattattatctaacattcaaacagggtagtacttagtagttttaaccattctactcaatattaccaactagtggtttgacaataaaaaccaacatgtaccaaaaaacatagaagactacgttttggctgaaaatactagttgataatattgattatcattagtaaaatgtaaaattgttgaagaatatatatatattgggattataagacttctttaatgtggtgataattgaacagtgtggtgataccaagtatcctaaccattacgggtc

SEQ ID NO: 2520 - DNA, 949 bp, Arabidopsis thaliana
  Intron number 1 from transcript AT1G68200.2 (locus AT1G682 00) derived from phytozome v7.0 (chr-ID Chr1; pos 25562668 to 25563616)
ctaagcctgggacttgtggtcaagtcagtactacggtatatttcttctttgttatcttgattactgtggaaacttggtgagttcttgcttagttagagattagctttggtttagtgatttgggaataaggtaatcattgagattattgacttggttaactgttgaatctgacttgcatatgtgattacaatcctcctctgtgatgcattaacagttgactgttctgaatataagtgtggatttagattcttgagcatgagaaagaaacaaaagaagaagtgttttgatactgtttgctttctctgaactatagatgtaaagagtaatagtgagcttgatgctgtttgatttctcttgaattattctggtttagtgtttttggaattaggtaatcactatagacttggttaaatctggcatgcaaatgtgaatttatggctgcttatagcatttgtacatttggtggtgtagttaaaaggtttatctgttagagacataacattatataccaacaataagtttagatttagattctggagaagaactatcttgatgctgtttgctttttccaaagtctgaactatatgtgtaaagagtaatggtaatggatgaatgaatgaaatgcaggaaaaagtatatctgagaaggttttaattagagtcgtttttggtttagtgttggttatcattgacgcactatagaactggttaagttgatgaatctgagctgcaatttatgacaccacaatgttctattgctctgctttcttttatgtatagatgtaaagagtaatgggaccttgaatgaatcattgacacactatagactgttgaatctgagctgcatacatgactttgttttatgatactacaatcatttattcctgtgttttctttgaagtagaaattgatggtggatatatgaatgaatgaaatgcagcagaaggtgt

SEQ ID NO: 2521 - DNA, 949 bp, Arabidopsis thaliana; identical to SEQ ID NO: 2520
  Intron number 1 from transcript AT1G68200.1 (locus AT1G682 00) derived from phytozome v7.0 (chr-ID Chr1; pos 25562668 to 25563616)

SEQ ID NO: 2522 - DNA, 624 bp, Arabidopsis thaliana
  Intron number 2 from transcript AT1G68220.1 (locus AT1G682 20) derived from phytozome v7.0 (chr-ID Chr1; pos 25570670 to 25571293)
actgtctgggctattgtcttcttcgttgtttcttggtaaagtttattcctttactctctaattgaatcttttgtacatcaagatttgaaattgagttgatttaagtggtatttggtaaccaaaatttgaaatttctgattaggggcttttaagttagatttggaatgaactaatttgtgatttgattgtgtatatttatgggttttaactttgaagtgaaaaggaaagttttttccaactcttttcagtattgtgaacatgaaaagtaaacacttttagattagtgggtattgaaatttggttatgtgatttatgattaataagtcactttgttgcaaacttgacttcttatttacgtccttaactcttacttgtgagttgtggatgtctctatctaaagacaatgatagtggtaggcttcgtcatggtcacaattgaatattctatatgtttggttttacagtttgttatcttaccaaactatgtggattctataagaaaagaaacgaccttacaagaataagaactagttagttcatctctatgtttgagtacgtttgtcttagtcattggttttgtgtatctttagggtaagctttttaggagctgaggcgtgcttgttgg

SEQ ID NO: 2523 - DNA, 752 bp, Arabidopsis thaliana
  Intron number 2 from transcript AT1G68260.1 (locus AT1G682 60) derived from phytozome v7.0 (chr-ID Chr1; pos 25586478 to 25587229 reverse strand)
ctgtttacgcaaactactgtcaacacggttagttttcaatgttgctgcttctgattgttgaaagtgttcatacatttgtgaatttagttgataaaatctgaactctgcatgatcaaagttacttctttacttagtttgacagggactttttttgtgaatgtggttgagtagaatttagggctttggattaaatgtgacaagattttgctagtaagtttagagtcttgctagtaattcagttagtttgtgatgttgctgcttcagattgtgtacttttctattgttaaagaggaagtttcagatcgtgttcttgacagaatctggaatgcttgatcaatagttactccttttctgagtctaattggacaattttttgaatgtggctgactagaacttgaggtgatgttgctagtaattcggttgctatgttgctgcttcagattgtgtcaatttctatcgtgaaagagtagtttcatcagatcgtattctttgacagaacctggactgcatgatcaatagtcagctactccttttctgactctagttggaaaccttttcatacattttctgaatgtgactggaagaatgaaatgtgttaagatcttgttcgttaagtttagagtcttgctttttgcattcatcttcagccatatattgggaagtggatggctttgtggtatggctcagtgtgtgttacttataagatatatctcattctgttgcttgttaatatatttctactaaaggtcgac

SEQ ID NO: 2524 - DNA, 570 bp, Arabidopsis thaliana
  Intron number 1 from transcript AT1G68600.1 (locus AT1G686 00) derived from phytozome v7.0 (chr-ID Chr1; pos 25760219 to 25760788)
tctcaccgtcgttctcattttcgagtattacgtcggtattgattcttaactcatagcctagtttatgatcctttgattggatctttgagttttgtttttatgttttgttggaatcttgaactcaagacacttgcgcatgtgaagcaaatctagtaaagattcttttaatcctaagactgttcctttttttggattccatctttcattttgatgggttcggatttacttattgagttacattttactgtattattcacattttcagaccaactcttatactttctttgcttgtttgttacttggattgaatatttttcactgttttcgagttttctgtttatggaatccatttgatggaactaaagacatcaattggttgattgtataatccatctttttgtataagtggattcaaagattttttctattttctctgttcagatttacttattgactttgcattttactgttttatttacattttcagatcaattattctcatacttattgagtcactcttatgttcaattttcaggagcaactttggttaaaggattcaatagagcatta

SEQ ID NO: 2525 - DNA, 653 bp, Arabidopsis thaliana
  Intron number 1 from transcript AT1G68935.1 (locus AT1G689 35) derived from phytozome v7.0 (chr-ID Chr1; pos 25921805 to 25922457)
agtaagacctatctggatttgtgatattatatactgtaaagttgaagattgggggtttagtttctgttgttacagtacgctaactggaaatcggtgtactatacaacgtaaaatcacaattcaaaccgaaaactttatacacagtgagcagagcaatagttcataacagttaaggttttgacatgttagttttcttttatgtgatataagtagagaaacttggcatcttgtccaaacgcctcagtatattttctgccatctgccttgtgttaccatctccacgatggaaggcactaaccaacatacctgacaacatcctatcttgtgatatttcgctggcatacttatctccgcctctaataatgaacttgtcaatcatccaaaatgctttctgcaatagagactctttcttgtgttccttgactgcatttagaattagttgtactgcattcatttcactcagcatgcttaaactcttctccacttcgaccttgtcatctaatagcgtgcatatagcagctaatgctgactccactacctccactttatcactctgcaaacatgctagaagctttgtgattgcatttgcttcaaccaagcaaaatgtgttttttgcagaacatacgcctctgtggattgcacagatctctatc

SEQ ID NO: 2526 - DNA, 494 bp, Arabidopsis thaliana
  Intron number 3 from transcript AT1G69030.1 (locus AT1G690 30) derived from phytozome v7.0 (chr-ID Chr1; pos 25947900 to 25948393 reverse strand)
ttgcaccgtaaggatctaccatctcttctcaaagtctgaaaatgttatcgacactagactgagaattgcattaagcgcataggaggtggtaaagatagcttaagatctctatatttgtatgactaggtagtctcatagcttaatcactgcagcttaagtttggtaaaatgaaaccatacgtaattatatgggaaatggattataccttatcagcacggatttgatccagagacagtcttagtgaattctcttgtggctgcaaatcatctattctgcctctagcttggtccagtatatctcggaaaaccatgtaactcacaaatgagaatataaaaaacaaaggaacatgactgaaaacatatagaagatcttgacaccttagttgtttgtgtatttctgagaagtgattagtgaattgagcacccttgtctttcattcttatgagacttgatagctgcatgaattaagcggaaaggatttgttttgaatcagat

SEQ ID NO: 2527 - DNA, 430 bp, Arabidopsis thaliana
  Intron number 1 from transcript AT1G69420.2 (locus AT1G694 20) derived from phytozome v7.0 (chr-ID Chr1; pos 26093260 to 26093689)
atttggccataggaaaaaggtaactgctttttcatctcttaattataactcctttcctctcttctctctctctcttccatggtgggttcttcttttagtagatctctgcaccacccaaagcccaaagctcaaagctttgcacagaagatacagagagaaagaaccacatacaaaaaaaaagagtctacttttctttttgtttctacttgctatttattacttttcacaccacaccctctggtcaaatgtctttctctctactcttctttcctttggtctgagacaacagtagcaagagtccgtgaaagaagaaaacaaaatgttagaattttgaagaagatgagggaaaaggaagcaactttatctgtttatttgacttgagtctcttcgatctacatctggattttgcagcatttcttcttgaggaaaa

SEQ ID NO: 2528 - DNA, 467 bp, Arabidopsis thaliana
  Intron number 1 from transcript AT1G69440.1 (locus AT1G694 40) derived from phytozome v7.0 (chr-ID Chr1; pos 26104236 to 26104702 reverse strand)
gacccgtttccacaaatctctccctgtttctcaaggtgactactaatctacctttttcttcttcttggtttattctttgcatgtttggtctaaaggtttaggatcctcacctatggctgaattagtttatatttattggacgaggttttcaaggctatctcttgttgttcttgttttgctgtgtattcccacacaaactctagtatagtgtaaatgtctaaatggtccttctccttctctgtagtctgtacaatattcactttactttaaatgttctctttctttaatgtgttaatgtctgaaaacaaactctctgtctccctttaatactctctctattggtactgatttacttgcatctttttgtgtttcattcaaaaacaattaaagtctaaatttgactttgactcacccatttttttgcttcaacagttgtggagagaaagcagcaacaccaacagaagaag

SEQ ID NO: 2529 - DNA, 150 bp, Arabidopsis thaliana
  Intron number 1 from transcript AT1G69610.1 (locus AT1G696 10) derived from phytozome v7.0 (chr-ID Chr1; pos 26187078 to 26187227)
ctttctgggtttctttctctaatctcttcaggtaaacgtttttgcttcttctttattattctttgttctctgtttttttgagttcttattggttaatgggtttgtttttatttagagttaatccagacaaagagacaagcttggtcttgt

SEQ ID NO: 2530 - DNA, 255 bp, Arabidopsis thaliana
  Intron number 1 from transcript AT1G69720.1 (locus AT1G697 20) derived from phytozome v7.0 (chr-ID Chr1; pos 26226923 to 26227177)
atcatctttcttattcaatctgcaaaaattccaaggtatgtggttgtaatttttattttttacatactaaaaaaatctttgttaatcttcttatctttgatttgaagttttacattttggtgtttaaattcgtcaattgttatttttttttccaaaagcttgatgcttacacttccttcatgtttctccaacaaaccctaatttcgatataacttgacgaaatcctcaattcgtgtgtgtgtatgttgcagattc

SEQ ID NO: 2531 - DNA, 554 bp, Arabidopsis thaliana
  Intron number 3 from transcript AT1G69770.1 (locus AT1G697 70) derived from phytozome v7.0 (chr-ID Chr1; pos 26252368 to 26252921 reverse strand)
tacaggtatgactctattacgtctaaattgcatttgttacattttaaagcgtagatttatgtggtacattgaagaaaatgagttagagaggagaatgtgcatgacattgtgtttcttggtgtttgagtttgatgactattgaggttttaccacttttttaatgtgccaacatggttttactgtgtagaaaattttgatgtgtagggtaaataattaaccaaagttgatcacattctcctccctcaccactatcaactgtccgcaataaatatttgtgcattgtctctgtttgtcatgctttgtatatctccaagtccttatgatagtagttacctttcgaagctgagttctcatctgtaacaataactagctgattgttatttagactggcattgcatattatgcattggctatatgaacgtttatcatgttgttttatgtttttcgtacagcgtaggtagatgctttaccatatataacttctgtttttaacaactgagttttgtaatttttgtgcagtctggtgagggaaaggatcccttcatttgtaaaat

SEQ ID NO: 2532 - DNA, 474 bp, Arabidopsis thaliana
  Intron number 1 from transcript AT1G69840.4 (locus AT1G698 40) derived from phytozome v7.0 (chr-ID Chr1; pos 26295151 to 26295624 reverse strand)
ttacctttacgcggcacatagattattctctccaagtgtgttaatttctcttcttcgtaatctaattttgttttgttactgttgatttgtgtctttctgtttcgtggactctttttgactcccatcaattttaggattcttcttcgtgtgtggattttgatttcttcttcttctctggtgggttttggaactgttaggcttttgggtattttgttgaattccttagggttttgtagtaagattttgataattattgaatcgtttagaacaagagtcaactttttaaagtcattttatagaatctgagtctactagtcgttgaataaatattcttaaagaaatgatttttataatcttcttctcgtcgactttatttattatttagaatcttgtatttgtttttataacccataatctagaatttgatgatttttcaggtataaagttttgtaatttacttttcaggagaaaaaa

SEQ ID NO: 2533 - DNA, 587 bp, Arabidopsis thaliana
  Intron number 1 from transcript AT1G69840.1 (locus AT1G698 40) derived from phytozome v7.0 (chr-ID Chr1; pos 26295151 to 26295737 reverse strand)
tcataatatttcgttaattatcaaattgctaataggtaatttcgcggaatcttcctttgtaatttcctccaactttctctgctttgcttataattgcgtctttgcttcctcctttacctttacgcggcacatagattattctctccaagtgtgttaatttctcttcttcgtaatctaattttgttttgttactgttgatttgtgtctttctgtttcgtggactctttttgactcccatcaattttaggattcttcttcgtgtgtggattttgatttcttcttcttctctggtgggttttggaactgttaggcttttgggtattttgttgaattccttagggttttgtagtaagattttgataattattgaatcgtttagaacaagagtcaactttttaaagtcattttatagaatctgagtctactagtcgttgaataaatattcttaaagaaatgatttttataatcttcttctcgtcgactttatttattatttagaatcttgtatttgtttttataacccataatctagaatttgatgatttttcaggtataaagttttgtaatttacttttcaggagaaaaaa

SEQ ID NO: 2534 - DNA, 587 bp, Arabidopsis thaliana; identical to SEQ ID NO: 2533
  Intron number 1 from transcript AT1G69840.7 (locus AT1G698 40) derived from phytozome v7.0 (chr-ID Chr1; pos 26295151 to 26295737 reverse strand)

SEQ ID NO: 2535 - DNA, 429 bp, Arabidopsis thaliana
  Intron number 1 from transcript AT1G69920.1 (locus AT1G699 20) derived from phytozome v7.0 (chr-ID Chr1; pos 26334733 to 26335161 reverse strand)
ttgcccgtttttgggctcacttcgttgacggaaaggtaacaaaaaacttagatatattatttttaattagtgaatttgtttttagcaatgttgaattttggtcaatgaagaatcctgaaatcagaaccgaaacaattatgttaatatctgttaagttttaacttttaagggataattatcgaaaatgatggaactatgaaatatcccttcaacgaaaaagaaagaaaaaaaagattagtgtaattatgtcaattttaagagattgatacttttttacatagtgagtagtttgattaacgttggtctacttcagccaaaacttatttttctaaaaagtggttgatgagaattaataagcataatttttttttttataacaaaatagtctaatatattaatgacgattgtaacagttgtttgaatcgatcg

SEQ ID NO: 2536 - DNA, 420 bp, Arabidopsis thaliana
  Intron number 1 from transcript AT1G70030.1 (locus AT1G700 30) derived from phytozome v7.0 (chr-ID Chr1; pos 26378798 to 26379217)
cttttgtatcttcctgtaagcctgttacgtgtgaggtaacgtgtccatcaatacttgtgtcctagcgaactttgatcgatcctcttcactttgatcctatcttgtttctatactgaaattcttagatcaaaatatagtgtgacataatctgaggagtaagttagattcaaatcttctggtcgatagctgtaaattcccttgcaatgttttctatgactctaattgctagatctgcgctggttgtatgaatttttgggataatttcgattatttttctttgaacttatatatcttgaattcgtttattgagatttaagacttgtattgattttcaaagttgtttatattgggagtcgaacattaatctattttctcttcctctggataatgaagcacttgccagttgtcagtttcaaaacc

SEQ ID NO: 2537 - DNA, 898 bp, Arabidopsis thaliana
  Intron number 2 from transcript AT1G70220.1 (locus AT1G702 20) derived from phytozome v7.0 (chr-ID Chr1; pos 26446545 to 26447442 reverse strand)
atctttgacgcgatttctaagacgtaaggatctctttggttctttatattgaatggatgatgatgatgattttaatacaatccagtagtgtttgaaatcttgttaatggtttttgttagttctttgtgtgaagaagataacaatagcttacattgttactgcttttgctactttttgtgaacagatttgtgctttgtttctgttagcaacgagggttggatcagatgcttgcttatataagtaactgtgaatcgtttagtttttgaatctggattcaatttagtgtttgtattgttcttggtttccagaagatgtaagttatttggaactaatatttgcgctatggttgattgtgtcttttgctttgcttcatttgttgctactgtgaaaatgcctgtaaattagcatcatatctcacatctttactagagttttcatacttgtcatggcatagcgtttttattgcttgtggtttttagaagatgcaagctttttgggactatatatttgacgaattgtgtctttagctatgcttcagttgttgctgctatcaagtcacaaatctttactagagtttatttatgttggacacttggactacttgtcatggcattgctgaaagtataagctacaatggagtaaaattgtcaaagaaagtaattatgtagtttttgctaccttggggtgagttacattatataaaactcgacatggtcagaggctacttatgttgtggaccttgagttttccctgttttgcatctaagaaccgtggtgacaaatggttttatgcttatgatgataatcattctattgacttttagcatatactctttttttattcattgttatgtgatgctgcattctccaggcttcctatacgctgggtgaacaaagaa

SEQ ID NO: 2538 - DNA, 340 bp, Arabidopsis thaliana
  Intron number 3 from transcript AT1G70310.1 (locus AT1G703 10) derived from phytozome v7.0 (chr-ID Chr1; pos 26486483 to 26486822 reverse strand)
atcttcctttgtgctctatctccaaccccaaaaaggtaaatcctttatcaacaatcttaatctctagataatcaaagtctcttgctttcaaatggaaaactgcaagaaagaaggtgaattgtctatcagttatgaccatataacttgtttgagctagaaatacatcaaaaggatgatcctttaagggagttttagttttgagtttgtgtttgagaaaggtctataattgaagtgttttgagtcttttccctcttgctattggatggtataactgtaaagtaaccaagtgggtttcttatggaaatgtttcttcttcaggtactggtgattggaggaggag

SEQ ID NO: 2539 - DNA, 469 bp, Arabidopsis thaliana
  Intron number 3 from transcript AT1G71310.2 (locus AT1G713 10) derived from phytozome v7.0 (chr-ID Chr1; pos 26878826 to 26879294 reverse strand)
ctgaggtctttcccttcctcttgtttcagtgttatggtttgatttggttagcctttagctcaagtcgtctcctggtagagttctttgccttcttgcctcagaagctgcaaatatagaaacctagttgttttcttttgggttgtgtccattttgaattgtatgatgaaacccgtcaaggaatacagcttagagagtgtatgtttatcaactctggagaaacaccaactctgggttatagattctgttatcagtacttacaaaccttagagatgatatcacttgtgaatagggaggtttgacctgttttcgttagtaaatatgctagtggtttgcttccttgcatactttcttgagcatattatgttttcattgttttgcttgtaacttgtacgctgaaatcatttgctaataatcatttttttggtgttgtcaagatatttagggaatcaacaggtaccacatctgtaga

SEQ ID NO: 2540 - DNA, 708 bp, Arabidopsis thaliana
  Intron number 2 from transcript AT1G71691.1 (locus AT1G716 91) derived from phytozome v7.0 (chr-ID Chr1; pos 26950265 to 26950972 reverse strand)
ccgcggggattcttcctgacaccggaggaaactttgtaagtagcttttatgcaaaaaagtaaatcaattcgtaagttgcatgttatatccttaacaagaaaaggttgcatatatgttacatacttacatagttacatatacactctctttttactatttgttgtaagaaatgtaagttatccgaagagcattgatatactttttttttttttaagcatagatatacttgtatctactaatcagccgaccaatattttagtttgtattaaataattctaaatggattctaataaatgtactataaataacttacataattctgaagtgtatctattttctgttatgagcttgtgaataaacaagagtaaacatcaaaaaattaattaatattttaaaatcttaatgaaatcgtttctaatttgattttaaaaaaattagtgatcataaagaaaaattgtgacaaatcttttttattcaaaatcaatcaaaatactttcaattttttcgttttttcttgagaaagaaaatatattttcaatggtggtcacatcacatgagctatgttcaagagcaacattgtggtttcatattgtaccaagaaaaatggttgtgggtgctcctgctaaatgcgataattaataatgtaacgtggagtttatgttctggtggtcaggtgggacgcatacctttcgaccagcagattcataa

SEQ ID NO: 2541 - DNA, 893 bp, Arabidopsis thaliana
  Intron number 2 from transcript AT1G71692.1 (locus AT1G716 92) derived from phytozome v7.0 (chr-ID Chr1; pos 26953697 to 26954589 reverse strand)
ttactgctcaagaacaacttcaaccaccaaatcttgtacgtctactttctctttcattctcattaattagtatctactttcatcgagtttttctttatttttgggattgattatcgtatgtgtttgtttttttaaatagaatttttgggttgatattaaaactagtgcctcgtcgtcagtagtttcacttctttccatttcattcttttaaggggtagtttagtctttttgttccataaacattattttagtgtgcaacatgctaacacgtgttgacatgcagagggaaaatctgttggacgttgttaattgatttgaaattaaaatactcagggaagttaggtagggcacctgattctgattctatacatgaaaatagttagtgaagtacaacattcattgcacctagctctccaattctccgaatttttaatttgttgactactgagaggaactgacattgttgtggaacgttgtactatcataaaatagttacgaaacaagtcaaagtaattactgttaaagtaaaagatgcttagagacaatgtattacactttaattaatattttatatctctggttattcaatcgcattgtgtttcggaatgaagtagtattattggtttataatcagcacaatcttttaataaaagttgatctgaccactttataaaggttgccctaaggcctaaactatagttattgacacgctttgaactattattttatatattgatgcatatacgtatttcatgtttgtgtgtgtgtgtaccaacatgggtcactatttgtaattcgacatcttcaaaaaaattcacccgcttttagatatgtttacaaataatgtatagaaacattgaaataaaagtttataattctctaggatccgaaag

SEQ ID NO: 2542 - DNA, 981 bp, Arabidopsis thaliana
  Intron number 1 from transcript AT1G71695.1 (locus AT1G716 95) derived from phytozome v7.0 (chr-ID Chr1; pos 26964612 to 26965592)
attgcttcgttcaggttcgatctttttcttccttttgttttgtttcttgtattaaaacctaagaaaacttaatttgattcttaaagcctagtctaaacagttctacgcatgtaaattacatattatttcattaataaaaatatcattttttaatataagaaaccatatccagttatccactcatcactcgttatacccacacacaaaaaagattctctaggcatgtccgaaatgaaaatgaaatattcataaatatcaataaacttgtgagttttcttattaaaatccgaccaaaataaccttaaaggaaaacacaaagtcgcctcaaaagtctcatgaacaagatttaagggttgtccgattcttacttcacttttgtttttttttcaaaacaaagggtttcttagtgtaaacataactaaatgacatgtattattggaatagtattgtttattacaaaattactacacttaatatacatgcaagctataaaataaaattaaaaaaatacatgcaataggacatgtcgcattaatactatacaccggctttccgtatgttagttggatctcagttatggaacgtaaacatatcttaaataattcaatatccaaccaataataaaaataatacatatccggatatgatagcatatgtgaattatttatatcaacatttaatgcatccaattttctgaataaaatatttgatatttctcaagccaaatactaaacctaattttgtttgcagcaatactttaattatgattatcagattcttagaacttgtaagttgcaacacctttatatacttaaaagtaaatattatcaataatgatgaattgtggcataatttgattagatatacaatttcggaagaaacttcaaaatgtatttttcatttttaatctttttgttatgagaaatatcttcttttttttttgtatgttatgagaaattttataaactaaaataaacaggg

SEQ ID NO: 2543 - DNA, 706 bp, Arabidopsis thaliana
  Intron number 1 from transcript AT1G71780.1 (locus AT1G717 80) derived from phytozome v7.0 (chr-ID Chr1; pos 26995581 to 26996286 reverse strand)
gtgccgtcatttacatcgacggtgaacctcaggtaatctgattgttttgattttgagttttcacttacgcaataggaaaaaaggacagagaacgatctccttagcttagttatagttccctactgatgcttgaatgaataaactcacggtgaatattgttgcattgcatctgttggaccttctctgaacgcatgattaaggaataggataggacccaatctgcttcttgtctcctttacatgttcttcatacccttggattgtagaattactctacattggcgttctgcatttagataagttgatggttttcttttgattgtgctcataaacctcatacatgtctctagactttctaggcttctttactcttcaattgccctggaatatcaattaacgtggattcggtgtctcatggaaccttaggtttaggtcaaagcttgtattcttacttaaagtaaacaatttcttggaatcactcctatggctcatagatttagaatacgcatgtagaaactagaatggatgtcatggtattctgacttcgttggggcgtaaaaagtctttggataatattgttgcaagaacagaaaaaaaaagcattaaaacatgcagctttaattgggtgattcatctgataacactattaatttgaacaccttttgttttcaggattccctgctcaaacccatcaccagaatcattct

SEQ ID NO: 2544 - DNA, 287 bp, Arabidopsis thaliana
  Intron number 3 from transcript AT1G71790.1 (locus AT1G717 90) derived from phytozome v7.0 (chr-ID Chr1; pos 26997374 to 26997660)
gaagccaacgatatctttgcgatctatcgtgaccagtgaggttctttacctacctcgttcaacatgaaaaccatgtagtgaaagtaatttgagttatctaagacggagacatagttagcatctgatctgaaaaaaaggcttgcctagtcgtgagatttatctcatggtttaacaatatatgatatgtgtttcattcttctaatgtatccattagactggagactgaaaaaagcttgcaaagttaccaaaagaacacctgtgttgatcagttttcttttccaggtatt

SEQ ID NO: 2545 - DNA, 444 bp, Arabidopsis thaliana
  Intron number 1 from transcript AT1G71930.1 (locus AT1G719 30) derived from phytozome v7.0 (chr-ID Chr1; pos 27076360 to 27076803)
ggatatacaaggtaattatattaatcaacgtggattttgtataatgattatcattgattaatcctttgcatggaatgacagtaaattgtctagttatgacataagttttgaaaaccaataatatgtgatgaatttggcatgcgaagtgattgagagagcctactttctttgacttgtatgttcataaacggagtgtgaaaagaatttcacaaagaaattaagagatgtatagtacaatcataaatcataatacttcttttgaaattaaaccggttgaaaagtataatcatatcacatttagaaattactttactacataattttcaatattctcttttttttttaaagaaacataaaatttctaatattttgaccttttgtaatgtaagaaatttatgacattaatatttagttttacatttgcagcgaggtgtaaactagggt

SEQ ID NO: 2546 - DNA, 268 bp, Arabidopsis thaliana
  Intron number 2 from transcript AT1G72080.1 (locus AT1G720 80) derived from phytozome v7.0 (chr-ID Chr1; pos 27121614 to 27121881 reverse strand)
gtttggtaagtagttaagtactgcatttttctttttcattaatttgattatggtttgtatacttcatgaggacgaagaaactttcagctttagagaatgtttaatttgtcgtatgaagtatataattggatagattcattaatagcgtacttagaaaattttaaaatcgttagtaagtatatgtatttgtatactatcgatcaatatcataaaatgcatgcttatgtgtacagggaagacgtggtggtaataatcgtaatcgtagtcg

SEQ ID NO: 2547 - DNA, 819 bp, Arabidopsis thaliana
  Intron number 1 from transcript AT1G72080.1 (locus AT1G720 80) derived from phytozome v7.0 (chr-ID Chr1; pos 27121896 to 27122714 reverse strand)
tgtggtaagtcctagttttcattacaaattgtcaaactgtagaaaacattccgttggtttttatttttttagaaaaaatatatcatttgtgctgatgttgtttttcataggatgatatatttttttatgttgtttttgtttgtatgataatttatagatgtatcattgtatatgataatatatcttaagatcttatctgatttttaacacaatatgtaaaaacatataaaaaaacattgtttgcgagcgaaattttgaataagatgtttcattgtttgcgagcgtaacaatctaattttataatatgtctttatttgttattaatttaatgcatctgtttgtttatttaaaaacagtgtgatctaatcaaatattttaatgattaaatgaagaacatatatagattttgtttcaaatttttgcggaattgttttgcaagaaaaagatgttttcggtgtttgtgtataagaataatctataggttaataagactttacaatctaaaggatcatttagtaaaatagtacttgactttgttatgatttggttttagtgttaattgtttctcttctgtttggtatcttttaaagataatgtaatatatcaaagatttcgtgattgaatgaaactaactcataagtttcattttgaattctcccgcgaatattcagttgagatatctaaatttttcttgctcgaaagctaacaaatactaaattaggtgaaataaaaactttaaagatatttgattcctgctaataattttttgttcaaaaataaataggttcttgctcttcccgcaatctcaaacacttcgct

SEQ ID NO: 2548 - DNA, 515 bp, Arabidopsis thaliana
  Intron number 1 from transcript AT1G72175.1 (locus AT1G721 75) derived from phytozome v7.0 (chr-ID Chr1; pos 27158034 to 27158548)
tccttgtcaagccaattgttcccattggttctgcggtttacctctctctatctctctcaatcctttcgagtctttgattcgtttctcttgtctcttcgctaactctgttcaatgagatcggaaattttttgcctgaatttgtgcccatttgttttcctttttgtcattgactgttattgcctacgagcctcctgaatcttgatcgttagcttttggttaaagattaaattttgcctttagaatccaatcagcataagtttgtaatctcaaagttccaaacttgaacaattttgtttaccctctctctgctttcactaccgattacagattcttggatttggttgagttcggtgattacttgcttagaacatatagatttcttggcttactagttttttcaagtccactggtctaattacgaagtttgcgtggtttcattgcaacgaaagattctgccttttctgtgatctgtcgctctaactcttcttttcactttgcttttagggaactgcatt

SEQ ID NO: 2549 - DNA, 879 bp, Arabidopsis thaliana
  Intron number 1 from transcript AT1G72180.1 (locus AT1G721 80) derived from phytozome v7.0 (chr-ID Chr1; pos 27163141 to 27164019)
aacctgagattttggataggtttcatctatttcaggtacgataattcttcattatattttgtttaatcccgttgcttttcttggttttaagttttgaatctttaagcctcacatatttgttttctttactcaatctaaggttgttttatttccaaagatttaaaggatagattctgtgaaaaagtttctataaatttcaaattttcaaatgtgtaggttactagctctactaataacataattactttatccactaactacaatctgcatgactcatttttaacttgattgtttatttaattacctttttaatcattaatccttgatagatactcaattctcaatgttgtgttgttcttttttcattaaaattcaatgcttttaaagtttatattcacagatttagaaggagagagagagagtaaagatagatcatttgctttactttcaaacaaaataattaagaaactgaaaatttaggagaaggataataaactttctgcactgtaatgagtacctttaaagctcacttttggagtttgtgtacttaagcaagcttaatatgtccatctaccatacatgatgtataaatgtatcacaactaatttatgatttatacaaaactgttcacaaatcacatgcacccattcttcttacaaaatctttgctatgattgattttttatatatatagtaatatacgtgcatagaatataataataataaacagtaaacacaattggaaaaccataatactatgaaaatcccatacattaaaatatcaaatttattttgagtggattattaattgtatagtggttagtttgttgatttcatatctttatttttctatgtaggtgggaattccagtgcatcgacc

SEQ ID NO: 2550 - DNA, 331 bp, Arabidopsis thaliana
  Intron number 6 from transcript AT1G72390.1 (locus AT1G723 90) derived from phytozome v7.0 (chr-ID Chr1; pos 27246372 to 27246702)
tgaggtgagttatctgcaattattttttgggataaagccttccataagttcttggaaacagtccaaacgtatataaatatatttaaaaagagctcaacagaaattatctacacttaatcaagattaaaaaaatgtcgtaattataagtacatggaagtttatcttccaaactcaattgtacatgtatttgattgtttctgaaacataatggagtaactgggaccagaagtaaacataaaaaacctagttatactaatttttaattgactgctgtgtaccatcttacatcatcatgttttctttaatttttggcacatactattgtaggtgc

SEQ ID NO: 2551 - DNA, 579 bp, Arabidopsis thaliana
  Intron number 1 from transcript AT1G72650.2 (locus AT1G726 50) derived from phytozome v7.0 (chr-ID Chr1; pos 27349674 to 27350252)
tgtcactctccggcgacaaaacttgatttccggtggtaagcaataaaaattcaacctttttttaattcgtttctacatttcaagctttgattttgttctttcttaatatgttgttgttgtatttctgtgttgtattcgtaattcgatctaaaattgtcaaattgattgtgagaatgcaaggtcttagtttgtcaattgcgaaacttgtgaattctttggaatttcaattttttaatctttcttaattttgtatacttagtgttatacttaatattcaaagggctttacttttgtttgataatagatacttctcactttggggctgctttgttttcgtctgatggtgttatttgtatgagaatttgctttgtgttcaggtttttggtgtgaaattgtacagagatgctgtcaaatagtaaaagaattgtttttttctttggtaaagttatatgtagtactgaaacatgctttggtagattggtttttttagtacttgaagaatatattgagcatatatcaatttgtttgctttttctctgtttgggattgcagatagtgtgttcctaagttagatttgcg

SEQ ID NO: 2552 - DNA, 848 bp, Arabidopsis thaliana
  Intron number 2 from transcript AT1G72710.1 (locus AT1G727 10) derived from phytozome v7.0 (chr-ID Chr1; pos 27372737 to 27373584)
aagaagtggctattaaacttgtaagtaattcctactcaaaaagtggaactttatcattttcagtgtttaattgaagtacatagaatttagtattgcaatgtaaagtctgtacgtatatcttcattaaataaaagattgaattttctcggaaagtgggaagaaagctttgattgttgtgagttgtgacttatgtgtagaaagacttctgtttattgcttggtctttcttagcttgtagcttctccttttacatgttaaaatcgatcggaatgaaaacgttggtgtactgtgtttagacgaaaaaggaatagaattttatttaacaggctacacactgctttttctactctgatcatgcgattgttgcaatttagttgagttcttccttaagcttcctcttgattatctatgactgttttcattcagtattcaacatgatcaaaccaatatttctatagtttaaatctgggttcaacctgacttttccgtaagaactgagatctattattgattcttgagcaaatagtctaattaatgctgaatcaattcttagagtccacgacaaaactacctgcaactggtgggaccaacctattgaaaattttgttgtggcctacaactggagaattatgaggctgacagctatacatattactgtattgaacattggttgtttcttttttctgttacctgtttgtactggttctgactgttgagtatgttaaatcaaatcctcatgcttgtttcacatttctttttttgctctgaaatgtaacagatttatcgtagtttggctactgtgtttgttgtatatgttctgacggcatcttttcttcttgtttcaggaaa

SEQ ID NO: 2553 - DNA, 250 bp, Arabidopsis thaliana
  Intron number 1 from transcript AT1G73050.1 (locus AT1G730 50) derived from phytozome v7.0 (chr-ID Chr1; pos 27478203 to 27478452 reverse strand)
caaggccacgcgttaatcgacgtaagtttccgagaaaatttctgtagaatctcatgttaatgcttgaaacatcataatctttggcgacgaagaagtttttgatgaggtttctttgatttccttgtatcgcttttgagtaatagcaagaaaacgatgatcgatgtttagcttatccctaatttgattttgagattcttctctttcattgttgtttcttactgttggaaccttcgttgcagctcccggtttc

SEQ ID NO: 2554 - DNA, 799 bp, Arabidopsis thaliana
  Intron number 1 from transcript AT1G73210.2 (locus AT1G732 10) derived from phytozome v7.0 (chr-ID Chr1; pos 27529594 to 27530392 reverse strand)
tcactcctaagcctccttccttctctcttcctcaggtaatttttttttttttaattcttcattctcttagactaatccttaatttgggggtaaattaaggtcttaagcctcaactaatcaaattttaaaaaactattttaatcgattgtctctccccacaaatctctcgtctctaatcagcagattttgtcctaaaggtcttatttttaatcaagggtgatgtatcagacaacctagaacttgtaatagtttaatgatttggtgtgagttttcagatgagatttgggctatagagacaataattgcatggtccatcaaggagaaaaattatctatgaaatctatatccaatttaaatggtgtcacatcagtttatggattctataacaccacgtggaaacgtgcgacagaattgctttactcaactattttttatattactattatattcagtaatccattagctaagtactgagttttggttgaatcttcttggttgctttggtatatcctctggttctgtatcattacaaggttgtcttattcagtaatcttggtttatatctctgattatggattaagagctcaatacatgttggtctaataacctaaagatcatgttgttgcatttacattttgggggtaattaggagttaatgatagctagattatcagctaaacattggctttcagtgtgctgctttgtagtgtgttagtttcagagctttgtgagttgatgatattaacaatttgtggcaggaacagggaaaggaggagattgagtatttcaggcttggtga

SEQ ID NO: 2555 - DNA, 793 bp, Arabidopsis thaliana
  Intron number 1 from transcript AT1G73210.1 (locus AT1G732 10) derived from phytozome v7.0 (chr-ID Chr1; pos 27529600 to 27530392 reverse strand)
tcactcctaagcctccttccttctctcttcctcaggtaatttttttttttttaattcttcattctcttagactaatccttaatttgggggtaaattaaggtcttaagcctcaactaatcaaattttaaaaaactattttaatcgattgtctctccccacaaatctctcgtctctaatcagcagattttgtcctaaaggtcttatttttaatcaagggtgatgtatcagacaacctagaacttgtaatagtttaatgatttggtgtgagttttcagatgagatttgggctatagagacaataattgcatggtccatcaaggagaaaaattatctatgaaatctatatccaatttaaatggtgtcacatcagtttatggattctataacaccacgtggaaacgtgcgacagaattgctttactcaactattttttatattactattatattcagtaatccattagctaagtactgagttttggttgaatcttcttggttgctttggtatatcctctggttctgtatcattacaaggttgtcttattcagtaatcttggtttatatctctgattatggattaagagctcaatacatgttggtctaataacctaaagatcatgttgttgcatttacattttgggggtaattaggagttaatgatagctagattatcagctaaacattggctttcagtgtgctgctttgtagtgtgttagtttcagagctttgtgagttgatgatattaacaatttgtggcaggaacagggaaaggaggagattgagtatttcaggct

SEQ ID NO: 2556 - DNA, 425 bp, Arabidopsis thaliana
  Intron number 2 from transcript AT1G73350.3 (locus AT1G733 50) derived from phytozome v7.0 (chr-ID Chr1; pos 27576485 to 27576909 reverse strand)
gttgcaaaggttagcgcatcgtcctctccaatattcttaccgaatcttcttttgagcaatcttactgtgcacaaattgtatgcgagagaggttgtctttgtatatatcttagagtttgattggtcttttctgcagtatactacagtgatttgatgagtgtagtttgtatgctaaatgttattgattcgattaagctcttgtttcttttttttgcttagcgttggagcaagttgtggttttattgattgttttttttttgctgttgtagctagtgaagttgtttagatatatatatctttgttagcattagtggttattgatgtgtgtgaagtgattcttatgtttgactctatattgggactcgacttttctgataacttgccccggcagggataacggccccgccacattttctggttattgca

SEQ ID NO: 2557 - DNA, 430 bp, Arabidopsis thaliana
  Intron number 2 from transcript AT1G73350.2 (locus AT1G733 50) derived from phytozome v7.0 (chr-ID Chr1; pos 27576480 to 27576909 reverse strand)
gttgcaaaggttagcgcatcgtcctctccaatattcttaccgaatcttcttttgagcaatcttactgtgcacaaattgtatgcgagagaggttgtctttgtatatatcttagagtttgattggtcttttctgcagtatactacagtgatttgatgagtgtagtttgtatgctaaatgttattgattcgattaagctcttgtttcttttttttgcttagcgttggagcaagttgtggttttattgattgttttttttttgctgttgtagctagtgaagttgtttagatatatatatctttgttagcattagtggttattgatgtgtgtgaagtgattcttatgtttgactctatattgggactcgacttttctgataacttgccccggcagggataacggccccgccacattttctggttattgcatatag

SEQ ID NO: 2558 - DNA, 313 bp, Arabidopsis thaliana
  Intron number 1 from transcript AT1G73690.1 (locus AT1G736 90) derived from phytozome v7.0 (chr-ID Chr1; pos 27715180 to 27715492)
gagtcgtcttcaaagctactgatacaaaggtgaagatgattcctctctcaattcttcatattttttgtcgatcccatcgaaactagggttccaattctgtcgtgtgtcttttgacgtgtctcttcctgggaacaatttggttaaatctgatagctcttaggttttaaatcagctaaagtttcgatctttacactaatatgtgttcttagaagtcaaagtttgcatttttatgttcttaatggatttaaagtgtgtagtttttgtttaagtttgtataaggaagctgatttgttttgttgtggcaatttgtaga

SEQ ID NO: 2559 - DNA, 547 bp, Arabidopsis thaliana
  Intron number 1 from transcript AT1G73720.1 (locus AT1G737 20) derived from phytozome v7.0 (chr-ID Chr1; pos 27725062 to 27725608)
gcgctcgaaatcgaagctcgagagtaagatttcgctttctcttacaaaccctagttttcgtttagtgtcactgatatgaattgtgctccaagaaccatcgtttacgaatgctcagatggatcttaggttacatgtttggagaaaacatcttgaatgttggtttttttatatcctccatactaaagttgtggtttttaaatctacccataatttgttttagcttggttcttctaaagctaattgcttctgaatatctagattcctccgtagctattcttcgtttaaattaacgtcgtatacgaaaatttgagggagatcatcgttagagtgttttgattctttgcaatgcgtctcgaggaaaaatccaatttgtataaatttgaactcttgttaattctcggcttggattgaaaccattgacagtattattagccattttgttagtaatattggatggagaacgttttgatgctatatgtcagctttgtgtagatcttcatccctaatagctctctattgtgttgaatgtctcagtgtaataaagatt

SEQ ID NO: 2560 - DNA, 739 bp, Arabidopsis thaliana
  Intron number 1 from transcript AT1G73950.1 (locus AT1G739 50) derived from phytozome v7.0 (chr-ID Chr1; pos 27803657 to 27804395 reverse strand)
ctcaagctcgatcactccattacttactcctggtggttagtttctctcctctcttttttgtctctccttttctctgagactcaaattgtatgaaatcgaagtttttttttttttcttgttcgttgaatttcgagcgcatcattattgcgtcctacaagattgagagagttgaggatttgggttcagaccttattcgttgattttataattctgagcttggttttgtcggaaactgtgaggttttgcttgtatgtggcatctgtcggaacgaattttatgtgagattgttgaaatttagcttcccttgatcgaaaactgtatcgattctcctttagataatggaatccacgatggtaatttttacttaataagaattggaaattgccgtttttggtacttcttgtgtagaagacattaaaagtacatctctatcagctattagacagggaagccatgctagattgtgtcacgtgttgatgtaccaagtactatgtctgtatgaataaacatagggttttgtgtgaggactgcaattggagatgatgtcattatcttgggaatattcttttatagggtttcagattctttgattcttggttgtggaggtgtttttacttggttattcatttcgtcttggtgttggtagcaatcatatatgcaatgggttaatacataacaagtgtatatgcgccgctaatttgggtatgcagggttgtgtgtctaccactgtgggctttcc

SEQ ID NO: 2561 - DNA, 498 bp, Arabidopsis thaliana
  Intron number 1 from transcript AT1G74050.1 (locus AT1G740 50) derived from phytozome v7.0 (chr-ID Chr1; pos 27847961 to 27848458 reverse strand)
cccaacaggcgcacggcaaaaccaaccaagctcaggtacttagtctgacactggtatcgatgcaattatcttccatgtgtttggttgatttctttggctcgtttgctaagtgggtttgtataagatttgaatatctgctggaaaagtgtccaaattttgcattgtgtaaatcatttgtctctaggatatttgaagaatagttgaaatgcattggtttgtgaagattgttagtggagttaaacttgaatttcaaaaggttcataatttctgtgaatacatctagttttcttatacattactgttattagtatgattaagcttgtctcaggttgatagtaaaaagaaaaaaagcgaatttgattttcatttgtataccaaatttaatgtctatgctctgtaacgtcttcaatagatcttatatatgtttccaacatgatccgatcttcttatatctgtattgcagagctagcattactccaggtacagtgttgattatcc

SEQ ID NO: 2562 - DNA, 578 bp, Arabidopsis thaliana
  Intron number 1 from transcript AT1G74130.2 (locus AT1G741 30) derived from phytozome v7.0 (chr-ID Chr1; pos 27873975 to 27874552)
tctggtggttttactgggtttcaaaaacgtgggtatcgtttcttttcctctccctttttgtttttcaaagtaaagttggaacctttcctaagaaaaattctgagttcccctttctctatggtcctctgttttatattgtacctatttgtttccaagtaaaaactacatttttcaaagataaatttgtcttcaccataaaatttctgggtttgacaggatttatttggtaaagcatcgaccttttttcacaactctctttagcttttctggtcaattgtacgtttggctcttccaagtaaaagacgtgtcaggattcagagaaattagtaggctttttttttcttccatttctgcgtagttcttgattttgagcagcacaaagctcttttgatgcttttctctttatagataagacatagaatagcaagctggacactgtttagaccttctcctttaaaaaattgttctcctacatcaaaaatcttagattctttacctgctccatttgattttggatactaataccaaaaagaaaaaaccactttattggtttaactctggcaggaagtcttggatta

SEQ ID NO: 2563 - DNA, 584 bp, Arabidopsis thaliana
  Intron number 1 from transcript AT1G74140.1 (locus AT1G741 40) derived from phytozome v7.0 (chr-ID Chr1; pos 27877234 to 27877817)
tctggtggttttactgggtttcaaaagcgggggtatggaatcgtttcttttcgtctctctttttgtgattttgctgggtttcaaagtaaagttcgaagctttcctaagaaaagttctgaaatttctgagttccttttctctatgatcctctgtttctcgttagctaagtaaaagtctacatttttctgagataaacttgtcttccggatgaaatttctggttttgatttagggtttaaacagagtttctgtggtaaattatcgacctttttaagcttttctggttaagtacacgtttggctcgtccaagacatacgacatgtatgagaatttcagagaagaagatgagaaattagtaggctttacttgctattttgccatttctgtgtagttgttgatttgagtagcgcaacgttcatttgatgattttctctttatagatagactagcagctcgacactgtacacacccttctcattaaaactttgttctccagatatagaaataacatcagaatcttaaaattcttcaccagctctagttgattttggtttgtgttttcctctggcaggaagtcttggatca

SEQ ID NO: 2564 - DNA, 540 bp, Arabidopsis thaliana
  Intron number 1 from transcript AT1G74160.1 (locus AT1G741 60) derived from phytozome v7.0 (chr-ID Chr1; pos 27887265 to 27887804)
tgttcttactggccgacgaaaaagtcttactttaggtaaattaataattactatatatttatattgtttgataatttaaacactctcttctgatctctatggttcgtgtccagtagtcgttgacttgtatatggtcacatatgttattcttacatccatgtgtttttgtatgtttattcttctctgtttttgttttggctctttatctgccaatggagtgattctttcattaaccaggtcttgttatagtctcagagatctaaagttatggttgttactttttctttctcagttgtgttgatctgccgaatcttttggttagatttaatttttcccttatggccggttttttcttgctagattttgacttttattaacctttaggctcatggagtttccaaccaaatgtgataaattcaagtttgactagcaggttcttgtaggttttattaaacgtctctctcaatgcgtaatcgggtgttccttgtttgagagttttgatatgatgctcatgcttgttttatgtgcttgttgcaggta

SEQ ID NO: 2565 - DNA, 448 bp, Arabidopsis thaliana
  Intron number 1 from transcript AT1G74170.1 (locus AT1G741 70) derived from phytozome v7.0 (chr-ID Chr1; pos 27895582 to 27896029 reverse strand)
ggaattcaaaggtaagaaagaccagtctgtttcttccctaaaatttcgtggagaaaaagtattatagggaatttaaacgaaaatctttgtctaccagtctgtttcttctatttttcgtaactagaaagaccttcacttcactagacttggcttaacttatttcgtggtatattatcattacgcttatgactgtttactacaacgaccttgacttttcctatcatacaaatgatacaattcaaagtaaatgacagcgatcactaagtttacttcgactttttctaaataatacaataatttcttgttgaattttcataaacgtggaggtgtttgcatttttaactcatattcccacattgctttgtggattttatttcttttgcaatggaggggaagcttttcttgggacaatacttgatatgtgtgattttactgttggggcagctac

SEQ ID NO: 2566 - DNA, 468 bp, Arabidopsis thaliana
  Intron number 1 from transcript AT1G74210.1 (locus AT1G742 10) derived from phytozome v7.0 (chr-ID Chr1; pos 27910399 to 27910866)
attcttacaagtaagtaaagcttctcaatttcaaccttttctttttgttcttgttttctgggttttgtatgcatgaaatctttctgtgcttctgattgctttctattgcattagcttgtgtttttttggtgaaatttgtctaatttcacctttcttcgtaaaactgaatagtaaattaaaaaaaagaagcgaataggttgagaacaaagtaagaatctggatttgtttcatttttttactatacactaaaaacaaaaaaatttaatcttttattgaatctggatctgtttctgtttcttgtttcattataagcttagaaaattttttgggtcttgagagaccaaagcttatttctcattctatctggatttgtttcctgttaagctaaaaaaagtttgagtcttggttctgtttttggctctgtttctgttaacgtcaatacaaagtggttattggtgatcttacagg

SEQ ID NO: 2567 - DNA, 452 bp, Arabidopsis thaliana
  Intron number 4 from transcript AT1G74230.1 (locus AT1G742 30) derived from phytozome v7.0 (chr-ID Chr1; pos 27915834 to 27916285)
gacaggtatcacataaatgttccagcttcttgtgatactaagatgttgtgtggctttagtttattcctttgtcgtttcttttccttttctgaccaatattgttttgttttgaatgtttgacttctttcaaatcgatgtgccttgacgattcatttatttagaacacttaagttttgtggcctttcaaacgttggcaacataggtagggtagatgtttatcatctagcttgaaatactattaatctgttaagcaacgacttactctctcttaatgatgggtcgaatggtggagcaatctttctgtttgtggattgtatatcttgttacatagtaaaagctttgcgttcagactctgtctagatgattcagaaaacgctggaaatgaacccactttgcttggcattttcaattggtgtttattgggtttctttttttttgcatataggaccttc

SEQ ID NO: 2568 - DNA, 311 bp, Arabidopsis thaliana
  Intron number 1 from transcript AT1G74260.1 (locus AT1G742 60) derived from phytozome v7.0 (chr-ID Chr1; pos 27927447 to 27927757 reverse strand)
cctcccaagcaactcgtgcggctctgtttctaaacgtaaatattctcttactgctattcttatcagtggtccaagttttgtgtcgattgatcgatgaacttatttgattccgttctgttgcttaatcttttcatagattgattataaggatgatttcgaaaagtactttatattgagaatttgaagttctgttgatgttgaatgcagtaacttaggactctgatttactggaaacttcttggtatttggcatccataatgttttcgttttaacaagttagtgtttttttgcagggttccaatagacaagcg

SEQ ID NO: 2569 - DNA, 811 bp, Arabidopsis thaliana
  Intron number 1 from transcript AT1G74430.1 (locus AT1G744 30) derived from phytozome v7.0 (chr-ID Chr1; pos 27975507 to 27976317)
tctaggcgagtggggttcactgcctaagagagccggtacaaatctttacttacacctatgctacatacattgtgtacggtctatactatgttttgtgtctctttggaagctaggggctttgaagaagcttaggatctttagattccagtttctgtcggaccatagattttgttttgagaatgtgcacaatagtctctttatgcacaagaaatccatcttctgaagagatttattacagaaaaatccatacgtttgttaacttctttaaaaaaaattttaatttttttttttcgattttggggagtaaattaaggagtacatgagttttacggataacagatttgtaaaccaaataatcaagggatttataattagtcaaagataaatcttaataaggagcctcttgttgataaatctgtgtatgcattattatatgcattacaaagttatgtggtagatgagatttatcgtattattatattcataaccatgcagaaccttctatcagattttatctatattatgatataatatcttaatgcaatctatgaaagccaagtgtttccctggttcctatttcttttgattattgtatatatcttatcaagtagaaagctatagaaattagattatgatactttttgacccattttcagaacgtttatttcattgtgttatctcttattcagtttgatggaaaaagaagttcaatattttttttttttgtaacttctctgtttgccactatgttaaagtaaacttttatttgataaaaactttttatttctatgcaaaaaataggtctacaaag

SEQ ID NO: 2570 - DNA, 326 bp, Arabidopsis thaliana
  Intron number 1 from transcript AT1G74640.1 (locus AT1G746 40) derived from phytozome v7.0 (chr-ID Chr1; pos 28032994 to 28033319)
aaaaattgccagtccaaacaaaggttagtttactagtatcttgttttgtattaatggtttgatcctttgacttggagaatgaattagacaaaattgtattagtcatgttgagattctattgagttttgtttcacaatcttactatattagctgtattctttttatgtagaatttgatcaaagtgagatttgttttcttacttctgaaaccagaaatgaaaagtaaggctcttctgggataatcctttcgtttctgggcttcttttaatgtaatgatgctgttctgttttagacaagcaactggcagtggaagttcaagggcaattc

SEQ ID NO: 2571 - DNA, 586 bp, Arabidopsis thaliana
  Intron number 1 from transcript AT1G74690.1 (locus AT1G746 90) derived from phytozome v7.0 (chr-ID Chr1; pos 28063925 to 28064510 reverse strand)
attgaactaacacaactctaaatttctaatttacggtatattatctccttctttgttattgtttttgtttggtctgaatcggacttggatttagaacggagatccgacggttactccaactttaaaccgactttattttaagacattgttcgagtagtgttgggttttagaaggatctctctgtttgggatttgttgtttgactctgtcggtgttttttgtttgtttgttgttgtttttcattttggaaagtggattttgagtcatttagggttcttctttttcagtctgagttccagatctggtaatttcacttcataaatttatatggtaatcattgttttttttttttgttctttcttgattcttacatttagttatcattaggtttatctttataagcttattattagagttgattagaacaagataatgtgttactctccttttttgccataactaattaatgaattaaaagacttcttcattttgactattgtggtagactagtagttgccatattcacatactaatattggcttgtgttgtttcttgggcaatgcaggtttgttttagttctatacatt

SEQ ID NO: 2572 - DNA, 277 bp, Arabidopsis thaliana
  Intron number 2 from transcript AT1G74790.1 (locus AT1G747 90) derived from phytozome v7.0 (chr-ID Chr1; pos 28099217 to 28099493)
gttgtgcttctgttgtaaaatcaatcctttgtgctgtaagtataatctccgtctttaatccctaaagattctgcaagtgtttcattatgccactcatacataatttgctttgagctgttaccattcttacctgatttgtctggaaccattgtaatgtttttgtctgagaatgaatctatagaagaggaactgtgttctaagtttttttttgtttttgtttcattactgtgttgatgttacagaattgcgatcctttttcatcagacttattcagaga

SEQ ID NO: 2573 - DNA, 750 bp, Arabidopsis thaliana
  Intron number 2 from transcript AT1G74860.1 (locus AT1G748 60) derived from phytozome v7.0 (chr-ID Chr1; pos 28123855 to 28124604)
cttgattccaaggtactatcactttgttcttattttcatttgtttatgggttcttggtttgttttatttggtttctgcctgattatgtttttggggtcttagaggcatttcttttttcttgcttcatatgaagatggcttttgaaattaagtttttcagccttgctttcatggttttaagcattgttaatgttgtgtgtgtgtgtgtgactctgagttttgtttattcagtctttgacatttgaagtgactaaaatcttccatcattcaaatgatatgcttcgagactatcatttttgctatgttttttcactacattcacttcattgaacgttgatacaagccattgtttttgacactcttgagactattacattgatactttgcagatatagcttttctcttcctccattgatatttgttcatgaaacctaaggcctaaaactaatgagcgtaaccaagtgtagcttagtgtcagcaagttctagattcgttgtaccattgttggcagtgaggcttacacatatttcatggcttatgctctcaattctcatttcatcgtgaaatttttaagttaaaggtttttcagtgtgggggatatagctttttcatcttagagactgtatcacgtttgcttgaggatgagctttccctaatggagtatatctttcttttgtggctggctttgcgtttcctcctcaactctaatttttaaaaaaccgatttgtgtttataggttaaggagacagag

SEQ ID NO: 2574 - DNA, 585 bp, Arabidopsis thaliana
  Intron number 1 from transcript AT1G74875.1 (locus AT1G748 75) derived from phytozome v7.0 (chr-ID Chr1; pos 28129082 to 28129666 reverse strand)
tattatgtatgtgactaggagagtaacaagacacaaagccaatctcatctctcacaacttcattaaacaatcctttcctctgctttgtctttgacttccattttctgataaattcttcatcatcacaaaaatactattgacgtgatggtgatgttagtgggtttcctatgatttctccttttgggttttcccattggtgaacggtgaatgagagaatctagggtttggatttgttctccatacaaggatttaatcccattattatgtatttttcctttttttttttaaagcttttttagattttatttatttttaatcttttggcttattctaaacttttgtattacttccttttcctattaggaataggaaatctaaacattgttataaaaacccgagtcaacaaatcaagagagaaaacaatactcacaatcttaaacaaaccatagtactttttcttctttcaagaattcccacagaatgacagtttctgtttctctagattctctacctgaagaccttcttgtagagatctcttaatgtgttgcagcttcatcattatccgagtttcgcaatcttcaatta

SEQ ID NO: 2575 - DNA, 433 bp, Arabidopsis thaliana
  Intron number 1 from transcript AT1G74960.2 (locus AT1G749 60) derived from phytozome v7.0 (chr-ID Chr1; pos 28155232 to 28155664 reverse strand)
aaaccagaggagattgaatcgtgctgctagctccggtattacatttatctcctttttttattttctcttccaatctggggttttgtttttatgtggcaaggtttagtttttatagttcgatgttgttatgggtttatgttagtgatgaaatttagaggtaaagttgaagtgggaagcagctgacatgtgaaagtttgaatttttattgtgattccatgttttatcatctttcatatgaaagcaaactctgtgaggttagtctctagatgatacagagcttcgaaagctgaccaaatggcagtgaacttttatatctaaattttgaagttggctgtgattcttttgtttatcttgctattgagatgtggtttgtggatagtagctgattaagtttatctaccatcaactggctttgtgggttttaggtggagcc

SEQ ID NO: 2576 - DNA, 307 bp, Arabidopsis thaliana
  Intron number 1 from transcript AT1G75040.1 (locus AT1G750 40) derived from phytozome v7.0 (chr-ID Chr1; pos 28177768 to 28178074)
cagtattcacattctcttcctcgtgttcatcacaagtaacaacatcaaacacactctatttctgtttcttctctgtttcacttatatatgtcttatctttctcctttcattattacattcttcacctgttttgtctgtttttaaggagaatagctttcaatactgtttcttaagtttccttttctgatgatttctttttcttttgttcatcatcttagatcacaacatattgcaccattatttctcaaaattgtttcgtatttttgatgtttttgtttttttttaaactgcaggcggcattgctgtt

SEQ ID NO: 2577 - DNA, 768 bp, Arabidopsis thaliana
  Intron number 1 from transcript AT1G75060.1 (locus AT1G750 60) derived from phytozome v7.0 (chr-ID Chr1; pos 28182328 to 28183095 reverse strand)
agaaagccgtcggactcggtggttggcattggctggtgagcaaagatcaacttcgctttcttctttacctcgttttgtcttttttgcatctttgtgtctgtctgtgtttttattcccccagtagagtagatttttaaaaactgattaacaaaagatccagaatcattagctcaataatgcaataaaatcaatggttgttctatgttaccgattagattgattgttcttaaaatatcataactttattttgttaaattgcatcataacgatctgcactttttatatttatttttaacttttgtgttactttttctcaatcaattccttgagaatccttatctttgtgggttcaagctggcttttagatttgttttacttgtagtcactaattttgatatactttaattaataatatttagggtttttgttctttctttttcagattggtcattttcatccactgaaaaatgttaaactttttatagatgttctccgtttcattaggcttcctagtttttatattatcaattttactttctttgatccttttttgatcatttctctagctatacaataaaaatcagtatcttatacgatttcctcataacccaaagcatcatttttttttttactaatatcgatatcaaattccaccacttcttgtctccaaccattcccatttctcaaaaagtcccaaactttactttgtttgtggagttcaatttttaatctttgtcctttttgctttaaattttcaggttttgacta

SEQ ID NO: 2578 - DNA, 466 bp, Arabidopsis thaliana
  Intron number 2 from transcript AT1G75170.2 (locus AT1G751 70) derived from phytozome v7.0 (chr-ID Chr1; pos 28213915 to 28214380)
caaagttctctctttattcctcgttctctgtttcggtactaccctcgttcttctttttaaagtttgggtctttcatttgatttcatactcttgatttttattttacatctgacgactagaaaagtaggtagattatgaatctttctgggtttgtagtgagtttataggaaattcctttgtctagtgttccaaaatttgagtagatcttgaacaactttgcaaatcttgttgatcgatatgtttgggaattgaaaatttactagattttgaatttctgaggttttgtgtaagcagttgaatgaagcagtaggtggttgagtcatgtttggtctgtgatgtcctgtcacacgcatcacatgaaccttggctttggatttaacggccgttgttagtattaggctaattattaacatggcttttgttcattgtagttaattttcacagagtaaagagattttgatacatt

SEQ ID NO: 2579 - DNA, 792 bp, Arabidopsis thaliana
  Intron number 1 from transcript AT1G75210.1 (locus AT1G752 10) derived from phytozome v7.0 (chr-ID Chr1; pos 28224235 to 28225026)
tccagctcctcgaagagaatttctccacactactggttcgtcttccctcttcctcctactacatcgttttgcttgtttcagctaggtttcttcttcatcgtgcttgatttcttgttgtagaccgttttcgtgttcgctgtgctctctcttgttttcgtagtagactaatggtgttaatcgcatattcagtgacttcgctatgactgatttctatcttccgatggattttcgtgttagctaattttgatagtagcttagttttctggaaatcagagtttgttgttagtgaagaatcgtagatcgggaaggaggatgtggtaattagtaggtatctttaatcgtggaagttgcagtttctaggttttgcctggagcataccttggaagatactttaggatcaggacttaacgtggtgcacgctttgatccttttgatcgaggtaagatatgttagtggaatcatgcttgatcaccaaagctttaatggttgtatgactcgtgttgactaatttccaaatcacttatccactcgtagagaacgtgtcatcaggtagcttcgttttcttctgtgtatctaattttagcctaggtgggttctgactaaccagttgtttcttcctagattattttcaaatattcttattatctgtgctggatagagtttgtactattctctacgctaattgtattgtgtgttcaaaaaagctatatcatcatttgaagaacagaaaaaatgatgtttactttatttgataaactctcagggacaagccagctgtgttttaagagttcg

SEQ ID NO: 2580 - DNA, 503 bp, Arabidopsis thaliana
  Intron number 1 from transcript AT1G75410.1 (locus AT1G754 10) derived from phytozome v7.0 (chr-ID Chr1; pos 28301935 to 28302437 reverse strand)
tcttttgtatagtttatcatctagctctttctcaggtttcatttctttaactataataattcgattgttcttattagtagcttcttgattcaaagctatatgattgacttgttgtactctgtttctctttttacaaaaagatttcctttttcgaattttatcatcatcttcgtctctgttaaattcttacaaaagtatgaaatcatcagaacttaaaaaaaattaactttatatctttcatgatttcaaacatcatcctctgtttttgtttgcgtcactgaattgaagtggaaactttacctagggttttgatatcttcttgacctaaattgagtatttcatatttttttcatttcttgaattcatctgtaattgcggcgtatatagagattaagatgttttaacctctttaaagaattgttcttttatttatccagtttcagtttcaaactcacacgtctctctctctctctttctcttttttcagacaaaacatcaatcgg

SEQ ID NO: 2581 - DNA, 795 bp, Arabidopsis thaliana
  Intron number 2 from transcript AT1G75630.1 (locus AT1G756 30) derived from phytozome v7.0 (chr-ID Chr1; pos 28401110 to 28401904)
ctggtgttaggtaattgctatctctgctacatgatcttaactgtttgattgcagcaattttgatcgattttcacttgtttagaagtttctgagatagctttgttgtttgttgttttacatcattggatagggaacatgtagttatgaagtctgatttttatcatcaaaatctcgattctttctcggtgatttagtgatcaatggtttacattaactaggaattgcagttcttttgatcttcttttatgaatcatatggtgaaactgattggaagaagatatctgcaactttttggttcttagaaatgcagttttgattgacagaggtcatgagtcatgaccttttatctttggttgaatgttatatcgtgaacacttgtttctaacacagatctgatagactagaaatagagattagagagaaacagaaacagactttgaccatatggttactttgttagtgaggaacttttagccatagcctagaggattgttagggttgttgattgtaatcctgattcaaagataaaaatatacagtttcactacttcattcttatcaaacttatcccagaaagagctctttattgatttgctctcgtaacgttgtttgatattagatttggtgttggttaagaactgtctggattgaatctttgaagcagattaggataaattaccagtagaattcaacaggcgttgcacctgatgctttgttttcttttacatcaactatatgtgacagcatcattcagaactctgttttgttaatctcaatgtcttattttgcagagcga

SEQ ID NO: 2582 - DNA, 531 bp, Arabidopsis thaliana
  Intron number 2 from transcript AT1G75630.2 (locus AT1G756 30) derived from phytozome v7.0 (chr-ID Chr1; pos 28401110 to 28401640)
ctggtgttaggtaattgctatctctgctacatgatcttaactgtttgattgcagcaattttgatcgattttcacttgtttagaagtttctgagatagctttgttgtttgttgttttacatcattggatagggaacatgtagttatgaagtctgatttttatcatcaaaatctcgattctttctcggtgatttagtgatcaatggtttacattaactaggaattgcagttcttttgatcttcttttatgaatcatatggtgaaactgattggaagaagatatctgcaactttttggttcttagaaatgcagttttgattgacagaggtcatgagtcatgaccttttatctttggttgaatgttatatcgtgaacacttgtttctaacacagatctgatagactagaaatagagattagagagaaacagaaacagactttgaccatatggttactttgttagtgaggaacttttagccatagcctagaggattgttagggttgttgattgtaatcctgattcaaagataaaaa

SEQ ID NO: 2583 - DNA, 635 bp, Arabidopsis thaliana
  Intron number 1 from transcript AT1G76380.1 (locus AT1G763 80) derived from phytozome v7.0 (chr-ID Chr1; pos 28653574 to 28654208 reverse strand)
gcaaccgccggaaaattgacggatctgacaatacggtagttatagagtataaaaattcaatctttatttgaaaattcatttggggaaaaaaagttttaattttaggtttttttttttggatattttggcgcgttaattgaggttcgtctgcaagcttaaatatggttattgagtgagagtgatgagttttgactatttcccttttttttgttggtgggaaatgggaaattcataatttcagctttttctgtatatttatttttatttttcggttcctcttttttttttttgtcttggtcgagaaaatcttggtgttaatcttttcttcttttttgtctgaatattatataatattcttctgattctggtattaattcatagttatcagaaaaattaaagccggtttctgcactgaagagacaatcatatgtctctgagacaagttctgattttgtcttttactatcagtttagtttcttaagtttccttaaaaaattgtacttgttctcacttttgtcataaatacagacacctgttatgatttgatctttttaacttgaggttgttgatgatactctgttttgtgtatttcttctgcagggagaaaaggcttcgaaagcgacagacattcttct

SEQ ID NO: 2584 - DNA, 739 bp, Arabidopsis thaliana
  Intron number 1 from transcript AT1G76405.1 (locus AT1G764 05) derived from phytozome v7.0 (chr-ID Chr1; pos 28662052 to 28662790)
agaaggttccggtgaactcaaaaacccatttacaggtgaaaattttgttttttgttgtctgcttcgtattcttgttgctatggaggactttaactctattcaatttcttgggaagtttctttactctggagtttaatgcccaaaagtctcttgggatttgcaaagtttaagcttttgaggatatgtagggttttattttgggtgtttcggagaatgttgtgtgcattttacataagtgaactgtgttgtcttgaacttttgattaagaagataagattactttaaaggagctcttggagttatgaaacctaatctgagagaaattgtgacctaggttttgttcaaatttctagcattgagctgttgcaggagccaaattgaggagtagtttgtgtcttacacacttgctctctgcttggaattctcgtaggattctgtatcatcatttttgctgttagggttttgggttttgagaatgttatctaggttctagacttcttgtgttaggcataagaaaaaaattgtgtcttgaacttctttataatggttattagcaaagaaacatccatatgcttccgggaatcttgatttattatttgtcagtgtatgttcccagcttggttgttgtggtatagttgtttggctttggctacagtatagccggattatgtttcgtttcttgcaaacatgtttctgatttcttaatttccttgatggttttttgtttggtgctagcttc

SEQ ID NO: 2585 - DNA, 676 bp, Arabidopsis thaliana
  Intron number 3 from transcript AT1G76720.1 (locus AT1G767 20) derived from phytozome v7.0 (chr-ID Chr1; pos 28798781 to 28799456 reverse strand)
attgattcaggtgagatcagaggtatctctgtagcagtttcttacttattcaaatcccgtttgtataatttatataccatgcagatgcagtcatattgatattgcagttgtgtgccatgtatgtatatttgcctttgtttctttggttttgggttttaatgtgaatttgggatttttagaagaaaatgattaatgttgatagcacatgaaaaggtctttgattaatgtgattacactgattattttaaagtaaaaatttaattaatagttaaagtaaattttgtttagattgagattcggtttttttttaagtttatattttacatttattaatattcaatatatatataaaagagttaatataataaaataataattaaatatgtcaaaaataactttatttgaagatagttttaactatgagttattttggtctcttttttagaatgaaatctttgagtttgcagtaaggtgagattttaataaatgtttgtaaatcctagattttgaatgattttaacaaatgctagattcaataagataagatttaaaataaatttaagaatatcatgattaaaaaattgaattaaaagattcatgagcttgattcggtaatgccatataaaaagatgtcatcacaatatacatggtgatttgttggaagatttcggaacca

SEQ ID NO: 2586 - DNA, 375 bp, Arabidopsis thaliana
  Intron number 1 from transcript AT1G76970.1 (locus AT1G769 70) derived from phytozome v7.0 (chr-ID Chr1; pos 28924866 to 28925240 reverse strand)
tcctcgcttgctcttgttttaggtctcctgacaaggtaaagatccttgcttttgtctcttttgttcgaatctcaagtcttgttccaaagttttcttactcttcgaattctttccttgctagtagctgttttttttcctttttagtttctgcgtaatcacgatcaccggaaagactaatccttgtgagcttattgaattttgttaattccttgctttaaattgttcatgggttctgttgcaatctttctaatgatgtgtgcttagtatttaagctttgaaaagtctttgaatttttgcttgttatagctttggactaaagtagagtatggtgtcttcataggaaaaatttggaaacttgtgggagttgattgataa

SEQ ID NO: 2587 - DNA, 441 bp, Arabidopsis thaliana
  Intron number 1 from transcript AT1G76980.2 (locus AT1G769 80) derived from phytozome v7.0 (chr-ID Chr1; pos 28926139 to 28926579 reverse strand)
agaagcaatagtgatcgaagccgaaacagtctaaggtatccacaaactctggccaatttatttaggaatccgttgaggtgttttgcatctagttctagaatttgctttttctgagctttgtttttcttgatagtttcctttagtgttgaattgttttgtgatagtcttctctcttcatcatgtgaatcgtgtaaagagtttgtgaaattggtcgttttttttcgttggtgggtttgaagttaatggtcatggaaagtgtcaatttagttgcgttggttgcacgagattttgacctcaagttttagacttctttgagggatttgaactatatgcctaagtctctttgtctatttttcctaattttgtaacacaatctcttgtgccgtcgctacaacttttggtgttctaaatgtttaaattgtggggtttcttaacacaggg

SEQ ID NO: 2588 - DNA, 403 bp, Arabidopsis thaliana
  Intron number 1 from transcript AT1G77290.2 (locus AT1G772 90) derived from phytozome v7.0 (chr-ID Chr1; pos 29038509 to 29038911)
ctttctttctcgaaggtgttgttcagttttattgggtatgtcttgtcatatttcgtcagttcttgtctttgcttgcttcaatctctgtttgacgctgttctgttctgttatgttttatatgttttcaagctcatgtgtttgattcgattccttcattatcgtgcttcagcccctttttagtcccagatatgaatctctctttgttgaagtttcgaggtttaacagtttctcctgtaatgttaatttggtgaaatgtttgatcagttgatgactcttttttggattatatgtagttttaagttgcttgaatgtttaacccccactgctccaatgaaattagaatctgctctgtttgaataatttggtaggagccttggacaaatagttggagagaactggtctg

SEQ ID NO: 2589 - DNA, 423 bp, Arabidopsis thaliana
  Intron number 3 from transcript AT1G77710.1 (locus AT1G777 10) derived from phytozome v7.0 (chr-ID Chr1; pos 29207425 to 29207847)
ggatcgggatcaatcctcaacagagtgcaggtaactatcacaatgctaaacacttggttattgcgttttactcaattctctatcttttatgccattgcaattctcagttttgtttctctcttgcatgctttgattgccaatgtactaatagagtcttagaagatcactagtactgtccttaatggttgcgtgcttttcttttttggtgttccttagcctctaagtgacttcagtgcagtgtccataggaaagcaacctttagattatttacacacagtcgggttccgctgtaatatctcagctgtcttttttatggtgtggtcattagcaacatacaagtagaaatcaagctccttgttaatgaatgtggtgttgtgaatgatgtcaggaaacgtttttctgaagcacggatctgaactaaga

SEQ ID NO: 2590 - DNA, 909 bp, Arabidopsis thaliana
  Intron number 1 from transcript AT1G77880.2 (locus AT1G778 80) derived from phytozome v7.0 (chr-ID Chr1; pos 29286140 to 29287048 reverse strand)
agattgtgttgagtagcacatctgaagctgaaaaggttagtataccatatctcccagacgatctactcttgaattgcttagcacgcatctctagattgtactacccaactctctcgttagtctccaagagattccgctctcttctcgcttccacagagctctacgagacccgacggcttttaggtacctccgagagttgtctctatttctttatgactgagaggcgcaacgaccatgaggtttatgggaaagttgagtggtgtcatgttgtgcatacgttgcccctattcaatttgtctcgagcactatcttgttaccactgtttgagtcattgcttcctcatgatcatatatatcattttgttttctatatgatgtaggatttatggtttgaatatgattgcataatgcatacaatcgtttcgagaacttgccatagccaattcttgattacatcatgttgatttactgacttgtggttactagtttaactaggctggaaaaaacagagaattaggcacttgaaggacaaaagcaaaaaaggggtcattttcagaactagtcatccataataaacttagtgtactatatagtcatccataataatcttagtgtactatataggttgattgaaagcaactcatgttatatcatattgtcatgtcataccatcattttcctcacccattaactgatagtggacctactctccatcttaaggccataaaatggtgtccctttctaatcaaaacttaccctacaaccttccacaatgcatgtgctgatttagtagatctgtatagtcagaccaagcttccagataaatatgcttaaagaaaaacacagtaattattttatcatcactcagtttctgaaactcttgcagctctttcttgaagcaaacattgtg

SEQ ID NO: 2591 - DNA, 355 bp, Arabidopsis thaliana
  Intron number 1 from transcript AT1G78220.1 (locus AT1G782 20) derived from phytozome v7.0 (chr-ID Chr1; pos 29426789 to 29427143 reverse strand)
ggctaagctcggttgccaagctggaagatgtatcacatattctcacatatttgcccttttcatagagatagttgatttgatttaaactaggaggttaattatcatattggtttatgtttttcatgttgtcaccgatccagtttgtgtgttttaaacaaacttatggttactcgaatcatatgataacagaagatgtgttatgtctctcttcaaatatcaaatcatttcatttgatatctattatcagggtcttagaaatgcccaaaattactcttgtatacgaagaaatcagtgtagcaactttatccatctttctataaccttataagaagtaactaagcggttgttgtggcag

SEQ ID NO: 2592 - DNA, 494 bp, Arabidopsis thaliana
  Intron number 2 from transcript AT1G78260.1 (locus AT1G782 60) derived from phytozome v7.0 (chr-ID Chr1; pos 29447671 to 29448164)
atcttttggacggcctcgaccatcgccgcctcgaggtttatttattatacttgagtaattccgtaaaatctttctttatgtcgggaggattagtttatttgatgagtttctatatgatcacgatatattaatggtttggtacgttatcaagaattgtctttttcttttctaaagatacttgatcgtgtataacataaacgagattagttgtactcgttgggattaaaataagtacattgttaattatgtgcgtagtgtacaacataaatataaccaatcaaatccaattttgagaatatgaacatttttttttttgggtcaaaggaatacaaacatttttcttaatatcgttgaattactagtttttgagacctaaatgagcaatgtactcggcgacaattttgttttgttttgtttagcaatgtactatctttttcaatccttttgtttactatataggtcgaggacaaacaggaagtccgagtcagtaccaa

SEQ ID NO: 2593 - DNA, 540 bp, Arabidopsis thaliana
  Intron number 1 from transcript AT1G78380.1 (locus AT1G783 80) derived from phytozome v7.0 (chr-ID Chr1; pos 29487000 to 29487539 reverse strand)
aagctaggttctgggctgatttcattgacaagaaggtatcttatttcctttgtgcccttgattgaataatgttgaaattgaacttgggatttcataaaaattgaaactttagttgagtttgctagtgattggctcaaatttagggttttgcttgtagactcgtctttgagcttgtatgggtttgtctgatgttataatattacttgagtttgtagttgttagggttagagatctcacctccaaatttcagatttttcttgtggactcatctctgagctagtcagggtttgtcttcttagatagtttaatgttatgttacttgtgcaatttgaggtttttacatactagtttcgctagtagatatcatctttgagctttgtttgggttcatcttagatagtttgatgatatgtttcttttgcaatttgggggtctctaggactggttttgctttgtagacatcatctttgagctttgtttgggttcgactgagttctgacatagcttggtgttatgttactctgtgcaatgtttcagctgt

SEQ ID NO: 2594 - DNA, 796 bp, Arabidopsis thaliana
  Intron number 1 from transcript AT1G78880.1 (locus AT1G788 80) derived from phytozome v7.0 (chr-ID Chr1; pos 29654869 to 29655664 reverse strand)
cgttttactcggaagcttacaacacactctctcaggtgcgaatcgacgccgtcttctttttgttttctcagattgggtttttgtcttcctgtgatcatttttacttcattttgggggtttaggtattgttttagcttcgcgttttggtacttgcttcaagctctttttcttagtttctgtgatttggggattttgttagacatggcgatctgtgttcgatttctgctcaatcgcatttgaaattgaaattgcttctaaatcccagagatctcactgggtttcaagagatcagacatagaaattgtgattagggttttgtttttttcatgggttctctgatattatttggtttttctgtagcttttttgggggaagtagttgcaagaaactatgtagatctcaagtgatattagtatattacaagttccctgaattagatgtttacgaatagtcttaagtctcagtggtgctggctctgtcagagaaatggtaaaggcttttggcaaggggaagtgacttaatctcaaatgataactagtcccatcaaaacagctctgctagtgtttggtttctgagtctcattttcttagcatttagggatctatcttgcagcatactgtcctggtcgttcttggtactattttcttttgtgggcataggatgttgaaagctttttattccgtgttggtgtttgccaatgtttcgcttgtcacagttctctatatgcccatttctcatgggttattgttttgttctttcagggatttgaaatcctcacgtttcagcacattctttg

SEQ ID NO: 2595 - DNA, 300 bp, Arabidopsis thaliana
  Intron number 3 from transcript AT1G79200.1 (locus AT1G792 00) derived from phytozome v7.0 (chr-ID Chr1; pos 29795199 to 29795498)
cgaaaaagaaacatacggaaagcgaccacaagctagtgagctctaacttaccctttgaaatagttacccataaaaacatctatttgtatattcacttaaaaagtcaaaagtatattgctttggagactttgtatgtgtggttcttcgctggtctcttcagttgtttagtcatggtttaattacaaaagtcttgttgccctattgtaatgtttgacggattgtcatccacactgaggttctgattaaaatgcttttcttttccgttttttcttccagaaagagggaattccagagctatca

SEQ ID NO: 2596 - DNA, 433 bp, Arabidopsis thaliana
  Intron number 1 from transcript AT1G79230.1 (locus AT1G792 30) derived from phytozome v7.0 (chr-ID Chr1; pos 29800891 to 29801323)
cgcaaaagatctttaatccagccacctttctcagtgtaagtcgatatctgattcgcgatctgttctcaattagccattcgtttgaccactcgttagcttctgggtttgagagtgtctggattgatttcgagcgtttggattgtttctatgatttgacagtggttctactgggttttcgagcttttgaaatgttgaatagactatagagaattgcttaattgttgatgaggtctatgtcaatcgatgcttttcttatcaaagtttgaaattggacttatgagttttgtaatcataaattaggtagtgaagttttatgtgaattgctcagtttcgcctctctgtatatgattctgactttttggttggtcttcctcttcttgtgttggtaattgctgaagaggtcactccactctcagttaggctccgcttctac

SEQ ID NO: 2597 - DNA, 196 bp, Arabidopsis thaliana
  Intron number 1 from transcript AT1G79330.1 (locus AT1G793 30) derived from phytozome v7.0 (chr-ID Chr1; pos 29839055 to 29839250)
aatcttatcaccggtaagtcataattagatttgacattgacatttttgaactttgtcctgtttttttggttagattattagattcaggggaattatgtttttatgcatttggtcaaaaatcagttgaattatttcatcaattcaagaagatttttttgctattgtttcaaattcactcgttttcatatattctcag

SEQ ID NO: 2598 - DNA, 620 bp, Arabidopsis thaliana
  Intron number 1 from transcript AT1G79520.2 (locus AT1G795 20) derived from phytozome v7.0 (chr-ID Chr1; pos 29913702 to 29914321 reverse strand)
taagtttctcttcctcgtccttgtcttaaatctccgttcctctgtttcgtcgtctgtatgtgtattatcgatgtactgttacgtgtttacatgatccacgccagggaatgtcactctaatctgcgatttctcttcttccattgatagttttaaccctacgcgaaatctttccgcaattggtcgaagaatatacgtacggtgttcccaatatgttaaccctgtgaaaattgtagagtgatcttaccgaattttctgtttaaaagcaattaaattgattcaaaaaggaatctcagctttctgttttgcaaaattctctgtttacaacttgaagcatatatgagattctattgtgaatctgggaatattcttttggttttgctggaaacataatcatttctttatttctagtgtgatagggacacagaatcatattcttcggagttttcacgcattgtagtttgctgggaggatgataaaaaccattaaggatcgattgttaaacacgtttgaaactttgaatcattaggaataatcaggtaacaaaacttaacatgggttttactcttttctgttgtgaaaaatcagaaaaggaacgcaaagtctcagagtactacaaacag

SEQ ID NO: 2599 - DNA, 656 bp, Arabidopsis thaliana
  Intron number 1 from transcript AT1G79520.1 (locus AT1G795 20) derived from phytozome v7.0 (chr-ID Chr1; pos 29913702 to 29914357 reverse strand)
ccgtactcgcttgtctcgttatctccggactccgagtaagtttctcttcctcgtccttgtcttaaatctccgttcctctgtttcgtcgtctgtatgtgtattatcgatgtactgttacgtgtttacatgatccacgccagggaatgtcactctaatctgcgatttctcttcttccattgatagttttaaccctacgcgaaatctttccgcaattggtcgaagaatatacgtacggtgttcccaatatgttaaccctgtgaaaattgtagagtgatcttaccgaattttctgtttaaaagcaattaaattgattcaaaaaggaatctcagctttctgttttgcaaaattctctgtttacaacttgaagcatatatgagattctattgtgaatctgggaatattcttttggttttgctggaaacataatcatttctttatttctagtgtgatagggacacagaatcatattcttcggagttttcacgcattgtagtttgctgggaggatgataaaaaccattaaggatcgattgttaaacacgtttgaaactttgaatcattaggaataatcaggtaacaaaacttaacatgggttttactcttttctgttgtgaaaaatcagaaaaggaacgcaaagtctcagagtactacaaacag

SEQ ID NO: 2600 - DNA, 508 bp, Arabidopsis thaliana
  Intron number 1 from transcript AT1G79530.1 (locus AT1G795 30) derived from phytozome v7.0 (chr-ID Chr1; pos 29918520 to 29919027 reverse strand)
actttttctcgtcgccggcgtctgatcattctaaggtcagagacgacgttttacctttaatcgatgttatgttggatatgtttagcttcgtttctgattctcttgcgtttctgttcgatttgatttgcttttagcttaggtcgtgctttgatctgcttgaatttcctttttacgcgcctttggttactttgaagaagttgtttgatgtgataaatattacttggaagttgttctgagtttcttagcgtaagcttgtgacgtttaatcctatttttgtcttcgttcttgcgttttttgtatctagtctcgtttaacgatgaatttcaacttgtgaggtttcaaatcttatttgttgctcttttagaatgtctaatggcaatacatttggagttgtttgtttttttatttaagtttttccaggaactttgcaagaaaacaatcgtatttattatcttttgtcacaaatttctcaggtgttgtcaagtcttggatttagtcgcaacctgaa

SEQ ID NO: 2601 - DNA, 433 bp, Arabidopsis thaliana
  Intron number 2 from transcript AT1G79570.1 (locus AT1G795 70) derived from phytozome v7.0 (chr-ID Chr1; pos 29937645 to 29938077 reverse strand)
gttcgatcaattcttcgtaagcttactcgctaaaggtttgggaagaatgtttcactgttgtatcttattttgagtcgttagaatttcctgaagctttaagatcattgattttgattttacattctaaaatgacggaatcgttgtatcggctgcttatttagggttttgggttttttgtgctgttggtagcttttaattgagtgtatttggtatttttggattagttgaaaaatggttgggttagtttgaatccaattctcgctgagaattttatgctcacgatcattcacataagagattccgctatctgaagaaatcgaagcatgtgaaattttcccttttcctttcgatgtctgcgtttcgctgcgttgtcatcttttgttcttgccatgggacttaaaactaatatccttatacttttcattgcagctta

SEQ ID NO: 2602 - DNA, 333 bp, Arabidopsis thaliana
  Intron number 1 from transcript AT1G79580.2 (locus AT1G795 80) derived from phytozome v7.0 (chr-ID Chr1; pos 29942943 to 29943275 reverse strand)
tttctcttggacattcaggttttacttatgtgggtatatgtaatagaagattcatcttttgttttaaaattaaaggttaataagttggagcctttgttcttcgtgactatatgcatgcatttggtaaacctagggttttgatttttagatctaatataacccaaaccccaattaacaccttgagattattggatacatacttgcatggtcaaacccattcatttctcaatttgttaaaacttaaaaccttcaatataatgtgtgtttctttctttggggttaattaatatttcattagggcaaaggtcgaaaagaaagcgtcaaagtttgctt

SEQ ID NO: 2603 - DNA, 613 bp, Arabidopsis thaliana
  Intron number 1 from transcript AT1G79580.3 (locus AT1G795 80) derived from phytozome v7.0 (chr-ID Chr1; pos 29942943 to 29943555 reverse strand)
gcctctaacagaagcaatactttccggcctccaaggttcgtttctttcctcatccatcttatatctttcattgtcgtcatcatcatctgcatctacatatatatacacacacgcactccctcacacttcctcatatatatcatgtgtacttttcgtcttaaacatctctctattttcatttcttttctttgattacttaagaacatgactaagtctctatcattaaacctctcttgtttaagaagcagacaaagatcgttcagtttgcagcaccttcatgtttctcttggacattcaggttttacttatgtgggtatatgtaatagaagattcatcttttgttttaaaattaaaggttaataagttggagcctttgttcttcgtgactatatgcatgcatttggtaaacctagggttttgatttttagatctaatataacccaaaccccaattaacaccttgagattattggatacatacttgcatggtcaaacccattcatttctcaatttgttaaaacttaaaaccttcaatataatgtgtgtttctttctttggggttaattaatatttcattagggcaaaggtcgaaaagaaagcgtcaaagtttgctt

SEQ ID NO: 2604 - DNA, 226 bp, Arabidopsis thaliana
  Intron number 2 from transcript AT1G79610.1 (locus AT1G796 10) derived from phytozome v7.0 (chr-ID Chr1; pos 29956543 to 29956768 reverse strand)
ttagcgaacatctcgaacacggagactagcataaggttcgttgaactttttctcatcagtttttttagtattttctcaattatttattactatttttatgtcctttcctccattgacctggaaactcaaacgattgtaaattactcactgattacatacacgaatacatgtttatatgtgtgtaagtgttcttcaatgctaatctattttgtttcttctgcaggac

SEQ ID NO: 2605 - DNA, 553 bp, Arabidopsis thaliana
  Intron number 1 from transcript AT1G79820.3 (locus AT1G798 20) derived from phytozome v7.0 (chr-ID Chr1; pos 30026772 to 30027324 reverse strand)
cgattcctctcgacgttatcatatttcctctccaggttggtactatcatcatccttgttctctttgtttgcatccctccttccttccttgcttccttgtagatctgccattgccttttttaatccaaatcttatatttctgatttacattgcttccgtcagatccgacgatctcactttctcatcatctgtcgtcagcttttttgtttcttcttttatctctttttatttttaaaataaatatattgttgattctggaattttcctagtagctcacgtcacgttacgtcatgtgtgtgctttgaattttaaattgactcgcaaggctggttttgattatgtgtaagtgatcgctggacttcacacacactaacaagtagcacttgaatgaagctttcctttaatggattgattatttaataaattgcgactttgacgtctttgagcatccatccatgttgaagaatcccattattcgtatgcttttcttctatggccttgcatcagtcagcactcaacttgtttgaatgtgcaggagcgtgtttccagagggg

SEQ ID NO: 2606 - DNA, 494 bp, Arabidopsis thaliana
  Intron number 2 from transcript AT1G79830.4 (locus AT1G798 30) derived from phytozome v7.0 (chr-ID Chr1; pos 30032902 to 30033395 reverse strand)
tggcttcgacgacaagtccgattctgccgctgaaggtgttctcttcttctcactttttttccaatcaatacacataatattatcatccttcccaataatctgctgttagtcagctgggaatataggatttgattactcaaggcgcatttgttgataggacctgccatttttcttcttcttctttatgtaggatgtttagatcaataatctgctgttgcaataatacaatcttgcaagttatgggattctgtcttatttttcttagaactagcttagctagtgtgcttcagattctacccattgcattttattctgaatttgaaaaaaacactttgttttggatctttgcgtttacttggtgacagctttttctggctatgatttcaggggtattctgtgtttacctaactgtagcacaaatcattttcttctctagtttgtcttgagtttcttgtacctttcacaacaaaaatccttttgttctttctttttag

SEQ ID NO: 2607 - DNA, 479 bp, Arabidopsis thaliana
  Intron number 2 from transcript AT1G79910.1 (locus AT1G799 10) derived from phytozome v7.0 (chr-ID Chr1; pos 30055286 to 30055764)
gcagggtaatatcattttcttttacccccatttattacatgcatatggcagcctctattgcgtcttttttgtttgtttggagttatagacacgttattcatgtcctctatcgacttaatgaatcacgggatcttattggttttccgaacgtgaaagcaattacatttccatcagaatgattttttttttcttttgtttttcttttctgaaagagggtcaacgtacgatggtttcggtaaatctttgttaattggttctattttgggtatagatggaagcaatgcaaaaaaaaagaaatagatatatttcattctgatgctgtcaccagctggttataacagagtgaattgttgcttaagaaattcttggcccctgttttaagttataagtcacatgagtaagtacatagagagatggttctgatggcatgtgtttgtgtgacaggcagaagggcttatagaggagaaaaggaggctggc

SEQ ID NO: 2608 - DNA, 483 bp, Arabidopsis thaliana
  Intron number 2 from transcript AT1G79910.2 (locus AT1G799 10) derived from phytozome v7.0 (chr-ID Chr1; pos 30055286 to 30055768)
gcagggtaatatcattttcttttacccccatttattacatgcatatggcagcctctattgcgtcttttttgtttgtttggagttatagacacgttattcatgtcctctatcgacttaatgaatcacgggatcttattggttttccgaacgtgaaagcaattacatttccatcagaatgattttttttttcttttgtttttcttttctgaaagagggtcaacgtacgatggtttcggtaaatctttgttaattggttctattttgggtatagatggaagcaatgcaaaaaaaaagaaatagatatatttcattctgatgctgtcaccagctggttataacagagtgaattgttgcttaagaaattcttggcccctgttttaagttataagtcacatgagtaagtacatagagagatggttctgatggcatgtgtttgtgtgacaggcagaagggcttatagaggagaaaaggaggctggcttgt

SEQ ID NO: 2609 - DNA, 510 bp, Arabidopsis thaliana
  Intron number 2 from transcript AT1G80040.1 (locus AT1G800 40) derived from phytozome v7.0 (chr-ID Chr1; pos 30109832 to 30110341 reverse strand)
gtgctcgtgaagaagctggaaacaaattccaagaggtaaataaagcattgcatctttcttaatgtgtttctttcaaaatatacccttacatatgcaccttgtgcatacatactggctatcagaccatgaatagtgataatcatatttgttctttgagctctgggcatggaagacagtttcagttgctgtaggacataggttgaaccattagttacttcttatgtaggtgcatacgctcgtcactgattacaagtttgttggatctaaacacaattatgtataatggcaatgaggaatcaactgtgaaaggacaatcatcgtccatttgttctgcattaactatgatatctgaagagggtttgtttttcaatgggggaaataaagttatcatagtaattttgttcttagtaacaatctcttcttagtatttttggcatatcttgtctcaaaataacaatctcatatgattttacaggagaaagtggcagtgcagcaacaggtggagacctt

SEQ ID NO: 2610 - DNA, 506 bp, Arabidopsis thaliana
  Intron number 1 from transcript AT1G80110.1 (locus AT1G801 10) derived from phytozome v7.0 (chr-ID Chr1; pos 30135674 to 30136179)
tcgataaccctcttcttatcaacggcactcttttggtaattaaccaaccttcttcttttaatcctttttacattcatcatcacatctgtttatcggttccgttttctagttttgtttttatacagccaaacgttgttactctttaagtctagaaattacactagtagtgtccattgttgtccgatcctgttcttggattcacgaaaatgtgcaaaagctctgttgtgtgtgtcaaattgtttttcataatcttaattagattctgccaaattcaaattctgttccggcaaatctaccacctctgtaacttgtagtcaaagacctgaaacctttgtaatcactcttattttagggttttatgtgggtttagactttatcacttttgagatgtcttcaagataattggaatgttttatctttctcttctttttattgctgtgatcatatagtctgactgaattgtataaacagagcttttcgctggagagaaagagtggcaacaagtg

SEQ ID NO: 2611 - DNA, 833 bp, Arabidopsis thaliana
  Intron number 1 from transcript AT1G80370.1 (locus AT1G803 70) derived from phytozome v7.0 (chr-ID Chr1; pos 30213802 to 30214634)
cttcttcttcttcttgaagaaatttctggagcgtagtaagtttctatcttagtctctctatctccatcttctctgttttattttgcttgtgaaatgtgatgatattatttttatgccgaccctctgttcttttttttgaggcggttctcctggagggtttcttgaaactttatcttggttttgaagcttttttggttcatgggtcactcggatttttcttggattaaagaaaatgtgactttgattacttttttttttaacgaacggatcgataggtttttttgggagatcttgcagctttaaatcatgggtcttttcgttatcctcagaagaaatttgatctagtcgttccttttcttgttcctatttcttatggataaacatttttatataaaaacccatgaaagaaatttagaaactttactaattttttcttcaaatttaattatctccaaattctgcgcaagtcgctcccgtctttgctaaaattgctaagactttttctttcgagcgttgagggttttctgcattacagttttcaagtttttgtcaacaagtaaattgtaattcacaaagacttgttctttcaacttgaatctgacttgaaactttggaacttgattcgacgaacttaaacaacaagtacgtgttgcaattatttgtctagtcatgaatgatcagataaacaatcctcgtttagaataaacaatttctccaaacatcttatatgcattggactctgcatagataaatatatatctctctgttttgtttaatcttcatgccattgatcttcgatttctcttgacttcaaattcacagatcgagagtta

SEQ ID NO: 2612 - DNA, 450 bp, Arabidopsis thaliana
  Intron number 1 from transcript AT1G80400.1 (locus AT1G804 00) derived from phytozome v7.0 (chr-ID Chr1; pos 30225303 to 30225752)
tcaacaatagcttattcgcagcttttccaattctggtaaaaaggcttcattaccattttatcgtctactcttcttcttcttcctgttttcgatcttctgtctttttcggtaatttccgaatttgtgtttcaagaccgtatcatcttatgctacgattgaatttgttggaattccagttttgggttcttcaccaagctcagaatttcaaactgtcagaattgtttgaaagagtcaaacttgaactgggattttttttgacttagggttcgtcagatgttggatttgttaatccttgcagagtcgtttaaggggtttacaaaatgctttatttataatcctaaaagctatctactttctgatttttttcccccagttcttggtttgaattctaaagctgtttcctgtgctataacaggtgagtgtttcgcactacattgctcttgctctact

SEQ ID NO: 2613 - DNA, 464 bp, Arabidopsis thaliana
  Intron number 1 from transcript AT1G80890.1 (locus AT1G808 90) derived from phytozome v7.0 (chr-ID Chr1; pos 30397355 to 30397818)
aatcaaggttcgttttctctgggcgatttagattgaaatatataaatagatgtttctctgtagattccgaaatggaagaggatgatgatatcaatagctgaaagatttagaatctaaagtttctaactttatatttcttggcaaatgcaatcaagtggtcgatcaaatagagtttgattatatgataatgatgagtcacaatgtttattctgtttggatcataatagacttgcatgatcacattttttaccaagtttgtttgctttttcccctgatgatcacacatcgattcaattgcataatctcaatggttaaatatcttatttgctatatgtgacatttggtaatattctccttgttttgttcattatataggctaattgtttctcttattggcttttgttgtttggtaaatctggtttgtttcaggatcaaagcatcgttctcaccaagattacttggaa

SEQ ID NO: 2614 - DNA, 605 bp, Arabidopsis thaliana
  Intron number 3 from transcript AT2G01260.3 (locus AT2G012 60) derived from phytozome v7.0 (chr-ID Chr2; pos 136053 t o 136657 reverse strand)
accttccatacatccgtgaaccttttgctgataaggtttgtgcgttcatttctctactagaaccgaaagcatggtgtagatactatatactaagatgatgatatatattattatcatcttttatgctcttatatcataccaggtaacttcaaatttaaaaactaatgctcagaaatggcctttgttgtttctaaccttcaactgatggctatcaactaatcagaaatgttcaatctgctcagggactggtcatcgtcaacttaaactaaaccacattcttttctatttgttttagtcaacaaactagaccacattctaactcacaaaaaaattgggaacttgtttgagtctgttgttaatattaggctcctcctcctgactattgcctatgttgcaatacaggtcttggacctcgcagctcagtttcccgagctaatgacgctgagaagctgtgacttacttcggtcaagctggttttctgttgcatggtattgttgtttgtattttgcatgcacttgcttgctgcaatatgttgttcatgtctctaaaaattcatgtgatactttgcaggtacccaatttacagaatacccacaggaccgacac

SEQ ID NO: 2615 - DNA, 437 bp, Arabidopsis thaliana
  Intron number 3 from transcript AT2G01260.2 (locus AT2G012 60) derived from phytozome v7.0 (chr-ID Chr2; pos 136221 t o 136657 reverse strand)
accttccatacatccgtgaaccttttgctgataaggtttgtgcgttcatttctctactagaaccgaaagcatggtgtagatactatatactaagatgatgatatatattattatcatcttttatgctcttatatcataccaggtaacttcaaatttaaaaactaatgctcagaaatggcctttgttgtttctaaccttcaactgatggctatcaactaatcagaaatgttcaatctgctcagggactggtcatcgtcaacttaaactaaaccacattcttttctatttgttttagtcaacaaactagaccacattctaactcacaaaaaaattgggaacttgtttgagtctgttgttaatattaggctcctcctcctgactattgcctatgttgcaatacaggtcttggacctcgcagctcagtttcccgagctaat

SEQ ID NO: 2616 - DNA, 684 bp, Arabidopsis thaliana
  Intron number 1 from transcript AT2G01890.1 (locus AT2G018 90) derived from phytozome v7.0 (chr-ID Chr2; pos 398319 t o 399002 reverse strand)
gaggttcttataatcagtcccaagtagctcttcaggtacatatttatgtgtgtgtttatgtagatatgaccttatttttatgaacaatcaaactttattccttgtctgtaattaagctagtttcaagttctttttaatggtgtggtttagaaaatatgtgagagaattcaagcgagaagacgaaaatgataagagaaatcatatatatgttatcttgacgtcgaattcatcgtttgagtaaattacaaattaattagctattgtagttatatattagcaagtaacgaacaataataataaaactgcactgagtaatgcctgggttgtattaacatgtaataatatctgaatatataatgagtgagttgatgataatatatgaggcatatttcattgttaattaaggagccgtgaagatgaagttgcatacataatctttagttcattacgtaacttacgtggaactaataatcatcttaaggctgtccattagtgttgcaattctacgtcatcactttaattattggttgcttctataatcctatgagtaaatgctttggattaaggaagacactgactagagatttttattattattattttgttttagtttgtagttaaatggataggtttgtcgcagctagcaatttctaattattgtctatatttttttgcattgatcag

SEQ ID NO: 2617 - DNA, 834 bp, Arabidopsis thaliana
  Intron number 1 from transcript AT2G01918.1 (locus AT2G019 18) derived from phytozome v7.0 (chr-ID Chr2; pos 424619 t o 425452 reverse strand)
cacctgagcctgaacgcaccgtggaacttgctcaggtttaaactagttatgtctttactttaattacattatttgtggttcattgaatagttttggaggtccatacattttcctatctcaatagtctcctaaatgaaaatcaaactagagaatgtaacttttgcaagaatttagagaacaccactatatcaaaactcactttagtgatactttgatcctattgttttatattagaatttagatgttgtctcgactcaacaattgctaaacatttgagtgacaatgtgttattacaacaataaattttgtttacttacatggacaaatggtaaagctctttacaattatattccaatgtaaacttaaagtcacaaggttcaattttcttcttcaaacatttttctgtttttaagattaccgaattttgatctactgatttatccgaattccaaagtaagtttacaaaaactttattttagaggatattaaatgctaaggctgatacatactccctccgtttcattataagttgttttcaagtttctatgcaaattatatattactttaatattttatgattatttatattatgtagtctcttttgtgattggttgaactttttaaaagtaaatattcttaatctgcgtgcttttagctaaaacaacttatattgtgaaacaaagagagtagatttgtaagttatcaatcactttgtattattggggttttaatcctccgtaatatgtttctggaagactctttgtagcaagagttacaaattatgaattcttcgtgtattttgtatatatggttgataggaaggattaagaaaaa

SEQ ID NO: 2618 - DNA, 685 bp, Arabidopsis thaliana
  Intron number 2 from transcript AT2G01940.1 (locus AT2G019 40) derived from phytozome v7.0 (chr-ID Chr2; pos 433493 t o 434177)
ggacattcttgtgactgtggtcgtgtcttctccaggtataatttcttgttcctctctatcatttgatttttttttgacccattttataaattaattattggtattattaattctgaaaagatatgcaaacttttggaaggatttgttaagtatttctaaaatatacaagtaatttgactctgtttgttttgtatatttaggagatcatatagaaagacaaatatagaaaattcttctagggaccaaagactaagattgatagttatagtactatttgatttgactatccttcatgatttttactaattctgtgtattgatgtgtatgcatcagagttttttaatatatctcttgactatttgtttggtttttgtgacataaaaagaaagttaagcacttagattaatgacattgaccccaatctctaaagaaatattttatgtatttaggttattattggaccttttttcgacacaaaggttataattggacctaaactcatattaataatatatatttttgagttcaaaggtatttaataaacgacgtttaaacagaaaaacttaatataaaattattaactttgtcacattttcataatcctacgtcatataaattatgtaattgataggtttcttttcttcttttagggtggagagttttattgaacatcaagataattgtt

SEQ ID NO: 2619 - DNA, 538 bp, Arabidopsis thaliana
  Intron number 1 from transcript AT2G02030.1 (locus AT2G020 30) derived from phytozome v7.0 (chr-ID Chr2; pos 482393 t o 482930)
aaccgacaccaacgtaaggagaagagagagaaagacgataatcgccaaaataatcactcacaaatttgtttttattttattttaggggaatttagttaaattttgaattattatagttcttggattcagaagttatttacgtcaatctaagatttgagttaatctaggcaaatcttagtattatttactatgtaaatgaattacattattccaattagagatttgttctaacaattttgtagttattttaatcttaaaagtttgaggctttgagccatggataataacggaaaacaattctcaaataaaaaaataacaaagaaacattaaactatatagatatatacatcataattcacgttgattccagccactctttatgacggttacaaagaaaatatggaaacagaacttataaattcagcgcacattgaatttcacaagagtcagaagaaatcgatggagaaactccttacgatcaaataagtttctttgtccgcaagaaaagaaatcaaacgaagaagaaaagagtttgaga

SEQ ID NO: 2620 - DNA, 1031 bp, Arabidopsis thaliana
  Intron number 3 from transcript AT2G02080.1 (locus AT2G020 80) derived from phytozome v7.0 (chr-ID Chr2; pos 519257 t o 520287 reverse strand)
tgactgtggtaccatcttctctaggtaactaatctctatccatttcatttaaataatttgttcgtatttgatttaagtgatgaaacgtataatatatgtgtcagtgtgtgtggcatctagatataccttcttatcttggtaaagtataacaattaatggaccacctttattttgtattataatgcaaaactattctaagtaaaagctgcattcaacactgcatgtaaaacttagcttatttactaatttacatggaaaataccaaatatatataaccatctgtgactgaaatattgtatatttggccacggaatttgaacctcgagtacaccgcctataaattgtatgtagtcacaatgtacataggatctatcaatgtatttgtttggttgttgatgagtagtgaatagagaaagacagtgaatagaaagtaagaaaatttaaaagatgctaaatttggtcacatactcacatgcatgagttggattttgtttttctattttctacttttgttttcttcttcttcactttgcaggttcccctttttacgaaactcctcttcatttgtggaccctcttcttatctctttctctctctatgtatgtttatatatacgtacatagatacatacatatttggtaagagtgcgttacttatatttattacagtgttctggtgaacactttaatgctcttctagggtttctttctatattttcatggtttgagtaatatacgttgttgcagaatgtgactgacttatattaacattcatgggttttgcattaaatgaagaaggtctttcactaaattagcaattgactcgacctctatattcttctttcattctctcctttaaatggtagccacaataactatagcatttattgattatgactcacggaataaatatagtataaagttttcatatatatgaattaataactttattatcgaccgttgtgttatttacatttctttttgttttgctttgtagacgtgatagttacatcacgcatagggctttctgcg

SEQ ID NO: 2621 - DNA, 361 bp, Arabidopsis thaliana
  Intron number 2 from transcript AT2G02080.1 (locus AT2G020 80) derived from phytozome v7.0 (chr-ID Chr2; pos 520655 t o 521015 reverse strand)
acccaagaaacgaagaaaccaacccggaaacccaagcaagtatctcttacatataaatctctatatatttatcacctttctataagaatcactatatataagctttaagataataccaagaagaaaaagaaccctaatcatttgttctattttgttttgtatatctagctagtatcaagatttcatatatattgacaggccagtatatcttatatgtttatacgtgtatatgtcatttgatttatgtttacatgtgtgtgtatcatttttttcgatatagtctacatagattgacattttgggtctaattggtgacttaatttaaatgattaaattctttaattatatgaaacagatcctg

SEQ ID NO: 2622 - DNA, 483 bp, Arabidopsis thaliana
  Intron number 1 from transcript AT2G02080.1 (locus AT2G020 80) derived from phytozome v7.0 (chr-ID Chr2; pos 521171 t o 521653 reverse strand)
agagatatagagatagagagagatagggctttgaggtttgtgtttgtattataatacataatatataggaatagtgtcttcttcttcatcatcatcttctatctcatcatcatcatcatgcatcatcttcttcttggttctttctttagctccgatttatagcttttaattttgactattttttttccttcttctacttggtttctttctcttgatctcaggtacaagaaaaatacaacttagaaatctttcctcttaattctttcaaaagtttaggaacaaaaaacaaaagtataaactcttaatttgtttttctttgtttatgtcttctagtgaaatggtttttataaaatttcttcatgtcgtcaatctctatggatttttcctgttcttataattcctcccttcgttttcttcttaacttttttgtcttacgaattatttgtagattattctcttccacgcaaagaagaagatctaaag

SEQ ID NO: 2623 - DNA, 357 bp, Arabidopsis thaliana
  Intron number 2 from transcript AT2G02080.2 (locus AT2G020 80) derived from phytozome v7.0 (chr-ID Chr2; pos 520655 t o 521011 reverse strand)
aagaaacgaagaaaccaacccggaaacccaagcaagtatctcttacatataaatctctatatatttatcacctttctataagaatcactatatataagctttaagataataccaagaagaaaaagaaccctaatcatttgttctattttgttttgtatatctagctagtatcaagatttcatatatattgacaggccagtatatcttatatgtttatacgtgtatatgtcatttgatttatgtttacatgtgtgtgtatcatttttttcgatatagtctacatagattgacattttgggtctaattggtgacttaatttaaatgattaaattctttaattatatgaaacagatcctg

SEQ ID NO: 2624 - DNA, 605 bp, Arabidopsis thaliana
  Intron number 3 from transcript AT2G02470.2 (locus AT2G024 70) derived from phytozome v7.0 (chr-ID Chr2; pos 653547 t o 654151)
agaggtaagggtccttctcaagctcagtgtttttgagtgttgcatctcaattatgacaatattgggtgtactcatgtgtggtaaggttataatgatcattctagcatcctcttgttttgtctatttgtctgatacaacaatctctgtgtggatttttgtaactcacgtgatcttatttatagggtcggtttctgtgtaactctttttgtaagtggttcccagtttctattttgaagtgactagagttatgaatcgcaccaatctggatcaatgttattgagatagatatattagtcaatagatgtgatatgtgcctctaagtctgattagtacttcttgtattagtcttgtgcaggatcactgtaattagcctaggtagtttccactgcattgtacctttgttgagagctcagcaacaatcactgaatccattatttgatactggtagctgacaggttaaacgaaaagcttgagcagaatgagttgttgattctgaatctcatcaaattcttctctggcattaggtttgtttgaacaacttagctatcacttgcctttaagcttatgccatggaccgattctttttcaggaagaggctgttccag

SEQ ID NO: 2625 - DNA, 986 bp, Arabidopsis thaliana
  Intron number 1 from transcript AT2G02510.1 (locus AT2G025 10) derived from phytozome v7.0 (chr-ID Chr2; pos 673522 t o 674507)
catcgcatcagaaacaacccgctccatctcactgagagaatcattaggtaaaataaaaatcaaatcttctcgaatttgttttgcttctcggaggtttatatcctaaatcgatttgacttctctgtgaaagattggataaacaaaaactttggcaaagttcttagaatgtcacgtttgaggaagatagagtaagatttttgcatatggttagaatcaagttttgggattagtcaaagtacatgttttttgtctaatttcagtgattgaaatttcaaagttagaagctttattgtcaatggctaatgtgtattagtctgagatgaatccattccttgcaagcaaagatgaataaacactttgagactaatacaaatagttatgagatttgaagtcaagttttgtggaagatagagtaagatttgtgcatataatctaggaatatggttagaatcaaggtttgggattagatcatgtttttgtctagtttcagtgattcaatgttagaagctttattgtcaatggctaatgtgtgtattagtttgagatgaatccattccttgaggtaatgtatagagcaaagctgaataaacacttttgagactaaaacaaatggttatggcttttagaatcctgaagtattgggattggatcggtcacatgtttatggttacggctttcagtgattatctttatgtacactcttaaaagttaccagctattattagcatattgctaattagtatctgttatctttcagatcaatttcaaaatgtctatacgtatctgtgatgattaatgtgtagcattagctttgtctgatttctgtgtttgttggttctttgctttaatactaatgatctgaaagataggtgtcattttttgtatcttttcttctatgagaccctctttggtgtttggctctgaatctttttttgtaaaaggttgtatactaaaggaaattactcatgttgttgcagattgtttcg

SEQ ID NO: 2626 - DNA, 809 bp, Arabidopsis thaliana
  Intron number 1 from transcript AT2G02520.1 (locus AT2G025 20) derived from phytozome v7.0 (chr-ID Chr2; pos 677290 t o 678098 reverse strand)
tttggaaagaaacaaggaaattgacctggaggccagtaagtttggtcagccgatatcttcgcatactggttaagtgcatgagaaatttgctcagttaggaggattggttttgtgttggtttgaagaaaagggtcgatcctagcttgtgcaaggccagatgcaagaaaaagcagaataaccaccattgctattgcagagagcttcacaatcatcttcatattttgatttgtgagtgaaaatgtttaggctaacttacttatttatattgttgtgacaaaaatagctaacagtagtatgatatcttttgttgactagaattatatgttgtgaccaaaaggaaaaggcaatatgataaatttttgactggaccaaagtgcaaagatcatattctcttgttttggaacaggattgtcaagcattcatagcttttaaattggatctgattgattacaacggtagctttagatttttctgttgtactttaaagatttttagttattttgtaattgtagaagtatgaacgggaaatcttttgttttttttacggcatattggtaaatttatctttagctttaagaaaaagaaaatatgactgatacattttatttgtgtattaattatttatatttctttttattaaagataatatttaattaaaaagaaaattacaaatttatagcaattctaatttttttttgtgcaataaacaataaatatataattatttgtcagaagataaaagctaaaaagagacagttaatgagttttcttcagctgcaacttggcttcacttgaaccctattggagag

SEQ ID NO: 2627 - DNA, 506 bp, Arabidopsis thaliana
  Intron number 1 from transcript AT2G02540.1 (locus AT2G025 40) derived from phytozome v7.0 (chr-ID Chr2; pos 683796 t o 684301)
tttgagataaagtttgctgctctttctggttgtgggtatgtgctcttaacttcttcagtcaattttttcatttggtttaaatagaacaattttgttttggtgatacaataaagattgtcttcttgattatcatcaacctctcacttggaataagacctttctttctcaagtgggtttgtcagcttttgcttaagcaggcttgcaataagtttttcttttcttttgtactttttcgttttgttctctatctttatggaccttctaaaattagggtttttctttttgtttggaggaaataattaaaaaaatggggttaatgagtagtgaagaaagctcttgcctttttgtagcttaatcatttgaattttactcattaattatctttactcttgtttttttcttcctaactagtttctttgtccccaaaccaagaaacactttgcaaaacccaaaaaaagttttaaatataaaatcgtgtttatttccttggcagatagatcaaaaga

SEQ ID NO: 2628 - DNA, 790 bp, Arabidopsis thaliana
  Intron number 1 from transcript AT2G02550.2 (locus AT2G025 50) derived from phytozome v7.0 (chr-ID Chr2; pos 687808 t o 688597)
ttttcattgaggtaacatttacggtaaataattatttttaagaattttcacttctttctaattttttattaacctttcttttttctcccattgaaggtttaaaaaaaaaaagtatccgaatattgagtttatcgttgctgctcacagcttgtatatttggctaataataaagataaaagcgtttatgcggttctcactattaacactgacctcataccatttagatgttgaagagtaagttctttaatacacttatcaattattattattttaaaggtttttctcatgtagacataacattaatttttactaccactttaaacttttgtgtgatcacaaattattttcgccagtaaagactttgaattgcttgaactcgaaatgatagacttattgaagcggtttcatagtagcaagaaaaataaagacaacgaaaaagaaactaaagaagaagcaaaatcttacgatttttcagaattcacagacgataattttctggagatgtgcattctttgcgattgtgactattttaaatggccattaacggagggatccgaaagagcatatgaaataattggtactaaaactatacgtggtagagaggtactttttacttggtttagttcaaaatagtagtatactatacatttagattttgtatttgcatgtatgatgacatgatgtgtgttattcattttctttcaggtaatagaggaactactagaggacagcactgacctaacttctcatctgaaaaaattcataattttgttgcttttcaaatattagt

SEQ ID NO: 2629 - DNA, 446 bp, Arabidopsis thaliana
  Intron number 1 from transcript AT2G02560.2 (locus AT2G025 60) derived from phytozome v7.0 (chr-ID Chr2; pos 689901 t o 690346)
ctccggcgttacctccgtcgatttcatcttctcaggttacttagggttacctcttttttgctttttgatcgataaagtgtgatgatgtctagcgttaactcttttcgtcttcgtagtcgtagtcttagggttttggtggcgacgatactttgatttatcaaaccgaacttcttctttgtgatcttcgatgaatcaaaagttttctaagggatattaattaggttttgttaccggcgataattaatccatcttcgatgcttcttctttacacttctgactttgtttctgatgttttaacctctgtggagagcttgatagagtgacattgctctgactaagcgttttagttcaacgcatggttgattctctttttactaagtaatgaattttgagatccttgtttgattgcagttggaaggagtgaattgagaaggtcgggccaatat

SEQ ID NO: 2630 - DNA, 643 bp, Arabidopsis thaliana
  Intron number 2 from transcript AT2G02570.2 (locus AT2G025 70) derived from phytozome v7.0 (chr-ID Chr2; pos 699622 t o 700264 reverse strand)
gaaaaggagcttaaagaggtgatcaatccctattttaatcacttattttgtgtgatcaaatcttttcatctttgttgtggattcgttttattagtctcccttagtttgagtgaaattcattgatccttatgtctttagcatttgcggcatacacaacatgattaggttacttagcatgtaggttttgcatacggtgctctttatgtttctattccctgcctcttttgaaggaatctgcgtgttgtttgaaatagcaacatcatttaacagctagcagataaagtggagttttctttcagttctggggtttgaaaggtgagtatgtttttgagtggcatgtaactccggcagtggagtttgggtcagccaaaagcagttgttggcgtatacataaaagtaggagagttagcaaagaattcatcatttctatcttggttatttgtgttgtgcaggtgtgcttatatgggtcatgatggccagcctgcttctatctcctgatttctcgtgtttgatccctgaagttctacttctgaaaatctttactgatatattgtgtataattgctagaaatcctcaattctctgaaactttgtttttgcaccatataggtgattgcattgacagaggaagttcttgcaactgc

SEQ ID NO: 2631 - DNA, 430 bp, Arabidopsis thaliana
  Intron number 3 from transcript AT2G02740.2 (locus AT2G027 40) derived from phytozome v7.0 (chr-ID Chr2; pos 769981 t o 770410)
attggagtaggaagcaggtttggtttttatctttcacttactacttcatagattgtgatagaagaattcatgacttgatctggtgaaagcagcagccttttgactttctatagtgtttgtggttagttagatatgtttgatttgaaatgttgcaggtctactttttatcatgaacttggtatttatagattgtgatgatgaaaatcaattggtttggtgaaagatattatgattgtggtaagattatgttttgatgtagaaaagatgtaggtttggatctttaacttggtagtatatggattgtgataatgatcatgatttgctttggtgaaagaaacagtcttttgcttaatattgtgactggttaaatcattttttgatgtcgaatgatgcaggtcttctcgttgtcggttacagaaatcggtaatct

SEQ ID NO: 2632 - DNA, 846 bp, Arabidopsis thaliana
  Intron number 1 from transcript AT2G02880.1 (locus AT2G028 80) derived from phytozome v7.0 (chr-ID Chr2; pos 841832 t o 842677)
atattgataggcttcttgatagttgctcagagtaagtaatgattctgtttttgccctaatttcgattttgatttagggtttttgttggatcagtcttgtgttatagtttacttcactagttttgtggtttagctaatccttgaaatggttctgtgacttgtttttgagattgctctgaggatgatttctagtgttgatttggttgtaagtacatgccttaggtttgaaggaacgttttagctaaatacatgaacaagatttgtgatatgcttttgtgtacgatcaatctcacaagcatgtttattttgtgtattgagttttacaagaaacgttagagtgattgttatggggaattctggtgattttgatgtatgttttcacttacattcttatgtttgaagatcttttttttttttttggcaaagatgtttgaagatctatgatttacaatttagctagatatgtgattttcttatgcacaatctctcaagcattttcatttagtgtattgagtttagagagaatgctatgggggattctggtgatattttgattgaagctttcacttacatgcttatgtttgaagacctgtgattaacgttttagctaaatacatgaattaaattcgtgactctcttgtgtacaatctctcaagcatgttcatttagtgcattgagtttcaaaataaacgtcacagagattgctatggggataccttggtgtttcagttatctttgcatgctttagttatgtttatatatgattgtggttgaagatctgtctgcttgttggtgattttgatctttcaatgcttaaaaacgttcaggattttcgattcggtagacc

SEQ ID NO: 2633 - DNA, 736 bp, Arabidopsis thaliana
  Intron number 2 from transcript AT2G02890.1 (locus AT2G028 90) derived from phytozome v7.0 (chr-ID Chr2; pos 845165 t o 845900 reverse strand)
ttggaggaggcaagttagtgataatgagattggttctgatattagagcagctattttgaagaatgggggtggttcaaaagaataatgggggtggttagaaagaagtgttgaaaggactcacaaacgttagttcgctcttctctctatctctcacactctgtttttgttccagtttgtagtgtacacgtttaagaacttataagactacattgataaaaaaacttggaaacaatcttacacaacactgtcaacacacacgcacttacacacagtcatgctcttaaacacataattactacattggaattctaacagcaacacttgcacactactttgctttaactaaacttcaacctcaagctaaccaaaaaaaaacactttctcttgtttaggcctcaaccaaagctgcagtcctctgttgacgagtcatctccgacccatcttcttcttcgcttgttattctgttgctttgcttctcatcttcatcacactgattctttcttttcttgttgcaggtttgatctccaacaagaagatctcttattgctagtggcccacttgaaggttaaaattagcccatttttgttttacttaaccgactacaatcggaaaatatataatggtagctaggtctcgtatttctaggtttctctacgtcttttgttacttgttttttctagggcttattacataatatataagttttaacagatctttcttcgttcgatccgcagtc

SEQ ID NO: 2634 - DNA, 414 bp, Arabidopsis thaliana
  Intron number 1 from transcript AT2G02890.1 (locus AT2G028 90) derived from phytozome v7.0 (chr-ID Chr2; pos 846165 t o 846578 reverse strand)
agagcaaaaacaccaacaagactctgcttccgctggtgattgagccactgtttgttgcttgctagattgccaacaaaacactgctgatccaagagtgaaagcatacaccagaggtgttctttttgtatcttcatttgagccaccccaatcactgtcttgagtaaccgaacaactctggattttctacacttgtaaattgaactcaaaagttagatgtagctttgacatatcttcaaactctcttggcttcttggtagtgcttgatgagtggcacagacatgacccgtgatagataagagcatgcaatcattaaatctggtcacacgagcccacaaacaatgcttctgaactttgtcgcttcaccatattcctcatctagaccaccggagcacactgcttggtctagaaactgag

SEQ ID NO: 2635 - DNA, 993 bp, Arabidopsis thaliana
  Intron number 2 from transcript AT2G03260.1 (locus AT2G032 60) derived from phytozome v7.0 (chr-ID Chr2; pos 990638 t o 991630 reverse strand)
tatcgctgcttctacacccgccagaacccgaaccagtaagacaattaaagcagttaattctgtattttaacatacataactaaaacagttgcaacttgagattctccctaacactacatatttacaatttgaatagatcaaacttgactttaatttatgtgacaacaattagtctccgtcaatttatgaccgtttctaatgtttctttttaaatattttttcttcaaaaatcagtttttaaatcacatttaaattactaaccataaatactctctatggatgttcaagaaaacgatgtgttaagcagcgtctaaaatgtctaatttgatttaagcgattttagacgatttaagcgtttttaacataaatcttataaatataagatcatacataaaaatatctattagagaaataaaaatattaagtcttaaacaaaaattagatcaaagatttatttagtttataccaaccaatagaaactaaatagagctatgtgtatggacataaaacttagttcgaaactgaaaaaattatattaaaacgaaattttaagcgagtttaagatgtcaagacgattgtttaggtgtcgtttgagtgtttagcatttagtcggggtctatacagttgtttttttttttgtaatttggttttaattagagttcaaaagagtcattcttgtagaatattgtttacataagtgatgtgatacggttcggaacgtattttccgtgccgaattattcgcttttatatttgcgcaatgaaaattaaagatgaagaaaaatttgtgaactcatttttcacaatcgtagacggcttttaagtataaacttctttttcagtaaaaatgatatactaaaaagaaaaaattgatctcactaaaaaattccggtttataaaagctatcatcgtaaccggatcgccaatttgaaattgatgaatttatatatctcccgcgcgtttggttacagtgaatcctcgagctcaagctcac

SEQ ID NO: 2636 - DNA, 486 bp, Arabidopsis thaliana
  Intron number 1 from transcript AT2G03470.1 (locus AT2G034 70) derived from phytozome v7.0 (chr-ID Chr2; pos 1047131 to 1047616 reverse strand)
cctcttcttcttagggatcaatcttcaaatcaattgtaagtttcttgtttcttataattctatctttcgattgatacctgtttcgatatcttcaagtctagttttttttttttcaatcgagtttttgatttagatcacaaatcgacagatctgtttaggcgtttttctgggtatcgattcttttcaacatccatgccttaatttcaagttttccccaattttcttaaccctaatatttatgtgttcatcagatctgcaaatttatttagggcttttgttcctcgtgctgaaagttaatcgattgtttgaatttggactcttgatttcatgtttttagccgtggattgaaaaatctagggttaggttttcgaatttggggttttttttttatttttaatatctgtttaaagtttgactttttgactaaaaattaaaaaattacactaataccctagattgttaaatcaattcaggttgttaaaataa

SEQ ID NO: 2637 - DNA, 271 bp, Arabidopsis thaliana
  Intron number 1 from transcript AT2G03820.1 (locus AT2G038 20) derived from phytozome v7.0 (chr-ID Chr2; pos 1166700 to 1166970 reverse strand)
ttcgctttctcaaactccgatataatccttctcaggtaagcaatcttcttcgattctcattccttcgttctctaaggttttgtatcaatcgtagaaagttttaaactcgattttaatcggaatcaattttgtttcatcgagtttgttgttcgccgtggtgtcgaaaaccctaatttccgattcaaatctctagaaattagtgttgcgttatcaaatttgtgatcttgtattgattattcattcttttgattttgttgtgtgttacagagat

SEQ ID NO: 2638 - DNA, 628 bp, Arabidopsis thaliana
  Intron number 1 from transcript AT2G04060.1 (locus AT2G040 60) derived from phytozome v7.0 (chr-ID Chr2; pos 1344479 to 1345106 reverse strand)
ctcctcaaccagtaaaattagctaaagttaatgattttcatgaaattaacttagacatttattaacactaatgatctataaattgtttgattttataagtaaacacatggaatagttattattgtgacaactttacaccaaacaaccccaacactaaaaaaatgtggactgagaattggaccggatggttagttttcgtttagttattgctgtaatttaatatcttttactaataataagaacgtatatttttatgcaatctgaatattgttgacccaaaacttttataaatgacctcattgatatgtccttgatcgagagatgttttctcatggttagtttttatttattcttatctgtaaaaatatatttattctatatttgtataggtatatgaattagggaggtaaagatccttaaagaacaaccgaagatgttgcttttgctgttgcaagatatttccaaagatgaggagctttccaaaactactacatggtaaaaaaaaaattataatatctacatgttaaaaaagtaataatgaaactttaacttaattgataaagtaagaacatacattaatgatcattaaaaaaaaataatgaatgtttatctttgtttttgtagtatc

SEQ ID NO: 2639 - DNA, 219 bp, Arabidopsis thaliana
  Intron number 2 from transcript AT2G04305.1 (locus AT2G043 05) derived from phytozome v7.0 (chr-ID Chr2; pos 1502537 to 1502755 reverse strand)
gatagaggttagctagcactctcttcttcaaaagctctatatttgtcactaaaaccttaaatgactcggatttaaacatgcatttgccattgttttgtgcaccatttgattatttcttttcaagtctatgaacatttgcagctttatttcagaaggttttgtatagttgtttttttggctttatatgtatcatcattattgacaataggtggatttgct

SEQ ID NO: 2640 - DNA, 844 bp, Arabidopsis thaliana
  Intron number 1 from transcript AT2G04390.1 (locus AT2G043 90) derived from phytozome v7.0 (chr-ID Chr2; pos 1527067 to 1527910)
gcctctcttcgtctccgtctccatctttgtctccggtgagtattgataaatccgatctctgacaacattagatttcgattgtaagttctttaggtctgtagattttgagtaatgggtttgacaacattagatttatattgcccactcccacttgtttgtgttgattagattgtccctagaagtcactgtttttgctctacttatcgctctttcaattactgtaatgttgaatttgggtttcatctactaactaagatgaaatcaatttgagaagactagtggataatagtgaacacgtttacatgacttttgacttgatagtttgctattcttgttgtatctgtgtgaattgttataggttgcttgattttgatgttcatgtgtcaaatttgataatgtagcttttgtatctgattaattaagattctaatgcagttgagtttttggtcttaagattaggcattgtatattataccaacttgtgaagaggttctgttgttttctgaatttctcttattttgtgtttcattcaccaaaagtgtgtcgtgagttaatattcttttaggctgaatataaatgtatgtataaaatttggcttatattgtttgataagaacactagacctctttcaagttgagcgttatgttgatgtatattacttgactcattttcaattctcttgacaatatttgacattgcatttacatgtggttcctgtgtttgtttagtgttcaacctgaatgttgaagtttaagacataaatcatctatacttggttgtttcttgattttgaatccttaataagacatggaatttctcttctcatcaggtaagtaactgaaag

SEQ ID NO: 2641 - DNA, 755 bp, Arabidopsis thaliana
  Intron number 1 from transcript AT2G04410.1 (locus AT2G044 10) derived from phytozome v7.0 (chr-ID Chr2; pos 1534283 to 1535037 reverse strand)
gcagtacgatctctctccctccctctctttttgtctccatcttgttcaatctatgaatcttgatatttcctgtttcttctgtttctagtttcacatcttttgattttgatgtttctgtggtttcttatttttggtggaattgttaaagtttgattcttttcttttggttgttcgcctggatttgcttcgagattgatcatttctctcgttttttctttgtggtcctttattcttttggatttattcgtatgtgaaatattttgacttggtttttgcttgtaggaaatggagcttccttgtcttgatcttacaaaagtttatatgttttgtatagattttcagttactgttggaaaaatcaatacttttagtttcaagattttggtgttgagaaagtgttggtttttaatctttcataatggctctgctcttgtaattggctaattctaaattagtgaatagacaaagagaaagtcttagtaacatcttgaacagtggatagggctaatgagaagaatggtgtagttgttgtctttgcatatcatcttctggatttcaatacttttgcatatatagcttcttgctttactgaaacttttgcatgtatatgttttgttacgagttattgtgttggacatagatacagtttaatcatagaagacaaccttgagtatcatcttttagaactcactcgggtgaattgaaatgtttggattgtgtctaggacaagggccgcccgttgccgaagtttggcga

SEQ ID NO: 2642 - DNA, 334 bp, Arabidopsis thaliana
  Intron number 2 from transcript AT2G04540.1 (locus AT2G045 40) derived from phytozome v7.0 (chr-ID Chr2; pos 1583908 to 1584241 reverse strand)
aagccctttggctaaactctaaggtatctctttcttcttaaacaaactggcttgcagcttataaggacataattagtaggaacacagtcaaatctcatctcatattatatagttttagattagaagcatttacgtgttgcttgctattgacaacactgtctcactgagcagcaatgtctttgtaccttctcatggaggaaaccatttttgggattagtgctactcattttctgtcttttggaagcttaatattgtttgtcagagatatgcaaaaagtaaaggttttgttattgttgtttttgaatcctggaggcagttgcgaattttatcggat

SEQ ID NO: 2643 - DNA, 296 bp, Arabidopsis thaliana
  Intron number 1 from transcript AT2G04630.1 (locus AT2G046 30) derived from phytozome v7.0 (chr-ID Chr2; pos 1619920 to 1620215 reverse strand)
acttggggtaatctctccctctctgtttcctatgttagtatcatttgtactcgatttcagttgattctatcttcttcttcccgacgaatcgtaaacgattgagaacaattggatcaattattgtctagtttgagagtctatcaacgagattcttttttgaaaatttgcttattgttctggcatcgtagcattgattataatttcatattgtttagatagaaaaccctaatttcgtttgaatcttatacatcggatttcaaattgttgatgttatgtggtgattttcaattgcagat

SEQ ID NO: 2644 - DNA, 420 bp, Arabidopsis thaliana
  Intron number 1 from transcript AT2G04845.1 (locus AT2G048 45) derived from phytozome v7.0 (chr-ID Chr2; pos 1703409 to 1703828 reverse strand)
cagctttcttggactcaagatcccaatagtatgaaaaaactctaaaccctatttagatatatatcttaaatcttccatcttctttatcttagatttgatcagtttcagttttactcaattagggtttagggttttcttttaaactaccctagaatctcaatgttgattgtttttgtttgatattttagtctttttctgtgaatttgatatcacctaagctccaagttcttggatatttagctatatagtgtcttatgaggttcattgagttcgtctcttaaccaataaacaatgattagagtagattcatgaccttttatatttgattaggtctatcttctttttcaaatgtagtattttctaatgcccatgtttttggtttcagagcggactttcattgtcttggacaaggatttcgtt

SEQ ID NO: 2645 - DNA, 499 bp, Arabidopsis thaliana
  Intron number 1 from transcript AT2G04890.1 (locus AT2G048 90) derived from phytozome v7.0 (chr-ID Chr2; pos 1721817 to 1722315 reverse strand)
cttccaccgaaagatcacttcttaacctacacaaggtttgtttttctcataaaaatcaaacctttattctcttttcttgatgattttgatgctctgcttcttcttatccacaaaacatgaaaacatttcttctttgataagtttgatgttggtttgttgtaaatgattgctctttctagcaagctttactctaaagtgtgaagagaaattgtcaaattagtttgtttaggattggaactcttgtatgccttgtttattgatgaagtagttcatggctgacgtagattcatagagtcatgagttgatttcaatgatactagagttcttgttagagttttgatctccatggatattattgttcaatattgatatctaattcagtctctgattaatgactttgtctatgaattctacaggtgtttgttatgaagatcagataaataaaaggtcatttgaggataatggttgatgttcaaagattcttacttgcttatttgtg

SEQ ID NO: 2646 - DNA, 614 bp, Arabidopsis thaliana
  Intron number 1 from transcript AT2G05185.1 (locus AT2G051 85) derived from phytozome v7.0 (chr-ID Chr2; pos 1877080 to 1877693)
cctccaggtccgttccaattttgtgcttctaatgttaaggttgatttgatggaaactggataagaatatcgttaatggaactctatagattggtttaaacagaaactagtttggtttcaattttgaattggagcagctggtttcacatttgaattgttcgttaatgttagggtttagggagatagcaatccaattctgtttttgagctgatattgttttgtaatcgaaaagtgtgagaattaggtttcagttttgccttcttgtgaaatctattggtgagcttaactagctgtattgtggactagaaagcagttgtacaatttacgagagtaacagagtttgcgggaagcctttatcgagatgtgaagcgttgaatgggagaaatctgagtattattattgtggctggagttattggagctgtcatttgattgtgtgtgttggtttagtgatattctggtgtttctttattagagatgtagtaggaataagaatggtcatgatcctcggaaatctaaggatgatagtgattggattggtttgttgacgtggttttttattggttttgtcttcttcatttctttggctataaatattgggttttagacctgaaag

SEQ ID NO: 2647 - DNA, 581 bp, Arabidopsis thaliana; identical to SEQ ID NO: 249
  Intron number 1 from transcript AT2G05230.1 (locus AT2G052 30) derived from phytozome v7.0 (chr-ID Chr2; pos 1901939 to 1902519 reverse strand)

SEQ ID NO: 2648 - DNA, 561 bp, Arabidopsis thaliana
  Intron number 2 from transcript AT2G05350.1 (locus AT2G053 50) derived from phytozome v7.0 (chr-ID Chr2; pos 1949894 to 1950454)
actctcatcattcacctgtatcagacataaagaaggtatgtctcttaattctccctctcatctcatctcatatctttgtgttcattggcttgctgttctgtgcttatgcagttgtttcagatgttctaatgcaattatgtgaatcagattctctttttactaccataataccgaaagttgagtaataacgcttttcttagggctagcttccgagtcaaactaattgtcctatagatttcttgaattcattaatctcttgtaaaacaacttatgggttgggttgtgtttgttcttagttgtgagaatttgtttgatgaagaagagaggactccctgatcttatttgatcttattttgtttttgatagatgaatttgtgtagatgtggtttgcctccaaagattgtcacatcgtggaccgataaaaatccgtctttttgcttgaatcacttcttttttttccaagtttttaccaacatatctcggtttagaccaagtttgtttcacattttgtgtgcctgatgcattattcacattgtgtttcaggtgaggccaacttataca

SEQ ID NO: 2649 - DNA, 271 bp, Arabidopsis thaliana
  Intron number 3 from transcript AT2G05420.1 (locus AT2G054 20) derived from phytozome v7.0 (chr-ID Chr2; pos 1984725 to 1984995)
ggtttcaagttcttcctcaagtaagaaattatataaataattataccacacttgttgttatgtagtggaaattctaggtattctgttttgaaacaagtataagaaaaatacttttaaatataaagaatatgaagaaaacaaatcgttagtctattagtatatagtccagtttcttcaaatatatactaggtttagatatgatgtggttttactttatgcatcctttccactcgcagatagaatcggtgaatcgtttgtttgcaaaacacct

SEQ ID NO: 2650 - DNA, 228 bp, Arabidopsis thaliana
  Intron number 1 from transcript AT2G05642.1 (locus AT2G056 42) derived from phytozome v7.0 (chr-ID Chr2; pos 2100868 to 2101095 reverse strand)
ttccgagcaatcaactgttttttctcatcttgaaggtatcaatttaccatcttcaatttctgtttttaatttttcatagatctgcaaatcagataatatcttcaatttctgtttataatttccatgtttttgtttgatttcttcttctctgtttatacttaatcgattgcaaacccttgaaactaattatctctttgattttgatatttaggttattggaagaaaaaa

SEQ ID NO: 2651 - DNA, 402 bp, Arabidopsis thaliana
  Intron number 3 from transcript AT2G05752.1 (locus AT2G057 52) derived from phytozome v7.0 (chr-ID Chr2; pos 2169653 to 2170054 reverse strand)
agagattgcttaaagttggtagcaaaatgtgtcagagataagtaatttgtgacgctttggtgacaacagtcacaacctcgaattattagaattgagaacaagatacctatcacactcaaacaattgatttcatgatcgaagaccttaggtgaaactaaaggcagagttcgcaaagaattcttaagcacccatataaaaactggtacataacggtccatttgacgtccattatcaagtggtgccgataagtgattcagtattttactaagaaaaaacaaagaataatttaggtcagacctgggcttttgtgtatgaaggtttggatcacctttaataaacttgggctttcgacattttaatgggccagactttaaaaggtccaccagttgtaaacctagattc

SEQ ID NO: 2652 - DNA, 882 bp, Arabidopsis thaliana
  Intron number 1 from transcript AT2G06010.1 (locus AT2G060 10) derived from phytozome v7.0 (chr-ID Chr2; pos 2336941 to 2337822)
agcttcaaggccttcgcgtcggcgtcaatctcgaggtctttccttctctatgttcaacaaaactttgagtttcttcttactggctaataaaatgggtatgaagttgtgaagtttgaaacttttttaatgataatggatttgagtgttggggttaagtattcggtttataggcataagttcatctattgatgcattcaaagagacttgttttgtgctgtggattgagccatgagatgtcatcactgtgttttttcgactgtgtgtgcttttatataacgaaaccgagaatcattaacacgcgaagcttgtcttgaagttgtaaagtttggaactttatggataatcttccagttgtgtaacgaacccacaaatgatcacatttgcaaagtttgaaaaattatagataatggatctaattatttggtttattaggtattgattatctattgatgcattcccatatattttctgtgatgtttgagctatgagatgtctcatcattgtcttgaagttgtaaagtttggaactttatgaataattgatttgtgtgtggaaataaggattcagttttattagagatggttcacctattgatgcattcttgcttatgttcttttgcatttttgagccacgagatgtgtcgtcattatcatatttttttgcattttccagttatgtaacgaacccacaaatgatcacattgcaaagcttgttttgaagttgtaaagtttgaaaatttatggataatggatctagttatttggtttattaggtattgattatgtattgatgcattctcatatatttttgtgatgtttaagctatgagatgtctcatcattgtcttgttttggacttgtttagttatataacgaacccacga

SEQ ID NO: 2653 - DNA, 345 bp, Arabidopsis thaliana
  Intron number 2 from transcript AT2G06500.1 (locus AT2G065 00) derived from phytozome v7.0 (chr-ID Chr2; pos 2582644 to 2582988 reverse strand)
agaacaagctgaagttgtctttgaaaagaagaaaagtcgatagaatgaagacattccttccaatatttcttatccggcgaattgggataacatgaatttgagattaagagttttaatagttgaaaaagatccagtggcaaggttatcaactagtcatcgttttgctaaagatggaattggaagacatttctctcacggattctactgatttatgatagaaaaatggagagaaacatgatagaaagtggctgatttactcaaaaacattagataaagtcttttgtttttgctgtaaattgtttagacatgacaagagttgtggttacttagcaactagtgtgtaca

SEQ ID NO: 2654 - DNA, 341 bp, Arabidopsis thaliana
  Intron number 1 from transcript AT2G07280.1 (locus AT2G072 80) derived from phytozome v7.0 (chr-ID Chr2; pos 3026418 to 3026758)
tcctaacatagttccaccagtcgctaccttaacaggtaaataactttaacctagattcgttttgtcactcttctctgtcgttttcatcttctataactaaacaacgttttaaattgttcaggcaaggctgcttttcttgatcccgttttttgggataatgatttgccaccacggttgtacggaaccatacgttacccagacgctcgacttaatgtatattccaagtttgattatctatgtttcattaagaaacatatggaagggacacatgagccttaatgtaaactctggcacttcctcttacagacccttcggacgatatagttatattagactgggat

SEQ ID NO: 2655 - DNA, 707 bp, Arabidopsis thaliana
  Intron number 1 from transcript AT2G07750.1 (locus AT2G077 50) derived from phytozome v7.0 (chr-ID Chr2; pos 3576614 to 3577320)
tcaggctgaacctagcaccaatctcttccactccggtaacaaacccttttcatctctcagttaatttctggttctttcgagggtttatcgttgttcgagtatatgtttgatgctttttaaagatccttcctttatgaattcagatttagattatcaggttcgtctaagatgaactatatgtgtttaagaatttgataagttcaattattcatttttggttctgatttccagaaaaatgtctgctttcgattgcttaactctagaaatgtattgtaagagttaaagagagtttctttgcactcaattacttcagaattcggtttgttcggttaaaatttggatgcttacgtgatgatatgtgtaccggatcaatgtcttgtttcaagggtctatgtgggctgtttctagcatcttcaaggcttctgtttttgtaaactacttcctagtatcaattagtttttgaaatactgcttaacattgggctttgatgcaagcaattttgattaggctcttacttttgttccttcatagcctctgtttctcacttttatcacatggccattatcacatacatacatctaaggaatgttatgtgttcgatactgtgtctcagtttcgtgaaagtgtctttttgtcatgttatctttatctttgtgtcactggatatttcagggcttagtaagcgcatcacttctgaaaggtcctta

SEQ ID NO: 2656 - DNA, 407 bp, Arabidopsis thaliana
  Intron number 1 from transcript AT2G10440.2 (locus AT2G104 40) derived from phytozome v7.0 (chr-ID Chr2; pos 4017553 to 4017959 reverse strand)
gagcctgaattacggcaaaaggttctttcaaaaatgtaagccattctttcaagagtttcatgtttcttttgttggactcattgttcttatttgattattaacattcatgaaagagagtaaggttttcttggtcatgctttcgatgtgatatttgtagtttgcgcatgataaagattgcaacagttaaagcataagagttgtgcataaatgtttatcatagttgacaaaacctaacttcaaccttttgtactttaagttttgcatattcttttaacctcattacctgcatttaggctcttcctcactaggagaatcttgttttactctcgcttctatgtacaattgcttggcacatatgtataattgtttcagtgtttgttcgctaaacgattatcgtaagttcgaat

SEQ ID NO: 2657 - DNA, 560 bp, Arabidopsis thaliana
  Intron number 1 from transcript AT2G10440.1 (locus AT2G104 40) derived from phytozome v7.0 (chr-ID Chr2; pos 4017400 to 4017959 reverse strand)
gagcctgaattacggcaaaaggttctttcaaaaatgtaagccattctttcaagagtttcatgtttcttttgttggactcattgttcttatttgattattaacattcatgaaagagagtaaggttttcttggtcatgctttcgatgtgatatttgtagtttgcgcatgataaagattgcaacagttaaagcataagagttgtgcataaatgtttatcatagttgacaaaacctaacttcaaccttttgtactttaagttttgcatattcttttaacctcattacctgcatttaggctcttcctcactaggagaatcttgttttactctcgcttctatgtacaattgcttggcacatatgtataattgtttcagtgtttgttcgctaaacgattatcgtaagttcgaatattaactacggattattttctctgttttgtatttttagtgcaattaaaatggtatcacttcctcttgaatatcagttataaccaaattcttcatagtcactgatattttgttctcatgtatgtgtagagttgaaaagttcaaggaaaagtttc

SEQ ID NO: 2658 - DNA, 638 bp, Arabidopsis thaliana
  Intron number 1 from transcript AT2G11810.1 (locus AT2G118 10) derived from phytozome v7.0 (chr-ID Chr2; pos 4743698 to 4744335)
actatcgggtaaaaatattaatatttttatttatatcttcattttcattctctttgccttgaatccaacgcatagggttgagccaataatatgcttccttaaccatatatataacgtacaaaaaaacgaaaaaatattgcataagcaacaaaacttaatcatacttttatcttttagtttctgtgtaaaacaacaacaatattttgaaatattcattttgaaaatttcaaagcttgtaaatatatacctcgaataatatgtatttatattatgacaaaattttccaatagattatgttataatatatcatagaggagtttctgattctaatgaaatctcagccgtcaatattaaagttgtcgcagtagtcgtcttgaatttgaaaacgaaaagaaacaaatatctacttggaagttttgtagcctagtatgaatcttggagtttgccagggtgtcggagatacgagctgacgtcaacaatctatgtcttaaaacctgtcccacgttccatttattttgtttgtcaataatgattaaaaatttgcattatttatttctctagctctgactctttgatgttacaatattctctctaggaactaatgtcattttttttataactatagataatcataaaag

SEQ ID NO: 2659 - DNA, 768 bp, Arabidopsis thaliana
  Intron number 2 from transcript AT2G11910.2 (locus AT2G119 10) derived from phytozome v7.0 (chr-ID Chr2; pos 4806315 to 4807082 reverse strand)
tcgtcggaaagaatctggcttgtcttctccttgtggtaaagaacagttttttatcagtcttcttgatttctgtggtctagatttgcattgttagcttcgtgtttctctgtttggattgtatttgtagtttttcttagctgtcgtgtagttatgttctgttggaattgtcttagtccaaagtttatagatttgtaaattcagatttctgtttttgtgttctagatttgtatttgatagtttgattgtttgaatatagctatgtttgactatagtcttatgtgttaatggctctagataagtctttgaacaatgaagttgaattgtagcttaggaacaatgtccagtgtcactcttttttgttgactggtcacttatcttttgtgggttttgccatttgttgttaatgaagttgaatagagcttagaaacaatgtctagtgcctctctttttgttaattggtcagttttattttgtcggttttgctaattgctgtttatttattgtgcattgattgtgtgtttctttgtaatgtgttcttgaagttgggttatagagctacacacaatcaaaagtttctctttgcaagtttagatttaatacattgtgttggtggttgttgttatttgctttctattttaaacgaatcttgcatcaatgcatcatatctttgtcacattcagatgtttagtttctgtcttcctattttaactagcattcttggtgatcatttcaggcagaatcattactgataggtttggttgctgttga

SEQ ID NO: 2660 - DNA, 870 bp, Arabidopsis thaliana
  Intron number 2 from transcript AT2G12400.1 (locus AT2G124 00) derived from phytozome v7.0 (chr-ID Chr2; pos 5006926 to 5007795 reverse strand)
gaatataagcaattcccattatttgactgtgagtcttttatttctgtggtccaaaaatgttttttttttgttgttgtgtgaaatctctctccttaccaggtgggtattgcttcatttgacttgggttcttcttagattcctaaattttgattaaagttataatctttaccatcaaaagtctagtggagttttgactgttttaacttttaaggtgtagttatgatgctcatgatgaattaatcaatagcataggattcacaactagttggtgcttggtttacttgacttgggttcttcttatattcctaaatattgattaaagttataatctttaccatcaaaagtatggctaaatggagtttgactgttttaacttttaaggtgtagttatgctcatgatgaattaatcagtggattaggattcataactagttggtgcttggtttacttgacttgggttcttcttatattcctatattttgattaaagttttcatctttaccattaaaactatggctaactgtagttaaattttaattaaagttttgattctatgactaagtgtagttagggtgtttggtttatttgactttgattcttatattcctgaattttgaactttaaaagttttgatctttatcattttgtaatattcactctggattaatcaatggaaatttggattagctctatgactagccttgttacttgaatcagttttattatgcttatatagatgaaagatgtttgataccaattgatatttttgatgagtcttttgtatggtattggtgacatactaatcaatctctatcattctttgcttgtggtgcagtctgttggttatacagcggcgcctttcattataat

SEQ ID NO: 2661 - DNA, 518 bp, Arabidopsis thaliana
  Intron number 1 from transcript AT2G12405.1 (locus AT2G124 05) derived from phytozome v7.0 (chr-ID Chr2; pos 5010859 to 5011376 reverse strand)
aaggttcattagagacggcggtttcgtctaggagggttagataggagagggttcagttgaccccatgacttttatattttttttattttttaaggttattcgattttttccggccaaaaaaaaacatttccccaaaaaatttcaaaagagcgggtcagaatctaattcttaaaatatgaaaccccgcacgtatgtgcgggtcagaatctagttatattattatcaaaagaactataattgtaggatttatagcaatagttatatgtttcttagtcctcttttattaagcaaatgtaatagcaaagaatatttttaaaaatcagcaatgaaatttttttgagttaaataaagaatcatattataatatacttacattaatatatgacttccataaaaaatatttgtggctccgccactgctagtgggtgttctcaaacctgtctgagttgcttttgatgtgtcatgctctggattggtagccagaggcagtttctttggttgttcattggtgctcacat

SEQ ID NO: 2662 - DNA, 488 bp, Arabidopsis thaliana
  Intron number 3 from transcript AT2G12940.1 (locus AT2G129 40) derived from phytozome v7.0 (chr-ID Chr2; pos 5318431 to 5318918)
gagatacaggcacaacttcggggtacatcatctttatctatcgatactttagcaagtcttttagtttgattttatggtttaagttttacgctggtaattgcatgaactttcttgacctcccccttattttgggttgaccatgatagtatttacgacgataagatcttctttatgtgcaataatttccatcagtaaaaaaggagctaaatatattgcataaaaaggaaagttttttgaataagttttagtagatccataaccgtaaaatacggtttttccgctttacctgaaacttaatgtgtaggatgatgtattttttttattgcgacgtataaacaaaataacgcattttgaatgaaactttttacgtgaatcttaaccacaacaccttttaaaaaaatctcttgctttttaactgttgaatatttgttttcatttcctttattgttgcagtcttgactgaacatttgcacggagaaagtgaaagg

SEQ ID NO: 2663 - DNA, 468 bp, Arabidopsis thaliana
  Intron number 3 from transcript AT2G13150.1 (locus AT2G131 50) derived from phytozome v7.0 (chr-ID Chr2; pos 5437920 to 5438387)
tgaatcattggagcaacacgccgaacttcgtggtacatctctttatttatcgacactttagcaagtcttttagtttgatttttatgctggtaattgcatctcacttattttgcattcaccatgatagtatttacgacgacaagatcttctttatgtgcaatttccatcataaaaacggttaaatatattgcataaaaaggaaacttttttgaataagttttagtagatccttaaccgtaaaatacggttactttttctgctatacctgaaacttaatgtgtaggatgatgtatattttttttattacaacgtaaaacaaaataacgcattatgaacaaaactttttacttgaatcttaaccacaacacctgttcaaaaaacgtcttcctttttaactgtagaatatttgtttctattttctctattgttgcagccttgaccgaacatttgcacgtagaaattgaaagg

SEQ ID NO: 2664 - DNA, 571 bp, Arabidopsis thaliana
  Intron number 4 from transcript AT2G13650.3 (locus AT2G136 50) derived from phytozome v7.0 (chr-ID Chr2; pos 5688955 to 5689525 reverse strand)
acaacagagtgtgggctgctctcttcttagtatgtttgtctgctttaaaagtatttctaactgattctgtaaattgtacctgagaaaaaactattctcaaggaacctatttcaagctgcacatagatagcattttgattggagtttttgaaagatatccttgtcaaacaacgattctatactgttttggatttggttttctcttgttttctcaaagcactctctgatcatcaaccttaaccaataaagtctaaagcatatcttcttattgataagtgatccacccttttgtgtgcgtacacagttacacttgtcgtagcggctttcagtggtgtggcatagcctaacctttcaatactgttggagatacatgtttttaactgcttccacaattagtctgccagggaaatgtaatcatgtttttttgtcacggctactcattgttatatgtatattctatttgtttttgtatagatcttgaataagtagaggataaagttttgattaacctgtgcttctttcgtccttcatttgcagataatttccgcagtttctggaggaataacagacct

SEQ ID NO: 2665 - DNA, 315 bp, Arabidopsis thaliana
  Intron number 1 from transcript AT2G14540.1 (locus AT2G145 40) derived from phytozome v7.0 (chr-ID Chr2; pos 6198634 to 6198948 reverse strand)
aggctagtttcgctaaagttgatttccgacacaaggttagtttctgatttctctacttttcaatttcaaatataatatgctttgattagataattaggttcagaatgagaagatttttgtcaatttttatgctaaataaatatatagcttttcgatttcaaatttgcttgattagattaggtcaagagttatgtacttattgcactttttattctgtgatatttggttgttttctattatgtggtttagggtttatggattttgtgttgttgttttgaaggctgaagaagtgcgtctggacgtaaatacgtgggc

SEQ ID NO: 2666 - DNA, 257 bp, Arabidopsis thaliana
  Intron number 1 from transcript AT2G14820.1 (locus AT2G148 20) derived from phytozome v7.0 (chr-ID Chr2; pos 6358922 to 6359178)
tcaggtaatagctgatcttgatcatgttttttcttgttctgttttgttgcatctgttggtttaatgcttttgttttctgaggttcctctcttcttttgagagatctatgaaattgaatcttgatgcgagagactatgatctatgtttcattatgatttccttttaccttcaaagcttgtcttgagtatacaagtgcttgcacttttgtgcctagaaacagaatattcttattgatgttgtttttatctcatgcaggt

SEQ ID NO: 2667 - DNA, 829 bp, Arabidopsis thaliana
  Intron number 2 from transcript AT2G14830.2 (locus AT2G148 30) derived from phytozome v7.0 (chr-ID Chr2; pos 6362754 to 6363582)
cttcacttaccaactcctgatactccttgttctaggtaattgagactcttgattcgatggtttggtttgcaagaatcacgtctagtaattttgatttctaggtctcaattcgagtttctttaagatctcatgttattggactcttgtagctttgtgatttttgtttagtgattatgaattttaaagaaccaatctcaagtattggcaccagagctttgttgattttgatatcattgttttagaatgatgcatttgaattgtagcctgaacaagtatagtgtgatacagtgatattgaattgcatattacatggaatcaaatctatgagcactgagttagggtcattgcacacaactaaaataaagttgtgtctctgtgtctctgcagttctaggctgaaaatgtatgaccctttgtgatttttgttgaattttaagatactttgtgccattgagagtatcttgattttgaaatcattattgtattgactcagttattaactgttgagacataacttaactttgaatcagttcctcttttgtgagtttgtctctctgaagtcaaggctaaaatctgtggattgactcttccgttttgtgatttttgttgaagttgaacatatgaatagatatgggcttgtttaatacatatgctgaaaggagggtttagtgattctgaattctaaggaaacaatctcatgcaccatgccactggctattgtgattgttttgttgacagtgtattgatttagagatcattgttgtgttaatggaattatctttctttctaatgtgtataataaggtgccaaaacccggtagagaactggtt

SEQ ID NO: 2668 - DNA, 769 bp, Arabidopsis thaliana
  Intron number 1 from transcript AT2G14880.1 (locus AT2G148 80) derived from phytozome v7.0 (chr-ID Chr2; pos 6393772 to 6394540 reverse strand)
accttcaggtaacttaacaaccaagaatctctctcagaaacactctggttttggtttctcttatggttttgtttcgctttcttcaatccggtggtttgatattttagggtttctgtaggaaaattgaacggtctggattcaagaagacagaaattgaattaggttgtcttcttgttagttatgtaacttgtaagttttctttagattaggaagctgaaaatattttggtgactaattgcttcatatgattttgggggtagttgtttataacgttttgtataagcaaatttgattctttgattgcgtctcgtttacttgcttggctatgtgtatccttagagataactaataatcttctctgggctatgttcttgaaccttgttgcctagtttgaccaaaatcctaatatgttctgtcattggctttgtatctctgatgttttgatctctgcttcttggtattgttgctgtttggttcaggttctctaagtatgaaatggaacttttttcagctcttgaaattctagttctatagtgtttaaatgtggatgctgtttctctgcaagatttatagtctatagcaaccaagtagccaaaactttactctagtagaaagctctgtattattctcattgacatgtcttgaggtttcaaagtttaaagaaccaatttagctacggtacttcaagatgttttacttgcatcaaagttttactaaatgactaattttgttctttaggacccacaaaacaagagagaaatactgtgtg

SEQ ID NO: 2669 - DNA, 430 bp, Arabidopsis thaliana
  Intron number 3 from transcript AT2G15000.3 (locus AT2G150 00) derived from phytozome v7.0 (chr-ID Chr2; pos 6481173 to 6481602 reverse strand)
gtgctgcattgtaggtttcttatcagtatatgaagattagactctgtttccttttgcattgtgttggcggattagacaaagcaaagcttttcttagcactgaataacaaacattttgttcatttaaacagtctgtttgatactttgatttggcataatgatgcacatttgttgcttttgattcgtatagaatatggtttatacgacaactttggttttgtttcattgtactgcctttgagttgtctttggttatcatgaaaagaatgttaggttccgtgaaatcgataacgagagaataagtcgtaaaatgatacacaatgatggcgaagaagaatgaatcttcttctctcagggtcttgtttggatttgtaattttggttgtaacttggcacaggtacttgaagaggcaaaagagtgtaatttcactgc

SEQ ID NO: 2670 - DNA, 733 bp, Arabidopsis thaliana
  Intron number 2 from transcript AT2G15000.1 (locus AT2G150 00) derived from phytozome v7.0 (chr-ID Chr2; pos 6481173 to 6481905 reverse strand)
cgttaacttgcgagctttctgcgagctgtctaacggtaccttccaacgcacttgtcaagatcgctagtagtcctctttgtgagtgttttactttacttaggtttcttataggattatttgggagattagtctgctaagtttcttgtttaacactatggagcttcttgtgcattgatgttggtcgttaccgttctttgtttgagttggattaagttgtttttgtgaatggtttgggtttgggattgataggaattggaaaagatgggtgatgcactcggattttacgtcgctggcaagagaatggtgctgcattgtaggtttcttatcagtatatgaagattagactctgtttccttttgcattgtgttggcggattagacaaagcaaagcttttcttagcactgaataacaaacattttgttcatttaaacagtctgtttgatactttgatttggcataatgatgcacatttgttgcttttgattcgtatagaatatggtttatacgacaactttggttttgtttcattgtactgcctttgagttgtctttggttatcatgaaaagaatgttaggttccgtgaaatcgataacgagagaataagtcgtaaaatgatacacaatgatggcgaagaagaatgaatcttcttctctcagggtcttgtttggatttgtaattttggttgtaacttggcacaggtacttgaagaggcaaaagagtgtaatttcactgc

SEQ ID NO: 2671 - DNA, 690 bp, Arabidopsis thaliana
  Intron number 2 from transcript AT2G15000.4 (locus AT2G150 00) derived from phytozome v7.0 (chr-ID Chr2; pos 6481173 to 6481862 reverse strand)
caacgcacttgtcaagatcgctagtagtcctctttgtgagtgttttactttacttaggtttcttataggattatttgggagattagtctgctaagtttcttgtttaacactatggagcttcttgtgcattgatgttggtcgttaccgttctttgtttgagttggattaagttgtttttgtgaatggtttgggtttgggattgataggaattggaaaagatgggtgatgcactcggattttacgtcgctggcaagagaatggtgctgcattgtaggtttcttatcagtatatgaagattagactctgtttccttttgcattgtgttggcggattagacaaagcaaagcttttcttagcactgaataacaaacattttgttcatttaaacagtctgtttgatactttgatttggcataatgatgcacatttgttgcttttgattcgtatagaatatggtttatacgacaactttggttttgtttcattgtactgcctttgagttgtctttggttatcatgaaaagaatgttaggttccgtgaaatcgataacgagagaataagtcgtaaaatgatacacaatgatggcgaagaagaatgaatcttcttctctcagggtcttgtttggatttgtaattttggttgtaacttggcacaggtacttgaagaggcaaaagagtgtaatttcactgc

SEQ ID NO: 2672 - DNA, 709 bp, Arabidopsis thaliana
  Intron number 1 from transcript AT2G15050.2 (locus AT2G150 50) derived from phytozome v7.0 (chr-ID Chr2; pos 6519191 to 6519899)
tgcggaatcaaaataccttacagtacccaaatcaggttcaacaccaagtgcaacacgtacatatgttaatctctttctcatctaattatactaaatcaacagtcactttttcaataactgatacattttctgtttgacatgtggcataagtctcaaattctactcttttacttcttctttttcttttacactttacgacaaaacaaaaataaaataaagaaaataaactgttccttttcaaaaattaaaaactgttcttattctccacatccacatgatctctacaatctccaaacactgttttctttcacaccttacacaaaaaaaaaactgttcttttaaataattaaaaactgtttctttgtttttttattattattttgtaatattgatacaaattttttgtttttataacactaatgcatatgtttgatattctcaaaatattttaatatattttataaattaatatttaattaactctgcataacagtggcataattctagtatatatataattaaagaggtttaagaaataaggaaaatttacgtactcatcaaattattttactacagacaaaattttgccaaaaaacaaatttgcaaaaggaagtatatatcgaacccctaactcagaaaattggaaacttgtaataacggtgttatgttgaattgtatgtggctgcagcgtgaggtgatcggcggtcag

SEQ ID NO: 2673 - DNA, 688 bp, Arabidopsis thaliana
  Intron number 1 from transcript AT2G15050.3 (locus AT2G150 50) derived from phytozome v7.0 (chr-ID Chr2; pos 6519212 to 6519899)
agtacccaaatcaggttcaacaccaagtgcaacacgtacatatgttaatctctttctcatctaattatactaaatcaacagtcactttttcaataactgatacattttctgtttgacatgtggcataagtctcaaattctactcttttacttcttctttttcttttacactttacgacaaaacaaaaataaaataaagaaaataaactgttccttttcaaaaattaaaaactgttcttattctccacatccacatgatctctacaatctccaaacactgttttctttcacaccttacacaaaaaaaaaactgttcttttaaataattaaaaactgtttctttgtttttttattattattttgtaatattgatacaaattttttgtttttataacactaatgcatatgtttgatattctcaaaatattttaatatattttataaattaatatttaattaactctgcataacagtggcataattctagtatatatataattaaagaggtttaagaaataaggaaaatttacgtactcatcaaattattttactacagacaaaattttgccaaaaaacaaatttgcaaaaggaagtatatatcgaacccctaactcagaaaattggaaacttgtaataacggtgttatgttgaattgtatgtggctgcagcgtgaggtgatcggcggtcag

SEQ ID NO: 2674 - DNA, 425 bp, Arabidopsis thaliana
  Intron number 1 from transcript AT2G15420.1 (locus AT2G154 20) derived from phytozome v7.0 (chr-ID Chr2; pos 6727756 to 6728180 reverse strand)
cccgttcggcgtgaacaacaggtagtgagttttttttgttgtcttgaatagattttttttggcgggagttgcgggtcgcgtttgcttaaccgagaagtcggaccgttgaggttgcattaattattttcgcttacgcgggaagtcgaatttttgtaatattatatgccatattcgtttgatattactgtatctcgatatctgctggatattagagcttccatattttcatactgttgcatcttaaaatctgctggatattggcatgtttccatatcccctaactgttgcaccttaaaatctgctggattttggcatgtttccatatccactgaatattgtgatgtttccttctctctatttatacacctttcttcttcatttttcttctagtttcttctcttcacaagaaaaggtaaatttcttct

SEQ ID NO: 2675 - DNA, 661 bp, Arabidopsis thaliana
  Intron number 2 from transcript AT2G15430.1 (locus AT2G154 30) derived from phytozome v7.0 (chr-ID Chr2; pos 6734584 to 6735244)
gatccagtcaccagacaggttagttttcacgttttggaagaatgcagctatacaagtttatagctttgagacttaaatatgattgaactactttatagactgccatgccttgaaatatatatatgtgatgtggttagtgcatttgctcttttctgtgcttctctttctgttagatagcactacttagctctttaggagaattacgccagtcatcggaatgaatcaaataactgctaaacttctggtaccaaactgaaacatctttctatatctaatcactgcaaattatatgaatcacttggagtatctctgtgccagttgaacttttgtttgtgatttcatgttagagatttcaaattattcgaatggtaaagggaataaagaaaggagaagatatagtacttgtagtacctctgtaccagttgaattttcttggagatttcatgttaatggttcagtgtttactaggactcaccacaactgacaattttcctttgacccgctagagaacattgtatatcattataacagttacagtagtttatcgttggaatttagtatgccatttcttttgaagtctgttgcttgaatcatcacaactgtaatttttatactttgcttcttaggttgtagtggttgatcctgaagcatacacttacga

SEQ ID NO: 2676 - DNA, 965 bp, Arabidopsis thaliana
  Intron number 1 from transcript AT2G15670.1 (locus AT2G156 70) derived from phytozome v7.0 (chr-ID Chr2; pos 6828434 to 6829398)
tcctctctacaccaattgtagtggtgatgatgtgtattcaagagaacatatagtggaacaagagacatgattcaagaagaatgaaacatattacttttggtgatgcgatgtctcacgtaaagcataaatgggaatataagcaattacaaacagtttcagacttggagttttgttgggacagtgttcgatggaggacgaaatgagcaaacgacaaagaagatgaatgatgctaagtcccaagatttgctactgttacacatataaaagaccatttacaaaggttaaagttgtatctccaggaaggaaaacaagcccaagcacatttgagcatctataagtggagtctttacaacttgttatctgcaaatgttgacaagagagagtcaatttttctgtgtgacattgttggaggaagaagaaactgcagtacagtagcttgaatcaagtgctgttatgaactttactttaccattttataacaaagttccacagtgaggctgagatacattgctgcagcatttttaagttcatgtcaaggatttggtgtcattttaactcgattcttttgctagattgtgtgagttttaattgtgttagtgtgtgttgtgtttgggtaatgaaaaagtctatagctttggaatgtaatgaaaggtcttctaagtttgcattacgttcaaataacaaatgctataagaagaagatgttcttattataggccatgtttgtgtttatcaacacttaaacaccaaatatttgtcttgaatctctgtttttatagtcactcaaatcaaattatgtgtagatcatgaatctcactcaagaaaatctgaaatgtgtcaaatccttaatggggaatcaaaatcatgtttctagaaatcttttctttattaaaactgatggtttatttgtgtgtggtttttttgagttcagttcaaatcaacatctcaagttctgcccattcctga

SEQ ID NO: 2677 - DNA, 1005 bp, Arabidopsis thaliana
  Intron number 2 from transcript AT2G15710.1 (locus AT2G157 10) derived from phytozome v7.0 (chr-ID Chr2; pos 6842906 to 6843910)
cataacacaattattgggccaacaaaattggcaaggtgaggaagaacacaagtgtgggcaaaagtatgtggcccatttacgtcacctataaatgcattacaacgtacgacgtatagtggaggtaggtgagaaaagaatctaaagagagttatagagaagagagataaaagagcttccaaagcaagctttcttcttcctctttgttgtttttgaatctttgtttttcttgagtgcaaatctgtaaaaaccaaaagacaacatcacaagttagtggtgtgtttgtaatccctttgatgtagtgaaacttgggagcaagagatctcccccgagatgtaggggttgaggctgtgaactcggttatcaattttctttgtctgtttatttctttaccaagcaatctctatcacttttttctccacaaaactagataaatttggtgttggcgagttgggttccacatgccaaagatatttgccaagccattatgtgttttcaaacataaatgctgcaatataatttttgaccccaaaaaaaaaattgtttcacaccattcattaattggcttaatccgtagaacatcctaactttactaattggaaaccctaattagaactctcgtaaatttcagacactacatacacacatacatatttccaagactcctcgatatcttggaaatataaataaaatgtcataataaatatatggtgtgaactaactatgaacacttggacattagactcatgagtaaacgactcttcgttttctaatgacgttttggagactgctccaccttccttcacacactatttccaagactcctcaataaatctagtaagtcataataacattgatttcgctttattcctttttctctccatatattaacaatcttccaggttcattaggactagaatagttgtagatgaattaaggtcgtagttgagtataataattggttcatgcacaggagattctacaattgtgaataacttgagagaacat

SEQ ID NO: 2678 - DNA, 542 bp, Arabidopsis thaliana
  Intron number 2 from transcript AT2G16230.1 (locus AT2G162 30) derived from phytozome v7.0 (chr-ID Chr2; pos 7036887 to 7037428 reverse strand)
ctcaggtaattaactaaagttataatatataatctctcacgggttggtttctggactattagttaatgcgatactattataacgttataatttgaattttctctacaactaaacattttgttaaacttgcttttcatattgcaaaatatataggtcttggttttgaaattggtggaccgtttaatatctaattgatataactcacaatccagctcaaacattaatattttgatacaacgcatttgtttatttggtatcaatctcatagtatggttcatttgttataatttattgttgcaccgagatcttcaattctttattgtaattatataatgattgtaaatcatgtaagaagtctgttagttgaacgttggaaatataatttattatccaacataaaatattcggaacttgttgtttctctctacatttccactaactagaaagaaatcaaataatctcattatagtaaagatagaagaaacatttgtttcttgccacacacgttatactgatccaaatagggggttttccttaggttg

SEQ ID NO: 2679 - DNA, 443 bp, Arabidopsis thaliana
  Intron number 2 from transcript AT2G16390.1 (locus AT2G163 90) derived from phytozome v7.0 (chr-ID Chr2; pos 7098480 to 7098922)
gccttgtcaatagagtgttccaaggtatatatgtctgaacagttacttcagatggaattgaaatttcagtcgttcaagaaatgaacaaaacaatcttgtgttatgttacctcttgccgtaatactcaattgtgaagaaactcaagtttaattatttgtgtttttctccctttctttttggttgatagagtttctgtttgacaaatcggttggtatggactctacgtatgcattaatcagattgagttatcattttcgtgaagagggttctgtactcttttctgtcactatagtgctcctagggcttgatgttgcacctcttagatttcttgcatttgagatatttagtagaaagctcatttaagaacttagctccttaaatttgatcttattttttgcctcttttcctgctttattcatttctgattccaataaatgtacagg

SEQ ID NO: 2680 - DNA, 529 bp, Arabidopsis thaliana
  Intron number 2 from transcript AT2G16490.1 (locus AT2G164 90) derived from phytozome v7.0 (chr-ID Chr2; pos 7146707 to 7147235 reverse strand)
atagcatttgataacaatgttccctcatgtttacacacttgcatttttcttttaacaaaaaaaaaaacacttgcatttttccattatatagcatttgataacaaagttcctaagaagttattctctttttcgcatctgaagtgctgtaaacatgatcaaacactctagtttgttgaatacttcagttgacaataaatttatttgatggggatggagtgaagatgaattctcatttgataaggttaagaggactatgactgttgtggatactaataaaattcacaaaaacttaccgcaataggttttctaagataatacatactgtctttaacaagaaccaaagttggaattatctatgtgtgattaattttggcctatgttagttttaatttgaatatttaagtactttttttccgagtttgactggattgttgagtatccatacaatatcaataacatgataaaaaaatttggagaaaattgattttaaacctcttcatgaatgtttgcaagttgagacattctgaaa

SEQ ID NO: 2681 - DNA, 443 bp, Arabidopsis thaliana
  Intron number 2 from transcript AT2G16850.1 (locus AT2G168 50) derived from phytozome v7.0 (chr-ID Chr2; pos 7302417 to 7302859)
accccaaaagaagtgcccgtgactctcacgtcccggttagtaaaactttgcaaaccagttttgtataatttataattattctaaagctgaattttttactgttctttcatggtttcaaaatgtgattgtgtaatttctaaaaatagttattcttttctaaatttttcatagatttcatgatgggtttttctttactgttttttcatgattgaaatttttgaacatatttctaggtatttaggtttgtgtagttaataaacttgaatttttctgaatatttatcgtagggtttgacatggatttttgtaatttttaacaagttgaattcttttgaattttttttcttatgatttcacatgggtttgtttaatttctgaaaaagtcttttgaatatttttatttttataggttttggctccgttacctatagggtttgctgtgtt

SEQ ID NO: 2682 - DNA, 400 bp, Arabidopsis thaliana
  Intron number 2 from transcript AT2G17150.1 (locus AT2G171 50) derived from phytozome v7.0 (chr-ID Chr2; pos 7469315 to 7469714 reverse strand)
tgtaaagctcttgaggttttgcctctacctcaaactactctatagatcccgcaacgcttacctcacatgtttagacccatacaaccagtaaacctcatgcttgaatgtatctttcactggatggctttctctgtttgctcattattcaattcctcacatttgtccagtttgttttttggttttctttagagtccaacaacatcttctgcatacgtttgtactttgattgttctacatctttctttctgcatcatgtctcctcctgtcagtcattcagccataatcttctttgattaatgtctgtgataacagtgagaagttttgtttatgtgccacaacagtctaaagacgctgctgttttgcaggccgtcgatctaaggagttcaagtaacttgaacac

SEQ ID NO: 2683 - DNA, 802 bp, Arabidopsis thaliana
  Intron number 1 from transcript AT2G17160.1 (locus AT2G171 60) derived from phytozome v7.0 (chr-ID Chr2; pos 7472757 to 7473558)
ggtacaaaagctaggagaccaaaccctgaggtaaagtaattactgattgtatgaacaatttttgtgtgagcaaaaaaaaacctgtaaaatatatatatatgcccatgataagatgatatcacatttttgtaatgaaaacggtgtgatttaactaaattttatgtccttatcttggtgcatacaaggcgttttcaaagatacatataataatttcccgtacaatcgaatagaagcattggattattggaataatacatgttttatcgtacggtaacttaagtgcttactcggttctgtttgataaggtatacgaaacaacattttcaagcttatgccttcttaatgatctaattaagtatgcttaactgtttttatttgcttaatggatatgttgaagtcaaagaacaagaggtaatcagttcttgcttgtctcttcatactattcatatctgaatgtgatgttatataatatattcttattgtaggaatcgtgaaccctaaaagtgtgacattgatttggtactaaatatcattgtgaatctgctaactggaaagcgaattcctccaagccatgtaagccattctgtttcaaaccatgtaagccattcatcttgactttgtgactttaatccttagagaatctgtctttttcaattccttgcaacacaagtcacatttctgctgagtaaattagttgtgatatagtaatccttaatttcttgccacacaagacacatattactgagttgttatcctcctatttttaggctcctgtgaggagaaacggaaagtttgttactga

SEQ ID NO: 2684 - DNA, 897 bp, Arabidopsis thaliana
  Intron number 1 from transcript AT2G17380.1 (locus AT2G173 80) derived from phytozome v7.0 (chr-ID Chr2; pos 7553093 to 7553989)
actgttaaagattttccttcaatcggctaaaagtaacaatcgccactccctttgcttttgggcttctctgttatctgttcgaattttggatctgccttcgatcttgtactattgcatcgagtatctacgatttgatttgatgatgaaattgaatctaatcctccggtatccgtagatttctgcttggatctgtccggttcttttctcgcttacgaattgatcgattatttaggaagtgaaaggattagtttgtttcgtgaagcttgaaattgttatgtttctgttgcccattcgaatctcttgtgagttattaaatccaattcattgtttttgaaccactattgctcttgaagtaattaagcttcttggattcaaatgtaatagggtctaagctagttcatgtacctcacatctctttatttgcctctgtttctgaattggcaaaataagctcgttgatctctccatctttccatatctttaaatggtttaaaaacttttcttgagatgcttgtggcttgcgtttaggtgtatgatggtaaatgattctcaagttctggtacttgatctctcacaattccctcttttgcttgccttatgcaattatgtgcatttcaaatctttatgagttgccagaaatcgtgatatatactactggttttgtctggtcttgttttaattctctttatctcgatgctgtctttgtgattctagaattttctcatgcttgatatgggtgaggagacgtcaaaaactaattaatgtgttatgtattgccattcacaatgatagaataatgctttcttgaaaagaaaaaaaaaaacttctaaggtggctgttttgggttatgtttgtattttcagatacatttcgtgttactagtcagtcgacaagggaa

SEQ ID NO: 2685 - DNA, 672 bp, Arabidopsis thaliana
  Intron number 1 from transcript AT2G17442.4 (locus AT2G174 42) derived from phytozome v7.0 (chr-ID Chr2; pos 7575153 to 7575824 reverse strand)
agcatctcctcgtcgatctcgcattggtcttctaggtcttacccatttttcctttcttacattcaatgccgtttctctgtttgtttctcttctttctgtctgattttgttgtcagggtttttgttattagggtttatgctagtgttttttagagcctttttgacccataagttcgctaatgcttgaaagttcccaaatttttcctaagagaacaagaaatagtgaaaaagtgatgatcttggtggtttttcctttttcacttccttatatcgagaaagactttgtttttggtttgattgaaatctgttttggtaacttctagttccatgtaatgacatttatggtgaattttgattttggagttttggtgttaggggttttgttacggtttttgcagagcctttttgactcgtaagatcgctaatgcttgaaagcttctgactttttttcctaagagaccaataatcaatgcaaaagtgatgctcatggtgttttttacttccttataatgattttgtttttggtttgattgaaatctgctctggcaacttttagttccctgtaattacatttatagtgaatttgttctttgatactttatttccatatatacattgtaggctaagagaatccctaaaatttctatttcaggaggtggtcaagaagaagatc

SEQ ID NO: 2686 - DNA, 655 bp, Arabidopsis thaliana
  Intron number 1 from transcript AT2G17442.2 (locus AT2G174 42) derived from phytozome v7.0 (chr-ID Chr2; pos 7575170 to 7575824 reverse strand)
agcatctcctcgtcgatctcgcattggtcttctaggtcttacccatttttcctttcttacattcaatgccgtttctctgtttgtttctcttctttctgtctgattttgttgtcagggtttttgttattagggtttatgctagtgttttttagagcctttttgacccataagttcgctaatgcttgaaagttcccaaatttttcctaagagaacaagaaatagtgaaaaagtgatgatcttggtggtttttcctttttcacttccttatatcgagaaagactttgtttttggtttgattgaaatctgttttggtaacttctagttccatgtaatgacatttatggtgaattttgattttggagttttggtgttaggggttttgttacggtttttgcagagcctttttgactcgtaagatcgctaatgcttgaaagcttctgactttttttcctaagagaccaataatcaatgcaaaagtgatgctcatggtgttttttacttccttataatgattttgtttttggtttgattgaaatctgctctggcaacttttagttccctgtaattacatttatagtgaatttgttctttgatactttatttccatatatacattgtaggctaagagaatccctaaaatttctatttcaggagg

SEQ ID NO: 2687 - DNA, 649 bp, Arabidopsis thaliana
  Intron number 1 from transcript AT2G17950.1 (locus AT2G179 50) derived from phytozome v7.0 (chr-ID Chr2; pos 7809562 to 7810210 reverse strand)
tcatcataacaagccatatcccagcttcaataacggtgactaatctctcttatacatgcttttttatgaatttattcaggtggttttttataattactaagagaaccatttacaccactagctattacatgaattagcacacacaaaaaaaaaaaaactaacaagatctacatatatgactttgatagatatatgtatatgttaattgttaaaaagattttaaaaaatgctgttgatttatgaatttattcagatggttttgatttaaaaatctaaaatatatattataggaacatgttacacaccatctattattacatgaattagtaaaaataattaaacccaagaagatgttatgtacatgtaatgacgtatatttgaagttatggatcttgattggggcaaaccaaatttgcatctaaagaacggtttctttgttgtgtaatggaaactagactcacgtgcattttattttcatttgtgacttgtaacacaattagggatttgggttagtagaaaaaaaatcactaattttatgtctctttcttcattcttttcccctgtatatagtatggtctggattctggaatcacaacatatatgatcactgatgatacgtatattaatatgtttgaagggaatttaaatc

SEQ ID NO: 2688 - DNA, 747 bp, Arabidopsis thaliana
  Intron number 2 from transcript AT2G18060.1 (locus AT2G180 60) derived from phytozome v7.0 (chr-ID Chr2; pos 7849051 to 7849797 reverse strand)
caccgccccaggtacttgtgtttctactttggtggggacaaaacatttttgttttaattagggcttcttgtctcttgggctctttcgtgaggcacatgctaacttttaggtgaaagtccattaatacttatattcaatcagaaaaaagaaagtaaaagtctctcctaaactagtatcaaatttcagtctcacgtcaatttttattataaatattttgaccattgcagaattttacagttttccactaaccaaaaacagaaaagttcaatcacatttccttttgaagtagtaaacatgtaaacttttgtctcgtttataacaattataaattatttaatcccttttgtagtaatctttcgcatatatatttgtacgctagcaatttcctctatagaaaatgatctatatatgtttgtagtatatattgtttatgattatagttgtgcttgttttttcaatatcttaaagtcaataaagttcaaaagtgaaactctattagattgcatgagtatgtacctatacatttcactagctttcttatttttggtctcacacttttcaagcatgtccttatgtgtgtttcactaaaatctaactgccttttctccatctttttgtttgcattggccttatgtattatatgattctttaccaatttttgaaacatcaattcaagccaaagattctatttacatgtcatgtcttcttatgatcatttttgtgcatatatgtgttttaggaagaagg

SEQ ID NO: 2689 - DNA, 377 bp, Arabidopsis thaliana
  Intron number 1 from transcript AT2G18170.1 (locus AT2G181 70) derived from phytozome v7.0 (chr-ID Chr2; pos 7909375 to 7909751 reverse strand)
aacaacgactcgggttctgtaaattcagttattgggtatgttcgatctcttgttctgtttcttctctttattcatttagcttgttttaactcttaatttttgagttttgattatgattaatcaagagttatcatattaaaaagagaatttttataaccaaagtttgcttttttcttatggagtagtaagattgatagctaagtaaaggaaacgatattaaaaagagaatttttcttagttgaatttcactttttggagacgtaaaggagaaaaaagcttcaatgattcataaatcgaaaattctctataaacccttttccaaaatcttaccaatttaggggaaaaatactgaaagttttggtttttgcagagagaaa

SEQ ID NO: 2690 - DNA, 685 bp, Arabidopsis thaliana
  Intron number 1 from transcript AT2G18230.1 (locus AT2G182 30) derived from phytozome v7.0 (chr-ID Chr2; pos 7933561 to 7934245 reverse strand)
cttcggtttcgcgattgaagcttgagatttcatctgtaagatcatcttcttcttcttctctcgtttctttttttccttcgaaatccgtcgattaggtcatttttagtttatcttctcctgttaatggtacttgttttgatcacttcttgttgaatcgaagcgatttcgtttgattttgctattttcttgttggtttcgtttcgttttgagcgccgagtacttggattggtcttcacagatgatcgattcgtcgattatctttcatttgtttggattagttctgtttttcgattctatttcagtttccaattgatgtagcttagactagttggtgatttgagtgttttgatgtgtatttacatgaaatcgatgatggatctatgttcttcgcatatctctgatactttagcctttcgcgttgttagatatttgcctaagatgatattgagttgcattagaacagtgaaccatcgtagaaatgtgtgcttcatttctctgctcggatttgaacagtcattttttatggtttataagattggattctgctggaatgttgaaggatttgtctggtggttattgtatgaaatggttaagtagtgagaataatttatatggcctgttttgagtttggtatatgattgaatgagactctccttttgtttgcatattatagtgaacatccgat

SEQ ID NO: 2691 - DNA, 698 bp, Arabidopsis thaliana
  Intron number 2 from transcript AT2G18245.1 (locus AT2G182 45) derived from phytozome v7.0 (chr-ID Chr2; pos 7938168 to 7938865)
ttgactcgggaggagcagatcctcttgatactaaggtttgttctctctttcatgtaaccaagagttttaaatgctattcaatggtttctccactgcttcaagatcttgtattggaagtggaaatgtcaatattgttgtgaagtgaaaaattctatttgagctatgttgtcctctttttcaataatgattcattttatgctagtgtgaaagctttgctagtttgagttctatgttgaagaactttgtatcgattacaagcatttgcagaaccatggctaggggacttttgattttgatatctaagcaattagctttgtagatagataactcagtacttagaaaagactatatagctatgagttaaaaccgctgatttcttttggttacgtagccatcactcacaggtttatagtacatcggcctatatatcttgtgaatgtgatcttgttctcttgcaagatatgatgtcttaggcatgtgaacaagataaaatgagcttcatagtatgtgcctgagtttgttctgaagccccttttgttgaaaattgcttaatcattgcgtagtcctaataagccatcataatcattcatcttgcataagattagcaatgcgtacacctgtgcagattttatagatcaacaattgaattctgttcttttgcagatttgggcagcggggtttaccgcggctatactgaa

SEQ ID NO: 2692 - DNA, 712 bp, Arabidopsis thaliana
  Intron number 2 from transcript AT2G18320.1 (locus AT2G183 20) derived from phytozome v7.0 (chr-ID Chr2; pos 7956629 to 7957340)
aatatagcacaaagtcattactttcaatctacatagttggaccaaattgaatcaactttataacattggctgcattaatgatttttttcctaaaaaatacaagtcatgatataattcttaaggtttctcacatctaagatgtatctgtctaacaatattaagttgtttctttttgataaaaagttttctaatttgtttactgataatatcaaacagaaccgttgtaataacaatatcgatgccagtaacaaaagcttatatgtttttttgttatgtgtaacagtctgatacacaaatagattacttttttttcagtgttttcacgtccaattcggaccctccagttcgaccggttaacccacaatccaaacacttctctggtttgggttaagtattaataaccggaaatacttactattggactcaagaaagaatgaaagggtgtgatccatttcaaaccccatatttcttaatatgttttgattttacagcagagagatttggacaggttcttcctctgccatttcagcatcatgaggatgataacaataatgaaactctatcttgcgttaaagaagagaaactctcggtgttatatcaatccctgtgatagagatttggattataactaagattgagccctaagtggtgttgtggacccccttcttaaaagttgatatagaaccactcactgttcttgattttcagtttt

SEQ ID NO: 2693 - DNA, 493 bp, Arabidopsis thaliana
  Intron number 1 from transcript AT2G18370.1 (locus AT2G183 70) derived from phytozome v7.0 (chr-ID Chr2; pos 7981003 to 7981495)
cttctcctactgtcgactgcactacgtacgttttgaatgatatgatcgtgtctgattgttttagttgtctagtgtcttgtgttttagttcaactttatatagaaactaacaagcattaaagtttgagatactatctttatagtgaagaacttaaggtgaacataatgttaacgaatataattatatttgaaacttttatctgttgttatgactaatttcctgatttatctatttaaaaaaaaatactaactctaggtagtataagaatagattaaacaaatgatagtttactttgtttaccataactttgtttagaacaatatgcttttactcaattttgatataatttgtatctcttatgcacttataatatttaacatttttgaattttgtctgtttaatttaaattctaaactttataaaagctgaaataaataatacattgttgattttgtttttgcagtgttggttgagaaattctcaacattgatca

SEQ ID NO: 2694 - DNA, 719 bp, Arabidopsis thaliana
  Intron number 1 from transcript AT2G18915.1 (locus AT2G189 15) derived from phytozome v7.0 (chr-ID Chr2; pos 8196337 to 8197055 reverse strand)
gattgttactggttatcgagctgaagaagttattggtcgaaattggtgagtttgctcttcttgacttttaccctaaatttgtggtgttgattttgttttactgtagcgaattttgtctcatttgtggtattggtacgatgttactagaaagctttgttgaaagctgttttgacagaaagaaatttatatttcgattcattattatggttcttgttgattatgttaggtattattagctagaaccattttggaatcatgggttggttattgaattagaagtttgttgtggaggaactaagctataatgtgaggttcagtttgtaatgtttcctatgtctgtggattagtgtttaggaactcgaactttgatagtttttcacatgtcttgattggtttatgaaagccttgggattattgatttttgtaatattgaattgtaatgcgtttttgtctaagtatatatgtttctgttgaatatgtttctcttgggttttagcggcttttgatctggtattccatgttaattatgcatatagtttagtctttgttcaatacttgtgtgtgaggaattgttcgccaaagtactgtatctgtttagttgttagttatctattcgatgaattgaataggagggtcttgtatctgatttgtgctgttgttttttatttggcagccgtttcttgcaatgtagagggccatttactaaaagaaggcatcca

SEQ ID NO: 2695 - DNA, 675 bp, Arabidopsis thaliana
  Intron number 1 from transcript AT2G18915.2 (locus AT2G189 15) derived from phytozome v7.0 (chr-ID Chr2; pos 8196371 to 8197045 reverse strand)
ggttatcgagctgaagaagttattggtcgaaattggtgagtttgctcttcttgacttttaccctaaatttgtggtgttgattttgttttactgtagcgaattttgtctcatttgtggtattggtacgatgttactagaaagctttgttgaaagctgttttgacagaaagaaatttatatttcgattcattattatggttcttgttgattatgttaggtattattagctagaaccattttggaatcatgggttggttattgaattagaagtttgttgtggaggaactaagctataatgtgaggttcagtttgtaatgtttcctatgtctgtggattagtgtttaggaactcgaactttgatagtttttcacatgtcttgattggtttatgaaagccttgggattattgatttttgtaatattgaattgtaatgcgtttttgtctaagtatatatgtttctgttgaatatgtttctcttgggttttagcggcttttgatctggtattccatgttaattatgcatatagtttagtctttgttcaatacttgtgtgtgaggaattgttcgccaaagtactgtatctgtttagttgttagttatctattcgatgaattgaataggagggtcttgtatctgatttgtgctgttgttttttatttggcagccgtttcttgca

SEQ ID NO: 2696 - DNA, 518 bp, Arabidopsis thaliana
  Intron number 1 from transcript AT2G19050.1 (locus AT2G190 50) derived from phytozome v7.0 (chr-ID Chr2; pos 8253636 to 8254153)
gtcgtaacattcctgacattatcggttagtctcccagattttgtttatctttttgccaataattttatggataaaagagtgaatataaactacgaaaaagaaagagtttttaagaatatattgtatcacaatgtttcctttgcgctgtttgaagttttgaatgtaggtattatttgtttttagctaatgtatcaaatgaatacatgaaaaatggaagaaattaaagttttgatcggtaaaacatatatagaacttagttataaagaaaaagtagtcataaaatgccacttaaaacattatatacgtttgaataatttgtcctttcttttttgtcaaaagaataatttgtccttatttcagctaaactaatgagatatataagaactaacgaaattaaagttttttcatgtttgaaattaaagaagtaactaaagtttctcaagttggttcttatatgtttaccgaaacattgtatgagatacgagtttgaataatttgtcttcatttcagctgagcta

SEQ ID NO: 2697 - DNA, 468 bp, Arabidopsis thaliana
  Intron number 1 from transcript AT2G19070.1 (locus AT2G190 70) derived from phytozome v7.0 (chr-ID Chr2; pos 8260562 to 8261029 reverse strand)
tgctactcttgacgtggtcgcagcaagcacctcaggtacgtgttttttctttcttttctattactatccatagaaattttgtttgttttgtgaatttgaatacacttcttcaaaatttaatttagtcctctaaacaaaaattatgattttgttcattacttttatattccaattatatatattatttatttattaatttttttcaattcaaaaatattacaaaatattgtaatttgtttatcttagaattcgtgtcaaaagaccgtcaaaacgactcttttatgaaactgatggattatcattaatttctactattgctgaacaattaaaattatctgaagaacttggatatatgaaacttttcttggttgcttttcatccacgtaaatgtaggttagtacgtactgattctacaatgcaaagtctgtttcgataattttgttatgcatataggtgaactgatatcga

SEQ ID NO: 2698 - DNA, 737 bp, Arabidopsis thaliana
  Intron number 1 from transcript AT2G19170.1 (locus AT2G191 70) derived from phytozome v7.0 (chr-ID Chr2; pos 8317639 to 8318375 reverse strand)
tgtgtgtgttctctgttccgtctcgtgaagcaaatgtaagttcgtacaacattattggctttttggatttactctattgaaactgctactggttctttctttctaaaaggatctttctttttgggttttatttgatgtttgattctttgcttggatgatttgtgaaagtgggttattcttacttagtcttgatactttttctttgattttggtgattttcattttggtttaagagagtagaagattctttcttctttgtttgtctcattaattgaagagcaatagtggttataatgtacttactggtttgctttttatataaatggtataagatggagctgaactttctttacttgattgttgtgtttagtcaaatttctctggagtaagttcttggtcttcaagctgtgatttgagtttcaagttcttttctttggtgttggttggattttggttactgctcttatgtgtttggttcttgttctttgtttttggtggttcttgtgtacttggccttggagatgattcttgcgtttctctatacactagtttgattatgcgttgtctgcattttgtgggaaagcttgatccttttagaccaaaagtaactatgtccttgttagctctgagaagtgtgtatgagattagatgatctatctggtctgagggagctaatgcattcatttgattttgatgctgcagttgaatctacagcaagaaattaaagttggagcttc

SEQ ID NO: 2699 - DNA, 951 bp, Arabidopsis thaliana
  Intron number 1 from transcript AT2G19260.1 (locus AT2G192 60) derived from phytozome v7.0 (chr-ID Chr2; pos 8356271 to 8357221)
ggattttgctcttgtgtatcttcgtagtccatctggtaaatgcgagattgttcttcttgttacgaaattgtttgtttgtgtatcgctgttcattgtattgtttgttgttttgtactggatttggctgtgctttgtgaggtatatgaaggtttctgcaattactggaattggattttggtgtttagtctccgatggtttgattgtgttctagggttttcataagaacggaagtctgttttgttgtgaatttctcagaaaggtaaaatttgttcagagattgttgagattaagacttgaattttagcataggaagagaaatttatgtctagcttgaatctaggttgaagggtgcatggtgctttaaacgactgaaagattaagatttctcagagattgagacttgaattttagaataggaagagaaatttgcttacttcacaaacgttttgtgcaacctggatttaagatgatatagatatgtagcttgaatctaggttgaagggcgcatgggtttccagattcgagtcactttagatccgaatttttgtagttttctaaacttgggtgctgaatttggatctgaatagcatccaagaacatcctggattactaacttactgaggattaaaggtttttctgaatggaaagtttgcattttatcactagttaggaatccgatttgtttttctcagtgagacttggagatgatgagaacagtatgtgtccgcttaatgcagtaccacaaaattattcaatcacgaatcaggagagcaaccttttgagcgcctgataagttactggagttagtttaaaacaatgggtgaaattgatccaaattagtgatcagaagataacttactgtttcttcgttatggtactcatggacttggttttcttgcattttgactctgttccatgttttgctttcgacatttaggtgatcagaaggat

SEQ ID NO: 2700 - DNA, 946 bp, Arabidopsis thaliana
  Intron number 1 from transcript AT2G19290.1 (locus AT2G192 90) derived from phytozome v7.0 (chr-ID Chr2; pos 8365979 to 8366924 reverse strand)
agagggtggttcttttgggtttggaggagatagatgtgagtttagtttacctttctatactctgccattgttaactttgttttgtcttgttgcaaaatttatttggagttgttggtagggtctcttacatttgatttatgaattttaaatcatttgcttgtaggagaattctactagaaaacatataggtaagccggagagaaaatagaataggatttgcagattgtctcttgtttgggctttcattgtgtagttttgctgcattatttatttgtgtaggaattgagccacttgatatcttacgaaatatattgtagaaaagacttgaaaattttgtatattatgttttaaatgcagtctttgttcacatttgtcttgcagccgacaacatcttcatcaaaagggaatttgtcaaagcttcacaaggaagcatcaaatcactgcagttacggatgatgatttgctgatacggtacatgaagttgtctctaggtagagagtatattgactgatacacaagctaaatacagatggtgatttgctgatattgtacattaagttgtctctaggtataaagtatattgactgatacacaagttaaatacatatggtgatatgttgatattgtttcttccaaatttgctaaagaaatattttctgtaactcaatgtgtgatttttttttcatttactatgttcctcgattcaagctttgaatgggtaaaggaacaatactaattaacaagagacatatattcgatattacaataggactcaaaaatgcaaaggacttttgattatcgaagtgcatacctcagtcattacaaattaacatattttcgatagttcctggcatatcacaatgtttacactgcctgaaagggctgctactacttgtctgtatctgtctcagacaccccagcatcagtggaataccaaccagctgtc

SEQ ID NO: 2701 - DNA, 916 bp, Arabidopsis thaliana
  Intron number 1 from transcript AT2G19340.1 (locus AT2G193 40) derived from phytozome v7.0 (chr-ID Chr2; pos 8374403 to 8375318 reverse strand)
agtatgctctttatccgtattaagattcctggttatctttattagcttttagattatgtgtaatgggaacttgacttataagagtagtgatcacttgaaaagttgtgtcttttttagtgttcgaactcagttccgtagtcaccaatttgaagcatgtctctttggatttgaattaaagtcctagtaattattgttcaattgagttctctttgcctcattgtgcaaattctatagtcagaagtcaagaaaagttgagatctttaagtggattcgtgtgccggacttcaatcttcagacagacttaacttgtagtagaggaactaggagtttgtaaagtgaaaatattctcctttggctatgaattgagttttgatacttagttatatgacgtacattgttttgaattttgatcatcaaactatatgtgaaattgaagagaggaataaagattgttgattcctctcagcaattgtcagagtatgtaactgagtgagttctagacggttaaagaatgtgaggccttgtatgttaggttttaagtattgctttctttgtctgtataaatcttaagtcttttgcttatagctaaaggatcaggcagagaagggggtaggttttctgaaagaacaaactttattcgtgaacaaaatttggtgtgtatagaaatagtcaaatagggacctggtgcaagcatagatatgaaaaaaacaagaattctagaatctgatgaacatattgaaatactctttacacattttttgatgctactattaaaatgatagacaaaattggattgttttggccttgatgctacagaggtgtacatggcttataggaatgtgaaaactcttggctgttgtctgttttatctgctgaaataggttcttggagaaaagagacgacgtggagagaacat

SEQ ID NO: 2702 - DNA, 706 bp, Arabidopsis thaliana
  Intron number 1 from transcript AT2G19620.1 (locus AT2G196 20) derived from phytozome v7.0 (chr-ID Chr2; pos 8487894 to 8488599 reverse strand)
gtggcaaggtttgtttacgctttgagctaccaaattttcttccttttctccttttgtcttcactcttaggcactaagaacagtcacatttcgttttcttccttctgggttattactttcccgaaatagcatctaattagctccctgatttctaaaatctagcttcagtttcgtgattgaaatcaattttgtctattgtgttcttgattttagtttgtatgcttaatttacttactagttgggagattaatactacttcattgataccgaaaagttgtttcactttgtcatctgaaatttacaagttgggtgtttcttttagtttgattctttgttcttcttgcctaaaaggtccaagagattcccttgaaaatggtatcttttattggctccatgattgatatataatgtctgactttttttagccataagttatctcttcgtactgatttttctgagtcattgcacatgggagaatctcttgaggtccttaatattttttgttgtctggaacaaagttggaatgttccttttcttagctgtatccgatttaaagaacacaaattaaaaatgttgagttgattttggatgaacactaatggtgaggatatgagaatgaagcatgtggtattgtttatatttttctcttaatttggatgtagactgattcgtttcttgcttattttcttatctcttgcaggagcatc

SEQ ID NO: 2703 - DNA, 436 bp, Arabidopsis thaliana
  Intron number 1 from transcript AT2G19790.1 (locus AT2G197 90) derived from phytozome v7.0 (chr-ID Chr2; pos 8527421 to 8527856)
cctcgctcgcaacgaccaacaggtcccttcctcactcttttcttcaatttctattagatcgctcctgattctcctccgatctcgtctcattgatatctattttgatctccttagttttgatatttttggattcttagatgatctggatatggatcgatcgggcattaggtttattacttctcgataaatttgggaatcgaagtaattttgttggaaatctagattgatacatagccgattttgggaaatttcgtagcggtgatgcataaatcaccgaccattggctaattggattcaaactaatttagtatcattgatcctaattacattaaggtctttgttaattctgtttagcttacggcatctgactaaatttttctgcatttgctcttaataaacagtgttcgtttgtcgagcatcgcaactacaagatagt

SEQ ID NO: 2704 - DNA, 838 bp, Arabidopsis thaliana
  Intron number 1 from transcript AT2G19860.1 (locus AT2G198 60) derived from phytozome v7.0 (chr-ID Chr2; pos 8571058 to 8571895)
cttattagctacgttgataatcttccttctgggtatttttctcttcttcttcttcttcttccttattaattttgtgattttggatttttaaaaatggataaagtttagatttttgagcgattttatctgaattcagatttaagaaacctgaattggataaatcgttcccacgtttatccgattttgtttctttttggataatgtcatctgtgaaagtttcttgctttatgatttatttggaattcgattttacttgtttgattgtcactcaagagaattggataaaatttgagaattttgtgggattttatctgaattaagattaataaaatggattaatctttgtcacgtttatttaattttgtctttttttttttgttggataatgttatctgagaaagtttcatgctttatgattcatttggaattcgattttgatggtttgattgtccatcattcatggaatctaaatctttactttgaatcataatctctcttgaaattgggaattttgtgaaaattgtcatgccaaagtcaatagaatcggagcagaacatagttgatatagcttttgatgtctcactgttccaaagcttggcttcttttactttcatggaacttaaagagttttttctttgttatcttttgtttgtcatgttctttgtaggagcgagcccatatgtctttataagaggatttaatgtaactttttgggtgaatcattgagtgtactttttctgtgtagttgtttgtttgttttttgagttctgatgctaaattccgttgtaaaatttgagttgtgtgattggttttaatgcttggtatcaatttgacaggg

SEQ ID NO: 2705 - DNA, 396 bp, Arabidopsis thaliana
  Intron number 2 from transcript AT2G19940.2 (locus AT2G199 40) derived from phytozome v7.0 (chr-ID Chr2; pos 8613482 to 8613877)
gtcttcttggtgcaagtggctacactggtgctgaggtttgtgcaatgttgaatctgtctgtttcaagtttaattttcttggaattgtttgttttagtgatctctttggttttgcaatgaatcagagcttaagtggtatgcatcttgttgcaagtttttgactttttgggtattggccttctaatttagcttaagctgtaaacatatgcaaagttaatcttttctcgataaaaggaagagaaaagtcttatagtcgttgctttaaagttgtttaaaattacaagggaaagaatggatgaggcattcaaggtttcattcaaacccatgagatggtaagtttactcttctttattgaattgcagatcgttaggcttcttgcaaatcatccgcatttcca

SEQ ID NO: 2706 - DNA, 771 bp, Arabidopsis thaliana
  Intron number 1 from transcript AT2G20080.2 (locus AT2G200 80) derived from phytozome v7.0 (chr-ID Chr2; pos 8663769 to 8664539 reverse strand)
gcttcaacagttataacccttctttgtatcctcaggtaacatatacaaacacttctttacataaccgagattccgatccgaaagcatccaaattaattaagacacgatatatatgtgtataatgaaccattaagaccccataagttggttaagacatatgtacgtatattctgatcgagttcttaggttttgcttttgtcgggtcatcgcctatgtttgttgtaaagttcacgaggctagtttccactcatttcctaagctatatacttcagaatatttagattttatgaaataagtttgactaaatttctctaattatctatctaaatcaaatattttcaagagtataagtaattttatattaattaaatcttcgtatacaaatttgagtataggaggatgtgaggatgcaaggaggatattcatccataccatcacaatcttcggctccttatggtttctatccaaatatgatggtatagattttccttttaatgatgtatattgttctttttaagtatcatatataggttcgtgtatataaagaataactgacttggatccatcctctaacttaaatctaattatatatttactttttattttaagtataccatcttaataggggaaagaaatcttctacaagataaggtcgatcatgtttccatatttaacaaacacatttcaaagaatctgaaataaaagaaaaaaaatcttaacaaaaggaaaaataccaactattcatttttttattttttttgctcttcgcag

SEQ ID NO: 2707 - DNA, 310 bp, Arabidopsis thaliana
  Intron number 3 from transcript AT2G20190.1 (locus AT2G201 90) derived from phytozome v7.0 (chr-ID Chr2; pos 8717825 to 8718134 reverse strand)
aagcagttagggaagctgctattttgtgcattgaggtaaattttgtaccatccttgttctcaactactaaagtgatttagactttaaacatcaaggcagagtctcacacccaattgtatactctcgacttccataattatgactgagatagttagtagtgaactcaatcaattttgagtgcagtttgagcaaagaatttcactttatcagtagggatttgtctgtgtttttagagaattcgtagaattcagaattcagatgttctacttcgtgtttgatattaatatcataattctgtttttctcaggag

SEQ ID NO: 2708 - DNA, 702 bp, Arabidopsis thaliana
  Intron number 2 from transcript AT2G20390.2 (locus AT2G203 90) derived from phytozome v7.0 (chr-ID Chr2; pos 8796949 to 8797650 reverse strand)
tagcaggtaatctcccatcacatattcgtttcatcaaaaatgcatttatctttccattgaagtttagctattgcaatagacatactatgtgtgtaaccttcactgatagttgaattgtgaatcgattcggagtcttgacaaggctttattagcaagagactcgtttggacaacaggtttagataatgtttaaaccattttgttgaagtggtggctgagaccatcaattctttgaccatattttgttatcaatgggttggggtttaaaggatcaacttcgaaagacaacaaacgaaactcaaattctcctgctagtgatacatgtacgtgaattgatgctgtctccatatttcgattttggcttcaagctttagtgaaactggttaagcaaacgaagagaaagatgtgtagtctggtagtctatcttgtgcttgtgccgccactttacaaagtaatgatacttcttctacctgtcctcgttaggaatcgagtgaaaagtcagccgtaatatccagaacaaacatattttttttggatttctatacgcaccattttgttatttgttgtccattctgtcatgaatttctctatgatcttctccttgtatcatcaaatcaataacatggacatgattttcaagaatgtagtatctgcattggcgattactcaaaaagtctttgtatgcttaattttcagcaaggcg

SEQ ID NO: 2709 - DNA, 314 bp, Arabidopsis thaliana
  Intron number 1 from transcript AT2G20430.1 (locus AT2G204 30) derived from phytozome v7.0 (chr-ID Chr2; pos 8809430 to 8809743 reverse strand)
cttgaaagggctccgatacatttctcaagtatttggtaagttcaccctatagatctcttgtttaatttcttctgatttttgttcgcataagagtttatacatatgataaatccttttttccttatataaaaactcgaacttcatgatcagttttgaattactatgatgcaaatcacgtagaaaatttgcatgcatgcattgcaagtacgtttatatggattgaggatgaatctaaatgattgattatactttcttgtttctttcttttaatgatgatagaaagtgaaaaagaagaagaaatacaaatcggaaat

SEQ ID NO: 2710 - DNA, 828 bp, Arabidopsis thaliana
  Intron number 2 from transcript AT2G20585.2 (locus AT2G205 85) derived from phytozome v7.0 (chr-ID Chr2; pos 8865765 to 8866592)
gctggctctctgacggtactttctcacatccttcaattttgtaatgcttgaataatggcttaaatatgtactaaatattgagtggagatatgctttgtttgattgatgaaatgtgtttgagagctgtttctgtattggctttctagattgttgtattagacataggtagagaactagtttagattttgccatttaagaagctttctcgatcagtgtagattctttttggttgttgctatggcgaaaaactggatcagttgttgttgtctttctgcttaacgttgtaaagagatagcggctcaattggtctagtttttcgatcttgtaggctgacacaagtgtagatggagacaacgaagccaagatctgggttttcatgcaaataatataaacgattagaacgggtttcaggcaataagataggctttagatacacatcaagcaatggttgatgctgcattgtgttttaaaagaactggttcttacatatcttcttaaaaaaaatacatgtacccggaaacgtgtcttcttttcttgttggttatagcatttgagttattactgattggtcttatactcccagcttgcaatgatgatgtgtgatgagttagccagaggaacaatgaagctacagtttatgtacaaaacctctaccttttaaagccttcttctttagaaaaacttaggaacgaaaaccctcttaattttgtttctgagtttcttggagagcttttctttgttttcagcctattaagtaagacatgttgtattggttggacgagtaactgatgtttggtataatttatcagcttgcaaagaggacttttg

SEQ ID NO: 2711 - DNA, 589 bp, Arabidopsis thaliana
  Intron number 2 from transcript AT2G20585.1 (locus AT2G205 85) derived from phytozome v7.0 (chr-ID Chr2; pos 8865765 to 8866353)
gctggctctctgacggtactttctcacatccttcaattttgtaatgcttgaataatggcttaaatatgtactaaatattgagtggagatatgctttgtttgattgatgaaatgtgtttgagagctgtttctgtattggctttctagattgttgtattagacataggtagagaactagtttagattttgccatttaagaagctttctcgatcagtgtagattctttttggttgttgctatggcgaaaaactggatcagttgttgttgtctttctgcttaacgttgtaaagagatagcggctcaattggtctagtttttcgatcttgtaggctgacacaagtgtagatggagacaacgaagccaagatctgggttttcatgcaaataatataaacgattagaacgggtttcaggcaataagataggctttagatacacatcaagcaatggttgatgctgcattgtgttttaaaagaactggttcttacatatcttcttaaaaaaaatacatgtacccggaaacgtgtcttcttttcttgttggttatagcatttgagttattactgattggtcttatactcccagcttgca

SEQ ID NO: 2712 - DNA, 292 bp, Arabidopsis thaliana
  Intron number 2 from transcript AT2G20680.1 (locus AT2G206 80) derived from phytozome v7.0 (chr-ID Chr2; pos 8921876 to 8922167)
catctatccgcagatacttcaagaattatctcacggtatgttttttttaatcttatttcttttctatgtgaagatggatgtgttagtcttgatcatcatagttgaattagatactgaattcagaaactttgttctcgcttgaccggtagacttggataagtttccgcacaaaagcttttcttcacttataggctttgatttttcatggttgtgtaattgatgttgagcttgtaattactctcattttcatatgccaggtgctgctgacccgtaaaaactctttaaccgggat

SEQ ID NO: 2713 - DNA, 275 bp, Arabidopsis thaliana
  Intron number 2 from transcript AT2G20750.1 (locus AT2G207 50) derived from phytozome v7.0 (chr-ID Chr2; pos 8941746 to 8942020)
cgcaaccgtggcctattaaacatcctctaccgccggtacctcttcgcgctatcttattattttatttgactactatatgctaacgaacaaataatgagtacatttaaatggttttttcttacattgggaggagtaaacaaataaagaaactttaacggcgttcttgttttttatcgatggtcccatattttgagctttgactacacataaacacaaacacacatatggatctctgacacacttgcacttgtttgttttttgcaaaacagaacggc

SEQ ID NO: 2714 - DNA, 432 bp, Arabidopsis thaliana
  Intron number 1 from transcript AT2G20800.1 (locus AT2G208 00) derived from phytozome v7.0 (chr-ID Chr2; pos 8955214 to 8955645 reverse strand)
tctacttccaagattcttcttctcagcactttcaggtctctccttattctcctttagatctccttcaccattctacacttcttcttcttcttcttcttcttcttattcttcttttagctgtagaatctatataactcttttgtttccaattctctttatagatgctttgactgttttcttagtatttttagtcttgtgatgtttttgaccactcctatgcacgtgtccgaatttttcgcttgtcctcttttggcctcttccctagctgtgatgcatgatataatgcataccatctctataagcttcatacctttttcgactcagatctatgttttttttaagtaacgtgggtctaacaattattttggtttgtgtctttttatgtattgttgtccagtggtggtggtggtgtactggtgtattcagactcga

SEQ ID NO: 2715 - DNA, 506 bp, Arabidopsis thaliana
  Intron number 1 from transcript AT2G21240.2 (locus AT2G212 40) derived from phytozome v7.0 (chr-ID Chr2; pos 9102490 to 9102995 reverse strand)
tttgcccagattttttccagaagctcatcgaattcgtaagctttcgcgccttttcctctctttaatttatttgttaatcaattttgaatgtgttgtatctctagggtttataatttcagtttcacccttgttttctattgtttcgcggaataatctcttgtcatggaaggtttagattgattcgacctttttgatcttgacctaatttattccaattttcgtaaaattgttccttaagacctgtttctctgactagctcagattgattttggtatctgaatcaattgcggaaccctaactggcagatcaattcgagaagttttgattttgtttgaagatagtgaattgcgagttcagtgtgctaatatctgcttgtaattcttactcttcaattgttttcatagatcgaatcacaatgtttgaaatttggtttcactgttgctgagtgtgtttggaggagaagcttgattggttcggtgtttcactgtttgaagattataagagtt

SEQ ID NO: 2716 - DNA, 415 bp, Arabidopsis thaliana
  Intron number 1 from transcript AT2G21240.1 (locus AT2G212 40) derived from phytozome v7.0 (chr-ID Chr2; pos 9102581 to 9102995 reverse strand)
tttgcccagattttttccagaagctcatcgaattcgtaagctttcgcgccttttcctctctttaatttatttgttaatcaattttgaatgtgttgtatctctagggtttataatttcagtttcacccttgttttctattgtttcgcggaataatctcttgtcatggaaggtttagattgattcgacctttttgatcttgacctaatttattccaattttcgtaaaattgttccttaagacctgtttctctgactagctcagattgattttggtatctgaatcaattgcggaaccctaactggcagatcaattcgagaagttttgattttgtttgaagatagtgaattgcgagttcagtgtgctaatatctgcttgtaattcttactcttcaattgttttcatagatcgaatcaca

SEQ ID NO: 2717 - DNA, 697 bp, Arabidopsis thaliana
  Intron number 1 from transcript AT2G21400.1 (locus AT2G214 00) derived from phytozome v7.0 (chr-ID Chr2; pos 9158554 to 9159250)
ccaatcgcaaccgctctctactagtatcccaaaaggtatgagagagcaacaacaactttcaaattcttgtccttcatcaggttcttatctcctactcttatttaattatgctcatgtataagtgcatgttaatttttttctctcaccataaaacatctgaatttttggggtctttcaaatttcatttcatttctgagttaattgtatatgtcctaaagatagagaaatgagattttcggatctcatgaactttaaacaagacttgctagtaagtgcaaataagtacactacatattgatgtatccttgtgtgttgtgatgatgtttagtgatctatgtctatttttatatcaatcgataaggaattaggttttttcttctcctctattctcgatgttactatttgatcatgtaaaatgatcacaatcctgcttttgattttagatttttggtattcttttttgtattcttgatttttgaagtggattacgtagtaaatatataaacaaacgtctctagttatgatctttgacaaattgagaaatgtaggaatcttgttttttcactaattactttaatggcttacttaagaaaaataattgatgctaataaaattattagacaaacagacttatcgtgttgaaacattctttcctattttaggtgtacaaatccacactactcctggacattttccg

SEQ ID NO: 2718 - DNA, 539 bp, Arabidopsis thaliana
  Intron number 2 from transcript AT2G21470.2 (locus AT2G214 70) derived from phytozome v7.0 (chr-ID Chr2; pos 9198926 to 9199464)
ctcttgctctttctggattcgaggacattcatattgtaagtttctcaatttctttccactttttctgttttcgtgacttttagtattcttaacttgtgatttcttcttcttctctattgagattctgggtcacagacgaaagtttaagcatttcaaatctcctattgtgctactggatttgattggcatttagggttattgatgatttgagtaatttcaacatctttgagcttttagatcaagttaagtttgacttggaagatggaatcatatgtctctaggaggactctctgtttagctgtcttcgccaataggtttagtgtaatttctaagactagttaggctatttataatttggtgtgcatgaattgcttctgttttaattttcggattttgtagatttatgattgatgttttgtatcagaaaccatcggatttcacctgtgctcctactggatttctgtatgaatagagcagggacttataagattagtttgtaaccgtgattaagttactgaactcttgtgttacagattgac

SEQ ID NO: 2719 - DNA, 751 bp, Arabidopsis thaliana
  Intron number 1 from transcript AT2G21590.1 (locus AT2G215 90) derived from phytozome v7.0 (chr-ID Chr2; pos 9238611 to 9239361)
ataatcataatcagaaaaaagtgttaaactttctcgtgagtttatatactctgctaacaatgctgtttataatggtttttggttgtttcttaagtttctgtttaaatttcggattcttctatctggatcgttgttgttagcttctcaacatgtaaaaagtttctatcttttgaggttttttcattcccattatcgattttgcttctctgggtttagtttttaaccaatgtgcactagaaaaaaagttaatctttaggatatgttcttttagtttcatgatgaaaaattgaagcttcatagtataatgatccttaaagcctggtactcataaaaccattaatgttcaaattcaagcttcatagtaattttgagctttagagtattttgaaacttcaaagagttttgtgttttgagaatttcagggatctgtgtttgtgaaccatctgggtttgtggaaagttcgtagctttcgaggatttatctattgggtactctcaagaaatgtcttttagattttttttcagaatttttctggtcggtttcactttaacactttgcttagatttgaacaatgggtttggattattctattactaaatttgattatattattaagtaaatagtaactgaaacgctttgtgtgttattcactttacttgaagcttttattattcttctcagcaaatcgtatctgctattaactttccgaggtttctgttgtttcatttttgtgtgttttgcagctaaaaag

SEQ ID NO: 2720 - DNA, 298 bp, Arabidopsis thaliana
  Intron number 2 from transcript AT2G21590.2 (locus AT2G215 90) derived from phytozome v7.0 (chr-ID Chr2; pos 9239064 to 9239361)
ggaaagttcgtagctttcgaggatttatctattgggtactctcaagaaatgtcttttagattttttttcagaatttttctggtcggtttcactttaacactttgcttagatttgaacaatgggtttggattattctattactaaatttgattatattattaagtaaatagtaactgaaacgctttgtgtgttattcactttacttgaagcttttattattcttctcagcaaatcgtatctgctattaactttccgaggtttctgttgtttcatttttgtgtgttttgcagctaaaaag

SEQ ID NO: 2721 - DNA, 498 bp, Arabidopsis thaliana
  Intron number 1 from transcript AT2G21770.1 (locus AT2G217 70) derived from phytozome v7.0 (chr-ID Chr2; pos 9284883 to 9285380)
aattcgttctcattaacgccgacgacactgccagagtaagatttctcaattttgttttttttttcttttgagaaaaaaacaagaatgtatcttctgtttggatcgatctgggtttggagattgaatctgcgttttctaaaacagaagtctttatggaaatttcacctgcttttttgtctcgaaatattgcatgatttatacgtgtcggatatgatcaatgagacaaaagttagtgtcagtttcagactcatctccatgcggtttgtcagcttgttgagtatttaaattcgtttgtcatttgttgtggattccaagaagttgcatacacagtattgttaattaatggaaaaaagtttaaaactttatgaagttttgttaagatttagtatcaggagctttgttaaatgatataataagattgatcttgttttgttactatgaatgaatgtggcaatgtgtacagatacgatcagcagaagaactgagtgggcaaacttg

SEQ ID NO: 2722 - DNA, 447 bp, Arabidopsis thaliana
  Intron number 1 from transcript AT2G21870.2 (locus AT2G218 70) derived from phytozome v7.0 (chr-ID Chr2; pos 9322168 to 9322614 reverse strand)
cgtacgcttctcgttttctctccagatctaagcaggtatatactctctctccctcgatttttctgattctcttcttcgttctgtttgattccttttgttttcctcccatttctgggttttatgtgtttcgatgcgatggttagagtgagattatcgattttactgtatctctatcactgaatcacatcttagggtgtgccatttcaatatcgtagtcgaatttttgttatctttcgtacgatctcaatcggagagtttgttgaaatcaaatgataaatttgatggggtttttttctactcgttgttgatttctaatacagttcgaaatgataagatgatttgcaagaagtattcttttcatcaaaacttgttattgatccataatttttattatcttactctcattacgcagctacaggggggtctggtcattttgcagcagcaaca

SEQ ID NO: 2723 - DNA, 491 bp, Arabidopsis thaliana
  Intron number 1 from transcript AT2G22360.1 (locus AT2G223 60) derived from phytozome v7.0 (chr-ID Chr2; pos 9497671 to 9498161)
tctcggagctcttccgtcgtccaccattgattacggtaagattcaccttctcctactcaatttcataactatagataaataaatctctgtcttctctgcctctgttagtttttttctacgattgaaaccatcaaatcaattcaaggttttacacagtttcttatgcttgtcctgattgtttcgttcccggagagggagaaattacggcttttggaatccgcccagaaaatttcccgcccagctcggattttgatagaaatgttttgcctttttggtttctgtaaaattgatattcttattgtactttgattgaagtatgtgtgttcaattgaaattgatgttgtgtatttcttaagtttgaatctttgtgtaaggattgggggtttagggttttgactcatgattgctttctgcatttttaaagttaaaaagccagactttgaggcttagagctacttatattgtgttgcagggagtgtattgagctaaat

SEQ ID NO: 2724 - DNA, 414 bp, Arabidopsis thaliana
  Intron number 1 from transcript AT2G22690.1 (locus AT2G226 90) derived from phytozome v7.0 (chr-ID Chr2; pos 9650966 to 9651379 reverse strand)
tccgtttccggcgataatcttcatcgcttcttcaggttcatgtttttccagattctttgatgccttttatgtatctctgactctccacggtttcttaatatgaattcttcttcgcttcatttctgattcgcgatcgtcagattctctggtttgtttgaaattcgaatccgtgtgtctgatatttcgattcctggatcatttggtatgaataatcagaaaaaatgtttggtgttgcatctgatgcgttgattctgctactatgctatgagaatttgaattgcaatgaatcgattagatttaagaactcctctgaacaatgagttgattaatggagattatagtggttattgtggatatgattcttttggttattgatacttggttccttctttcatgtagttgattatctttaga

SEQ ID NO: 2725 - DNA, 412 bp, Arabidopsis thaliana
  Intron number 1 from transcript AT2G22750.1 (locus AT2G227 50) derived from phytozome v7.0 (chr-ID Chr2; pos 9672572 to 9672983)
tagctctttccgcgctaattcctggcctaaagaaggtacacatatgtaaaaataaatcttctcttcttcttcttgtttaataaagaggcgcataccaaccaaatgatagtgtagtcttttcttaaataattctattttgctaggcaagaaaccaattttcatggacagtattcactcttttcttatacccacaatgaaagttttgacttcagatctcccggttatgagactaaattatttgaccaggaccgactttgtgaaactcgaaatatactaaaacaaatcctctatatataagaattattacttttttacaaatcatttgcagttccggcttgaaggtttttcatttcgattaaatataaatatatttacatgctatatattgaaatatgcatctatgtcattatag

SEQ ID NO: 2726 - DNA, 334 bp, Arabidopsis thaliana
  Intron number 2 from transcript AT2G22942.1 (locus AT2G229 42) derived from phytozome v7.0 (chr-ID Chr2; pos 9763934 to 9764267 reverse strand)
tctatacccaaaatcctcctccgcgtgcacctaaagttaatccctaattatattcactagcacgaaccatcaagttacatgttatcatctacttattcttttatgttcgagttttacgtttaaacaattttgaaatgattgcgtaaaactcttactagttttacaaatctaaataagttaaattttatagtagtcgaagaatattgcatctatggagagtttggttctggcttttctaacaaaccaaactaaactaaatgcttgtgaaacataatgaaatgtttgaaggaaatgaagtagaatttaacaaatttgttttgtttgtttgaaggag

SEQ ID NO: 2727 - DNA, 759 bp, Arabidopsis thaliana
  Intron number 3 from transcript AT2G22960.1 (locus AT2G229 60) derived from phytozome v7.0 (chr-ID Chr2; pos 9771561 to 9772319)
acgagagggtacgtgaagctcttcaaataagaaaggtatatgacattaattttgtcgagggaaataaataatgtcaatatcatttaaagatcaatgacacatcatcattagagagcatatgaaaagttaatatatgttcaaccattacttgcatattaaatcagttaatatgaatttattgatataaaaagtcacaaaacaaaaacatataatattttttttgaatctaatccaaaaatatttaaaatgtaaaaaataataatacaagattttaatttattttacatcttcatttcttttctaaatgttttaattatcattcttgccatctcttttatacttcaatttatattaattagttagttacaatgtatatttattgtataggttcgaggaatttgaagtattttctattgtatatggtataagataccaaaggacacaagtctaatcgcatgtgctcttctcgtttggttaaaaatcgctgtgattgtttttttactaaaaatcaagctagatgtcatattaggaactatatgttaataacttcatattgcggccattgttacgtaggtgttggaaatagacatttttgttatacaatcactagacatttttcttcttcatcttttttttttttgacttacatgaatataacttataagttcttacttcataaattagggtcataagagtgagcagatgttgtttgatataactggatatcttctatatatgattacagggaagtataggaaa

SEQ ID NO: 2728 - DNA, 966 bp, Arabidopsis thaliana
  Intron number 3 from transcript AT2G23040.1 (locus AT2G230 40) derived from phytozome v7.0 (chr-ID Chr2; pos 9807967 to 9808932 reverse strand)
tgtcacgtaaagaaatagttgaagtggaagatacttctagtacatccagagagttaatcgtatatgtaaggaaaaggaaaaagaatcaaaagccaacataatgaagatatccatttcttgtttaagtgatggatatagttttcacattgtttatggtgtgcaataataagttgtattttttgagtgatgaaaatttatacgggtatgtagtcatgaaccttgtaagatgttcttggggtcataagagttttatctgatcctgcgagacgataatttaataacattacaagcaaaatatatccattgaagtaatcgtactttaaagatgctatggagagattatggaagcccaaaactctcttacactaatggttgatagtcgttttgtatattttacgctatttacttagtaagttattgagttttcgatctcttctcgagtttcatcgcagtgtaaagggacctagagtaatactcaattggttgtagtcagaagcctgtgaaatttagcatgttataagaaccaagtttaattcagatagtgacaaaagtactgtggagattttgggtgttaaagtagcgacctttatcaccataaacccctctctttctctccattacactcgtgtgaaagaaacttagaaagaaagacttgaagcagagtagaaacagagaaattgcagagaaagtaaagtgcaagagagagtttttacgtgttcaggtctcagtgtgaaaccctactcacgccgggaaacttgttgtcccggaatccactagaatcagtccttatatacagttggctcttactggagcttgtacatacacaactcattaactacattcaaccaaacacgccattccatctcatctactctctgcatctttgattctttgtcccctgtttttcctgttttgttcgaacacttctacaaaggacagaacgacacaaacctttaaaaggaaaca

SEQ ID NO: 2729 - DNA, 613 bp, Arabidopsis thaliana
  Intron number 1 from transcript AT2G23220.1 (locus AT2G232 20) derived from phytozome v7.0 (chr-ID Chr2; pos 9885061 to 9885673)
agttgctactacgtctctccaaaaactcgagacatgtttgtgagcttctacatatctttacattatctaaatatctataacctaaaccctaaccccggcaatgtgtatatgcacatggtaaattactccgaaaggagaaattttctttttatatacagtcttaataaatataagggtttcatgcaaaaaaaactcaaagtcgttcattttttcaattttagcctttacatccaaaaaatacaaaataatcatatgaaatccttttttgctattgttaaattttaaaattttggtattaatatatcaaatcgaagctttcgagatgaggagtttaactatatcttcagaatttttaaaaacaaatgtatgtgatcggaaaaacgtttacaatatatgtaaaattacaataatgagctatattgcgtattattttggatttcatctgattatttcgtatttttagacgtatagagtaaaattgtaaaaatagatgattttgaggttttttgttttgcacaaaacccaaaaaaaagattgagaagtatgaaaatgtaaatttgagaataattcattttttatgttattataaaatcaggggtttgcgaaggtggag

SEQ ID NO: 2730 - DNA, 504 bp, Arabidopsis thaliana
  Intron number 1 from transcript AT2G23590.1 (locus AT2G235 90) derived from phytozome v7.0 (chr-ID Chr2; pos 10035091 to 10035594 reverse strand)
acaccaaaaactcaccatcgttcgtcctggaaaaggtatacctcgtttttaagcgaccaaattttgttcaaaaattgatcaacataacaattccttttggtctatacgtccgattagtcagtccaatcgttccattaaatcgagattttattttgtagcctttaatatttgtggtgtatatgctattatcataggtcatgtgttagataatctaaattagtccgtctgtggtggtgtatacaacgagttttggttacatctaaattagtaaagtcaaagtagtgtcactttagtggtaattagagttttaccaccatatcatcctaagattcaactttgttcttagagattaaattgtagtgtttcggacatgtttcatattcatggttgtcactagggagattactaccgtatggttatctacttgtatatttaactgtattgagcttggaaaataagtatgaatgtgtttttcttttcctaatgtaaaagtttgcaagcacc

SEQ ID NO: 2731 - DNA, 904 bp, Arabidopsis thaliana
  Intron number 1 from transcript AT2G23820.1 (locus AT2G238 20) derived from phytozome v7.0 (chr-ID Chr2; pos 10140830 to 10141733)
ccattgatttcctctctctctgtactcgtctcaaggtaagctttgattgatccgccttacattttcgctaagatccggtggttttgtgtgattatacaacgcaatgttggttagatgatgcgattgttcttgttgatggattgtgtggaaatctgatttcgttagggaaatgaaacgatttcaagctatgtagttacttttgatgttcttgttgatggattgtattggaatctgtaaattcgtttgtgcaatgaaacgatttcaagctttgttgttactgtgtagatgtgaagtttttatgtgaatctggttagttttcgcggtggtttctgtcaatgaactatttctactcgtaacttttgtctatggaacctagaatttgatacagatgttggtttgaaacctctaacgcattgtttagatttatgtggatgttttttaccaatgtaagattggatctgtgttaagaatggagattattctggtgatggattgtagaaactcaatgcattgtaactgtttatataagatcatttgttttttagatttgtgtggatgtttgttatcaatgttatgatggatctgtgtggagatagcttgaaacgtttcgtgcttaatggattgtattggaatgtatagtggattgttacggaaatgaaacattgtcaagcttggctgcatctgttgacggattgtagaattcgtttaggggaatgaaatgatttcaagtttatgtgattaatggtctgtgattactaaatccttgaagatgtgaagtttgtcatgtgttttacttttttgtgaatcaagtgagtttttgtttgctgatttaacgatagagtttgtgtgctgtatcgtttggtaaaccatctttttatatcaaatagacaactccaagagctgg

SEQ ID NO: 2732 - DNA, 773 bp, Arabidopsis thaliana
  Intron number 1 from transcript AT2G23960.1 (locus AT2G239 60) derived from phytozome v7.0 (chr-ID Chr2; pos 10196336 to 10197108)
acaagaaagtcctcggtatttgctttggccaccaggtaatttaattctcatcacatatataacatttgttttttctcttatgttcatagattggaaatttagattaaaacccaatttgtaatgaatatttttgtaatgaatatttgtgtacattaattgttaaataccataccagtttagggttaaagaaattaacgaaaccttcctcaattaatgtataagtttatcaacttttgaagtacatgtgtgtgtgtgtgttttcatgctcatggtttggaagtttagatcaacctaatttataaatgaaatttgtgtataatctatttttaataattatgctcttttacgttcagagaaactaaaatgatttttttcattttatgaatattgtttatatatatatatatacatatatacatattgtatcgtgattggattatttttaatgcatacgtaggaatataatcttgtatatagttgtgagtaaaaaaaattagatagcttctttgaatggttcttgtatggatttttcttcgaacgtgtacacaaatgatcacgtaagaattatttttctttatataaattttataaaattagatacagctacttggaaggttatttattcaatctaacagtacagttgacaatttgatatggaacctcacatttcgtataagtattaactaaagttaacttattctaatttaagaacacaattattggataatatatgtccagctaatagctagagcgaagggaggcaaagtagcgag

SEQ ID NO: 2733 - DNA, 579 bp, Arabidopsis thaliana
  Intron number 1 from transcript AT2G24010.1 (locus AT2G240 10) derived from phytozome v7.0 (chr-ID Chr2; pos 10214868 to 10215446)
gaggttagattacattctttaattcttttgtctccccacttccgctcatatatgtgcacacatgcatttctcttttatatcttcataataactccaaattaaactatctgaaaaaacgccaaaaataaataaataataataatctcaatttaatataatttgcagaaaatatcgatagatttttgcaacaaaatttgtaaaacgttaaggaaatgtaaacgtaaacaattgcaataaaacaagtcgctgttctatgctcggtcctagtaatagcataaaacggtaatggttattcattggtcagagagcgagtaattatttttgtcctgctttaacttattaattaaccaatccccaattggttacaatatggtacaccctttaccaatgataagggaatatcaataatcttaacgattagactcgaaaaaaaaaagagaaaaaaaacaaacattatttttgtatatacctacataaaatattaatcaaaagaaaaagaaaagaaagtgaaatccactaacattacttttttgaatctattaagtttttaaaccaacaaaacctaccctgagtttcata

SEQ ID NO: 2734 - DNA, 453 bp, Arabidopsis thaliana
  Intron number 1 from transcript AT2G24220.2 (locus AT2G242 20) derived from phytozome v7.0 (chr-ID Chr2; pos 10300150 to 10300602)
caaagacgataatcctcagtcaaatttatcagtcagtgagtactctcttattaactctcaaatttagggtttttttttttactctgtttcttctttctcaattttggttgttacgttatgaaatttgactctaatcctcgaaaacttcagtaaatttgaataattttgttcttcgtaaacaatcgtgtggcttttcttgttgaacaattctgtttctgtacttagggctgggattagatcataagaatctgatcaaagctgagatttttaagattttgttggtaacctgagacgattttggtcttgattcactcgagaaactccaaaaaagttttgatttttagtgttagattcagatagtgtgtctagggttgttgattgatgaaatagtgaatagtgtttcagataactttgcagagattctgagtcaggttttatgtttcaggactacta

SEQ ID NO: 2735 - DNA, 457 bp, Arabidopsis thaliana
  Intron number 1 from transcript AT2G24220.1 (locus AT2G242 20) derived from phytozome v7.0 (chr-ID Chr2; pos 10300146 to 10300602)
ctttcaaagacgataatcctcagtcaaatttatcagtcagtgagtactctcttattaactctcaaatttagggtttttttttttactctgtttcttctttctcaattttggttgttacgttatgaaatttgactctaatcctcgaaaacttcagtaaatttgaataattttgttcttcgtaaacaatcgtgtggcttttcttgttgaacaattctgtttctgtacttagggctgggattagatcataagaatctgatcaaagctgagatttttaagattttgttggtaacctgagacgattttggtcttgattcactcgagaaactccaaaaaagttttgatttttagtgttagattcagatagtgtgtctagggttgttgattgatgaaatagtgaatagtgtttcagataactttgcagagattctgagtcaggttttatgtttcaggactacta

SEQ ID NO: 2736 - DNA, 972 bp, Arabidopsis thaliana
  Intron number 1 from transcript AT2G24340.1 (locus AT2G243 40) derived from phytozome v7.0 (chr-ID Chr2; pos 10358574 to 10359545 reverse strand)
tgactattagttatcctgcaaaggagtttctccaagtgagttttcagttaccctaactaattattagttttcacacccaaaaaagatgattaaaaaattgaacaatgcggaagaaaacacaagtgtgactgtgaacttactcagtctttaaacaaaatataaaaatatttatttcgtttacacatttcagtttttttgtaaccattgaacgcatatttttcactcgtgtttcaaattcaattttgaatctcagacaagtttgcaaaatctctggttcttaattaggtttggtaggaagattaacggatgagaaagaagagagattaaaacatattaacgaagagtgaaaacattttcttgattttcgaatggtttgcaataaatgagttactttaaatttatctaatccagcaaataaaaccaagcacacattttacgcaagaaccaaattttttttttggttagttatttagtattttaacatttttgtgtatttattaactttttatactaaaacattgtgataagtgcattttttccttgttagagaaggtattggggttttaggctgtgccacgacaacatagtaacttaaactacaatcctccaaaagcagccacgaaattacggcggtaggtttatggtttccaaatgataggtttctaaactaatttatatttcgtaagattcactaggtatatgttttctaaactttatatattttcaaaactacattctaactatattaacatgctcggttcaatatagtgatatacaaactcaccgattaatcaaatattactaaaacaatattcttaagaaaaactctactcacacacatgctatatgtttacatattactctttttctttcatatataaatccaaattatcacgacaaataatcaaaatgattgttgatctttatcaaccaatagacaatctttaaaaccccatatctcaagaacctcta

SEQ ID NO: 2737 - DNA, 510 bp, Arabidopsis thaliana
  Intron number 1 from transcript AT2G24350.1 (locus AT2G243 50) derived from phytozome v7.0 (chr-ID Chr2; pos 10361330 to 10361839)
ctcgctttactgacgattactccgacgacctctctgttcgtcatcttcttctttttattttcatcttcctctttgttctagagacgattcttaggtgtttagttcgatttccttggtttttacttgtgagctcttgtacgcactcttctctgctcgcagaagtaacattatcttcgtcgtctctctaatttatgtgaattttacccgatggatttgatattggcgcttctcacctactttttcccttatcgttttgattgttcgatgcaaattatcatcgattatcgtttagcagctcttgtagaggttatgttgcataatgattttggaaaatctgagttacaggatccgtaatagggctatgtgtatgtaatcactttgtgtggactggtttcatcttgttgaattgtaaaattgatccgtgggagcagaaattgcaggttgatgagtgtttttgtgtgaagatcaggtaagtttgtgtttactgatgaatcagcttgtttcaggagt

SEQ ID NO: 2738 - DNA, 802 bp, Arabidopsis thaliana
  Intron number 1 from transcript AT2G24710.1 (locus AT2G247 10) derived from phytozome v7.0 (chr-ID Chr2; pos 10519524 to 10520325 reverse strand)
ctccaaaagtgacgttgtaggtgccgcgattgcaggttttttaacttctcctctccagcctcttgctttctcatatatatatatataatataatatatattttatttggatcaggactggttcggatcctgtacaaatttaaaaattggcctttgtcaatactatttttttgttttaaataaccatatatctatatatatgttaaaaagaaattgatatataaaaatttgggcccttttaacaacataattacaaaaacaaaaacataattatatataagaaaagcatttggacccttaaatttgcccaaataaagttttggacataagaacatttgtttcataatgtaatacaccgaccctggttaggatacataatgtaatatatcttatgaactctcatgattattttactatacatataattaatggtaaaatatatagtatatttgtaaatagatgtaaataaaatgacagttattttcagaagacaagaattgtgaaacttttttttattggatttgacaagaattatagtgatgattattttgcaaatgtgtaaaaaatgattactttgcaaaacttttggtgattggcaatcccattgaacattcctagtataataaatactacaatataattagagttaattagaatatataaataattattttctccaactaaaaatgtttctacttacttccaaagatagttttacttcaaacaaaataaatatgattttttttaatgtttttggcattgtcacagctcttgacctgataaagaacaaacaagtgaaggct

SEQ ID NO: 2739 - DNA, 259 bp, Arabidopsis thaliana
  Intron number 2 from transcript AT2G24970.1 (locus AT2G249 70) derived from phytozome v7.0 (chr-ID Chr2; pos 10620721 to 10620979 reverse strand)
ccttgacctattgtctgctaaacaggttcgtatctcgaagataagcttcggtttagctcgatgaacgatgcatctatgtaatttgaatcaaaggatgatttttaatctatcgcaaagaagaaaggttaaatttttcgtgttgagagttttttgcttaggctttgcaagatctgattcgactgtgactgttatagaaacgatttgtgtgtttttgttataatcaggatttgattgataaggcacagactacacttgttgg

SEQ ID NO: 2740 - DNA, 463 bp, Arabidopsis thaliana
  Intron number 1 from transcript AT2G25070.1 (locus AT2G250 70) derived from phytozome v7.0 (chr-ID Chr2; pos 10665367 to 10665829 reverse strand)
gctcttcctttttgttcatttctctacccagatatgtaagttgctagcttcttctgtcataactttaatatctgaatctttttccgatccaaatagtcaaatattcgcatctaggtcaaatcgattcaaaaccctttttgttgattgatgtgctaagtagttctgagttgattaagtctatcagtttaagagaaaaggattgtgtaagattatgattcgtacaagttagcttctttcttgattaggtccactgtgaatcatgcacacgtttatgaggaagatattagattgtgtaagattctgattggtttgatggtttcaagttagtttctttgttgattattgattgctgagtagttctaagttgattatgtcaactctgaatcatgtacaagtctatgagctagaaaatgaattgtgaattgtggagctaagaatgatgttgttgttttggctgaaagcg

SEQ ID NO: 2741 - DNA, 609 bp, Arabidopsis thaliana
  Intron number 3 from transcript AT2G25100.1 (locus AT2G251 00) derived from phytozome v7.0 (chr-ID Chr2; pos 10680842 to 10681450 reverse strand)
ctatcagtcgtctcttgcttctctccattttgcaggtaaaaattctcacttttcattcctttatgttgaagcattgatatgtttgttttggggtttgagaatgtattgaatagattcttcttctaccagtggaacacttatgtgtgtacacagtttaaccttcacttgttagtgacttactgtaatcatattgttctgcgacgttttcaaatttgagagggcgtaagtaaagcatgagacttttgatcatatttatattctcttgactctttttgttcccgttaagtcttttgccgcatagtgcttgtatattgtgagtataagcatggcattgtgacatttcaatttgagagggcacaagtaaagcatggaccttttgatcacattcgtctcttgccattttttgtacccctgaagttttttgctacacaatgctttgtatattgtgagtgtaagcatgctactctgacgttccaatttaggagagcataagtaaagcatggaacttttgattgcattcactgtcttttgtctttttttgttcccctgaagccttttgctgctctgcttgtagattcgaagactctaaaagaggagaaaagagaagag

SEQ ID NO: 2742 - DNA, 360 bp, Arabidopsis thaliana
  Intron number 1 from transcript AT2G25340.1 (locus AT2G253 40) derived from phytozome v7.0 (chr-ID Chr2; pos 10793268 to 10793627 reverse strand)
aagacgccggaagtaagtcttttgagcttttagtctgttactatgataacactaatactcaatattttgttccttattttggttaatgatcaataaattaatcattacttagtttagaagacagagaccagattcttgaaatttgaggttttatgaatttggtgtttatgatgagtaacaacctttgagaacagagacaatgaaataagaagagtctttaaaatgttcccaaagttgtgaagtagtagagattgagattcttttttctttctttctttagtttgttgttatgtgttaatgtacttgttttgagtgttattttcagggaggattccattttcgtttctagaggatattcat

SEQ ID NO: 2743 - DNA, 356 bp, Arabidopsis thaliana
  Intron number 1 from transcript AT2G25780.1 (locus AT2G257 80) derived from phytozome v7.0 (chr-ID Chr2; pos 10995144 to 10995499)
cgcagtctttgcaaggccaaccaaaacagtatgtatacaaatattgaaatatttagttaacatacatacttatataatcttaaatactttgattagtttagttacaacacattgcgtttcatcaaattatatgaattagtttgttcttaagtttaactgaactctatctctatgtagtatgtactatatgattatcagtatcatttggttaactcaatacacttgacaaaaattatatctttataaatactatacgttagcactctatcaattcattggtgttatagctcttaaaataaaacctcatcttcatatgaccagaataaagggaatattcttcgaaaggccttctctga

SEQ ID NO: 2744 - DNA, 623 bp, Arabidopsis thaliana
  Intron number 1 from transcript AT2G26170.1 (locus AT2G261 70) derived from phytozome v7.0 (chr-ID Chr2; pos 11141080 to 11141702)
gccctattttcaggtacctctcctctctctctctctttattctgttttcggtggctagagacctagagtttagtttttaagttttcgtgtcgacaaaaaaaaacagttttagttaatttgttcggtttaatgtaatttttggtttatttgatttgattttctgtttagactttagagtcagtttgatttttaaaataaggaaaacaacttcatgtaaatagtgctttaattaatatacaagtactttttaacatatataattaaaaaatataactttttaatgaatttctgtttatttataacttcagtttcatttttagtcatttgataataatgaaaccaatttaaccaaaagagataaataattaagaaaacctaatggaaaaaaacatttataatttaatgtagtttttgtattatttcatttgattttcagtttattttaatttaaatgatttataaacacattatgtttaattttgtttaatcattttggtttagtttggtatatatggccatctcttatggttgttatgactgagtgatgaacacaacaagtgtctaaaaaacaaaatgaagacaagtgatcatgtccatttaaattaacaacaaacagatttcag

SEQ ID NO: 2745 - DNA, 588 bp, Arabidopsis thaliana
  Intron number 3 from transcript AT2G26200.1 (locus AT2G262 00) derived from phytozome v7.0 (chr-ID Chr2; pos 11153115 to 11153702)
gagacagagtaagcctttagctcagttactttctttctcaattcacatgtaattgagctaatattgatgcatataagtgtgtaatattgggtggattcacttttgatttggtaaatgcgtttagtttctttagatgtagtcgttaaggattgttcagatatatgttaagaccctctctttgttgatatgtggtacaagtatgaaagtgaagagtatttaaagcaaccactcctctgaactggttagggtgattgatgggtttgaggactcaagttagttagtgatactatatatcaagtagatctatttcattaagtttagtaacttaggtgtttgtttataggagaaacggaattatggctgtcttgagcggatattgtcttcaactgcctatgcccttggttccagattttatcagcaatataatctaaggttccagtattaggtcatatcataacgttgacattaatgctttctgaaatttgagtgtgagctcactgtgctaattatattgctgtgttttactatatgataagattttcttgttcttcatcagtttttcaaagaccgccactacttggataagga

SEQ ID NO: 2746 - DNA, 957 bp, Arabidopsis thaliana
  Intron number 2 from transcript AT2G26580.2 (locus AT2G265 80) derived from phytozome v7.0 (chr-ID Chr2; pos 11305746 to 11306702 reverse strand)
acatcccttgcaacttttgcaacataattcttgcggtataattgctatacatatatatctattatatctgctgttatattatatataatggatctatgcttctccaaatatcgtatatataaagatataatcaagcatagatctacctttaatttcctttgtactatatattggtttctgataaagagtggtgaagctcttttcatcagttccactatcttacaaatgttcaaagttcttattcatttaaatctgttttaatttatttttgtcagtgacaaatatttcatttagcttatggtgccagagagaagtcaccatccttctgctatacatgacttttttcagcatcatatagatttattttctgctcttttcctactttcctcaaaggaaaatcctattacgagcattttacttaccattttaagttatgactcataagataacctattttaaaatggccatgcatatatttgtgttccttttctttttttttttgtcaaaaatatgtgtgttcctattcactaatctataacaaattgcgcatattgaaaatggagtcacttccggatcttaaatggtggctacagcaaaacttcaaaagagaagataatcatctctcaagcaactacttttgtttaatgtcataagattagattgcattatttctattttgccttctaaacccataaagaacttaacatgttacccaaaaaaaaaaaaaaacccataaatgataggaatatctgatctatattaacaagacaagcaacaactttttctcccttgtctaatgataattatcttataacaaattttagtagcataaattttagtataagcttttcgtcgatctatgtcttatggatcatctagtaaacagatccaattttccaagaaagaagatcaattaattaatatttgaggttgtgtttggctaaaacgtgtaggtga

SEQ ID NO: 2747 - DNA, 910 bp, Arabidopsis thaliana
  Intron number 6 from transcript AT2G26590.1 (locus AT2G265 90) derived from phytozome v7.0 (chr-ID Chr2; pos 11312847 to 11313756 reverse strand)
ctcttcagtcaatcaatacctcaatcaaccactaggcatgtaacattcctaccttgttacaaacagtctaggatatgactgcatccttgtactaatgtctttcttactgtttaaccttccaacttccatgatgagcaaactagctttcttatccttaaaattaaaatacatattccttcgtacattcattcatctggcattttatgtgtcaacgcggatttggtaatagtttcatggtactaatatttataaggagcttccctttccaaatagcatgcacaacaatttcttttcattagctcatgtaatcgtttccatcatgaatatgaaaaaatttgccacgaataggtggcgccttggttgtagaacactggttcaaatccatatttctgcttgcttttatatttcatcgaatccaaatttagttgtaattgtaccatagaaggaaccacttttttaaatttcctgcgtaaatggatcttgagtgtgactaccaatcagtctaatgcgcttatcgactgaatggtgaagaagtttttaatatatatcaaagatcagatttgcaagagtatgtttgatttcttgcttgtcattgttggtttgcgtattaagaaaagtttgaagtgaggagctaaaatgtgttattgttttttagcactcgaaaacttctcttatcccagatggaatggacgccacaaattgtagcctttttacttataatgtcactaagattctgcaataattcacatatgagcatgtaaatgttattttctcatctctttatgtgtattacgcatgcttgatagtgacaatacgtagtcaattgcataagacgaaaaggttgaatcaatctaataaattttcctgtgcaccagagtttcctggtgaagaaggacttgcagctgctatc

SEQ ID NO: 2748 - DNA, 432 bp, Arabidopsis thaliana
  Intron number 1 from transcript AT2G26600.2 (locus AT2G266 00) derived from phytozome v7.0 (chr-ID Chr2; pos 11316579 to 11317010)
gactttttgcgtttacctgaaaaactgttttgatcgtaagtatctgattgcttcgatgtcgctgtcgaatcagattcccgtttactctcgatgaccctttgcttcttcttccactttttttccacagttttctgataactcttctcagatgagaagttctaagttacttcttctcaagttcttcttcttcttcttcttcaatctgacttcgcttggtacagtgtctttctattattaattctattgctaaaaaaaaaattctaggttaagtttaaatttcaattttcaactcttattacgatgttgggttttgctaatttcgttgattgatcaaacatagttgaatcttaaatgttatgattttgaatttctggttgttttttttctgatgattttttttttttttttttgatctttaagagtatcaagttg

SEQ ID NO: 2749 - DNA, 830 bp, Arabidopsis thaliana
  Intron number 1 from transcript AT2G26670.2 (locus AT2G266 70) derived from phytozome v7.0 (chr-ID Chr2; pos 11342065 to 11342894)
agacttcatactaaagatcaagctaaggaaggtgagaaagagactaaatctattgaggaacgtcctgttgctaaatgggaacctactgttgaaggttacttgaggtttcttgtggatagtaaattggtttatgatactcttgaactgattattcaagactccaatttcccaacttgtgagttttttttttctccttcttatcttcttgttatgggttgattggtaatctttagaaaaatttgaagtgatttggagtgtttttagatcttagtagtatctacccttttgataaagatggttcctttgcttcatttcttatcatgtctggattttgattcattcagattctattggctacttaggtttttgtaactattggattgagttggttatagacttatagtgatggtttgatatgaattgaagtactcttaggatggtaatctattaataggttgaagtgatttaatcttagtatctacccatttgataaaaatcattcctttgcctcatttcttatgttgttttggatttgaatcgttcagagttttttgacaactcagttatttactcttggattgagttgttggttgtggtgttttgtatgaatggtggatttaaggttgattatatgtacaacttgtgaaatctaactgaatgttaccggagttttggactttcaatcttaacgttatctcttattcttgattagctcgtaattaaaaactgagtttgcttatgtattggaaaaagatctttatgcaaaagtaggtctttttttcttgtgtaatcatctcatgatctaattctgcatactgttttttatatag

SEQ ID NO: 2750 - DNA, 690 bp, Arabidopsis thaliana
  Intron number 1 from transcript AT2G26670.1 (locus AT2G266 70) derived from phytozome v7.0 (chr-ID Chr2; pos 11342205 to 11342894)
tgaactgattattcaagactccaatttcccaacttgtgagttttttttttctccttcttatcttcttgttatgggttgattggtaatctttagaaaaatttgaagtgatttggagtgtttttagatcttagtagtatctacccttttgataaagatggttcctttgcttcatttcttatcatgtctggattttgattcattcagattctattggctacttaggtttttgtaactattggattgagttggttatagacttatagtgatggtttgatatgaattgaagtactcttaggatggtaatctattaataggttgaagtgatttaatcttagtatctacccatttgataaaaatcattcctttgcctcatttcttatgttgttttggatttgaatcgttcagagttttttgacaactcagttatttactcttggattgagttgttggttgtggtgttttgtatgaatggtggatttaaggttgattatatgtacaacttgtgaaatctaactgaatgttaccggagttttggactttcaatcttaacgttatctcttattcttgattagctcgtaattaaaaactgagtttgcttatgtattggaaaaagatctttatgcaaaagtaggtctttttttcttgtgtaatcatctcatgatctaattctgcatactgttttttatatag

SEQ ID NO: 2751 - DNA, 616 bp, Arabidopsis thaliana
  Intron number 1 from transcript AT2G26700.1 (locus AT2G267 00) derived from phytozome v7.0 (chr-ID Chr2; pos 11369153 to 11369768)
caaccgtctaaacgtttcactatctcctccacaaggtcccctttcccacaacactctcttttccttcttttaaccatgcatgattaatcaatctcattgttaataaagatttaattgtgttttcgcttctgtatttaattagtgggttgttttgaatgtgtaccacggcttttttttaatattgttctatatttctattaatctttattttttggtttaattaacttatactaaacttatttactagttgtatgtgttttctgtatttgttaaaatatttaatgaaaaaatgaaaaatatttttaattatagaagatgtgaaattttatcattttttccaccttagtttttggttgaacaatttacatttaatatttgctttcttatccactacgatgttttagacgtaggttctggattgaaaattttcgggtaacaaaataaaccaatctttaattttactagcaacaaatactgatacgtatatagtaataggtctatatagcaattttttttgtttaatagattagcatatctagtaactaattaccaaatgcttaataaactaagatactatgtaggttttacgcagcagaaactctagtggccttagagt

SEQ ID NO: 2752 - DNA, 836 bp, Arabidopsis thaliana
  Intron number 1 from transcript AT2G26710.1 (locus AT2G267 10) derived from phytozome v7.0 (chr-ID Chr2; pos 11380951 to 11381786)
tctctctttttaccatcactggagaaaaatctacggttagttctttttctcaatttcctctgtttttttatttttcagattcagactcttcttatggttttactctgtttctaatcagtcagatttttgttattcgaaaacctcttttgtaaaagttgaaacataaaactttttgtatatataaagaacacaaactcttgtgtctttttttttttttgttatttttcatgattttgtttgagatttgctttcataattatgtactttgagtttgttagtggaaattgttttttttggtttggagatagaaccattgtgatttggtccgattctctgtgaaatgtaacagagtgtgtgttttcatgtcaagcaaagcaattttattttgttttattacacacataaaaaaaaaaaagagatttattttattttatctgtgtttgttttgtcatgatcaaattatgatgtcagtactttgatgtgaaaaaaggaggctctgtttcttccccactctttcctcacgggcttagtcatcattttcctctctgttaactcttgtcttctttctttagtctaattacaaaaacaacaaaattcgaaaaaatgaaaaattttggttgctgtgcagtgaattaaatagcaccaatgtggtaaattatgagagagcacttagtgcattaatagcaacagcagtgaccataccctcttttttgtcaaagttcccaagttgaggatctgttcttgttttacagcttcttttgtcatctaattttaattttcaaaaccaattttaattttcaggtgctacatttctggtttggttcggtccaactttc

SEQ ID NO: 2753 - DNA, 478 bp, Arabidopsis thaliana
  Intron number 1 from transcript AT2G26830.1 (locus AT2G268 30) derived from phytozome v7.0 (chr-ID Chr2; pos 11443716 to 11444193)
attcctcgtatcatgttcgtttccttatctaattttcttctcatttgatagctcgttccgtgaattttggagatttgattttgttttcctccttgaaattgggattgaagaagaagatctctctgacctagaacttacaaattggcttttattgctattttctttacacttggattggttttgtggaggcagtagttgttgtaaagttgctttgatggtgacatagtgaaagcttcctttatcttcttgttaagactgcttcgttgtgttacttatgagattaaaataacattaaaaagatgataagactgcttcgttgtgtgactcatcttcttgttattgcttcgttttcatggcggattagttagaaatgaatggaatgtggcatgagtcttgtttctctaggaagagatatgtaaaagctatcttgaacctttgttttggttgtaatttctctttttttttgtaacagagagtt

SEQ ID NO: 2754 - DNA, 636 bp, Arabidopsis thaliana
  Intron number 1 from transcript AT2G26870.1 (locus AT2G268 70) derived from phytozome v7.0 (chr-ID Chr2; pos 11458288 to 11458923 reverse strand)
aagtctcttgtctccgagttcgctgttttcgataggtaataataatatactttcactgtctttttggaattagtattacgtcatataatcttgttgtcgtttcctttgtcgtcttgttggctcatctttaaacagttttttttttttttttgggtgcaaatgctcatcttacaacaacactaaattagtatgttacgtaatatttttcgttaaaatatattactaaaactattgatttaaatatgttccacttcagttatattctcctttacactttttttcccgtcgatatttctccattttttaatatcttatattttttcctctctatatggaagatttatcgatatctattattttgttaaatggtttatggaagtattattattattacgtatataatttttttttggtttttgttaagtactaataatatagtcttactggcgctctctttgtggtagtgtgtactggagtttgaccgttcgctcatgttttttttttgaagaacgaacgttggttcatgtattttttttattggggggcgaactaccgttagtacatattaaattcattagtacactaatttgatattaaaatgaaataaatctgatattttttatatataaataacag

SEQ ID NO: 2755 - DNA, 485 bp, Arabidopsis thaliana
  Intron number 6 from transcript AT2G26900.1 (locus AT2G269 00) derived from phytozome v7.0 (chr-ID Chr2; pos 11476475 to 11476959 reverse strand)
tgatcaagccaattctaggttttctcattgcagtatgtttccactaatgtctatcacatttacttctatttgcttctctgaaatggatgcttatgcaatattctattttgtttaagatattggttctcttcgtccgtttttacttctatgggctgtatacgctttagccaaatcaaatgttgattggaatattctttctttgattaacttagatccaagagtcgttgcatgtccaaacatcactttttcttgaaacgtttgaatcaaatatttgctttctagttactgtagaaacaattcctggcatactcacttactccttgagggatttctcttgtagagaggattgatatggacatatgctatgtgcatttggaaacactacatttggttaacattaattgttgagcagccaactaatacaaactttttctgtgtgttttattttagactcttaagctttcggcacctcttgcgactggcct

SEQ ID NO: 2756 - DNA, 218 bp, Arabidopsis thaliana
  Intron number 1 from transcript AT2G26980.4 (locus AT2G269 80) derived from phytozome v7.0 (chr-ID Chr2; pos 11518206 to 11518423 reverse strand)
ttgatccccaacaaaaaattaaggttcttttttgctttttaaataagtaatatatatatatatatatatatatatatatatatatatataagattgagatattctctgtcttgcttcttctttacccttttcttgtttccaatcaaatcctctaaagtttcgttctttgttctaagttttctgaaggagtgatatttgtttgtggtgtggttagagaa

SEQ ID NO: 2757 - DNA, 369 bp, Arabidopsis thaliana
  Intron number 1 from transcript AT2G26980.3 (locus AT2G269 80) derived from phytozome v7.0 (chr-ID Chr2; pos 11518366 to 11518734 reverse strand)
tgtgcctttttttttttttttttttttagtggttacaagttacaaaactcaaaaaaagaccaaagacagcaattaatttttgtttctttctgttctaaggatctttgtctgctactgaaactccttaaagcaaaactgtaacttctcaccaaaaacgaatttttccaacaaaaatttaataatcaaaataaatcttcttcttcttcttcatcgtttatcacgacctctgtctcttcgtctctctcaaaagccattttaaatctctctctttctcactcaatctctctgtagctatcagatcttctcttatgttgatccccaacaaaaaattaaggttcttttttgctttttaaataagtaatatatata

SEQ ID NO: 2758 - DNA, 471 bp, Arabidopsis thaliana
  Intron number 4 from transcript AT2G27120.1 (locus AT2G271 20) derived from phytozome v7.0 (chr-ID Chr2; pos 11581790 to 11582260)
atattcagattgttcacaaagaagatctttatcttgtaagtcactaaagcataactccttttacgcagtttgcaactacctgttgattactcgtttctttctctctatatagaggactcatgtcaattacatttgctacaacttttagttattttcctcttcttgcaacttcaaattgagcagctctagtaataagtccaaaactgatcttgcttccatgtgctcaaatcatctatctagcctgccaaaaacgttcttgtaactcaaaaaacgtttgctagtaaatgtttaagtgtttaatgcttcttctttagtggcaacattatgcaagatatgaacgttttcagtacctcttgtttggttgtcacttttgctgaccttttctttgacctaccataccaatttgagtttcttgatttcttatgttcatgagcagaaaaatcatctatctggcctgcaaaaaaaatatct

SEQ ID NO: 2759 - DNA, 190 bp, Arabidopsis thaliana
  Intron number 1 from transcript AT2G27228.1 (locus AT2G272 28) derived from phytozome v7.0 (chr-ID Chr2; pos 11650662 to 11650851)
aacaagctggaagaggatcttgccgtggaagttagtctttgttcaaatccattttcctcttaaagaatgtaataatgggtttttattgattgttgtagatttgttaaaaagttttgtttttagacctaaagtttcgatttttttcttctgggcagtttgaaattgcactgttgcaagtgaaaaagtttgt

SEQ ID NO: 2760 - DNA, 195 bp, Arabidopsis thaliana
  Intron number 1 from transcript AT2G27230.1 (locus AT2G272 30) derived from phytozome v7.0 (chr-ID Chr2; pos 11650657 to 11650851)
gacaaaacaagctggaagaggatcttgccgtggaagttagtctttgttcaaatccattttcctcttaaagaatgtaataatgggtttttattgattgttgtagatttgttaaaaagttttgtttttagacctaaagtttcgatttttttcttctgggcagtttgaaattgcactgttgcaagtgaaaaagtttgt

SEQ ID NO: 2761 - DNA, 157 bp, Arabidopsis thaliana
  Intron number 1 from transcript AT2G27230.2 (locus AT2G272 30) derived from phytozome v7.0 (chr-ID Chr2; pos 11650695 to 11650851)
agtctttgttcaaatccattttcctcttaaagaatgtaataatgggtttttattgattgttgtagatttgttaaaaagttttgtttttagacctaaagtttcgatttttttcttctgggcagtttgaaattgcactgttgcaagtgaaaaagtttgt

SEQ ID NO: 2762 - DNA, 383 bp, Arabidopsis thaliana
  Intron number 1 from transcript AT2G27370.1 (locus AT2G273 70) derived from phytozome v7.0 (chr-ID Chr2; pos 11709202 to 11709584 reverse strand)
tcgtaagtttctctccaaatgttactcttactataggttatgccaagaatgtagtaaccaactatggaaatgaaaccccaaatgtgtatagtcgtactatagataataccaagactgctacgtagcttaacccgttgaatccaaccaaagccaggctagttgcaaagttcaagcagtagttagagagaaaaaatgagctacgttttaaataaggggggaaaaaaaactatcaacatgaatttcgagcaatgtgcttggtgcttattagggatttaattatggtacatgattttcaattatataaagattcaaacttatatcatttttttttattgttttgttttgcagatcttttgtgatagtaaactcaatcgtgggtggct

SEQ ID NO: 2763 - DNA, 465 bp, Arabidopsis thaliana
  Intron number 4 from transcript AT2G27790.1 (locus AT2G277 90) derived from phytozome v7.0 (chr-ID Chr2; pos 11848452 to 11848916 reverse strand)
ctaggttttgattcttctttccctttgatgatcatcactgagattcttatttggttttttattgattccaaactcaagtaatgtgtatagtgaaaaactcatcactgttatgtcttagcgttaataggatttttgtttttcttccctttgtgtgacttcatagtgtaatgatgtccggattttatgttcattgcagctgaatccgtcgaattgagctgtgtgatttgtcttacgatatgcaaatgaatatttttttgggaatgagtttgttttatgtttgatacatagaaaaagaggcgtaagtaggttccttggggtgattttatttcctttggctaaaagtgtcgaatttttttatgctttacatgttttcttgctatattttgtccacttttgattccaagaggaagaatttttatatgctttacgtgtttatgtttgatagatttgcaaagaggaagttgg

SEQ ID NO: 2764 - DNA, 384 bp, Arabidopsis thaliana
  Intron number 1 from transcript AT2G28000.1 (locus AT2G280 00) derived from phytozome v7.0 (chr-ID Chr2; pos 11926622 to 11927005)
tctcttccgcctccgtcctctgttcttcccgtcaggtacaaagtttgttcctttttaccttccttagctacttactaaagaagaaaatgaatcatctttcattactttgttttgattggatttgacccttcagtgttatctattttcaaaaacctttctctatctggtttattgggtttttgaagaaagtgattgaatttgaccctttagtttgttctgtttcaattcaattgcttttctctatttggtttctgggttggtgagaaaaggttaatttttatgggaattagaagaaactgattgagattaatgttaatgaatctgctttattgatgttgtgggtatacagagtaagttgggaggaggaaatcagcagcaaggtca

SEQ ID NO: 2765 - DNA, 543 bp, Arabidopsis thaliana
  Intron number 1 from transcript AT2G28090.1 (locus AT2G280 90) derived from phytozome v7.0 (chr-ID Chr2; pos 11973337 to 11973879 reverse strand)
cgctagaatcgttcgcttatctcgtcgtttagaaggtacaatctccgttcagaaccctagaaatctaaatcgatgaaccatggattcgttatgtttcttaacacaatctcgtttcgcatttatctcgggttcgatttctctgttttgtggattttcatggattcgttgctgaaatctcagtcgaatcatccgtgttaatcgtttgctttgtttcgtttcttctccgataatggtttcgagcatcgtgaaagcgattgagagtttttgttaaaccctaaaccctgacgaagttttgttctcttcctcgtttatttacgtttatcgatcttcttcttagatctagtttcaggatcataaatattctctgtttctgctattgaaaacacagcgattgtaaagaaattagtcaatttttgagtctttgattcatgatttttgttggtatacaagaaattgctatcgatgctcaatggctcattgacttgttctgattgttgtactgtatcaggagttgaaacagtgagagcagatcctgattcgaac

SEQ ID NO: 2766 - DNA, 441 bp, Arabidopsis thaliana
  Intron number 1 from transcript AT2G28190.1 (locus AT2G281 90) derived from phytozome v7.0 (chr-ID Chr2; pos 12014807 to 12015247)
actcaggtccgtctctctcaattgctcaaaatctctaatttctcatctgggtttctgaagattgatttgatgggcatgattaggtcactctcagtgttcaatctgcttcgtatctgactttcaatatcttcaaagtctcagactttttctgtttaatctgcttcatatctgattttcggtttcttcaaagtttcagactttttctgtttaatctgttgagttacatttgttagtgtttggttctcactgctatgaataacttaagataagctgataaagaaagggattagctttaagagtgttttgcatattcttgctgattcaatggttctgtgaaagtttacaaagtaaccctatatggtttcttgctaatttttgactatgtagattgttctaagtgaatatggttgtgtttatggcaagcaggtcctacaactgtga

SEQ ID NO: 2767 - DNA, 488 bp, Arabidopsis thaliana
  Intron number 1 from transcript AT2G28290.1 (locus AT2G282 90) derived from phytozome v7.0 (chr-ID Chr2; pos 12056258 to 12056745)
ttctgcttcgtcttctcgagccggatctctaatttgtaaagctccctctctctttcttcttgttcttcttcgtctccttctacactgatggatcgttatttagctatttagggttttgtgagttgcattaactagagtaactcgcgaattcttctcctttgccttgcgatttggggaattttttagctccatcagccaattttacaattttgtatgtatccgtggatttatcacatgaattgtggacctctgagttttttttttttgttaggttcttctcgctttagttttgcttttaggtacataaattttcctcctttatgatttacttgctcttgggctattttcttttatttgtttggtatggagtatggactctagagtttagtttagtttttttttttgggcacattggttggaattagtcttgttttattctgaattgtgtaatcaatatctgcatgcttgtggtgatgcagggaattctt

SEQ ID NO: 2768 - DNA, 869 bp, Arabidopsis thaliana
  Intron number 1 from transcript AT2G28500.1 (locus AT2G285 00) derived from phytozome v7.0 (chr-ID Chr2; pos 12186974 to 12187842 reverse strand)
tctttggagctagcaacattattaagttcttgcaggtactaactttcttcttcttctttctctatccgttacacgtgtgtatttcatatgtctatgacaatatgtcattacccacgtgtgtacatgagtagatatttaacatcaaaattataaacgaggacaatttaacacaaaatatcgcttacttacactataaaagaatttaaacaacagaaaatatttagtaatgttttgcagtaattaataccaaggatttataaggatatctaatttaatagatattaagagaatgatgtttttgttctttgtattaaaataatatattttgaaaattttatatggaaaaaaatgaaatctggtttgcaaaatgtgaaagggaagttaaagtggttaaaagtctagttgttgaacaataatgggttcataagtcatgtgaccggaactagaccctacaattgtaatgaaaggtcaataacaacctttcctcaaagctacatgcaaccttattgtacatgttcaacataaaaatatacatctctaaccctttaagaaataaaatttaaagttatgttttaaaagaaaaaggtctattccatcaattccttttcattcataatttgaaaaagtcatgtaagtttccttcatggtcaaacatcaaaaaacaaatccacaatgtcaaatataaaaattcaataaatcaaatccacattccacaacatgtccaagactttttttttttttggtaaaagatgtccaagacttttgtatcctcttctagaaaatcatgaataagtgaaagatgatatttatgtgttaatcttttttatatatttattataatcaggaacttccagaatcgcaaagaacag

SEQ ID NO: 2769 - DNA, 425 bp, Arabidopsis thaliana
  Intron number 1 from transcript AT2G28510.1 (locus AT2G285 10) derived from phytozome v7.0 (chr-ID Chr2; pos 12200200 to 12200624 reverse strand)
gatcctgaacaggtaatttcttcttctacttcttattttagttctttataacacttttcttttgttaataattctgagctctcttaattcaatcaaaaacacaaacaagaatcatgtcaaatttaaatcatgaataattttcaacttcttctcatagtaacaaaaatgtcttcaagaactatatcatttatcaatttagtgataaatatcaacttgattaattaccctaagcttatctcaaaaaccctttcaaaaaaatcattttcttgtagacaaagaattattgtcggtaaaagatcggcgccacgtacaactaatccgttatataaagtaaaaacatcattatttcactcgtcagcacaatttaatttagtttgtttgaatgtgcaggaaatctcaaacgagactttggaaactatattggt

SEQ ID NO: 2770 - DNA, 675 bp, Arabidopsis thaliana
  Intron number 2 from transcript AT2G28520.1 (locus AT2G285 20) derived from phytozome v7.0 (chr-ID Chr2; pos 12210510 to 12211184)
ataagagtccctttcaacggacatttgcaaatcaggtatcaacgcaatgttctctgtaattctactacacttgagctctgttgtatgtgattcaatgcagatagtttttactctattgatgtggtggggcaatttgttttggtatagatgtgtgtgtatatatattaggctcagtacaaactttgtagtaatatggtgattgtttgagtgtcactaatttgtgtgatggtggttctttaactttgtttcaatttttttttacaagatctcttcttaagaattcatttatttttgaagtataatcgtagatttcttttctagtttatattacattaactcccatgcaggcagaacttgtttaccaggccatgcttaaccacaatgagaaactggacgtattgctcagctgtgaaatgtttcttttacactttggtttgaaggttctaggattttgatgtagcttagagacttggagtggatatatatgggctgggctatgcatgtacttaattgctgcactgatttatgttttccaaaatataactttgacatcatgatagaaatccttattaaccacatttattttcgatatcaagtagtatgtggtgaaatttttctcatgcatagagcttttttgcttatgcaaattcttgggggcttttaacaggtaaaacg

SEQ ID NO: 2771 - DNA, 680 bp, Arabidopsis thaliana
  Intron number 1 from transcript AT2G28690.1 (locus AT2G286 90) derived from phytozome v7.0 (chr-ID Chr2; pos 12307797 to 12308476 reverse strand)
tggaagagttgggttctatttggttttaccaagaggttagttttccttaataatatgaattttaaaggccattttgtgtaattgttctattaaccaaatcaacattttagcatgatgttcaattttttgcatttttatatggatgatcaattctagagtcttgtccttcagaatgattgtgtgtgtgtgattggaattctaatcactttggtttactgagtaataatctatctttcttttttcttcccaacattttacttttagttaactccgacattataaaactctaagatctatgaaaatctatcagaacaatccatttcacctacataaaatgtgacttcttgtacttttctgacccttttaacacaaaaagactattttctttttttgtctttttatttaattattttctagccctgacgtttatatataataataataattaatatgtttggtttacatttagtaacgttttgagtgaattcttgaccccatgaacccaaggttgttatcacacatgattagtaaaaccaatgtattttttattattatgtttccttttcactatactttttttctagatgttgatgtcttcaatgattcagccaatctttttttcttcattttaatatcaattaatttctgacttttaaccctttttgatattattacagagt

SEQ ID NO: 2772 - DNA, 750 bp, Arabidopsis thaliana
  Intron number 1 from transcript AT2G28780.1 (locus AT2G287 80) derived from phytozome v7.0 (chr-ID Chr2; pos 12342030 to 12342779 reverse strand)
tactcgtcccactacctcgcttggctacttgcgaggtaccctttttctcatcactctcaatatatcaaattatcccaacttgaattatttacgtatatgtaacgttactctctacgtacttagtcgtagaagtacggtctttattgtttcaaacactaacttaagtgtttgtatttttgcatgtgaaaacaaaagtagctatatttagaattttcacgatttagaataatgttacatcatttgagatggtttttccattaaaagaggaatgattaggttggttaaaaatttaaagattttcgagacatagtacatatatattttttttttgataaaccattgtacatatatatacgtgttagaaatagatttgaggaacaaacatgttggtggacttggtaatacagtcacaaaacacgttgacgtgggtattaaagtgtgttgctaactttattccgtaccacattattacatataaaatcctacttatgtcagcaaccaccgaaaattttgtcttaattcttcccaatattgcgaacaaactgtgtcgcatcacagacaaaatatgattcccttttgattaattaacataatccctataagattatatacttcttctttgacagtattaaatcaacctattagcaatggcatgggattctatgataatattaagaaaaataaaatagaaaactaataatttatttttaaatatataggtgaaacaaagctgcaaagagcttggtcaaa

SEQ ID NO: 2773 - DNA, 447 bp, Arabidopsis thaliana
  Intron number 1 from transcript AT2G28810.1 (locus AT2G288 10) derived from phytozome v7.0 (chr-ID Chr2; pos 12363700 to 12364146)
caagctttttagatccaccaattaattggccacaggttctttgatcttccattatacctaattctctctttctctactttctttttgtgtgatttttaccgctcttaaattcttcattgattgttttgattcttatattaataattttgattcattttttctaaaagatatattcctattctcatcttcattcatctttaagctcttcttttttcaaagttccaaaacatattcatggtatttcttgctttataatctcacctatatatagaccatttacatactatacggtttacataaagaaaaacaaacaattttgattgaaaccaaagattgaattagaagtttctacatgttgttctttcttgtattgtgtgattaaattcctttttgtttgtttgtttgtttgcagtctgcgaatccaaataaccatcctcatcatcatca

SEQ ID NO: 2774 - DNA, 376 bp, Arabidopsis thaliana
  Intron number 1 from transcript AT2G28960.1 (locus AT2G289 60) derived from phytozome v7.0 (chr-ID Chr2; pos 12441916 to 12442291 reverse strand)
acatcttgttcaagctcagccgcctgatcaacgaggtttctctatatacctttttttaataattgcttcatgttcagtttttgacacataaagacttaaggattagccaagtagttgagtgttcttgctcgactggtcgagatcactaaccgatttctactttgttgtacgcatagccaccatgaaaataatattaacgattacagatataagagatttggttaaagaaaataaaggattctctgttttccaaaacttttgattgtcttccttataagcttcatggtctaacaaaaggaaaacattatttttcactaataatacattttgtatcttgccaggattcatcagtttggattgcggtttacccgttaat

SEQ ID NO: 2775 - DNA, 610 bp, Arabidopsis thaliana
  Intron number 2 from transcript AT2G28990.1 (locus AT2G289 90) derived from phytozome v7.0 (chr-ID Chr2; pos 12455768 to 12456377)
catctataaggtaagtcaatctatttgaagcattcaatgtgacgtttttcttttgaataaaatttaacattattcttttaaaaaatgtgaggtttttctctctttttttttctggagaagatatgaatgaggggatatgttgactttacttgtgttaaaaacatcattgttgaatgatgtgttcaaaattttaagactccaacgtaactacattatgccaaaactatatggcaagtcattgtaacaattgaacaaagaactaagaacaacgaactagaaataaaagatactaatatgagctaagaaaacaaattttttttttcttttttttgttcacaattaaaactaaattaattaattgaaagaaaataagcaagaaccaaacaaccaaatcaaacatacaaaagactaacattattgtaaatcaaactaaacaagcaacgataaatgaaattgaatgattgaattcattattaaaaaaacgagccaaggtgattgactcggatagttgccaactaacttagtttttggtatcttagtttcatagactagtatttggctaatacaatttacttattaatttatgtggctaataaaatttattgtaggt

SEQ ID NO: 2776 - DNA, 445 bp, Arabidopsis thaliana
  Intron number 2 from transcript AT2G29090.2 (locus AT2G290 90) derived from phytozome v7.0 (chr-ID Chr2; pos 12498432 to 12498876 reverse strand)
aatcccaattccttcttcgccactcgccaaaacaagtactattttcttctcctatgttgttacatacataaaatatgcatgaattattgatatattcacttaaggtttattgttcattgtatttttttaaccaatatattggatggtaaaaattaaacttatatattcgagcgaactatggaccgcaaagcaatacttttgttgttacaaaaaacgtatttttgaaaaaaatataaccaattcatggtagtctagtagttaaacggttcacattatcaatccaactaaagttagtccttacactatgattttaatcataacaatcactttttaaatgttttacacgatcaaaatttgcttttacacaaattccgaaaaatagtcttaagtgtgaaatatccgatccgcaggtacggggatatattcaagacgcacatattaggat

SEQ ID NO: 2777 - DNA, 454 bp, Arabidopsis thaliana
  Intron number 1 from transcript AT2G29110.1 (locus AT2G291 10) derived from phytozome v7.0 (chr-ID Chr2; pos 12509862 to 12510315 reverse strand)
aaagacactgtgcaggcttcagctgcaggtttgttacttttatgtcttttgcttctccgctacttgtaagggatcatttggatttattaattattagttgcagtcggatgaaatatattacgtaggatcgtctttggtaagagcaatctcttcattttctttattttctagaaagtcttactactattcctagtagcctctttaaaatatttaattcatgagttattatagtatattagaataataactagtcaatgactattggtaacatgtcatgtgatacctatacaatgaagatttgaattcttgtgcaaattattattgtctcattaattatcatcaaatattaaactactgctgttacatttagtgaaatactaacatgttttttttctttggtttgcttgtggtgcaagcagccttggacctaatccagaacgagcaagtgagtgcc

SEQ ID NO: 2778 - DNA, 672 bp, Arabidopsis thaliana
  Intron number 1 from transcript AT2G29540.1 (locus AT2G295 40) derived from phytozome v7.0 (chr-ID Chr2; pos 12642803 to 12643474)
ctgttagattcgtcttaaaccaagagtaagtatcttcttctttcaatccttttgaatctgttatgtatatatatagaagaagctatacactttcacagagaaaggctttagctttataatctcatacttagttcgtgacactctcaaattctgattattgagttcatagtttccctcattaggaatgaatctcttacctgtctttacctttgtttttggttagaattattgtgaagataatcaaattttgtttgaataatcagtgtgcacattgtatgtttgtgccattataaggtgattgtgaaggttgagttcgattcagattcatgttctgtggttagagactagaaaagatagtctagaattagctcttagatagagacagcagtgacgaggcattattgttccgatatctttcgttggatgagtttggtccattaagttcgccattatattgtgattgtgaaacttgagagttcgattaaatgttggtttacattcatgttatgttgttagagattctcattgtattcaatgaatgtcacattatcttatctttgaggttgatggagttgatatgctggtgtgtagacaatgatgattatgtcaataaccagtactgttttcaattctgcagtcccagagtaaccgtggctgcatacaccatcccac

SEQ ID NO: 2779 - DNA, 527 bp, Arabidopsis thaliana
  Intron number 1 from transcript AT2G29570.1 (locus AT2G295 70) derived from phytozome v7.0 (chr-ID Chr2; pos 12650766 to 12651292 reverse strand)
tttgagagtcccagtaagttcttcaaatcgatttttgtttgttagggctttggttttgttgtcaatgttgatgctattggtgacctgattctgtgtttataggtttgatttgccagaagctagaatatgattgtagagaatgattcagtccatttcttgaaagctttagtttgtaagagatgaaagagaagataaaatctatgttaatagagggtttttggtttggaataaggtttgatatggctttgtttttgtgtagttaatgatgttattagtgatctgaactgttatttataggtttcatttgacagaaactagaacttgcttgatgagaatgagtccttccatttttgttttcagaataggtatagtctctagcttaaagactatagtttgaaagtgaatagagtttcttgatttagtgaaagttaacagaggaactttgtttgatattgactatgtggtgttaatctcattatttaaatggtgttgatgatgcagcacaagacaagattgcagattttgag

SEQ ID NO: 2780 - DNA, 770 bp, Arabidopsis thaliana
  Intron number 1 from transcript AT2G29840.1 (locus AT2G298 40) derived from phytozome v7.0 (chr-ID Chr2; pos 12733092 to 12733861 reverse strand)
attcaaatccctaaattggaactgggattttcaaagtgagtttctttatttaatcaaagtgaatttcttttaccaattatttttttggaagaaaaaatatatataatattttcgataatattgaaaatatgagtaagtgatgaagaaaaacacattagatgctaaagagatttaatacattaatgtattagaaagagatttaagaaaaaaaaaatgatttattacaaattatcattttggatttttatttctgttgaaattatcatgtattcctaatcacaacattaattgaaagctaaatctctaacaaaataacaaacaaaaaggaaagtagaaactaaaaagattaggaaaacaaaattataaaaatggaaactgatatcaaatcccaatagtattagattttctactaaagttatatataccctcgatctagcctctctgttataattatatgaatgatttaattcaagagaaccctatataataggattaggtattcaactgacttgctttttattgattcactaactatcgtatttatacacaatgatctctattaagagacaaacataaatccctaaaatataggttagaaactctatcaccaaagatattgtactaatcctaatcggattacacatatccccaatagatcaggaaaaatcgctcccactgatgttttccatgtgttactagagttgtatcgattcgtcgatgaattaacttcctctgatgattatactccagcttgtgctttaagagtgtcg

SEQ ID NO: 2781 - DNA, 342 bp, Arabidopsis thaliana
  Intron number 1 from transcript AT2G29890.2 (locus AT2G298 90) derived from phytozome v7.0 (chr-ID Chr2; pos 12744235 to 12744576)
cctgatccctgtgagtattctgcatttaacattcatcttcacaattgattctaattcctcttttgttgttttcgattgtttggagattttaactgatttgagtttttttttttctctttctgggggttgaattgtggttgggattgggaaagttgttttctcggtgaaaaattaattgaaaatctgagaagattgattgcatatgcagcaacttaagaaaacgtaaatgcaaatttatctctggtaacaacattgtttgttggtgatttaatgtttgctctctactctttggtttatgaaattgcaggattggtttattaagcgtcactgttgttggatttt

SEQ ID NO: 2782 - DNA, 530 bp, Arabidopsis thaliana
  Intron number 1 from transcript AT2G29930.2 (locus AT2G299 30) derived from phytozome v7.0 (chr-ID Chr2; pos 12757838 to 12758367 reverse strand)
gcttgcggattcctcctttggtttcctttccgatcgtaagtttacttctactacatgtctacatctttatcttcgaccacaatctacatcgtcttgaacttgaagtaatcttgcatgtcctaggctcctagctttagaggatttttctttgatgttttcgttcaattctgttgatttcactgtctaggtttctccttttgatttaaactatctgaacttgtaaccctaaccctagatcggattttgttgttgatagattctttataatcctaacctatatatgtctaccaaaagagtagatatgggttctagagattatattagcagtctaccagatgagattcttggcaaaatcttatcattgttttgcacaaatcgtgctgcttgcacatcagttctgtccaaaaggtggaggaatctgctcgagcttgtagacaaccttgatttgaatgacgcatatggtaatcatcaatacttctgtgattttgtggacagaacacttgctctcttaagcaattctaccaccgtca

SEQ ID NO: 2783 - DNA, 714 bp, Arabidopsis thaliana
  Intron number 1 from transcript AT2G30070.1 (locus AT2G300 70) derived from phytozome v7.0 (chr-ID Chr2; pos 12835107 to 12835820)
caccatctcttatcgaacagggtatttctcaacaggtcagtttttttttcttctgtgtttctcatagtaaccaaatcctctgttttatcatgttctgtttcaactctgttctgtctgttgcaatgagaattttctcaaaaatcacttttttcttctgggtttttgattttgggaacaatgcgaatttatgtggtcgagattggattttcgtatttgaagaagaagaacaagtggaagattaagggttctatttttgctctgtttttgcttcatttttggattgttttcccaagtaggattggtaggtcctcctgcttgaaccatatcgactttggtatttaccggaatttaaacaaagacgtgaacgcttttcatgtttggtgatattagattagttgttaacttgtgaaattgagccttctaattattaatgttattgttaatttgacaaaaggtttgattttgaaatttagtaaagtctctatttttaaggaaagaaatgagttggatgtgaaaagtccaacttttttttattagactgtttggtttttgtagttgacatctattggcagagtaaaggttctaagattatgtaattaggttaaatttaggtcatactttatgaaaactcaatgtttctgagtacataaatcttaaaagttcataatctttgttttaaaatgtttcagcatttgaagactttgtcttgtgcca

SEQ ID NO: 2784 - DNA, 641 bp, Arabidopsis thaliana
  Intron number 1 from transcript AT2G30090.1 (locus AT2G300 90) derived from phytozome v7.0 (chr-ID Chr2; pos 12844765 to 12845405 reverse strand)
ctggttaatttctcactctctttttctttctattctcttcaggattataccttaatttttttaaaaaattatatccaaatatgagatggttctcttctttcaaaagtacaaaaatttgattaaagaaaatatatttacattttgatcgacacaaatatatatatatatatattcacgcgtaatatatatattttccttcgtgtttttaaagagtgttatgaaatcacatttttgcttgaatgtgcttttaaatttcctattaattgtatagttttactagatgagctatattaaatagagatatggaaaaaaaagtgagatgtattaacatgtcatacatctttattaatctctataaaatgtaaaacatcatctattaaaaatataggtgataaactactttattatgtaagatactgtatatagttgttgtttttggctatacaaacatttatgattctataagccgaaagacgctaggtttgttaactttgaaatgtgttaatttatatatgtatatatagtaatacggcttattaagtgaactactgttgggattgatataaataacgtttatcaaattaattaatgtaacttaattaataggtggcaggggttgggaacaagctggtaggttccat

SEQ ID NO: 2785 - DNA, 404 bp, Arabidopsis thaliana
  Intron number 1 from transcript AT2G30130.1 (locus AT2G301 30) derived from phytozome v7.0 (chr-ID Chr2; pos 12868896 to 12869299)
ttgcaggttccatctccttctcatttccccataactatatgctatatattggtttttcttccatgatattttggtccgttgaaatcccttccatatgctttctatttttatccatatctctcttccaaaacattcagtgtgtgtttggtcaagtatcaaacttctttaaacatttgtatagtatacatacacattaaaaataaacatatttcactccaacaacccttattcactttcatattatttattcttaattagttgattagttatgcttgataaactactatatggacatatatgaatcagaaattgtgctacaaaatatgttctatatagaaaatgtttacatgattatttaaattgtcacaggagctaccagttcatcaaagagctgacgcggtgaa

SEQ ID NO: 2786 - DNA, 379 bp, Arabidopsis thaliana
  Intron number 2 from transcript AT2G30340.1 (locus AT2G303 40) derived from phytozome v7.0 (chr-ID Chr2; pos 12931784 to 12932162 reverse strand)
cttctggtacacatattttctacattaatgaatatttattttcttttcttagttaaggtttcttaatttgattactcttttgatatcgtatttgattaatctgaatatatagttgaacggatctaccatttttgatatttgactctttccaaatatattcaaaacatatatttatcccatttgttatagtcgaggtggtttatctaactagtataggtagaaattcattatcctaagatgcacatacatactaagattgagtattggtaagttatttacttttcgtacataatatttgattgagctatatgtatattaacttatggaataagaaaatgttgtaggaagtgggagagagccaaagaggagacgcagcaaa

SEQ ID NO: 2787 - DNA, 605 bp, Arabidopsis thaliana
  Intron number 2 from transcript AT2G30424.1 (locus AT2G304 24) derived from phytozome v7.0 (chr-ID Chr2; pos 12964613 to 12965217 reverse strand)
cacagacttgttggtgataggtaacatcttcttcttctgtgtatagatatgtcgttccatattaaattttatatcttctttttttctctatatacaatcttacatgaagtaactcatgtcttttttgtatcttagctatctttagattctctcatgtacttttttcaaccctttaacagcattatactatataacaactttcaaaaaaaaaaaaaaaatcttacgacataattattttacttatatgataatgctcgagataactgtgggataactcttttatattagcatatatcacttccaaatatgcttggctagctcataaacgttggtacgaattttgagtattaatcatgtatactcttgatgttacttttttgaaaattcttatatattttataattagaacatattttaaaaccaagatttacttttctctctattaattaattcaattcactatagaaaatatagttatcaaatttaaataatgttttttataacatatgcaaacattcataatgaaatagctaattaaaaagattttggccatgaactgaataatactaggtgggatttaatagcaggaagagtggtaggacgag

SEQ ID NO: 2788 - DNA, 646 bp, Arabidopsis thaliana
  Intron number 2 from transcript AT2G30520.2 (locus AT2G305 20) derived from phytozome v7.0 (chr-ID Chr2; pos 13004168 to 13004813 reverse strand)
ttgtccgccgttgtgtcgacgtcgtcggtgctaaggtattattttactcagaactcattctcacttctttgtaagtgttggatctccattttggctagtgtttatgtttttcttttctacctatgtagtagtaactgcaataacccaatctagtaagttagtacagttttaggtatgtttttcaataaatggcaagaatatctggtttagttattccataggtttcaaatacagtaatagtttgaaattgattttaaaatttcatctatcaattttcctaagaaaaatcagtttgagaccattgttcttcacttcttttgttctagtgtttattattaaaaacaaaaatctattttaatattaaagtttagatctatgattactgttgtcagactatgattgcgatttagattcgataggaatatttcatatttaattcggtttggtttccgaatcttaaattgagcaaatcatacttctaccctattccagttccgtgagactcaagtataatatctatgtaatgcaaaatgaattacgagtttaatattttaacatccatgaatttttgtaatgcttggttacagtatctgatacgttttttatatctatttcttttgatatttgaaaggcttgcaacgaggca

SEQ ID NO: 2789 - DNA, 1065 bp, Arabidopsis thaliana
  Intron number 1 from transcript AT2G30560.1 (locus AT2G305 60) derived from phytozome v7.0 (chr-ID Chr2; pos 13017535 to 13018599)
catttcaagagataactttgagagtgatcctaaaggttactttgataatttgcatggtagtggacagggtaacaagtgaagtgaatttgatctgtaatgaatagctatgccatggagatggttattattaccaaatctagtatctaatgaataaataaaatgagattttgctatacctcgtcttactctcttttgaatatatggtactataaaagagttccaatatgggtctatatcatgcaagaagtgtacaattcagtgatttgaacattaagttggtacgacttatttagtagcaatttggttctcactggcatttttgggctctcaagttaatccatttcatttgtttagttttgatgaacatgtcatgatatttaataatcacatcatctcattgtcatgacaagataaagataattgggataccacactggaattaaatagtattaatctttactttcaaattacaagaaactagattcgtaccactactgattcgtgttcacacatgattacatgagtcaatgttttggccacggtgagacatagtcaattctaattggaggttaaggtttggtttattgaaacgaacatgtcttcccgctacttcgacctcatcaatgtttattttgttaaagagttttcattaaatagaaatacatagtaggaggaaacaatacataacaaaaaaaagtttcatgactaagttagttttttctgtaattgtttttttttgttcggttagaaagaactctggccactccaaataaacaactgcagaacttgataaagcttccctaacattcaacaacaattaaataaacgaaattgcataaaataatatgactaattcgtgaaacgagcaggtcttcccgcctcttcgaccttattgacctcatcaaccatctacttgaaaatttactctattataaatatccgtcctctcacctctcacttttaaacaaaacttaagttttcttaaagagtcactaagaacttctaagatttcaaagaatggaaggaaaaggtggtagcggtggaggagggaaaggtggtggtgga

SEQ ID NO: 2790 - DNA, 738 bp, Arabidopsis thaliana
  Intron number 3 from transcript AT2G30820.2 (locus AT2G308 20) derived from phytozome v7.0 (chr-ID Chr2; pos 13130186 to 13130923)
acgtatgttcatatcgaaattatacttaacaactcacgcttaagattttggctccattgaaattaattagcattttcgatttgactggaattctagagttaagcatctgtcattcatttatacttgggagacaataattatgtttgcttgagacatgttcttcttttgcttgatatgtgatacttgagctgaagctcttctcccgtaatgagaagaagtttttttttatgtcttatgttattgaagaggtggtctagactctactagtgctttttttttctccattaggaatgcatcatttgcattgtatataccacagcctttggctttgtccttatatttgattttccttttctctgttttggtgtgctcagttatttgaggtgttggttttagaacttaattctttgtaaagaaaatatatacattatacacacagatgtttttttgggatgaatgtagcttatgtatccatgcattattgtgcaagtgtgtggaaggaaatatgcttaacttgcattagtgtctgcgtcttttatctttacttgggaaattatctgaaatttgtgtgcgttactcttctcaagttgaaaatcctgctagagcttggcagatatatttgtttgcatataacaacagaattagattaccactttcttcaatgagaacctaatctcactttgctttacttatggaattacaggcacagtttcttaaagtttcctgcgaaataccagc

SEQ ID NO: 2791 - DNA, 454 bp, Arabidopsis thaliana
  Intron number 1 from transcript AT2G30830.1 (locus AT2G308 30) derived from phytozome v7.0 (chr-ID Chr2; pos 13133363 to 13133816 reverse strand)
gttccacaagcaggggacttacccgtgatttgtcggtatggttgttttcttctttttgttaaattatattcaaagaaaaaataaacttttttacattttagtgcaaactttttgtgggcaaagtattaagtcctgtgtaattttaattttacctatttgtgggaatagtatgaatggtataatacagcggaattcatatttacaacgtgaaaatgaataccattcatcaccataatgatttgcttttttagctaaatccataatgataccctcatgttattatgttatgttgaaaatcttggttggtgtgatttgctttttaagctaaattcatttacaaaatttcgagtttggaggtttgttcgatttcgaggtgagaaatttcggtctggttcggttataagaaactttccaactaataacgaactctggtggtgaatatttcagagaaatc

SEQ ID NO: 2792 - DNA, 392 bp, Arabidopsis thaliana
  Intron number 1 from transcript AT2G30890.1 (locus AT2G308 90) derived from phytozome v7.0 (chr-ID Chr2; pos 13147874 to 13148265)
gtccagtcgaaacttctcctatctccgaggttcgtatgctcttctttctctctcgcttatcctaattaaaatctaataatctcaaactcttcataatctcattgatatagctgataaatctttacaatgaagctccaggcatttcctttgtttctgatcttataacctattgagtttatttatcatcgcatgattataatgtatgtaagtcatgtacatattattattccatgatgcttaaaggttatagtttttttttcctactctctgtataaaatgcctgcgtgttaataactttaatcaaaaactctgaatatatattggtatgaagctcttatttttatttttcttgaacagaaactaaatccaaagcttgtgtacgaaatcaaagt

SEQ ID NO: 2793 - DNA, 873 bp, Arabidopsis thaliana
  Intron number 1 from transcript AT2G30933.2 (locus AT2G309 33) derived from phytozome v7.0 (chr-ID Chr2; pos 13165622 to 13166494 reverse strand)
aaccagtcttcttcttctctccttcttcttctcaggttacttttctaacccattattcaaagaagatgaaaacttttgttccaaaaattttcaagtatatatataacccatagtttgaatttcttttaatggaaaaccaaccaaaaattgataacacaatatttttttcttgttttttatttgtaattaattatgtaaaaatgttcatctatgtctaagacatatatatatatatatatatatatgtttatctatttaattcaaagttataatgtttaatgaatttgctatttaaaagattcggaaagttaatctatgtcttataggactttttgttgtttttaaaactctgatccatgtcttagttttgttttttcttcagcagaatttgtttttatattctaaaatgtttttccttcctaacgttccatttctatttattttccttcctaatgtttttattttcgttattatcaatactctgaaaaggtaattcttctccaatttcaaaaaaaaaaggttcttacacatgtgaattgatgtggtgttcaagcttgcaaatattctagtagttactttttcttgttcagttcaaagattctctattgtctttttgtttatggtttctgaggtttggtcttcgtttttttactttttgttttcctaactcggtttatcttttttatccacttacataaattacaaattggtgaaacaaatgttagagacatgacaattaatgttctaactttaccaaccaaatcttagacttagacatcattattactgtttttaataccttaatcaataaataaaaacattaactatggtttgacaggtacaaaagcaattactgaaccaatagaagaagaa

SEQ ID NO: 2794 - DNA, 536 bp, Arabidopsis thaliana
  Intron number 2 from transcript AT2G31180.1 (locus AT2G311 80) derived from phytozome v7.0 (chr-ID Chr2; pos 13287293 to 13287828 reverse strand)
aaagcttaggcaacaggtttgtcttcttttttcccctaaagagtgattgagaaatcaaacagttttagggtcgacgtttctttttttttttgtaatgtcaacttcctttttcctttttccactttgcattacactgactctctgagaagtgagtattacccagtctaagttaataaatgattatttatgtaacaatttgcaaaatattttaacaccatgggggtggtaaggagattcctgtccgtgatttcctctgtctcaaaccaaaccaaagacttcattaatttgttttcaaatatactttaaaaaaaaaacagaaacaagatcttctatattactattaaaaaaggatatgcactttgatcaatgcaaaacatatggcatgtataagcttttcttttgttgttttcttctgtttttgagcaactaaaaagcaatataaagtaagaaattgatgaaatccatacaatactattatacgtggggcgcttttttaaaaagtgttttgttttttgtttgtttcttaattaatttag

SEQ ID NO: 2795 - DNA, 291 bp, Arabidopsis thaliana
  Intron number 1 from transcript AT2G31220.1 (locus AT2G312 20) derived from phytozome v7.0 (chr-ID Chr2; pos 13302718 to 13303008)
aagacagacgtagagaagaattaattgtaacaaaggttctaattttcccagctctgattactcattatcttacatctctttctatctattgtcaaattcaaacccttaacccaatgtttaatcttttggatcctaacaaacatttctatggtttcgtttccaaaattataaaagagctaactttttttgaaattagtttcaaatttttggtttttcttcttcttaaagattgttgaatgttacttttgatttgcaggtgttaaagaatcatctagagtactcgttgaacca

SEQ ID NO: 2796 - DNA, 809 bp, Arabidopsis thaliana
  Intron number 1 from transcript AT2G31260.1 (locus AT2G312 60) derived from phytozome v7.0 (chr-ID Chr2; pos 13326361 to 13327169 reverse strand)
cgctttctaattgctgttcctttcgtgggtctctggtaagttttgattttctcatctgctgttatcgagaaaggttgattttttttgattaatcgcactgtgatttaaggttggaggagattatagtgttagcttaagggtttttgaggtttcaatttagaatcgtattgctcctgatcatttccctgttaaaagtagataaaccccttgttctattgggaaggaattcgccgtttttgcttcgtcttcttgtgaaaaatagagttggttttaggtaattgactttgatcaaggtctattggttgtgcaaaggttgcgtgaatcttgtgtcagcctcttgattgagtatagattacttcgtcttcgctttctctgcaccatcaattgtcatcagagtgctaggcatttagtgcattgtccaaagattctgcttgtgcatgaatgctattgttgaaaaagaaaggaagtgtttgaaatcgaatagtcttttgagtgtcaagcaaaggataggtgggtctggtttatatccatcatggtggaaaacagatatagaaacatttctttagcaggttatgccacgagttccgtatccttggtttgtctttctgcgtttaaggatttgatttgccttagtgtctcattggttagtatattcattgtatgtgcttctagcttgaacattttagtggcacttttttgtttgcatacataaattatctctgtcattaggtgatttgcattgtggatgctttatgttattcatgtttgatgcaggatttgtagttgcattctcattgcgcactacactt

SEQ ID NO: 2797 - DNA, 415 bp, Arabidopsis thaliana
  Intron number 1 from transcript AT2G31380.1 (locus AT2G313 80) derived from phytozome v7.0 (chr-ID Chr2; pos 13382298 to 13382712)
tctcaactaaattccctccctgcgacatctgccttgtaagaatacctcctcttctctcttttgtctctattcgtatctgcagagatctttatttgttttgagggtatcttttgattgagctgttcttggtagattctttaagtataattatcgagaagttcttagctttataacatagattaaggttttagatttaagtttagtaaaggttttagtgggatctcaggaaatttgtttgtttttggatgtttttagtttgctaaggttggatatgtagatccaactttggtagatattcttaatgggatctcaagaaaaacatgctcaaagttgcttatgtagtaaatctctttcttgtgttcatctttgttgacttgcaggagaaggcagctttcatattctgtgtagaggatag

SEQ ID NO: 2798 - DNA, 806 bp, Arabidopsis thaliana
  Intron number 1 from transcript AT2G31432.1 (locus AT2G314 32) derived from phytozome v7.0 (chr-ID Chr2; pos 13397706 to 13398511)
acatatttttaatcgcggtacgttagatagttactaatgtaacaattttcgttttttttttatattaattatgcagaaatccatgtggtagaaactaggaataaaaagaattttcgtaatattgatgatctaacgtaacttagatttaattaagaaaactgaataattgtaaccaatcaaaagtaaatgttaaacaaatcgcaaatattagattagaagatgcaaatatttcctctacttcgatccatgcatatttaacatataatatataaataaatcgacaagttaataatattttagaaaatcatttttcattaaattaattacaggactattaaaattttatcaatcaagaaaatagtaccctacacaataaattttgatatagagctgagttttgttttaatttaattttggtaatttctattttatttttttttcttttcttggagaagattggatatatatatcttaaaaatcaaatatttggtttaatgtaatatatgtgacaatagcttggtcacatatattacaaagaagaagcaaaatgtttggttcaatgtaaataaacttagggataataacggtctaaacttagggatattgataaatggattggattaatagtagaaatttttaacctcaacatttcttgtattattaaatggcatccaaagtactagaatatttttggaaaaaattgtagtttactaatacactacacaaaaaaatataccctttatttatttatgattgaaaccttcttaccaggtatcaaggacccaaattatagttgacactggact

SEQ ID NO: 2799 - DNA, 707 bp, Arabidopsis thaliana
  Intron number 1 from transcript AT2G31600.1 (locus AT2G316 00) derived from phytozome v7.0 (chr-ID Chr2; pos 13448771 to 13449477 reverse strand)
aagctctacactggttgcacaaacgtcattaaacggtttgtttcactttccctttatttggttttaaaattctcgtataaaccaaagtaattgatgcttcaagttgtgttctttgcatattatagttggtgaagatgttgtagtgatgatgaattgaaactgcaaagctgttttgtgttatgtagtgagccaagagattgtttctctttttttttcaagtttgcagaaaggatttgggattgacacttgactttttttcaaagtttttcatagggtttgggagaagtcttagctttggacatcgagatagtgatcgtcggtaatcatttatagattcagtagttgccttgtgttaaaatattgctctatgtgctttgttgttctggttgatacacataactgacgcagatgcttgaagttgtctgttttgatgtgtatttgtaaaatagtcaggatatgagtattagcataactatatcaccctttgaaaatgtatttgtgttagaatagtcccattgtggtagtattaaaacataaaccaagtttcagatttgagtttttacaacctagatttcatatataggtaagtttgtatgctggtttgtaattagcatataatgataatttaagcaattctcacctaactctgcattgtttccattgtacattcagagccccagcaggaccattactttgtggaaaaccaa

SEQ ID NO: 2800 - DNA, 426 bp, Arabidopsis thaliana
  Intron number 3 from transcript AT2G31660.1 (locus AT2G316 60) derived from phytozome v7.0 (chr-ID Chr2; pos 13465210 to 13465635)
tcacccaagttccaaccttactcaggtaaatttgccagatagcttttggaattatcattcaagtcatttggtttgctgaactctgtctgacgtggtctgattttaagcgattttatgaaaatatttgtaacctgtatggctaatcatgcctacaaattgctcatcatcttgtctgatagattgtcttcaagctgatagtcctcttcttttatatatacatctttgaatgtgtctctacattatccttaggttctagatattaaaaaacggcagatagaagatgatttttttttaagttagtatttttttctcattaccttggtcccaatagcatcttctataagcctcaacaacaaccataatttttttttcccctaattttcttatccagatcacaacttggagagtctctcaagacaattattt

SEQ ID NO: 2801 - DNA, 552 bp, Arabidopsis thaliana
  Intron number 1 from transcript AT2G31680.1 (locus AT2G316 80) derived from phytozome v7.0 (chr-ID Chr2; pos 13474081 to 13474632 reverse strand)
agctcaagagtaagtctgtattgattttgattgcgatttgattgagctaagattagtatttcctcaatttgaatagtggatttagtcaattaggtcttgaaactgcaaattaggaagctggatttggtggaattgtggactttattctccagatttggtagattgtgttgattgattaggagtttgaatggttgtggcgatcatggcggacaaatgtatatgcggtttggactgctttttatttaccattcataaactataatccgtagtagtgcggatcgaaaaaaatagaacaagtctgcagcggactaactacgtaccgcttttaggtagaagtaaactttgtccaccacggtttgttatccgctccaaaaatagagggttgtctagtccgctaacggtttagatcttcaagattttctggtgacttattctttacttaggccaaatgtgaagtctatatgttcaagtttgatttgaatactggtttgttgattcatttgtggtttttgttttattttggcagcacattcggatacaacggttgcgagg

SEQ ID NO: 2802 - DNA, 762 bp, Arabidopsis thaliana
  Intron number 1 from transcript AT2G31730.1 (locus AT2G317 30) derived from phytozome v7.0 (chr-ID Chr2; pos 13488594 to 13489355 reverse strand)
ctgagtctcttctctctgtaagttcttttttcttcatttactctgttttgttccccatttttggtctttttgacttaacttagagtattttaaggcaaaataaaatcatgaatcttttggtattttttgttctcatcttcttgtggggtttttctattgaagtttgcttagctttgaatcttgtctaatggagctaactcgatccaaaataaaaacacgtataatgattaactagttctgctcattagatgaactaaattaatgagttaattccgtagtttcatgcatcctacaatgtattgtctatgtatggaagcaaagtatgatatcatatttaaacatctatgattgtgctactaaactttaaataatactttaagctgatgtgatcttatatggataacctctgaccattatctactttctttgaccattgctcttgttttctaatccaaaagtcgtatcttccaatgcattagttggtccaaacctagatttgcatcccttaatttgtagtagttaacatctaattttgatgttaaaaccaagacaccactttgtttgtctggtctgagaatatctcaaggcgtatagttttgtccttatgacgcttgcaaaagcaagttgttgagttgtaatcttatgtttttttctgcaacttgccttggatgaagccatgagattatctttataaatggtagcaagtaaaccggtttcttatgtcgaaaaaccgatcatttttgttttgtttgatgacaagga

SEQ ID NO: 2803 - DNA, 147 bp, Arabidopsis thaliana
  Intron number 2 from transcript AT2G31955.3 (locus AT2G319 55) derived from phytozome v7.0 (chr-ID Chr2; pos 13585502 to 13585648 reverse strand)
atactgctattgagcttggatacaatcctgtgaaagtatgtttattaatccttcttcatgttttctgtttgaatgtagcagaacgatatttgatgttcaagagtttttgcaaatcgttcttggttttgacaggtcaattgtgttatc

SEQ ID NO: 2804 - DNA, 402 bp, Arabidopsis thaliana
  Intron number 1 from transcript AT2G32160.1 (locus AT2G321 60) derived from phytozome v7.0 (chr-ID Chr2; pos 13662396 to 13662797)
tcttcccggaatcatcagtgcttatctcaagtaggttcctgttttttcttcgtttttactcataaatagcactatcttggcggattcaagaagacttgaccgagttaaatcttagacttaagttttctcaagctctttaaccatgttacttggttggattgtgtatctttgtagggtgattcgttagttgagtttgttttggtcatttaagtttgttgtgctttgaactcaaaaagcaattggcaattattgaattggcccatgtcctttatatacgactcaagtcccttctcatattttggatgtgggatatttcttcgcttttaggttaaatagttactttccttgtgcttggaaattcttacagttatcccaaggctgcggaagaaaatctgaaaaaat

SEQ ID NO: 2805 - DNA, 510 bp, Arabidopsis thaliana
  Intron number 1 from transcript AT2G32320.1 (locus AT2G323 20) derived from phytozome v7.0 (chr-ID Chr2; pos 13726918 to 13727427)
aagatcgattttatcaatctcaattgaacaaggtaagttttattgtttctcagttcatctttttattcaattacttgttttctatgtcaatcgtttgatttatcttctggtccttgaggttgtaaattgggatagaccacgtttgtttattgtaattgatcccctaagctctaaaattatttttcattgattttgattgcgattagtatgaatctatttggagatatatggttttcgatgctatgatttggttctagggtttattttagaattgttatttcagagtaattagatatttcgtgatttctcaatcgatttctcaatagatttgtctctttgatttggctaatctaatcattacttgcgttctgtcttttttttcttttcttttcttttttacctttttgattattgaggatcatatttggttttgtgtttcattgatttagtttcatcatgtgttaactcttttcaatttgtttcttttttgcagtcgactctgttagctac

SEQ ID NO: 2806 - DNA, 507 bp, Arabidopsis thaliana
  Intron number 2 from transcript AT2G32320.1 (locus AT2G323 20) derived from phytozome v7.0 (chr-ID Chr2; pos 13727431 to 13727937)
taaccaaaattgaaaccaaaactaaggttcgtgatcacttattccttttgatcctttgagattcatgtaaattaggttttttcttgttgttgttgctgtgttgtaggataatgtgtttgtgcagctggtttgtttgattcaatatcgtgtagtgaaatctagtgttgatgatgcattttatgagcttcaaatccctaaagagcaaatcctagcttatagtgattctacttttgttaagctaaccagttggtggtttgagtcttatgacttgtttattagtgtattaattaatttattttttcttaagaaccccaacttaatacactaccattgcacaatgccaaaaaataaaacttctacccaaaatctaaactacaattttttttaaaatcaattcataaaatattgctaagaacctttgctaataacctcccattgtggatgctcttagagtctaatgttagaacttcagtttcttcttttgtagccttcttcatcattcaaaat

SEQ ID NO: 2807 - DNA, 402 bp, Arabidopsis thaliana
  Intron number 2 from transcript AT2G32400.1 (locus AT2G324 00) derived from phytozome v7.0 (chr-ID Chr2; pos 13755591 to 13755992 reverse strand)
tctttcgtgggtcctttggaggtaccgtgactgttcttctagttcttttgtgtttcaaacacttgtgacactcatccatggctgatacagtatatcaaacatattatagaaagcggtcaatgcacatcagtagcaacaatatttcattttgtgatagttggaaatgattggcacatcgatttacgttttaatccgttttttattggtacatattttgggttccgaatgctaataatgcatagaacaatatagaccgcataccctaaacaggctgttactaggacctgtgtttcctgtacataagtggaaacaaaactttggttttaccactaagggcctggtttaagcttcagtggtttttgttttgcagcttttgaattgcttgagaaagaagtggtggct

SEQ ID NO: 2808 - DNA, 308 bp, Arabidopsis thaliana
  Intron number 1 from transcript AT2G32460.1 (locus AT2G324 60) derived from phytozome v7.0 (chr-ID Chr2; pos 13783762 to 13784069 reverse strand)
gcttctcaggttataaatttttatcataaatcttttttttcttatttcttcatttattaatttttgttttttaaattaatcaccttatttgtttcttcaattcaagaaactagagggctttaaattttcttatatgcaatttttttttcctagttaaacacacaatttgcatgattaaatgtgtttgaactttgaatctttctttctcttggcatgattaatcttgcttctctatttttttgtttgatgcttataagcatgtttttttttttgtttttgatgtatatagttacctggaagaacagaca

SEQ ID NO: 2809 - DNA, 665 bp, Arabidopsis thaliana
  Intron number 2 from transcript AT2G32487.1 (locus AT2G324 87) derived from phytozome v7.0 (chr-ID Chr2; pos 13792209 to 13792873)
cacgggctactcatcacttcatcatcattatcgtatgtgagctctctctctctcaaatatttggcataatttttgaatgttaaattttaatatcttaaaaatgtgatcactaaagaggtaaaaacgtttggttgcaatttacagccttcgctacttgcttcaaaaacaacacatgtatggttttaggtaaaataaaaacatggtactaaagaagaatatgcatgtgggtgcgtgagagaaaaactcgttatcttcttgctaatgattttggaatattgatgtattattaattcattattgacctatttgactaattaacccctcttggccggttaaggatcaaagatgttttccaaaagttgtatatatgtatggtttgcaattctaaccaactagaccggttaggggtaagtcagcattctctcctctgatctatgtatatgcgtttctttggtcgactcatctctcccaaaatatacttgatcggagaagagaagaagaatgctaacttatccggaatgggctagctggtgattttagacattatgcatggtatatatataagaaaatgtctaagatctaaaggaaagttgtatgttggtaatattttttttttttaactccatgcaggatcaagctcaaagaacggcgtaaaaccggagtca

SEQ ID NO: 2810 - DNA, 667 bp, Arabidopsis thaliana
  Intron number 1 from transcript AT2G32520.1 (locus AT2G325 20) derived from phytozome v7.0 (chr-ID Chr2; pos 13806733 to 13807399 reverse strand)
acactgtaagagcttctcttttttgtctctccctgagttttttttctacttagtgccatttttatggttgtgtttggtgtatcataagcttcgactgtatccgtagtgcctgattttgaagtaaaaaaaaattttggttatcctttccgttgaatgaaaatcatcatttcttttgatatcccccaaatctcggaatctgttgtgtatgatgtatggattatatttgatttatcatttcaatggcgtttctgcttcaggattgtgtagtgttgttctgtggtagagaaactgggaatgagagtaagagatgttattattgcttagctacttctgaagatctccgtataatcatagtccttatcaggtttggttatagaactggttgatttaagaaggaagattgtgagtttaggtttcagttcacaaatgatcagtatagtgataaacagtttaggtattgttttggtcagagttttcggcgatgttatgctttgcttgtaactctctccatggatagactggtttctcttgaacattggagtttcttgattattaggattgtgaaaaatgcatttgatttagctatttttttgtgtatgattcttctataatcttgattttactctaaagaaaacttatacactgtggtctgttggttagacatttg

SEQ ID NO: 2811 - DNA, 262 bp, Arabidopsis thaliana
  Intron number 2 from transcript AT2G32540.1 (locus AT2G325 40) derived from phytozome v7.0 (chr-ID Chr2; pos 13815401 to 13815662)
actaaggtaaagggtttgtttgtcttttacaaattcttcaaacaatgtttatctataatttttttgaaaattgttgtgattgataaaaatataaacaagttcttcagccaattaacacaatgacatttgaattttaaaaaaactgaaaaaaatcaagattcattcatttcttttcgtaataattattgggaattttcttgaaattgtgtttttgtattaatataaagagggagtacgagaagttaagccagaaagtagaaga

SEQ ID NO: 2812 - DNA, 667 bp, Arabidopsis thaliana
  Intron number 1 from transcript AT2G32580.2 (locus AT2G325 80) derived from phytozome v7.0 (chr-ID Chr2; pos 13827995 to 13828661)
ttgctcttcgttgcctcttctcaccatcccaactggtaatcactatttccctttattggatcttgcttgatcggctctaaagtttattcattttccctgagacaacgagagcaaatttagtacctttttcatatttggtattgtttagtagtagttggtgattgagttgccagattgcatgctttagcttgatgagggattttgagtttgaatctctatgcagatagatagacaagaattgtgtagatctacaagaattgttttgtttctctgattatttggtttgataagtatatctgaagctatagtttttggtcatggagatttgaagtttgcaggctgctgttcttgtttaaacaccaagtttgagtctttgagatctgacttgtgttgtgatttagcttctggtttacttgttctggtcattgtgacttctaatagcagtgtatgtggtttactctgtgtttatctttatctttatccatgtatgtgattcactcttaatgaattcatggaggttgatatggttgtccacaatgccttgtgatcattgcttctttactatctacaaacttctttatctactatatgtgtatttttcggatgataccaaaaataaaaagcctaactctttttacttgttttcatattgctgcaggactcagca

SEQ ID NO: 2813 - DNA, 960 bp, Arabidopsis thaliana
  Intron number 1 from transcript AT2G32720.1 (locus AT2G327 20) derived from phytozome v7.0 (chr-ID Chr2; pos 13877406 to 13878365 reverse strand)
gaaaggtttcattcttctttctccttattctcacctctgaaattagagatctcgtgcttcaaagtttccccttttggtgtttgcatgagattaagcttttgaagtctcagatttctaagtctaaaattatcagatcaaatctttagatgggtagagagagtagaaaatggtgtagttattaagcttatgctgaagatttagctcttttgatctatttatcagctgaaaattttctaattttgattgaagatggagaaatgtagaaatagttcttattgtctttagagtttgtttgatcgacatcaacctttcttgggatggactactgacacttgtcgattagttgtttgccctgaagatcgatcgtttttgtattgtgattattaacttgtgaaggaatctgtagatacatccttgagcctcccttcatagtgaacttgatttttgttttcttcattgattggtttgtgaaatcagtagattatcacaagaaagtaggaaacattaaatgttttggtctgttgttccatcagtagtttatgtttcttattaatattgtcacttaagttcattttttttgggagtttacctctgtgcaacaagtttgctatgtacacagaacaatcctttttatcaagttcagaagatcccaaatgtatctctggacttggttgttggtacagtaatttgtttcaagtattcatctttctattcctattgtttgatttttagagttatatgcaccatatcttgtttagtccaaagaaagcgataacctaagaacttttctttttgttgctccattgtttcttacattttaatcataagcctcagaagtggatcttcccatgttttaaacttcttgatttgacaagaaatcttcaaagttcagaagttctgtaattgggtttcatttgcctctcctaacttcacacatttgcaaaaaaatgcaggtgtaca

SEQ ID NO: 2814 - DNA, 554 bp, Arabidopsis thaliana
  Intron number 1 from transcript AT2G32730.1 (locus AT2G327 30) derived from phytozome v7.0 (chr-ID Chr2; pos 13880300 to 13880853)
ttctggcctgagatctccactagtgtccccatcatgtaattctcttttaaaccctttttttccggtttgagatttagggttttgttctctcacttgatctgtttttttattcgggatattctagagaagattgtgggatttggattgtttgagctgtggttgtgtgtaggtcttctcgatttgggtattaaagttcaaaattttgagtgagggattgatagtttgtggcgatgcagattcaatgggtaggataagaaaagtaaagttttttattttacatgactagctttagcaagttctgtagtgatctttatagattatgaatgagtaattgtatctaacttcttcctggacatgattatgttcttttactcatgtaatgtaaaggcttggattcgttttggtttatcatcgtacattctagtggtatagattccagttgtagaggctgtgctggcgcaatgcttagggttttatgataatctctctttaatgatttgcactacttgacagcttgactcgagagaatttttttttttacagtgagagtttat

SEQ ID NO: 2815 - DNA, 518 bp, Arabidopsis thaliana
  Intron number 1 from transcript AT2G32910.1 (locus AT2G329 10) derived from phytozome v7.0 (chr-ID Chr2; pos 13959168 to 13959685)
catcgtcatagaaatcctgctctttcttcgattctgtaagagttcttcgagcagactctagattcgatttgtttttttccttttcgggtttgtttcaaatcaatctcaatttcagggtaaccaaagtttgagcttattcattttgattctgcccggatctctatacatgtcaattacagtctttttacattttcttgatttggaaaccttttcgggatttaattgattagcttaagattacaagtgatgaaaaaaaagacagagactttagcaaatgttttctctcatctcttaattgctgtcttaattacaatcttcttgtttcagttactgttttgtaagacattgacattataatctacttgtttggagattggaattatgagaagagaatctttctgatgccaaatgtcattgaataatcatttgctaatgtttcttttaccatatgattcatgatctctttttcgttttatgttgcagcgactaagctttgaaatctgcttgttccttgaaaa

SEQ ID NO: 2816 - DNA, 624 bp, Arabidopsis thaliana
  Intron number 2 from transcript AT2G32970.1 (locus AT2G329 70) derived from phytozome v7.0 (chr-ID Chr2; pos 13994416 to 13995039 reverse strand)
tgttttccccttgacgagtctccagatcgggtaattttatctatctatttgatctgcattgccgcttttttttttttttataagttatgattcacaggatcaatgattctgcagttaattacgtgacctgtttttgaatgaagtacaagcttgttgagcctttaattggaaaactatgttgtctttccagacaaaacaagatctgtttttgtggttttgacaatttattatctaagttctgcaattaaagctatcacttatttgtgtttctttcattatcttgattccaggcttatgttcctctcctgaatctgaactagtaatcagtttttggtgttaatgtcttaaacatttccctctgaagtgaattatatttgttctagcaattctcttgtccagtttcttgaaattttcttctacgtatgtgatattttaaagtctcactcgtgttggctactttttcttagcagagatcttaatctgatgatactttcgtgtgttttttaagagttaactacattgtcacactttatttgcttgattgttctctgcttttctggttaacctttgtttttttggttggttacagagacttgcaatcatatctttctgatctcagtattt

SEQ ID NO: 2817 - DNA, 517 bp, Arabidopsis thaliana
  Intron number 1 from transcript AT2G33120.3 (locus AT2G331 20) derived from phytozome v7.0 (chr-ID Chr2; pos 14044637 to 14045153 reverse strand)
gattcagtgagtcaaaatattgctcgatctgtaagcgtagcttgtttgtgttttgatttatccattgtttgaattagattttttgcctaattgagaaatatgaatcgagttcttatgtttggtatagtttccagtaataattatgtattggcgttgataattaattgatgttagatctatggtaatcagtgatatttttggtggatctatcaatgaatatttgcaatttttgttctggatctattgattctttgcttatttgcgtgtagctttcgatatcatgaagtttttggcattagtgtattgtgttctttatgtaactctgttttactaaacctaattgggttttgggtgatgttgatggcggatatggtctctttatgatagtgttaactttcttatcagcgatatattgatgaatctattgctttatctcttaatatagagtttaaaatggaccggttttgttttcgtttgtgcagcctattgtgttgttgcagttgattctgctgggagg

SEQ ID NO: 2818 - DNA, 517 bp, Arabidopsis thaliana; identical to SEQ ID NO: 2817
  Intron number 1 from transcript AT2G33120.1 (locus AT2G331 20) derived from phytozome v7.0 (chr-ID Chr2; pos 14044637 to 14045153 reverse strand)

SEQ ID NO: 2819 - DNA, 371 bp, Arabidopsis thaliana
  Intron number 1 from transcript AT2G33370.1 (locus AT2G333 70) derived from phytozome v7.0 (chr-ID Chr2; pos 14144271 to 14144641 reverse strand)
tcgaagcgaggtatgtctttttcgattccaagccttcttctttcgtagctgttgcaatttagtataatttgtttttgaagcttccatggctgttagatttaataataattgaaatcaatctactactctcagtatagaatgctcgaaagtttgaacctttgatctcgatttcttcaattccaagtaatatgatctgatgtattcatctagacagctcattaacaacatttgatatcaaaaatattgaatttgagacttgatgttattgaaaacagaaaaggtaaatgtttttgagcattgttctaatggtgcttgtgttttgttgtttgatttgattaggacgtggaggaacgtctggtaacaaattcagg

SEQ ID NO: 2820 - DNA, 718 bp, Arabidopsis thaliana
  Intron number 2 from transcript AT2G33390.1 (locus AT2G333 90) derived from phytozome v7.0 (chr-ID Chr2; pos 14151946 to 14152663)
aaccaaggtaatatcatccttaacaacactatctctgtagagtattatttcaagtttttcgctgtatcgtgattctcttctcttttatttggtctagctcttacttaaatgttaatgatttgcaaatgcgggattcgtatcggaaaccttaggttagttttgttttggctatttccgtgcttttggagtggtcttcttgatctttgactggtggtctttttgtttaagaatggtttccatagagaaattcttatagttgctctagccatattgtaaaccttagattagtattgatttgactatttccaatatttttgttgatgagcctatgagaaacaatttggcttccctgtgtaatgtagctgataaatttcttatagcgtttgtgctcctatctggcagcagtttagtgtactaactgatagacgaaacaaacctgtagtcctgtttctcacttcaatttggggttgtggaatctgaatttagtaaagaaccttgaagataatctacttactatgtctagaaacactaactaaacccattggaaaagcttgtcgtttacatccatattggtagttgaaggtccaatagagtagttatcttctgtttaagaacttactcttttacattgttgtttttccccttggcaattgaaaacaactatatatcttacgtctgccattttatgcttgcagcgaagttagcgatacagaggacg

SEQ ID NO: 2821 - DNA, 585 bp, Arabidopsis thaliana
  Intron number 3 from transcript AT2G33530.1 (locus AT2G335 30) derived from phytozome v7.0 (chr-ID Chr2; pos 14199333 to 14199917 reverse strand)
ataagatcactggtaatttattaaaccgaattatctccatttcattcccagttataactcaaaccctagaactcaaatcttcactcttttcataaatagtgtagtgatttaggctttgtaaaagaaacccaaattgataccaacattacttgttatgttttcagacataaactgctctagataattgttatgtttctatagttcaagtatttttctttgtgtatgttttgaatttgagtatttttttcattttttttggtcgagtagtaaatggtttaattttgtgatgatgatactggggtgcatgcgatatgaatcttgtttgatcgcttttaaaaaaatatatatatatattaatgtttccctgaaaacatttcagcttttatttgttgttctttctcagtctgacaaaaagagaaaaataatcgaccttttttgcagaattcagatcacatctgaggattattctcttcatctttgtttctttttgtttgtcttcacatatcaaacattctaatatttgtcttttttgtccattttcgaataaaaatttgcagcaaaagacaatcttgtgttcttgcaaaa

SEQ ID NO: 2822 - DNA, 316 bp, Arabidopsis thaliana
  Intron number 1 from transcript AT2G33590.1 (locus AT2G335 90) derived from phytozome v7.0 (chr-ID Chr2; pos 14224725 to 14225040)
gcactgtcagagaccctggtactgaatcttctctccttttactctcttcctctgtaaattttccgcctttattcactctgatgtctcgttgacttgtgtgtgcgtgcgaagtagaaagtctgttcccaaagtttgatttttttcttaatctactttctaggtgtttagattcgctagtttctgttctctcgacggataaaagccttagcttttgatttttgtttgttgttcccaaatcattttagtttgcttctcttcttttagtgtagttgttgttgttctgatgaagagtttcgcatggttcttgttatagata

SEQ ID NO: 2823 - DNA, 484 bp, Arabidopsis thaliana
  Intron number 1 from transcript AT2G33750.2 (locus AT2G337 50) derived from phytozome v7.0 (chr-ID Chr2; pos 14272107 to 14272590 reverse strand)
ctagccgctggcgatttcaaggtaaaacatgctttgtttattttcaagaatagggtttgagaatcaataattgggatctttgactttcttgatccaaaagcaagataaagatttcatttttaagccttttaaaccaagagggtacctctggattgtttatggaaccctaaaaggaagatgtttgaattttgtttgggaagaaagagtatgctttttctaatcaagaatagggtttgagaatcaataattgggatctttgactttcttgatccaaaagcaagataaagatttcatttttaagccttttaaaccaagagggtacctctggattgtttatggaaccctaaaaggaagatgtttgaattttgtttgggaagaaagagtatgctttttctaatcaagaattgggatctttgaatttcttgataggataatgtttcatttggcaggtgatagcaggagaagcaagagattttaagcttgg

SEQ ID NO: 2824 - DNA, 920 bp, Arabidopsis thaliana
  Intron number 2 from transcript AT2G33847.1 (locus AT2G338 47) derived from phytozome v7.0 (chr-ID Chr2; pos 14319291 to 14320210 reverse strand)
ttcagtttcagggcgctccatttggactttccaaggtacttaaatgacttagtggaactcggtgttttgttaccttttgactttttttggtgaaacttcttgttgaagatgtgaattatgatgaagatagagactttgatacataaggcagaactgtatcctttaattgttgcattgttatatcttcttcctgtttattcatcatatgcttgtagattaagtgtagagttggtatgtcacttttaaaggttgttgtgttggtcttaaaggttatgtgcaatagtaaatggaggttcgatagatggatgaatttctggaattgaattctgtcattgcttggtttactagttctgttaggctctctcttgtttaggtggacccttgttttcagttttcagttatcgaccacattttgatgtttaaatttgtcgcagttttcacgagtagagttctacttcttatacacttacgaattggtgttttggtatgagacttgaagtttatgttggcatttaatttccatctgctttcttcgccttacttgagtagttgggtcaggaaattaagagactaaaatacagccttccctgtggcataatttgacaaattttgaactatatttcaaatgtcttgcatgcaatgagaatctcaacttttttctttgtcaagatgatgaaaaggataatgatcagaagtgattgatgtaagccatttttatcatgtgttcttcttggagttaagtcttcaatataaaaaggggaaccttgatgtgtgatgtgtgcattatgccctctaatgttttaggttatgatagtgtttcacatgaattgccaatagaaactttcatgaatcctgcaacacatgaggttatgttttctcgatactgatatgatgatgttctatttgctcagattgcatcg

SEQ ID NO: 2825 - DNA, 496 bp, Arabidopsis thaliana
  Intron number 1 from transcript AT2G34315.1 (locus AT2G343 15) derived from phytozome v7.0 (chr-ID Chr2; pos 14482443 to 14482938 reverse strand)
aaaaccaaaatagtgggcatccgtatactcaccaggtcataatatgaagtgatatctcgtatatatgagctttgcctttagataacatcggtgcgatagccgtcattctcacgaccgatcgatttgattacaacaaataaacaaacaaacaaacaaacaaacaaagtagcatgtttcttatatgttcacgttgtcatgccagactattttttaggaatggctattgttaatagatttttaaatattgccattcatcgatttctcaggaaggaaataatatgccgggagaaaaagaaaagaagatcgaacctaagaaccttacagaagcagagttaataacgatggaagaaaagtcccggatggagcatgagcataccatgaatataatggaacacaaagtaaaactgtatttaaaacttcgtataggtttaaacatgttcttgacaatacgtgattgattttaatattctctcgttatctatctttcaggtggagc

SEQ ID NO: 2826 - DNA, 347 bp, Arabidopsis thaliana
  Intron number 1 from transcript AT2G34650.1 (locus AT2G346 50) derived from phytozome v7.0 (chr-ID Chr2; pos 14590698 to 14591044 reverse strand)
caacctcaccggcgattctccctctcttccgccaggtaaaaaatatcaaattttattgaataatttaatattatggacaaagtcagattttttttcaaaaaaaaaaaattgtgaaaaaagattcatcatcatcaatgtatatatatattttatagttacatgcattgactctgttcacatttgttatcttgttctgcaagaacagacctgttcttatcatgtcggtcttttccagttctttgaattgttatcaaagagtctttttcagcccatcacaatttataaacgtcaataattatgattttattagctaatgagtatttattttgtttttggttacagatttt

SEQ ID NO: 2827 - DNA, 745 bp, Arabidopsis thaliana
  Intron number 3 from transcript AT2G35020.1 (locus AT2G350 20) derived from phytozome v7.0 (chr-ID Chr2; pos 14757432 to 14758176)
gcaaattgggtgtggtgcttttatctggtggacaggtacttttaattattgatgcttggggtgttatgttgctttggaaacaaaacattgatctggctctgagtccttgtcttggattacttctatgtagcttactaaagattgttgagaagatgtttaatgattctaggattatggttggaatttggggggtgattgctgaaatgatgttggaataatgcgtggtacctaattcaaataatgcatttatagatgtccgttacttaaataattgctaagtctgaaaagtgaaaagtacttattttgataattgtggtcataaaggcttaatatgagtaatcataactcctttgaaaacctaaaaacccgtcggtgctttcctctagatagtgaccaccttattatgagaaagaatggttatcacgtgacctgaaagatgctttataggatcttgtaatcttctttacccttttcactttgtcttcatttacttcagcatttaataccttgagaatatttttctgtggatatgtatgggagtgtgttatcacctgtaactgtatgatagagttagtcaattgaacaagattcagatgggaataactactttcaaataagatattgattgcctcttgtatccttattgtagtgtttgttagtatactatatcctcaactcatgatattatcttgttacaaaaataattgcagggaacaagacttggaagttcagatccaaaagggtg

SEQ ID NO: 2828 - DNA, 550 bp, Arabidopsis thaliana
  Intron number 1 from transcript AT2G35120.1 (locus AT2G351 20) derived from phytozome v7.0 (chr-ID Chr2; pos 14806681 to 14807230 reverse strand)
aaggatctccgttgctcaacgagggttttcttccggtgaatctcaatctcctttctctttgtttgatctcctctgttgattactctgcgtttttgatctgagattgttctatttgaacttattggtttttggtttgttctcgacttctgatcggattaaagcgtttgctttttgctggattgattgtctctggatatcgctattagctaatatttctccttttcgtatcaaatcccagaaattgcatatgatttctcgagtctctctgttaataatgataatcttcttacaagtgttcagaaacttggaggtagtgagtgatatgttcatgttatacgcattattctctaaagttttattcttgaagtagttttggggaagattttgaaaatctgttgttttgggcctgaaacatgttgtttacagagaaggaagatcttcaagaagttttaggaatgttgattattttgccatttaaccttactgattatattctcttttgttgttgttgttggcatgtgtattatagtggttttgaaggatttgaaat

SEQ ID NO: 2829 - DNA, 535 bp, Arabidopsis thaliana
  Intron number 1 from transcript AT2G35140.1 (locus AT2G351 40) derived from phytozome v7.0 (chr-ID Chr2; pos 14813455 to 14813989)
atcttcgtccccctccttcgccgtttcgttttccggtaatactccaaaaaaagtataaataaaactcccgatcgttcgtgctttctcttctccttcattgatttcaatagatatctatcttccttgcttactattttttctcgtttatggtttttttttcttttcatgtatgtttgtgatagaagtcgaatttaaaaaccaggaaactccaagccgtgattttttttcccaggtttgattggttcttctgcattgcttttcttaaaaattctccatttaatgttcatggctactgtttaattatctgtgaatatgcttgagagattagttacgtcgccgttttgatttatctgtggatgttcaatagcgtcactaacttctttcttttcttcggtatttgttgctttatttgcttacttgttctaaaactttttttaaattggaatttggggttttactgtttacattattcagtttgctctgtcttagttcaacaaatgaaggaaagttgttattttagttttctgtaacagca

SEQ ID NO: 2830 - DNA, 535 bp, Arabidopsis thaliana; identical to SEQ ID NO: 2829
  Intron number 1 from transcript AT2G35140.2 (locus AT2G351 40) derived from phytozome v7.0 (chr-ID Chr2; pos 14813455 to 14813989)

SEQ ID NO: 2831 - DNA, 180 bp, Arabidopsis thaliana
  Intron number 2 from transcript AT2G35210.2 (locus AT2G352 10) derived from phytozome v7.0 (chr-ID Chr2; pos 14836464 to 14836643)
catcggagtcttggcgtccacattagcttcgtcaggtcatttgattcattcattcattttcatcttctgattctattatagagacatttcctaataatctagggtttagagaatctgctttttagccaagaaattgtgttgatcttcattttttgtttttaggtcaaccaatttagattc

SEQ ID NO: 2832 - DNA, 558 bp, Arabidopsis thaliana
  Intron number 1 from transcript AT2G35550.2 (locus AT2G355 50) derived from phytozome v7.0 (chr-ID Chr2; pos 14929367 to 14929924)
cgccactggtaactccgacgatttttctcgtttgcgtaagccgaaagatcactctttttttggtgtcgactctgtttctgccgtatgattcttttggaaccctagtcacaggtttttgattttgcatggtttattgtagcgagttaattttttccgcatatgggtcttgattcttctttcgttaactcttctgggtttgccgattttcaatcaaacaatcttgaaagatcaaatcttttcctctacgtatgtagtctttatatctctgttttatctgttctgactatctgggtttcaattatcaagtttgcttatttagacttatgcatatcagattctgtcttgtaaaatctctgtcttttgattgaaaactgatactggaagtaaactatagattatattctctgtaagtagagcatgtaggttgcttctgcatctgtgtgttgcttaataatgttagtacttagtatcaattgttgtttggaggtgttggctcatcttatctgcttttgaaatgatgtaggagctgcaacgcgaaggtgtgatctttccactgaa

SEQ ID NO: 2833 - DNA, 598 bp, Arabidopsis thaliana
  Intron number 1 from transcript AT2G35605.1 (locus AT2G356 05) derived from phytozome v7.0 (chr-ID Chr2; pos 14946330 to 14946927)
aaatctgggaatatatcaagcttaacaatcttcaggttagggtttgctttatcttctcgaacatttctgggtcttctctctgcgagttctactggattttgtcttttaattaagctctcgttacttaaattaataacctgtttatgccacgtgggtgattgattgatctaatagagcttgtttgactgtatctgcttaagcatttttctgggtgtaggaagattcgtagaaattttgaggctttgtgttgtcctgaagtaacttgatttcttcaaaatggtagaacaaggtgttgtgattagcctttaattcggtgattaagtttatctttgtgactgcagcttatgatcttgatgttttggatatctgatttgttcaggagtcaacatttcaaagcctaacttttgtagctatatgttcttgcttatgttgagtgaagaaatcactgcttttagggaaatttacgagctaatggaagttactttgatcgtgttgttagccttagctggtcttacatttctatgttttagagattcttgttttccaacacatactattggtttttgatgtagaatccggtgaacaaaagggagatact

SEQ ID NO: 2834 - DNA, 446 bp, Arabidopsis thaliana
  Intron number 6 from transcript AT2G35620.1 (locus AT2G356 20) derived from phytozome v7.0 (chr-ID Chr2; pos 14963240 to 14963685 reverse strand)
agtgaaataggaaacctgtccgggctgaaaaacctgtacgtggtttttttcctcgttcttccaagtggatttgttttcttagcctctctaggatctgctatttgttgttctgctatctactctcaccatttagtatcctctataattatattgtgaactacaagaggttcttctgatcttccatgcagcaacaacataatgttttcgaaagtacttatttctacagtcgtggtgaaccctaaaaattatagggagtttgacataacttatatttaatcacgtattgtgttattttttccgggtgaaaaactctcaaatatgatgatgagaattgtaaatctatgctaggcttctttcatattaaatgggcatatcatctacattcttctgaactactatgatttttgactctcatttatgaagggacctctcaaacaacaatctca

SEQ ID NO: 2835 - DNA, 395 bp, Arabidopsis thaliana
  Intron number 1 from transcript AT2G35640.1 (locus AT2G356 40) derived from phytozome v7.0 (chr-ID Chr2; pos 14983485 to 14983879)
ttcatttcacgctgagcctataccgcccacagtaggtaccttccgttttatctctcttcttattcttaaagcctaattaaatgaccactaaagttagattttatattaaatctataaagtggatttcgacattccaacaaacaccctcaagtcaacttgttattaattataatcaatctaattataaatttaaaatcaaaacttatacaattactatgaaggaaaaaatgtaaccctaaatttgcttgtgtgtgcatagacaattctttacaataaagttcttgagtacattaagattaaagtagtaattaaacccgcattttggtcgatgaagagactgataagagtgtgtacattcaggtacatcatcgacaaagcgaaggagaacaacgccg

SEQ ID NO: 2836 - DNA, 496 bp, Arabidopsis thaliana
  Intron number 4 from transcript AT2G36020.1 (locus AT2G360 20) derived from phytozome v7.0 (chr-ID Chr2; pos 15124460 to 15124955 reverse strand)
gatatcgaggaactcagattttggtgccaatactggtattgaattatttatatatgatccccttttttctatcctcgatacttttaaacattcatatataatgtgtagtgtatgtagtagatttgtagtgataggcaaatcgattttagttcgatcatagtgatatacttttctctgttatgggtttttgtttgattttaaaagagaaaaaaaatcaaaattccgttaagttgatgtcttctgctagaaaaaccatttatgaatacacctcatcttttgtacaagtctttggtttcgaacgttgattatatacctagtctggggattactgggacaattgtattaggtttattttaaagatatctcaatatatgtgatgcacgtaattctaatatgatagtttattgtcaatatgtactcgaaaatattaatttgttaaacatttgtatttgaataattaggatacttttggcgctaatttcatcattcgagaggg

SEQ ID NO: 2837 - DNA, 1019 bp, Arabidopsis thaliana
  Intron number 2 from transcript AT2G36560.1 (locus AT2G365 60) derived from phytozome v7.0 (chr-ID Chr2; pos 15330779 to 15331797 reverse strand)
tcacgccgcatagcttcacagttaataaaggagaggtaaatatataacatatgcatactttctatttcatttgttgttgtagaaaaaaaaaaactttttgtttttaaaaattatgattttagatttttaatatcatcctttagtcaaagtataataacatttctcttcaattcaccacaacggaattcgaatatttatataaatttttaatccacgcaaaaaatgtataatgaaactctttaagaacagattttgttcagttcaactcgatcgagttcttgatgagttggagttatggttttagattctttttatacatggattaggtaagcaaatgtattcaagttagtaaattagacggatcaactctaatgagtcatgaatagattcgtgaataaagtttgatttctatatatcggtaatatttttgtttttatttggttttacaacatacaataacggtaatatttttattcatttgttgttttcgtgggatttagatcatctaaaactttcaaatggaagagagttgacttccattatacaatagttgcatttgacaactatttatttaggtttatttttgtttgaatattttggctcttaaaggtagggtttcttctggatatatttgtttagactttagaagtttacttttctggattatttttgttattacatatgtttacaatgttgaatgatatggattcaaatctataaatataagctcataataaatgagctgaacttaactaaaccatgaagtattaatattctaattcattatacgttgactggaattgagtgaactaactcactttaacactcctactaattttataaacatggaaggaatagataagattagttctagtgacctaaaagagagatgaaacaatggacttaaggcaacagctttgtttatctggtctttgtatatgcatatatgtgttgaagatgagaggtttttatttgtcttttatatatggtgttttttacaggatataatcaagaggatc

SEQ ID NO: 2838 - DNA, 491 bp, Arabidopsis thaliana
  Intron number 1 from transcript AT2G36670.2 (locus AT2G366 70) derived from phytozome v7.0 (chr-ID Chr2; pos 15367268 to 15367758 reverse strand)
ccagttcaaggctcttccgatccttacctcgtcgggtaataaaaaatttcatcttggaatgtttctttttttagttttaagctgaaatcagaagtttctttcctttgtttccataattggattgagttaagatcgttttcattaaattctgtgatgaaactgaaagatttagggtttcaaagtttttattatctttccttttttgttcctttatcctttggcttttattttgccttatgctttattagaaggttttgaattggaaaaaaaagagtagattttgaaatgatatctatacggagatcttattgagtttgtctcctttctttttctttgtgttgcagctccaagatgactatgtatgtcacatttgcacacacactctgttattggagttctaatggaatttattatcttctcttttgtgatatgtagctgtattttgtttcttggtaggctttatttcacaaaggtcaaattaggttctcctc

SEQ ID NO: 2839 - DNA, 485 bp, Arabidopsis thaliana
  Intron number 3 from transcript AT2G37130.2 (locus AT2G371 30) derived from phytozome v7.0 (chr-ID Chr2; pos 15598591 to 15599075 reverse strand)
tcgaagccaccgtcgctctcttaggtaaccatgttttaactacttaagtaggatgtcatttctgttttccgtttagttcaagtttttttcggatagacaagaattttactgaattaaaaccacatttatccggtcgaacttttactaatgtatttagggagtatactgtaaatttttatctgaatttttttaattttgacatacaaaatcgatcactataaacgaacttttgtttagttattgggtttggtatttgattcggagatgtaatgtctagtgaagtaaaaagatatatcacagaaattttcttagagatactaattgaatttccttaaataaggatgatatcgttattttattttatttttaattataaaatgatattgtttttttttctttttttaatataaaatgatattgttagtgatcagtcaatgtatataaccgtaggtgctcactcagtgggtagggtccactgcgttaac

SEQ ID NO: 2840 - DNA, 241 bp, Arabidopsis thaliana
  Intron number 2 from transcript AT2G37290.2 (locus AT2G372 90) derived from phytozome v7.0 (chr-ID Chr2; pos 15660934 to 15661174 reverse strand)
ttcagagatatcaagaataccttagcatctatacagtgagttcttcttgatcatgcttcatttgctttttctcagataatttagtagttgaattttttttcatatattagctatgattgcattattagaattcatgtatgtcatgtccaaaattgcttctgtttatcaaatcaaatgtattttttgtgttactaaattgaatactactggaataggaggaagagacagagagggcagagaa

SEQ ID NO: 2841 - DNA, 945 bp, Arabidopsis thaliana
  Intron number 1 from transcript AT2G37510.1 (locus AT2G375 10) derived from phytozome v7.0 (chr-ID Chr2; pos 15743477 to 15744421 reverse strand)
ctcaactcttacgtctccccggctcttcgttagcggtaatttctctcttcaactgtcttcaatttcttatctttttttttggaatatgcaagcttggattttggtcatgttagcttatagatgataatgtgtttgttttatgtggatcagtgtttgaccattttgagatatgatctcctacttgttcagtatcagagtgttaagtcttaatgtgaagggtataaagaggaaatgtggattagaatgagtttggtaaagtgggagcctttttggctttgagattatgatcagtgatcttatcaatcagtttcatcttgtgtctggaaatcaacatgaaggtttagatttactttccattttttctgataattgactttagtggttagtgaggcattgtaaggcttgtttgtggtgagtgtgctaatcgtctttgtgttggtgattccgtctttgttacgatggaaagcatcaacaagttgtggaattcataagtatcgtttttcgttttctttattagactctttaaggcctgaagataaagaatgtgtagagagggtctttgaccatttgagaaagagggcgccttttggcttcgggagagattaggatctgtgatcttatcaatcagttgtatcttgtgtctagaatcaacatgaaggttttgatctacttgccaattttcttatagttgaatttagtggttagagaggcattgggaggcttgtggtcagtgtgctaatcatctttgtgttggtgattccttctttgctactatcgaaaggtctcaaaatgtcgagctcataagaatgtcctgagtttatagattgctactgtatttgtttgtttggaactttagaatcctcttttaaggcttgaagttaaagaatgttaaccccattatatgaacttggtatctatgaataggtctctccagactcacaacaa

SEQ ID NO: 2842 - DNA, 724 bp, Arabidopsis thaliana
  Intron number 1 from transcript AT2G37560.1 (locus AT2G375 60) derived from phytozome v7.0 (chr-ID Chr2; pos 15758811 to 15759534)
gtcgtcgtcgccaaacgatttgcctcttcctaaaggtatgttctttcatttctctcagtgcccctttgcgtatttcagcttcttctttacgatctaattcatttctatgtttcgtttgattctttgttcaattctgaattgagaaaatggcgattcgagatctatcttttcggtttttcatgtaagaatataatctagctttggtgtttgtattggtttacttgtgggaagaaaagtctttctctttgggactttaaactttaattacttaactccaacatcatcatagttgggttctgtttgcgagattcattctgtttagttcagttctcttatagcagcaataacatattgattgatggcatcaatcttgtgatggaaccatgggaattcagagttcagggaggattgattaattagaatctcatatttatgagagaataagagaactgatgtgtgtttcttttcctatgtatgttgtgcactttcctatttctataagctcttcaggataacaacagttgattgggtctgaattaccgtgtgttaaagtgtgttttcggaattaccgtaattccccttctgtgtagcttttggcgattgggtctgatccaattcttaccagcttcataccattgttcaaagtgaaaacagaaatagtgttgattctcttattactgttgtctcaggagattctttcctacataggaattgagtttaaggt

SEQ ID NO: 2843 - DNA, 904 bp, Arabidopsis thaliana
  Intron number 2 from transcript AT2G37680.1 (locus AT2G376 80) derived from phytozome v7.0 (chr-ID Chr2; pos 15804443 to 15805346 reverse strand)
cacttccccctagttcacttctcggcgctggccaggtacaacgattaatgaattaacaaaacatgttattttgcagaaatttatttctaggattcgtatgatacttggatttttacaagtttttctctcaagtgtctgaccatagaggtcttgggaatattggttaggactagaaagaactttattagttatgcttgtgcatctgtggttatgtatgcacactctttttatgaacataaccttatgtgtaagcagaatctgagtatacctataaagacattatcttaggggtttttatgtgtaaaggtgaattttctctcaaacttgacaagttcttacttatgaatacttgaaatcacaagaatagctaatttttttattgttgattctgtcgattggctgtggtagttatagaagaaactttgcttcacaagggtttgctagtatactttatgtgaaatttgtgagagagaggctatggtaagatgagaaggaaagttataagtttccatgatgtttagctacttaggttagcataaaagaacttaaagatctcgtgtctcgttgttcaggcacaaagcatcattcataggcaggcaacaaacatcatgggtctagttactttcttcccattagatctgcaacttgttcaagtgttctggttgcataacgattctctagtaatgctgatttttgttataccaattagaagttggccttgtctgctttgattggcttcatatctttttcatgttgacatgtatgcttaattcaagtgcatttgtatctagttgggattgtataacattcattggctcaaagagattgtttattcataatgaacctaaagatgaggaacacacatgtttttatgctgtgctgcaggcattttctggtacgcaaa

SEQ ID NO: 2844 - DNA, 157 bp, Arabidopsis thaliana
  Intron number 2 from transcript AT2G37860.3 (locus AT2G378 60) derived from phytozome v7.0 (chr-ID Chr2; pos 15857487 to 15857643)
gcaaagtgcttctccttaggtacttggatttgcaggtacatgtttcattgcttttgtctattattcttctggaaataatagtgttagagaagagttttgattttcggtttcttcggatttagagctcagcagggcttcttgggtttgctataagatc

SEQ ID NO: 2845 - DNA, 813 bp, Arabidopsis thaliana
  Intron number 1 from transcript AT2G38060.1 (locus AT2G380 60) derived from phytozome v7.0 (chr-ID Chr2; pos 15924423 to 15925235 reverse strand)
ttggctggtcgagttctttcttaggggtagttcaggtattttctaatctcctaattttataggtttttctctttcattatctccgcttattacattcttgatccgcgtatcttgaagaaatcaagattacagaaaaattaatcaagatttcaagatttggtttccttatataaatagctaaatatagcttttcacataattgaatcgttcgtaaattccaaaattgtttttcaaaagtgtaaaacacatgaaagaatatccgataatttaaacaaataaaataaaataatgatatataaattagaaaaagagggagtggttgttgaaaaaaagagtaggtgcgttagtttgagcggcaagcgtggagaaggcttgaccttaatgtgaatgtgaaacttattaccaaaccgtttataatgtggccgtgtgggtcacgttaattgtccttttattgagttttgtctggcttcaaagctaaaaattagttacaatctcctgattttggagacattcaattccaatgcaaaggacagaaccattacataggaatataggatatgatcctaaattttgagtttagatcactgataaaccgaaattcagatttaatctcaaaacaagtaaaaaccagactttcttgctacttaaggtgtggatgatctaaaccaatagagaagttctcaattactagattgatttcttctatatatataggttagggcactttgatgagtaccacttaaaatgtttggctaacactatatatatgcttttggtactatgacacttgtttattttgcagtcctccttcct

SEQ ID NO: 2846 - DNA, 629 bp, Arabidopsis thaliana
  Intron number 1 from transcript AT2G38090.1 (locus AT2G380 90) derived from phytozome v7.0 (chr-ID Chr2; pos 15945706 to 15946334)
gacagaagaagaacacaggtaaacttaaatcatctctctacgttaacgtcaatgcttttcttctctagatttggacccctttacactttcttttataaaaatacgtacgtcttttttcttggaaacgtgtttatgtatacgtataaagatacgcatatcgtataaatatatatacgtatgtaatttataaaattaaaactatacagtcatccaccaaaacaattgtatctttagtgcgtgtctatatgacctacgtatgggttagacagagaggcagacacacacacattattttgtagagtagatactttacatgtttatgttaatctcaaaaaaattatttaccctttttttatgtatcgagttaataaatctattagtaaactatatacagagcagataaaatttgtttcttctaggctcttgatgtgtggaatgggtttcattggtgtcttggtgcggttatttgttttgcacgcatggacattgtactgggacatggaacattagtataaacatgagtttttattttggctataaaatctagtttagttgtttgtatatgtgttaagagtcgatttggtttatttaggttttggtatggttaatgaatgtgcagacaatttctg

SEQ ID NO: 2847 - DNA, 878 bp, Arabidopsis thaliana
  Intron number 1 from transcript AT2G38290.2 (locus AT2G382 90) derived from phytozome v7.0 (chr-ID Chr2; pos 16040767 to 16041644 reverse strand)
cctccggtgttgccggtttcgtcgctgcttactgggtacgtttattacataaaatattcaagttcagagtttctttagtttgttagaggttagtttatttagttagggaaactattaaattctcaggctattgtttgatatttgggtattattactagaaatataatgaaagattgaagaagatgtttgtttgttgaaaatattggaattaattaatgtacggtagtcggtagatgacatagtctcaaaaaaaattcttaagaaataattcgatgtagactggtctttaattgccaagttttgttttgctttctctttcggtatgattacgtatttaaggtccatagtttatagataagtagtaagttctatgattgtttggtccactaacaaaaggttactaatttccaagtactaagattaattaaatcaaatcaattttggatttgacaacacgatcttgatctatattgtattagcaaattagataatttagttagaggagagtaatcgaataaagtaacgctccaatattgatcacactcaactgaaatatctatttttgcctaatagtaaattcacaaaataattgaggttgattccatttttgcattttatatcttatagatatgtatacactaattaatttgtttttcttgtattctgcattttgtcgcacataagcaaaatggtaaaagtcaagtcaattccactgacgacgacataatattccacatagtaaatatataaaatcatgcaaaagaaaatgaaattaaatggttagttaaaaagcaaacactagctagttgagaaatacgattttctgacatgatgttattataggtaggaccaaggcctaaggctgacagagagagatt

SEQ ID NO: 2848 - DNA, 136 bp, Arabidopsis thaliana
  Intron number 4 from transcript AT2G38300.1 (locus AT2G383 00) derived from phytozome v7.0 (chr-ID Chr2; pos 16044735 to 16044870 reverse strand)
attctccattcaggttgatataacttttttttttgaaaattttagattttatgtgttccttaatttgaatgatattccgttttaattatatttattcggaaactaaattaattgtcttcttttgtttttggtagat

SEQ ID NO: 2849 - DNA, 747 bp, Arabidopsis thaliana
  Intron number 1 from transcript AT2G38350.1 (locus AT2G383 50) derived from phytozome v7.0 (chr-ID Chr2; pos 16068357 to 16069103)
taagagaacacgcgtggtgcttacgacaattaaatgtacggctacaagacacgtggtgacttcccagtttaggcagattctggtatgctaggatttgtttttcaatatgttttggtcattatagatttctttgcggctaagactttgaaaattatcgtaaatatcgtgaagaaatagatattgtaagtcttgggcaccaatccaccttaaattgaaattttactttttcagtgtttttttggcttacggtgcaagccagcaatttgacatcttccacttattacttttctgacaaacgtgtttctttttttctttgtttcaaactatactataaaaataaattattattccatggttacttttttgaagacgtttagtccgagacttttggtactctcattggactcttcccagctcaaattgcgcgccaactaacaaactgtagcttttgccttcgcaaagaacaatttctaagtcactggcattgacaaatcccaagttcaaggagattctagtttccgaggtcaatacaacttaggatattgctttgcttttggttatagagatatttgcgactaagactttgtacttttttgtaatttactaattttcgttgatggaagatgtcaaattggtgacttataccgtaagctaaaacccttaaaaagataagaatgtaaggtggattgtcacccaatactattaattttaggtaagtaacaaatcatttttaaaacgaagcttcct

SEQ ID NO: 2850 - DNA, 489 bp, Arabidopsis thaliana
  Intron number 4 from transcript AT2G38695.3 (locus AT2G386 95) derived from phytozome v7.0 (chr-ID Chr2; pos 16178470 to 16178958)
aggataagcaagaaaaacccgtttgtttcggaagagtatgtgatatactaaatctttcttttggtagattttttctatgactctatgctggtgcttgtgagtttgaatatggagtttactagttgtttgtttcttacgttttgtttaagaatcaagaggaaccaatatcaccgattatgttatctcttctttcaatactcaatttcaaacatgttttctgcctcttgtttatgtgtggaatgttttggttcaaatatttgccttagctacttatttttccacttctttggtaattatgacaatgtcatttgtatttcggatatggttctgtccaaatattagctaagatgctttcggttcacattgtatttctggaaggatttggggaatcaatatgattttaacattaacaatatgctttccttttcataaatttgcctgccttgatatgctaccaaaattgtaggcttctcaagaagttgaagagat

SEQ ID NO: 2851 - DNA, 895 bp, Arabidopsis thaliana
  Intron number 2 from transcript AT2G38810.1 (locus AT2G388 10) derived from phytozome v7.0 (chr-ID Chr2; pos 16219706 to 16220600 reverse strand)
aatccatctctcgctcttctcgtgctggtattcaggtatccctcaaaccctagctccttttttgagaatcgagtggctcggagtttgaatgtgcgttaggtttttttgattatgttcaattgtgaattgggaaccagatttgtatttcgttctgtgtttaatgcatttttgggaaattgcttcctctctgatttctggaaatatgttttactctgtgtttcttcattaaagttacaatgtgtgcttgatactggacttttattgtctctatgactctatgccaagtagcattatttttggtgtgtctcattttatgactgtgatatggtagcttgcatgttctatacggttgatacacacaagcttgatttctctgtgtgcacttcttgtagttgcgtatgaagaaaaacagtgctatctatctagattctagagtaatttgtatacaatagagtactaccaattgatactgagccttaatgggagcatctacttgtcctctctgtgtgtgtgttctggaaatctaagccaaacattgtcctgttattgtcattagtttacttttgggattcttccttgttaaagccgaattgtacatatcattgaatccatgttacttatatggcttattgctgcagtgtcttttattatgataatcacttgatacgttgtaatatctatctataagatgtagtaagtgaatgatcaagcaaattaaaggactgtgtggttagtttaagtgtcttattaatatatatctatctacaagaagatctgtctcagtctgattaatgggaagcctttctctgtgccctaaagttatgtgcttattttgttttctcaatgtggtattctttcagtttccagtgggtcgtattcatcgtcaactcaagca

SEQ ID NO: 2852 - DNA, 491 bp, Arabidopsis thaliana
  Intron number 3 from transcript AT2G39040.1 (locus AT2G390 40) derived from phytozome v7.0 (chr-ID Chr2; pos 16299847 to 16300337 reverse strand)
cgatttggacgtcgttgacctcgtcgctttatcaggtttaccatatttgatatatcattttttggtaatcacatttgcatatacgttactgataagaaaccaagtgaattaaaagctaaccaatgaaaattgggaacaaataataaaactaaagaacgcataaaactataagaaaatcgcgggaatatcagaccacgtgcatgtccatgttaggaagtgtatgggatgctacaaattaatttcctccaatcttcaagaaaaagtataatatccgatcgtatatataccatcaaatatttgaggataatcttggaaaaggcgttgcacgtgataattattcaaaagtcaattaatcttcttaggaatgatacactaatattttcatataaatcattcatttaatcacctaatttttcgattatatattaaaaagaaacgaaattgtatgaaaaataggagcacacacgataggaatagcacattgcggtgtg

SEQ ID NO: 2853 - DNA, 497 bp, Arabidopsis thaliana
  Intron number 4 from transcript AT2G39400.1 (locus AT2G394 00) derived from phytozome v7.0 (chr-ID Chr2; pos 16453472 to 16453968)
tgtaaggttagtaatctcttttttcagttaattatttttagttatctttagtcttgcattatttattggtgttttaagaacccaaaattatttcatagttttcatttaatttcaatgatggtttaagaatcagataaaaagtccaaatcaaaaacgaaaaatagtttcttaaagtgggactaatccatatttttcaataatgttctctacttattggattggtaataaatgcccttagataatacagaaaaatggttcaatcactcttcattagtcatttgtctcatagtttctatatatacacaactacttgttacaaccaaataccagtatatataccactaattaaacaagtaatcaaaactcaattatcgaaatgattatatcaactaccgaaagtcccacagagataatcaaaatgttttgtttatcaactaatacaatgaatgttgttatggacagttagcagacgagataaagccacatccagtagtgat

SEQ ID NO: 2854 - DNA, 285 bp, Arabidopsis thaliana
  Intron number 3 from transcript AT2G39440.1 (locus AT2G394 40) derived from phytozome v7.0 (chr-ID Chr2; pos 16468536 to 16468820 reverse strand)
gggagcaactatctcactccctagtggctattctggtaccttttttttcttactgagaaaaagttgcaaacttttgatttcttacggatgtttatcaaagtatgattggatgaatgttacacattcctgttgatggagattttagttagagagttttgacatgtcctgaagaatctgctactattggtatcattatggtgttgaagaattttatgttttggttattgacaattcgtttgtgtttgacatgttcaggctttgtgcttagacaagcgagtaacttga

SEQ ID NO: 2855 - DNA, 361 bp, Arabidopsis thaliana
  Intron number 2 from transcript AT2G39700.1 (locus AT2G397 00) derived from phytozome v7.0 (chr-ID Chr2; pos 16544550 to 16544910 reverse strand)
tatcgcgccggcattgtccccgtctcataccgcaggtacaaatcttgtttatatgtctagggtcttggcaatatttagaagataataagaccatactgtaattaactttaaaaaaattagtggaggacattttgttctctatttaccttttaactttactaaatgatactttttagttttcattaaatatttaaaataatagttaaaaattcgtagtttaagtccttgaaaatcaaattttgatgatattttactaaattttagtttattagctgtttctagtatacaaattagtcactaaatggacatataagtgagtgactaaacgagtgtgaaatgttggttttgtttgtagggtgcc

SEQ ID NO: 2856 - DNA, 763 bp, Arabidopsis thaliana
  Intron number 4 from transcript AT2G39780.2 (locus AT2G397 80) derived from phytozome v7.0 (chr-ID Chr2; pos 16592070 to 16592832)
gtgggaaagggtcattttggggccacgaggtgattatcttttcacatctgttattaacttttcatagataggtgtttccatctcctatgacattgtctttcagtcttcaccaaaactaactctgtttcatttgttggttgtcatgtatatctttgcaatacacgctggcagtggggtaattatattcaatctttacttctttaatttgatttttctttcgatttccttccacataatttgtatagaacttgattcattggtgttgttatagagttccatgcttaatctcacaaccttttgcataacagtgagttagttagcagaatacattcgggtttggttatatgctaattcgataacataggttctctctctaacgattttgctgataattttttattttcagagaaacatgggacttgttcttctcctgtttttcatgatgagtataattacttccttaccacacttaatctctacttgaagcataatgtcacggtaagtcttcatcgagttatgcttttatgttatgatataatgcatagtggactggttaaataagaaagttgggcatacggaagatttacatgtgttaactatttgcttgcattcttctgcaatgtagtttttctatgcgatgtaaatgatcatgtatcttagatttcctctgctctgtcagtttatcagtttgtgaagacactttcttacattttttctctcttggataagttcttaatgcctctgcatctgtaaatgtggtagg

SEQ ID NO: 2857 - DNA, 410 bp, Arabidopsis thaliana
  Intron number 2 from transcript AT2G39890.2 (locus AT2G398 90) derived from phytozome v7.0 (chr-ID Chr2; pos 16656087 to 16656496)
cgaaatccctgacactgctcatcaaattagcagcggtttgtttttctctgttccaattgttgttttgtttttcaatctggtttcgataagaatgtgtttgcttagatgtgtcgaaaaaagttttgttttttttaaatgtacggagattgtttccccaatttcaatttctttaatgctttttttgattaaaatatgaaaatggtatcaccaggaagaagaagtagaatctgactacttcaaaatgttgactttgatgattttaacgatgacccttttgaaaaaatgttttctttaatgatcctggaaccataagattgggaaattttcttgctttgccaaaactctgctttctataaactgagatcatgttttgggaagcttatactatgttttgtggaatgtgcagattc

SEQ ID NO: 2858 - DNA, 793 bp, Arabidopsis thaliana
  Intron number 1 from transcript AT2G40250.1 (locus AT2G402 50) derived from phytozome v7.0 (chr-ID Chr2; pos 16813919 to 16814711)
attctctactaaccaaagtcgaagtttttgtccaggttagtttcaacgtttactttaaagttcatatatatagttttatcggatttattgatatatatatatatatatatatagttcatatatactgtatatcaaagttcaaaaatagtaaatttcctacgtacatggatcccactcattaaagttattcactagagtaagacctgtacgcatttgcttatataatgattagattttactgttttcatttcaatttgctttctgctttttttttttttaatttccattttgttttatagagaaccatgataagacgtattcataggccgaaattgtgttacttgggaaggtctcacaggcccatatgtactagttgttggtttattgagagaaagaagaaaaacagagtaagagagacatatctcttctcttgtgaagaagacaagaacaaaactttgttttattgaaactgaaacttgttaatctttacatgacgatacaaggtgtttatatagaaaacaaatagacacaacaactcaattagttctgtctcttcatacttgtgtctctttctacttgtgcctcttgagtgaaacaacacaaacttacaacctttaactgaaaactcaattaccgaccaacactagttagggacctccatagttatcttgttttcggatagttccatttgggtctcaaacagagaaagagagagatccaactaacagctagatttctgactttacaaatgcttacagagactatacgaggcaggagcacgaaggattacaat

SEQ ID NO: 2859 - DNA, 713 bp, Arabidopsis thaliana
  Intron number 1 from transcript AT2G40340.1 (locus AT2G403 40) derived from phytozome v7.0 (chr-ID Chr2; pos 16849642 to 16850354 reverse strand)
ccgtcggagattgttgacaggtttgtttgttacatttttcgatttttctccgttttttttcctctcttctgtatgtttgctaaatgtgattgttcattgttagggtttaagattttctttttatcgatttttgttgttttgtgtgtatatcctccaagttcctttgtttgtgtaataggtggaagctgaaaggtttttcaattttagggtttttggggttttttgttgactgaaatttgttaatttggggcacaatttgtctcttttggattgagttctgtgcgatttgtggattctagttcgtgtgtggttaagagacttggaaattagaggatttttagctaaaataatcgttaaaggtggtacctttcctgatacagaagttagattatggattctatgttgaatctttaggtgattctctgtttctgagtttgctctgttctagtttcttaatctgttcgtgatggagtttctttcttgctcgctgtgatgctgcagattatgaaaacttcttcttgtagctacttcggtgtaattacgttcaggtggttaaaaattgtttctttgaaaggtgctttgatccgaagtatagttgaacctgttgcttgaaattttgtgaagagagaaaattggagttctcgagcatgttgctaatcttgcttctatcccctttgattctaccaggaaaaggaagtctcgtggaacacgag

SEQ ID NO: 2860 - DNA, 374 bp, Arabidopsis thaliana
  Intron number 1 from transcript AT2G40520.1 (locus AT2G405 20) derived from phytozome v7.0 (chr-ID Chr2; pos 16923160 to 16923533)
tggatcagaattctttttgtcaattctttttttgggtattttccaaagtcttgttttttttttattctttggtttgggtttggctttgaggaagctaaagactgtatagggatacctaacatttgcatttactattcatttatcactctgttttgattttcttgtcttgcttgtattgttttgaagcaagattttgttcttgctctgttctgttctgtggtgattcaatttgtatggcttcatttctttggttggaagttgttttccttatttgatgtcatgtttttcttttaatgaagccatgattttttctctttgttctatggtttgtacttgtagatcttgcactcgttggggtgattctctttgttttt

SEQ ID NO: 2861 - DNA, 556 bp, Arabidopsis thaliana
  Intron number 2 from transcript AT2G40520.2 (locus AT2G405 20) derived from phytozome v7.0 (chr-ID Chr2; pos 16922978 to 16923533)
cttctttgacgacgacacttggactaaaagcataggtacttttccgatactcctcacaactctaaaaatattttctccatttacgaggttgacgaggctttttttatttgcttgagttttagaaagctttagtttttagttgttgtcgcaatcattgccgtgtaagctgggggaaaagcgagtggatcagaattctttttgtcaattctttttttgggtattttccaaagtcttgttttttttttattctttggtttgggtttggctttgaggaagctaaagactgtatagggatacctaacatttgcatttactattcatttatcactctgttttgattttcttgtcttgcttgtattgttttgaagcaagattttgttcttgctctgttctgttctgtggtgattcaatttgtatggcttcatttctttggttggaagttgttttccttatttgatgtcatgtttttcttttaatgaagccatgattttttctctttgttctatggtttgtacttgtagatcttgcactcgttggggtgattctctttgttttt

SEQ ID NO: 2862 - DNA, 677 bp, Arabidopsis thaliana
  Intron number 1 from transcript AT2G40765.1 (locus AT2G407 65) derived from phytozome v7.0 (chr-ID Chr2; pos 17012383 to 17013059)
tcgccgccgcagccggtgccatctgggtcgtccaagtaagctatctcgatctcttgttttccggccatagattggttttcacggattatggtcctgatctgggatctctatctctagctaatgttatgtttctggtgaaattgttggctttatctggttgaaagatgaaaatttcataattgatcaccatttatcaaatttacttgctttgatctcattagattatctataaaggtggttacttttatgagcatcgttgcatataattacgtttcatgaaaggcttgattcgttttggtgctagtctattcttgaattggtgatcaaatcttcttcatttcgttttccttgtactattggtttcacttacattctgatttagtcttctacagaaaatgcctagcttctattgatccttgcttcacgccattaacatcttaaggaggatagagttgcacttatttcagactgatacatgagcttgtttcttcatgaattagtttcatcacttacagacacaatttgctcttggtttggtgttatgaagagattaggcgccttaagctgctagtgaccctattttactaagcttcttttcaaactcataatgtattgtatctgacacattctttatcatcacagccatttggttggataaagaagacattcattgaccc

SEQ ID NO: 2863 - DNA, 403 bp, Arabidopsis thaliana
  Intron number 1 from transcript AT2G40980.1 (locus AT2G409 80) derived from phytozome v7.0 (chr-ID Chr2; pos 17102093 to 17102495)
gaaggtttgttgctctttgttcatatctcttcccagatttcctttttccccgtctgagaaaaccctagatttggcttcttcagaattggattcctcactaatctattaatacacacttgtgtttcttcttactgtcagcattattgtctctaccctaaatctgatttcgttggtcaatctcatacttttaagagacacccgaattaaggggagatttgaatgttgagattgccactaacttcagtttgaaatcttgcttgttcatgctcattgcctgatttagatctgatgagactaaagtagtcttctttagaaccattatagtaacaattatgcaaagaagattaaagttttttttgttcttacaggtaaatctccagacctggaatcgatagggtctggt

SEQ ID NO: 2864 - DNA, 565 bp, Arabidopsis thaliana
  Intron number 1 from transcript AT2G41050.1 (locus AT2G410 50) derived from phytozome v7.0 (chr-ID Chr2; pos 17125623 to 17126187 reverse strand)
tcattcacgggtttcgtttctttcttctggaaaaggtgacaacttttttctgttttttttttataataaaaggtgacaactttctcttccattgatgtgtaaacgaatagtcgaatacgaattcgtttctcttaatgtattagggaatcgatttctcttgctttttatgaaaccggatatttcaggctgcgaatagattattttaacaatggtgttgatatgtgaatgtcgaaaccagattttgtgtaacgttttcgattttgttgcttttaatggaagaatctgaatcctgagggtgtgatttgggttttgggggaatattcactttgtggggtctttttgtttgtgaatctagtatattgaattattgtcggaattagaaatcttttttaattctctaggattcgttttctactctttcaaatgtggtcattctagtgtaaatgtttttccttttcgtcttctaacacttttttctagtttgcacaatcaaaaagacgttacctttgctcattaagggacttgtttgatttttgggtttaacaggtttttggctgtgaagaag

SEQ ID NO: 2865 - DNA, 635 bp, Arabidopsis thaliana
  Intron number 1 from transcript AT2G41130.1 (locus AT2G411 30) derived from phytozome v7.0 (chr-ID Chr2; pos 17143619 to 17144253)
acaagcttcgtaacgtactctcttgtaattctaaggtaatataaacttttgatactttttcatttggcgtatgtatctctcctcgtacatatgatgtttatacatctgtacgtatatatttctttgaaattttaagaaaagatttttgaaatgggtatataattagggttttgcatcttctctaacccagagtttacatctttaaaattttctcatgtttcattcgatttggtgttagctcatgaatactgtactttttcatgataacattttataatcatttggtttcaattgagtcttttttgtcttactattcttacttattaacaagcacatatttatcaaagatgatccctaattttctacatttataattctaaagattgatatatattttgatttgaatattcaaaactggcgagtagtgatcagatgagaaaaacgaaaagcttcatggcctttttgtgaagctcgttgggatagtatatcactttttgggaaagttctcaagctttttcagttgatttgatttgatacaaacatcaaatttcaacttcttgatccaaacttttcattgtaatttcatgtttctattttcagaccgataaagccacactgctcgccaaagtagttca

SEQ ID NO: 2866 - DNA, 639 bp, Arabidopsis thaliana
  Intron number 2 from transcript AT2G41160.1 (locus AT2G411 60) derived from phytozome v7.0 (chr-ID Chr2; pos 17157872 to 17158510 reverse strand)
ggggaggttcttccaagctcggcttatcttaccaggtcatttctcatttgattttgctgtattttttattatcgtttttgatttttaagctcttctgggtatatagaagaatgaggatttgaatttggctcagatttgttctctattcgatattcttggtaccaattgtttagctgcgttcttattaccaacattggcactataaaagattacgggttatgcttaggtttccactgcagtgtgcaaggttttgactttattaacaggaagcagctaaaccgataaagctttagtcttggcatcatactgtatagtgctatactttgatggagtttttactaggattagtcatcagacagtggtgtgagctgaataatagatgggtttcttaagcaaatttaggctccaaatatttaatagttcgataatttgcgtctactcgtctgattgtgtatgtcagtagccttgcatttggaaagatgttttgattgtttcagagatctttgtttgtgtggtacaagttcagatttgtttcttttgagaaacggctggtagctgctatgaaaaggtatctctttttaaacttctgccaatctcattgcaggatatttttgagaagtttcggatttggaagttaat

SEQ ID NO: 2867 - DNA, 300 bp, Arabidopsis thaliana
  Intron number 2 from transcript AT2G41250.1 (locus AT2G412 50) derived from phytozome v7.0 (chr-ID Chr2; pos 17201613 to 17201912 reverse strand)
gggtggatctcatcttaggtatttagaatcatcttctttctctttttgtttcttctactccaagaaaatcaccactaggcaaaatgttcttttgtggctttctatttgtttgtatgacaacttttaatacttgatcatgattatgactctagtgatgcatctccgtacaaagatatctggtttaatactgactctttcgaatatacatttgctgtggaatctctgttggattcataaatgggtctgcttaagacatttacttctgtgctggtcttgatttttgattctttgtttgtagat

SEQ ID NO: 2868 - DNA, 311 bp, Arabidopsis thaliana
  Intron number 3 from transcript AT2G41500.1 (locus AT2G415 00) derived from phytozome v7.0 (chr-ID Chr2; pos 17306469 to 17306779 reverse strand)
cctcgtctctgccaggtaattaattagcattcaagtaaattgttacatcaaagattatagtgcagttgaattccttaaatctgtttcactttttcctggttgagtttgtttttgtatttttctcgcaatgcatctagattagagcttaaggatttggtctgtagagtccagatactgtttcgttcttccaattattaaagaagtgcattgggttttctttggtttcgtgatcctttaactctagtaatttatgtttcacttttactgtaacttcaggtttctctgccattccacctgtggttcctccttct

SEQ ID NO: 2869 - DNA, 335 bp, Arabidopsis thaliana
  Intron number 2 from transcript AT2G42170.1 (locus AT2G421 70) derived from phytozome v7.0 (chr-ID Chr2; pos 17578281 to 17578615)
atcaaggtaaggagaaaataagaacactctctattattaatttgtgatgcgtcgtttgttttccaaacacaatttacgcatttgtattgcgtttacatttaaaaatatcataattttgaaatataattataacaaagtcaaaatgtcaacaaagaaactttctattttcaattttcatttaacaatacaattttttttttttctagtgagcttcttctatgtttgagtattgattcggaaaaatatgcaaaatgtaaaagtaaacaaccaattaatgcacattataaaacaacgtggcagatctaatgattggtaaaacatattgaaggcaggat

SEQ ID NO: 2870 - DNA, 250 bp, Arabidopsis thaliana
  Intron number 1 from transcript AT2G42380.2 (locus AT2G423 80) derived from phytozome v7.0 (chr-ID Chr2; pos 17647871 to 17648120 reverse strand)
ggcaaccggattctcgatcccaaaagggttaagaggtaacaaaattattcaagaacatgcatgcacgtaaaaatatcaactcatcagatttgattacgatgcaccaaatattttgaaaaatatgattactgaagattagcgtcacatcactaaccatataatgttttttaaattgttaacaaaaataaaataaatatttctgaatgtttctacagaatattagcaaatcggcaatcagcacagagatcaa

SEQ ID NO: 2871 - DNA, 357 bp, Arabidopsis thaliana
  Intron number 2 from transcript AT2G42540.1 (locus AT2G425 40) derived from phytozome v7.0 (chr-ID Chr2; pos 17711432 to 17711788 reverse strand)
acctcaacgaggccacgtaagtctacattctttcttcttttagtatcttgcctcataagtaaggatcttagcaggcaatgtttatggtatactatattagtatagattttagtggaaatatgtttgttttgaacttattttatgatcatatttgactattatcaaagataaagattcatataccgtacattatatatctctatttttctagtttacatgtatagctctaagtttatttgatgattctgttgactacttttggatatgtgttttgaaacctttgataaatactaaaataaattttaatttgaaaatgatatagaaagaaagcttcagatttcgtgacggataaaacaa

SEQ ID NO: 2872 - DNA, 362 bp, Arabidopsis thaliana
  Intron number 3 from transcript AT2G42700.2 (locus AT2G427 00) derived from phytozome v7.0 (chr-ID Chr2; pos 17779198 to 17779559)
ttcagcgctgcaccgtattcacatctatttcagaggtgctcttctttaacgttatccttggtctcattctttatttaatctcttttttttctctggatatatatattggcttttttattttctagaacaatcacaagctatttgacttatcaacactagtgatcgttatataatcaaattcaaagtgattgtaatgtattctctaacttaatttagcagttctgcttctctatgccttcttcaaaataattttccatctataagagactcttcagaatatttgtttcttttcttgcgtcattgaatattaatctgaacgttgtacaggggtctcactcagctatccctgattcacctctagg

SEQ ID NO: 2873 - DNA, 493 bp, Arabidopsis thaliana
  Intron number 1 from transcript AT2G43000.1 (locus AT2G430 00) derived from phytozome v7.0 (chr-ID Chr2; pos 17881934 to 17882426 reverse strand)
cgatatctataagtacgatccttgggatcttccaagtaagtcttcttaattattggatcatcccctctataaatatcagcatcgtatattatgatcaactcattacatatagttgtttttattgttttttctactgattttatcaagaaattagggacgtccactttgagatcttgttcgaatcaaaacgataaaaaaaaaatttgtattttgaatgcgataagttagtacatttccatatacttatgatatgggaccatccatccatacgaagatcaggtcaaataaaataaaatttagtatacttacacagaaatatcgcatagtgcgcctttatcatcatcgcatgaagatatagaacacgaactatgtaatgaaagggtattttatttagttttgattttctctaaacaattttccacgaaattaatatgagcagttactgtggattttattaggagtgagcagcgtcggagaaaaggagtggtacttc

SEQ ID NO: 2874 - DNA, 405 bp, Arabidopsis thaliana
  Intron number 1 from transcript AT2G43020.1 (locus AT2G430 20) derived from phytozome v7.0 (chr-ID Chr2; pos 17891978 to 17892382)
cgtagaggtactgttttcttcaacctccatcgaaaagtctgttacttttttgtgaaatcgcttacggattgttatcgttgatgtataggaaggatctagggttcttactctagattataatctgggtaatttggtttatcaaacaaaatttgattttttttttaatgggtcctcaattttatccctcgtgctgaattctctgtcggtgatttgattccttcgtggcgtttacttgtttggatgtatctgctgattgccacaagttttgtttttgtggggttgtttaattctgataatcactattgtttctttgttagaagaattgatactttattggactttggacggtcgttaattcgtgtgctttgttttcatatagctaattgcttttcagctggtgagagg

SEQ ID NO: 2875 - DNA, 976 bp, Arabidopsis thaliana
  Intron number 3 from transcript AT2G43110.1 (locus AT2G431 10) derived from phytozome v7.0 (chr-ID Chr2; pos 17922880 to 17923855)
agttgttctcaaagcatttgaaggttgaggaacaggtagtgttttattcttataatgatttgtctatagagaactgaacttaattctaagcacatagaaaagagagaacaaattgaaactggcattttgagttatttcgttattgaatcttgttttggttctcttgtgtggaatgcattgttcttgcttctctggaacttgggatatgatgacaaaaatacgatatctctaaggctaattgctgtgcggatgaaatgtatttgcacgtcagtctgatcccattatgtatataacattaggagttggtgcatgctcatgtagttcgtttctttcatttttagttaatgttaaggatttgggaagtgatgataagatatatcaatatatcataggcacatgcaatgctgaacgatatatatttgcacgtcagtctgatccctttatatatatataacattaagagttggtgcatactcatgtagttcatttctttcttttttagttcatgttaaggatttgggaagtgatgataagatatatcaatatgtcataggcacttgcaatgctgaacaatatatatttgcacgtcagtctgatccctttatatatccatcattaagcatttatgcatatactcatgttattcttccctctctctgtctgtctttcatgttaagagtctgggaaatgatgataagtatatcgatatttcagaggcgtatgcaatgctgaacgaactatttgcacgtcagtctgattccagctcttgtttttgtttcttaatttgcatataagaagactatagaattagattcttctgctttggtctaaatatgaaactctcatttaaaaaagaaatggtttccgaaaatctttatataaatttctcaagctcattgttatatgactcgaattattaactctagttcattgtgttgcaggtatctctgttgaagaaacgggttaatattgggag

SEQ ID NO: 2876 - DNA, 626 bp, Arabidopsis thaliana
  Intron number 1 from transcript AT2G43160.3 (locus AT2G431 60) derived from phytozome v7.0 (chr-ID Chr2; pos 17948236 to 17948861)
cgatccgattctggtcaaattttacatttctgcaggtacgatcttagctctttttgttctttcatgttcattattctttttctggatctattgtttccatttttaaatttccggttgatttttttatcttgttcgatgtgattctattttgtggagggatgttattagctttaagatctgtgtgagctgcgtttttgaatgtgaatcttcctttttattcgattttgattgttaccgtttgaatttttagtctgcttaggagtcggattttgttgattttgacttcttctttatatcctttaattgttgcaaaattcggaaattttgttacgagctggggattttttccacttccttgagattgttttagggtgaatctgaacaaagacaaattcgatcattgctgattgctttgttgccgttcctcaattccatgtatctggctcttacgattgtgtaattgaaatgagattatgatgaagaatgattcgtttgtttctttttgttctatctatacatttgtggtgatatatatatatatctttgtttgaaacgttaatagataagctgctcatactagttatacaacagactccatagaaggtgacatttgtttaagatactct

SEQ ID NO: 2877 - DNA, 597 bp, Arabidopsis thaliana
  Intron number 1 from transcript AT2G43160.4 (locus AT2G431 60) derived from phytozome v7.0 (chr-ID Chr2; pos 17948236 to 17948832)
cgatccgattctggtcaaattttacatttctgcaggtacgatcttagctctttttgttctttcatgttcattattctttttctggatctattgtttccatttttaaatttccggttgatttttttatcttgttcgatgtgattctattttgtggagggatgttattagctttaagatctgtgtgagctgcgtttttgaatgtgaatcttcctttttattcgattttgattgttaccgtttgaatttttagtctgcttaggagtcggattttgttgattttgacttcttctttatatcctttaattgttgcaaaattcggaaattttgttacgagctggggattttttccacttccttgagattgttttagggtgaatctgaacaaagacaaattcgatcattgctgattgctttgttgccgttcctcaattccatgtatctggctcttacgattgtgtaattgaaatgagattatgatgaagaatgattcgtttgtttctttttgttctatctatacatttgtggtgatatatatatatatctttgtttgaaacgttaatagataagctgctcatactagttatacaacagactcca

SEQ ID NO: 2878 - DNA, 615 bp, Arabidopsis thaliana
  Intron number 1 from transcript AT2G43160.2 (locus AT2G431 60) derived from phytozome v7.0 (chr-ID Chr2; pos 17948236 to 17948850)
cgatccgattctggtcaaattttacatttctgcaggtacgatcttagctctttttgttctttcatgttcattattctttttctggatctattgtttccatttttaaatttccggttgatttttttatcttgttcgatgtgattctattttgtggagggatgttattagctttaagatctgtgtgagctgcgtttttgaatgtgaatcttcctttttattcgattttgattgttaccgtttgaatttttagtctgcttaggagtcggattttgttgattttgacttcttctttatatcctttaattgttgcaaaattcggaaattttgttacgagctggggattttttccacttccttgagattgttttagggtgaatctgaacaaagacaaattcgatcattgctgattgctttgttgccgttcctcaattccatgtatctggctcttacgattgtgtaattgaaatgagattatgatgaagaatgattcgtttgtttctttttgttctatctatacatttgtggtgatatatatatatatctttgtttgaaacgttaatagataagctgctcatactagttatacaacagactccatagaaggtgacatttgtt

SEQ ID NO: 2879 - DNA, 753 bp, Arabidopsis thaliana
  Intron number 3 from transcript AT2G43240.2 (locus AT2G432 40) derived from phytozome v7.0 (chr-ID Chr2; pos 17974057 to 17974809 reverse strand)
ctattattccaggtacgtttctgaattgacttcagttctttcgaaatatcaattttgtttgagggccatttgggtttcattcttgcatttaaaactacttggtgatgtttcttctgcactatattccgtttgtggaggtgacttaaaccaattgctaaggttgttttagagggataatatcatattccgtttcttttatgtatctttatggtggcgtgctgagttttgattaactagtaatggaatgagacggatctcatattcatttttttgtgcatagagaaagtttcttggtttaaagtctgattgctttttccacgcgtgtcttgctttcccatacaaaattggccgcccttttaatacttaagttttttgtggtaatatttgtaggccaggcaccaaaaagttggagagaaacctctactatctctttccacgtttgtccaggtacatcatcttggcaactaggcaatttagaattactaggattgtggcatagtctcaaagtaagattagtttcttgaaatcttaatgtccaatgggtgtggcatatgttatacatctggttttcaaagcatgattgttcgaaatgtagatgttatgtcaccattagatcatctagtattatattttttcttaaattagtccccattattaaactcgaaacttctgagtaattcattttttcttaaactatatataatgcaagttgcagtaacttgagcctttatttcgcaggcagctcggaacaat

SEQ ID NO: 2880 - DNA, 425 bp, Arabidopsis thaliana
  Intron number 3 from transcript AT2G43240.1 (locus AT2G432 40) derived from phytozome v7.0 (chr-ID Chr2; pos 17974385 to 17974809 reverse strand)
ctattattccaggtacgtttctgaattgacttcagttctttcgaaatatcaattttgtttgagggccatttgggtttcattcttgcatttaaaactacttggtgatgtttcttctgcactatattccgtttgtggaggtgacttaaaccaattgctaaggttgttttagagggataatatcatattccgtttcttttatgtatctttatggtggcgtgctgagttttgattaactagtaatggaatgagacggatctcatattcatttttttgtgcatagagaaagtttcttggtttaaagtctgattgctttttccacgcgtgtcttgctttcccatacaaaattggccgcccttttaatacttaagttttttgtggtaatatttgtaggccaggcaccaaaaagttggagagaaacctctact

SEQ ID NO: 2881 - DNA, 847 bp, Arabidopsis thaliana
  Intron number 3 from transcript AT2G43330.1 (locus AT2G433 30) derived from phytozome v7.0 (chr-ID Chr2; pos 18001958 to 18002804)
ttctttcatatctcgttaattctgctttcacacaggttagttggttacttggttagttagacatatctttcctcaccgtaaaaagttttgagttttggtgaagttttgttacatctagagagagcaacagctaatatgtttgcgagtgaatgacaatgcatcagtcatgttatgttcaatgtaagcatttaggaattctcatagcgatctgtgaattcagaattttattatgggattacaagtatgctcttttcatctgactctggttagaagaacgaattcagaaatagagtgaatgcttatattgttttattaattggaactaaaacgaaacttgagaaggtggaggactgtttgatttgcattgctgttgatgccgaagcttaatgtctcatgttaatgtagttcacaagatcatggtatggttgcattgtgagtgttgtatcatttaattattagatgatctttgtgtccttggttttggtttatctcaaggctcaagttctactttgctgcagtaattcatgtcccagctaaggcagcttatctgtcctgtcaccatgacgagaaaataagtctatcctgagttccgacataggtcactctttggtggtcctttaccttactccagtttttaatttgaaacttattttccaaaattcaataaaaccaagtagatttgatgaaaatgtaaagttgctatagattttatgtaaatgtagcttggtacttgaaaattttgagaccattttttgtatatctaagaaactgtggagagaaagtaaaactttggcattttattggtagctttgaattcatgagattagttttggcaggttccaggaac

SEQ ID NO: 2882 - DNA, 121 bp, Arabidopsis thaliana
  Intron number 2 from transcript AT2G43370.1 (locus AT2G433 70) derived from phytozome v7.0 (chr-ID Chr2; pos 18013734 to 18013854)
tctctcatcacactacggaggatacacttcgagaggttaatgattgaaatttcacttagtttttgattttcgtgtagactatgttttgaatatgattataaaagtttcttcttcgtaggtg

SEQ ID NO: 2883 - DNA, 723 bp, Arabidopsis thaliana
  Intron number 1 from transcript AT2G43450.1 (locus AT2G434 50) derived from phytozome v7.0 (chr-ID Chr2; pos 18043302 to 18044024 reverse strand)
ctaaaagtaagtttgtgaactctcatcttccttgtttttttacattcatttactaatttggccatttgggacgacaggtttggtggacgctgctgtgaagtcagatatcactcccgtactcgctctattcgcctattttgctatttgccttaatggcaaattcgccaggaagaggtgataggggcagacccacagcataatactccttgttaaaagttagctaataacagtagcagtataaaatcatttagctcagctagactctctattccacaccttacgttcggagttcaatacctacttagtaccacttattttgcttatttttcttgggtcaattttatttttgtttagtgattttagcagttgcattttcctttgtattttctttattccattttttgttttcttaaataaaactatatgattttagttcaatttatttttctgtttccagtttaactttcaagagaaaatcggatttgtagcatattcttgcaaaaatccgatttacatagatttgattccaatttagtttaaggtagcaaataatttttctttggccactcaatgttgttactgtctcgaatgtacgttttgattattatagttttaaaaaggttttgcaaaacatccttatcttaaaggatatagtatataccagtaatcccctagtaatcgcataataataagtcatatcacacattatcaacccgtgtttgt

SEQ ID NO: 2884 - DNA, 426 bp, Arabidopsis thaliana
  Intron number 1 from transcript AT2G43590.1 (locus AT2G435 90) derived from phytozome v7.0 (chr-ID Chr2; pos 18081961 to 18082386 reverse strand)
tttgctcatttcactcacgagaccggacgtaagatttatgtctttcttctcttctatctttatatactcaaaaataaattaatattttgtgtctgtgtatacatctactttagtcatgactcattcgaagtttataactttagtaaactaaacgaatgattggaggatttgatattttaaaacgttttgcattatttcaaaacaaatgaggattatattatattattataacacgttaagtattttaaggaaaacaattggttataagaccatataagattaaacctttgatattgtagtaagaaatgacatttgacttgatctcaagtaactaagatgatcctaatcctaaataactcttctgtttcatgtgcatctccatacgtattagatttctgctacatagaagagattaacggagcaaca

SEQ ID NO: 2885 - DNA, 344 bp, Arabidopsis thaliana
  Intron number 1 from transcript AT2G43610.1 (locus AT2G436 10) derived from phytozome v7.0 (chr-ID Chr2; pos 18088418 to 18088761 reverse strand)
ttggctcagttctctcacgaatctggaagtaagttcaccgtttactacattctattattctttttatgtatcagaaaatgtctaaaaaggaattattaaagtattatcatgtttaaaaatttatataaatatctgatttatcagtttgcattaaaaactttattttgataattgaagaaaaatatagagacaggaatattttcctcataagaaataaggatttgctagctatatatattaccaaaatgtgttccaagaatgtgtctaaaacaagtttaaaataaagtttatctgtttggttatgtaaaggtttttgttacaaagaagaaatagccagaggaagg

SEQ ID NO: 2886 - DNA, 739 bp, Arabidopsis thaliana
  Intron number 1 from transcript AT2G43945.1 (locus AT2G439 45) derived from phytozome v7.0 (chr-ID Chr2; pos 18199062 to 18199800 reverse strand)
cagatcctattcgcggtgtgttaccgtatcgtttgattctctctctctcattgtttgctaattctcattgagtttttgtgctaaattgcttgatcagcattagtttgatcaatttcggaaagtgattgaattcgtaggactgtgtttagaatgatccatgttttgtttcatcaaagtttgtattttcttcccatttatagatttcgacctgaaattttatcctaggtgttatttactctctatcgctttcgtcttcaatgtagtagttaggtgggattccagtgttttaatggcctttgctgacttattcaagaatcaagatttcactctatttaaacttcattgtatatcaaagcttttgatggttgtatgtgtgtctttgagtccttagtgtttataagactacattgtatcttatcatgtacgtaatgtctcaaagttgtagattttgttttagggggtggtttctgtctcaaagttggttctctggttcactttaattgggttttcttggtcttaaaagcatgttgctgcactccttgaaacatcagctttgatttgtaaaagtaaaagatatttagtttctcaagtttcatcatgatagtgtaagcttgagagtttgtgtttgtgtctctcttcccaaaagtcttttgcagttgttgttttttccggcttttctctgatgatgtacgtttaatggctgtttcttatatgctgtgtatagtgcttaccagaacac

SEQ ID NO: 2887 - DNA, 330 bp, Arabidopsis thaliana
  Intron number 1 from transcript AT2G44195.1 (locus AT2G441 95) derived from phytozome v7.0 (chr-ID Chr2; pos 18274929 to 18275258)
tttcgcgctatccaagaacaggccggtcttgttccgtaagttttctaattctatacctatagccctctcctaaattagattttgattggtacatatatttgaaattagggttagcaacagagtttgatgattggaagtatattctaatggcggcgttagttaattagttttaaaacctttgaagtgaatcatgaatgatgattgcaattgagctaatgatcaaaactcgaatattttatcgaaatagcgtctgtggtaagatgagtggttttaaccttagttttgttgtttcttcttgtaggaggaggccagagagattggagttcttgt

SEQ ID NO: 2888 - DNA, 607 bp, Arabidopsis thaliana
  Intron number 1 from transcript AT2G44610.1 (locus AT2G446 10) derived from phytozome v7.0 (chr-ID Chr2; pos 18413187 to 18413793 reverse strand)
tacgacaaattcgacaacacttaccaggtaaatttccattgttcaaatctaggtattatctcgacgatgcacgacgtttgcttctattttgagggattatagtcgggaaaatcccagggtttgattgattttgagatccgttttcatggacgggaatcgtgtttttcagttcgaagttcttactcgtttacgtgatcgggcgtttggttttgcgtaattatgtgtgatctgatttgtagatcgtgttttagtcaatgtataggacgtaacaatcagctgaatgagattttggcatcgtaatcgctcactctcgtttattgtacaaagtcgagaattcagtccaatagaagatcgcagtaacactaatatgaggatgtttctttgatcatgttatcattgtttatctaatcgaattagttctcaattgatgaatgaaagcatctgatcttgttctgtgattatgagaattacgtttaagctcctaataatatgtgaaccatgcttgcttatcgtcattttacagaatgttcttccttttctaagtagtttttatgttgtttcataatcatcaggccacaattggtattgattttctatcaaagacaat

SEQ ID NO: 2889 - DNA, 424 bp, Arabidopsis thaliana
  Intron number 1 from transcript AT2G44740.1 (locus AT2G447 40) derived from phytozome v7.0 (chr-ID Chr2; pos 18442544 to 18442967 reverse strand)
atctgtaagtagtttctcacattctttccgttttaaacattaaatcgagggtcaatctcagaattgactatcgcagttagaaaatttcagacatgatcatcaatcaatcccctgtttcatgaatgctctgttttttttttatgtttggtctgaatctcgtaagaagtatattttttcatttaatttttaaaagttttgatctttctaaaccatagattgaattttaactgttaaaatttaagaatatttgtttggcacagaaatcataatgatatcaatcaatcaatcaatcattcccctggtttacggctgctctgtttcttcctttgaaataaagattcaatttttatgaagttaatcatatgacactgattcgctaaaccttataaatttggtaattattattaacacaggtactacaaca

SEQ ID NO: 2890 - DNA, 482 bp, Arabidopsis thaliana
  Intron number 1 from transcript AT2G45200.1 (locus AT2G452 00) derived from phytozome v7.0 (chr-ID Chr2; pos 18639061 to 18639542 reverse strand)
ttacgctaagctaggcgccaggtttactcaaggcggttcgttcttcttcctttccgcttgatcatgctatctgtgtctttctttgttatttccattgctttgaatgttgctgttatgtctactatctgaatgtgggggttagtagtctgtaatgtgatatagatctaggaatcaatgttggatatgatctcttcaccgaattgaatttgatcgccattgtttgctcagtctatgttatgcttccccaatgcttaattcatgtgtggtgtttggtagagtaaagttaaaattggtaatgtttctctcagattcctgtcaaaattatttttctgtgaatgactaaggtaagaagaatttttgtgtgttaagcttactgttttgcattagctttcagtttttaagaattgcattgttgtatgtatcagatactgatcttgttatgaattatgagaaagtattgaaatgtgttttggtttcagggt

SEQ ID NO: 2891 - DNA, 439 bp, Arabidopsis thaliana
  Intron number 1 from transcript AT2G45200.2 (locus AT2G452 00) derived from phytozome v7.0 (chr-ID Chr2; pos 18639104 to 18639542 reverse strand)
ttacgctaagctaggcgccaggtttactcaaggcggttcgttcttcttcctttccgcttgatcatgctatctgtgtctttctttgttatttccattgctttgaatgttgctgttatgtctactatctgaatgtgggggttagtagtctgtaatgtgatatagatctaggaatcaatgttggatatgatctcttcaccgaattgaatttgatcgccattgtttgctcagtctatgttatgcttccccaatgcttaattcatgtgtggtgtttggtagagtaaagttaaaattggtaatgtttctctcagattcctgtcaaaattatttttctgtgaatgactaaggtaagaagaatttttgtgtgttaagcttactgttttgcattagctttcagtttttaagaattgcattgttgtatgtatcagatactgatcttgtt

SEQ ID NO: 2892 - DNA, 411 bp, Arabidopsis thaliana
  Intron number 2 from transcript AT2G45480.1 (locus AT2G454 80) derived from phytozome v7.0 (chr-ID Chr2; pos 18745768 to 18746178)
ttcttcctccaattacaactatcactcttcttctcgtaagtaatttgacattcgagttttcttttcaagaaattcttaggagtatatgcgtgatagttgagctagggtaagaaaaagacacaatttagaagattttagacaacataacgacaagtcttggacctcagaatctagagaagtttatgttctgattcaacagttgtaaagtttggggtattgttgtggaaatgcttgatgggttttattgtgcttatttaacttcctgaacatgtttttggcttttgggttctgagttggagaagttaaaagatttacatacacaacaaacttctgttgactgaatttgattttgtgcctattggggattgagttgcagtgttgagtaacaagggagtaacccatatcgacacg

SEQ ID NO: 2893 - DNA, 417 bp, Arabidopsis thaliana
  Intron number 4 from transcript AT2G45640.1 (locus AT2G456 40) derived from phytozome v7.0 (chr-ID Chr2; pos 18800096 to 18800512 reverse strand)
tgagagaggtaagattacgttctcttcacaatcttgatcagataagttgtcaccgtagccacgcatgatcattgatgcattctagagtttctgtgttttcccctgccacacctctttgtcgcacatgtagctaccagtatcattcggagttttgtcaacaatgtttctcttgtacatgtctttcgcttattgacaactcatcttctcatggttattgatttttgaaacttcagagagaccacataatcatagctagttactacagaatgaagtaatttgattgaatggatgctttcagattcaatcgttatggctttacttgttctcttgtgatgtttgcatatgtattcaagaacccatgagaagagtctgatcttgtggtgttgtttctgttaattgataaaggttggggagacg

SEQ ID NO: 2894 - DNA, 453 bp, Arabidopsis thaliana
  Intron number 4 from transcript AT2G45640.2 (locus AT2G456 40) derived from phytozome v7.0 (chr-ID Chr2; pos 18800096 to 18800548 reverse strand)
cgtttgtttatcctaacaataaaggtggctataatgtgagagaggtaagattacgttctcttcacaatcttgatcagataagttgtcaccgtagccacgcatgatcattgatgcattctagagtttctgtgttttcccctgccacacctctttgtcgcacatgtagctaccagtatcattcggagttttgtcaacaatgtttctcttgtacatgtctttcgcttattgacaactcatcttctcatggttattgatttttgaaacttcagagagaccacataatcatagctagttactacagaatgaagtaatttgattgaatggatgctttcagattcaatcgttatggctttacttgttctcttgtgatgtttgcatatgtattcaagaacccatgagaagagtctgatcttgtggtgttgtttctgttaattgataaaggttggggagacg

SEQ ID NO: 2895 - DNA, 570 bp, Arabidopsis thaliana
  Intron number 1 from transcript AT2G45650.1 (locus AT2G456 50) derived from phytozome v7.0 (chr-ID Chr2; pos 18804600 to 18805169)
agccgtggcaagctctacgagtttggtagtgttgggtatatatatctttgctcctttgaaccaacttttgtgctatatatattaagattcatccaataaagctatgttttttatatgaaaattgattaataaatgggttcatttgctacttgttacatcgtacgattcaagagtcggatcatgttttgatcttgtggttattcttaatggttgtatcgtttatcctgtggtaattagggttcatcgttatatcgtgtctccctcttggatcctttatcataagctaataggtccttccgtacgttataatttgttgatttcccattcatgaattcctttgattctttaatcttacagatgacaggtttcaaatgggtttaattctagctttaaaaaaaaaaaaaacaaacaaactagggttttcccttttagatcagtgtgtaagatatataacttgagttcttgtcgtaagaagaatctttatttgttgaatcgagctaatgatctcccatttttgttttaattgaatttgtagaattgaaagcacaatcgaacggtataatcgttgtt

SEQ ID NO: 2896 - DNA, 498 bp, Arabidopsis thaliana
  Intron number 1 from transcript AT2G45660.1 (locus AT2G456 60) derived from phytozome v7.0 (chr-ID Chr2; pos 18810194 to 18810691 reverse strand)
tggttaggtttttatcaaacccttttagccaatcggtaagatctcttcgtcatgatcttttcttttttcttttgctttgtactctgatggatctataaacttatatgggtttggtttcatttggttcgatttgatgtgtttggtttctttgtcctaaatctcatgaaaggaggttgcatccttcaattaaaccgataacaaaagtttccattacagacttatagatcagatactttagattgttttgctttttgggtacttaatctttcgttgacttcatcagtcttctcccacccaaacaaaaaagtcatatttcgatcatatcttcatttttttaacctactctctttgattcatatatgaaatgggttgttttatgtgtgtgactaatcttgttattgaggtggttgcaccattgatctaccgttttcttcaatttttgaaaaaataattttattttttttctgtgtgcaagggaaattaactaaagaagaagat

SEQ ID NO: 2897 - DNA, 629 bp, Arabidopsis thaliana
  Intron number 1 from transcript AT2G45750.1 (locus AT2G457 50) derived from phytozome v7.0 (chr-ID Chr2; pos 18843274 to 18843902)
gctctatccgtacagccatcgataccggttgcggggtacgttcaaaattctcttcactctaattaaaccgaaccacccggttcgattttattatgcatattcgtaatctttattttattatatttcaaatttaaataaagaaaaaaatagaagattttccgtcaccgatttgttcaatcgaataatctgttgggacgtcaaatattaactaaaaagatatattcatgcatatccatatctaatctaaattccatttgattagtttactctcatataagtgaacaataattaaaatttggaattagtgcatcacaattttgtagattcaatgttaaaaatgaaagcatattgtttcaacatttttggtttctgagtgtgacccactaaagtcacctaatcgtctaatgtcactgttgacctactcatactctaccgttaaacctgtaaagttgaaaaaataaactagtagttgagtcaaaatgaagaatatattttcttgtctcttagtttgacttcatttgtcaaaacaagaaaaccatatgtctttttgagttttattggtgtgatcaatcaaatgtgtctttggtttttcaggtggctagcttcggtgcatatcttttatcaagaaa

SEQ ID NO: 2898 - DNA, 490 bp, Arabidopsis thaliana
  Intron number 1 from transcript AT2G45950.1 (locus AT2G459 50) derived from phytozome v7.0 (chr-ID Chr2; pos 18907199 to 18907688 reverse strand)
gaagttcaccttcaatacccaatatctgttataaggtacaacgcgccaattcgcataatagactctccttggttcaaaagagcttctcggtggttacgtgtatgtatctcaatgtgtttgcttttgcttgtttgatatattgtgttttggacaattcgaatatctgtattatctccaaacgtatacggctgtttctgcttttttttttttttttttttgctgcttcattggatcagttttaagatacctcttttgttttgcgtttccattttattctatgttaaatgctcaaaatttgtcataaagagagaagctttttagtatttctttgaattgagagtgtatattgcttaatgcttattggtttctttaagacacggttcttcattacatgttaagattcagggttggctttctgagcgttcattatcttttgttaagtggttagtctccgttttatagatctctcttcttttttccagtttggtgg

SEQ ID NO: 2899 - DNA, 216 bp, Arabidopsis thaliana
  Intron number 1 from transcript AT2G46060.1 (locus AT2G460 60) derived from phytozome v7.0 (chr-ID Chr2; pos 18944648 to 18944863 reverse strand)
cgaagtcagaccctacgatacacgttacatcagaggtctgttttaatctgagattcaagctttttcagctgctgaatgatgatttgaaattcagcaaatggaattggatttgttatatctgatcagttgcttctggattatgatcattttggactatcttcttttggttgatgctatctgattctctgtttgattccgtacagttgatttgcctcc

SEQ ID NO: 2900 - DNA, 769 bp, Arabidopsis thaliana
  Intron number 1 from transcript AT2G46140.1 (locus AT2G461 40) derived from phytozome v7.0 (chr-ID Chr2; pos 18959379 to 18960147)
tgccagatctcttacatcctcaagagtgccacaaggtcatcttctcttttttttcttcttgtaccgtctgatctactctaacaccgtattgtgcactttttattacacacatatcatgatagtatccgtattccggatctagcctaagataaatagaatttgtgacacatattttgatcatctaaattttgagaatatgaaaaatatatatgtgatatttttcgttaagtgtatccgatctttgtactaatgaatagaaatgtgtatcaattaggtatatccgatctaatgtttgactatttttaattgataacagtatttaatatatatgtgtatggatttcgttggtaatttgtctggtctcatcaccgaaatggctagatctcattttctcactaattgtatttttatcgcattgtgccgcattatatatacatacatatactaatttcattatccatgtgcattgatgatatctagcatcttatatcaatcctaatgtatatatttacacaagtctactgtatacataatatgacattactaataacacgtgttatcaaggaaacaaaggcacaaagctatatagatggtctcagcttttgtattttgaggatttaagcttagataacattttcataacagtactttttatgtaacgttatgcacacgccatgtataggtgtaacgtacattcatcatgtgctgattaataatgtttgtggcatgcgtaggacgatcgcgtcaggcacgataccggacccgggtt

SEQ ID NO: 2901 - DNA, 663 bp, Arabidopsis thaliana
  Intron number 1 from transcript AT2G46590.2 (locus AT2G465 90) derived from phytozome v7.0 (chr-ID Chr2; pos 19133169 to 19133831)
gacgctacgaagtggacacaggtgcttaaaagatcttcctttgcctcttctcttttgtttcttcttcttcctattaactacttcttccttttttctctcttatctttctcttactctcttccctatccgtgaaagatttcatacttgtttatatgcatatatccgtgtgcatatgtgtttgtggttatagagattggagatatacgtatttcagtttgtttgcacatctttctatgaataattaatttgcatgggaaaattattattgttgtatattatagctcaaaaacactttttctcagccttttcatgttattaatcattaattatatttgagaaactaatggagatattagaagaaagtcatgatttgtatttaccctttgttcttggtgttcatctattttcgttttccacgagatcctatatacatagttctatagaatatctaataaggaaaatctaatgttcatgtttcatttttctgtttaattagtgcttaaaattgcaaagcatcgtgcgaactaaccatatgttttaattagcttattatataacttatgtatcaattatggtctatacataattaatatacatgtacattgggtttcaattaagctctaattaactctttaaaattcaaatttttagggttttcaagaa

SEQ ID NO: 2902 - DNA, 978 bp, Arabidopsis thaliana
  Intron number 1 from transcript AT2G46710.1 (locus AT2G467 10) derived from phytozome v7.0 (chr-ID Chr2; pos 19192501 to 19193478)
gaaccggaggttcctcctcgagctcctagcgccaggtccgttattaattaattattatcccaaagatgagtaatattccaaacaaaaaatgaatttaatattttattccatatatattgaaaaaagattatgatatgaggaattaaataaatattttcctagctggaaatctgtatatggcatgttactgtgttgggtagaatcattaagatggttgttgtttggatttaaatgcatgattacgacactcgtttcttcacaaaagaagattctctttttgtttttttttctctcttcaaagattttcaatggtatgtaaagtcaataaccatttattcaaacaatgaaactatttagacataaatttggtctttaatcaactcatgaagtagtggttgaatgacacatcctggaattggggattagtgtttaagctttcacaacataatgatattatttttgggctttccctagagattggtttgtatgatgatacatggagctctaataagtttggtttgtatagaagatacaaacttttgggtcctatggagatatactaacagaaacacgattacacaacaaatttctcataaaaaaaaaagtaaacaatttgtaaaatcgaatttttcccctaatatgtacggctaaaagaatggaaatcatgaatttttcaaaaagatataattggtcttcttgaattgtgaaacttatggctttccgtacgtagatggatttgtgaagtaaaagagtgactgattatttttgatgatacttgtgagtttcactaagttggtgactttgtatatgatataatgattggttctttctaacgattgagcttatatgttttctctagatttatttctataagagtaaaatataggtttttatatgatctaacatattggtttttctatgagtaaagatttcttattttaattcagtgtaagtgtatttggagtatcggcgaagtca

SEQ ID NO: 2903 - DNA, 534 bp, Arabidopsis thaliana
  Intron number 2 from transcript AT2G46770.1 (locus AT2G467 70) derived from phytozome v7.0 (chr-ID Chr2; pos 19221506 to 19222039 reverse strand)
aggtatgtattaattccatcataacctaaatacgagttattcaatcaaaggatttggtctcttttttgaatatctcattttacatcacaatctcgattttgttttgattaattattatttcattgaccattataaaagttgttactgatgataagatgtacaagtaaaaaatatcatgtaattaatatatatataaaggtaattaatatattttaaaaaacaatatttatgcaaagtatgatcgtaattttctttaataacattatgaaaactatcacatattcgttttcgttattatttttttcttaaattcccaatatttaatgataatagttttagttacttcttcccacaaatatttcttttctcctttgtcatatacagacgcacatgaaactgaaatatgaattttctttttctttttggttttaacctaaatgggattagtgcaaaacatgaactttgctaatatatcttagttgatttttgaatatttaaggtcgtgagtattataggggaagcatcacaagacga

SEQ ID NO: 2904 - DNA, 548 bp, Arabidopsis thaliana
  Intron number 4 from transcript AT2G46830.1 (locus AT2G468 30) derived from phytozome v7.0 (chr-ID Chr2; pos 19246350 to 19246897)
agataagaagtcacgctcagaaatttttctccaaggtaaaatcggttaattttgaaatgatgttctcatcttcattggcttaatgcttaagacttattgaaagccaggcaagttttctgcttcttttgcttcttagtcaggagatagatagattacgtttttagagtttagtaatgagcaataagtcttaaaatagttggagaaatgacgagatgtaatcgttttcttttgtttatgcctatatcttgttaatccacaaacatgtacatagattcttcagaagaatgttagtttctttagattcttcagataaacttgtgtcttcttaccgattctgaggtagtggcaaaagtgggctgagtgctagaaatttttgaatgttccttgtgataagccatagaggtaaaccatttttgattttccagttctgtcatttaaacttgttagtgtcattagatttttgtttgtttacgtttgtttagagggtaacaaaactactctcatctctctcaggtagagaaagaggctgaagctaaaggtgtagctat

SEQ ID NO: 2905 - DNA, 305 bp, Arabidopsis thaliana
  Intron number 1 from transcript AT2G46850.1 (locus AT2G468 50) derived from phytozome v7.0 (chr-ID Chr2; pos 19251846 to 19252150)
gcaccggttgcttaaaatgtcagttttatttcttcttttcatttattttcgtgtatgaaacagagtacgtttcaagtaaccttattttactattctaaacaatgaatagaaatattttgtttcactatgaataattcataactgagtcatatggttcgttgggttactaaaaaacttagttttgattcagctcagtaattcattttgccttagtttaaaaagacaagtgtttcttgagttacaagcaacttacactacttggtttactgttgtaacagcttgcttcaaagacggaaaggaattat

SEQ ID NO: 2906 - DNA, 568 bp, Arabidopsis thaliana
  Intron number 1 from transcript AT2G46980.3 (locus AT2G469 80) derived from phytozome v7.0 (chr-ID Chr2; pos 19303430 to 19303997 reverse strand)
gggctttcgcacttgtacccgcgagctttgattaggtaatttcttagccaatgataccatcgctcgattttctctgttttcgttttcgattcatggctcgttactctcatattcagtgataagtcgtcgcgatctatgccccctttcgttaaattggtgttatcgtctcgattttgagtttagtaccagcgttatagtgttgtctttgcataatcggagagttttggtatgaaattcgttgctagagatatcacatctcgctagttgttcatcgtttcaagcatctattatctgctgcttctcttgttttcgtcatattatccagatctagcaccttcttattttgggattttctattaccaaattttttatccgagtgttagaaatttaccattcctaatgattaatttatcatccattatcgctgaatatagcctgcgttgtactgctttacttctctgtttgtgttgctattcagaaattatatgagtgattaggtgttcgttgatatttacattctttttcccagcagaattgttaaccttgtggtgatacatttcaggaaaag

SEQ ID NO: 2907 - DNA, 512 bp, Arabidopsis thaliana
  Intron number 1 from transcript AT2G47410.1 (locus AT2G474 10) derived from phytozome v7.0 (chr-ID Chr2; pos 19448621 to 19449132)
ttttgttgacctaactaaaccctagcttcttcgaggttttctcttgattcccttgtcttttctagctcccgaatttgccagttttacttgattttcatttttcatgtgtgatgtgtgtttttctatgtaattggatcttagggttttttgatttgggaataactctttgaaatcgcatttaagattgtgtctcaatgcttttttacgatccaattccttgagatgttttgtagatttctttcagtcgcttaattaggggaatgattggatgatccttcctgtgtagtaggaagaacagataaagttacatcagattccaatttttaaaagagaaccctagtttactattaagtatgtggacgattctatttcatatgaaaggtcttggtgttatatatgtcatctgtgtatatttatctaaaactgagtcagtatagtgcatgctttaattgatgagactgtctttcactttggcagtggcatttttttgacgagtgcttctcttccttatc

SEQ ID NO: 2908 - DNA, 457 bp, Arabidopsis thaliana
  Intron number 1 from transcript AT2G47550.1 (locus AT2G475 50) derived from phytozome v7.0 (chr-ID Chr2; pos 19509544 to 19510000)
gggtgtctcttgcccttttctccaaaggtataaacaaaagttatccaacatgcacgtaattcccattttttttgttcatatatgatactttaaatatacacgtaatcgtctataatgttgcacgaaatcttcttcatttaatttgcttttaatttctactattcttgctttcgtgaagaatgcatcattttgttataggagaaatcttttgaccacatggcttgtggcgtaattggtttgtggatgtatgtcgttttgccaccatccgattcaaaaatgcttaatacatgttatttgtcaaaaaaaaaaaatcgtcagaaataataatagaaatcacaaccacaaattactaggagaaatatgtgtgcctgtacatatataaactaaaatatgaaaatgcattttcgtatttgactttgtaggttgggtgccaagaaggcaaagatcgagaccgatt

SEQ ID NO: 2909 - DNA, 802 bp, Arabidopsis thaliana
  Intron number 2 from transcript AT2G47750.1 (locus AT2G477 50) derived from phytozome v7.0 (chr-ID Chr2; pos 19561715 to 19562516 reverse strand)
tttctctacaatcttatcattccaatcgtgaacaagtcagtgaattcctcctttgattcctctaataattagttctcctagatgctgtttaaaatcctaagggcaagtcaggctctttttctactttctgaaatctttagagttaaaagagatatacgtcttgtgtgcacataagtatttacttaataagtgaccatcatgctcaaaacaaagaaaaatgggtgatctcatattccataaaagaaccactaggactgttcctctagttgtaggataatggatatgtctccaaagccaatctatggaaatggaaggacatcacatcaaattctgcaatgttatccattactattgaaaatcttgaaagaattatcaattttcttacctcagtgtgactatggtttcataatcattgtaccactaacatatggaaattagtacatacagtacctaacactcataagaggtactgtccgtggtagtgtggtaccaatatattcatcacaatgggtttcgcacttaggaagaaaatgaagtttgctttcttcttaaagtttttgttttttttggggacaattagtggtatcatgtcatgtactataaagtttgcttccatcatcttttatccacacgccaattttgatgtccccactaaagattctctaagaattttgaacatgcactcactaaacctaaagaatctttcatatccgttgaggttacctcttttaccatcttcttcttgctctgtttttaacctttttacaacaggtacataacaggacttgacaaaggaaaagca

SEQ ID NO: 2910 - DNA, 184 bp, Arabidopsis thaliana
  Intron number 4 from transcript AT2G47760.3 (locus AT2G477 60) derived from phytozome v7.0 (chr-ID Chr2; pos 19567350 to 19567533 reverse strand)
tggtataaatgaagacttatttcttatctcttttcatcaagtatttgtagacgttgtcaagcgttgtccatttacgatgttaatgaacaatattttggttttgatttgtctgtttatgatgggagtgattttagtgaattcagtgatgatatctcttcttgtatccttacgtatttcaggtgcc

SEQ ID NO: 2911 - DNA, 220 bp, Arabidopsis thaliana
  Intron number 4 from transcript AT2G47760.2 (locus AT2G477 60) derived from phytozome v7.0 (chr-ID Chr2; pos 19567350 to 19567569 reverse strand)
tggggatcgtcttgatcatctacgtgaagactgatgtggtataaatgaagacttatttcttatctcttttcatcaagtatttgtagacgttgtcaagcgttgtccatttacgatgttaatgaacaatattttggttttgatttgtctgtttatgatgggagtgattttagtgaattcagtgatgatatctcttcttgtatccttacgtatttcaggtgcc

SEQ ID NO: 2912 - DNA, 706 bp, Arabidopsis thaliana
  Intron number 1 from transcript AT2G48030.1 (locus AT2G480 30) derived from phytozome v7.0 (chr-ID Chr2; pos 19648622 to 19649327 reverse strand)
ttctaagaatcttcgaccacactgatttcaggtctgtttttctttttcttgttttaagttattacccttatttataattagtgttaccaactaaaaccctcaaacttaaggatacaaattgtggttgatcaatatagtatacagtatgttccttttattaaaggaatcaaacaataaaatggatgcggcgactttgtaccaattgagaacctagtcgtcatggtcgtctcgtgagagcatcaaatgtgtgtacatatacatacaaacacatacgcacaaacatgtatatataacagctgtatattcttagcgacagcttcaaacgtcaatattgtacttacttttgtctttgaattattattagtatctctataaataaatatctcatggggttcttgtgaaaactctagtgttttttttttaataaaaatttcctaccaaattcacaataattaaatgttttttattttattttatcaaattggtggcagacatagaaaaaggtggtggtattagtaagtttttgttgttcttgcatgttgtaagcattctgattataagaaaggtacctatatactgtaggtgcatgtggttttatatatgttagaaattatattttgacaatcaaacaattaattaggttaattttactatatgtgaatgatttacaggaacgtgttgaaggcgagcatagaggttcccggga

SEQ ID NO: 2913 - DNA, 562 bp, Arabidopsis thaliana
  Intron number 1 from transcript AT2G48100.3 (locus AT2G481 00) derived from phytozome v7.0 (chr-ID Chr2; pos 19670656 to 19671217)
gaaggagcagcaaccctagttttcaatccctaaaggtgaagtttttgttcttctttttctttgattctactcttttttcgtcacaatagcgcagtagcgatctgggttggcgtttttattgacggattttggtgggtttgggttcgtgttagattttactttcacagattcaggtatgtatttgatcttatttagctttggtaatactcaaaccaactagtatttgatcttaattaggtgacgttgatattttgtgtgttgtgggtcaatcatccactctaggttgatctgcgtctatgtttagtcctaattttgaagaatcattctaattgctgatgtttatttatgacaattttatgtcttacttcgaatttagctaagataataaatctagacgagtgcctttataaacagtttatgtatgaacaatgcttcgcttgtgggattgttgatttcactacatttgattaagaatgtacatactattacaaatgttatcgattaaaaacgtcattttcagatattagttctccagcgagttgacacaaaacccgattacgtt

SEQ ID NO: 2914 - DNA, 555 bp, Arabidopsis thaliana
  Intron number 1 from transcript AT2G48100.1 (locus AT2G481 00) derived from phytozome v7.0 (chr-ID Chr2; pos 19670656 to 19671210)
gaaggagcagcaaccctagttttcaatccctaaaggtgaagtttttgttcttctttttctttgattctactcttttttcgtcacaatagcgcagtagcgatctgggttggcgtttttattgacggattttggtgggtttgggttcgtgttagattttactttcacagattcaggtatgtatttgatcttatttagctttggtaatactcaaaccaactagtatttgatcttaattaggtgacgttgatattttgtgtgttgtgggtcaatcatccactctaggttgatctgcgtctatgtttagtcctaattttgaagaatcattctaattgctgatgtttatttatgacaattttatgtcttacttcgaatttagctaagataataaatctagacgagtgcctttataaacagtttatgtatgaacaatgcttcgcttgtgggattgttgatttcactacatttgattaagaatgtacatactattacaaatgttatcgattaaaaacgtcattttcagatattagttctccagcgagttgacacaaaacccga

SEQ ID NO: 2915 - DNA, 620 bp, Arabidopsis thaliana
  Intron number 2 from transcript AT3G01130.1 (locus AT3G011 30) derived from phytozome v7.0 (chr-ID Chr3; pos 44727 to 45346 reverse strand)
tcatctacggcaacatcaagctcaaggctttaaaggtacatctctctatcttccttgtcttgtttttatcagatgagaaattattttcattgggtttcattttgacatcctaaatctgacacttgccattatagcagcaaattcgaatgtttatggcttttgaattatgatattctcgatcgaatcatgtgtgccgtgactattagtatgctactttgctccttttggtttggtcatctatacacaagtaacatgattctttgaccccaatgtttctgcctgagttctgatctcctattccactgaatgatcatagttttgacttgatgtttagtagaagagtttgtcaatgatttgcaacttgatcactgaaatgtaatttcttgcctttgtaaagcataagtttgcgatgttgtgtctggtttccaaaccctaagaaaatcggtatgaaagtagagcctatgttgcttcctttagagcatcccaatccttattcattcagattgtggaatctaattttctactatgatgtgatttgctaataagttatgatgataccaacaaatgcttcttcttcatatgcagataaagaagaattcgcagattaaggccgaagcaaa

SEQ ID NO: 2916 - DNA, 798 bp, Arabidopsis thaliana
  Intron number 2 from transcript AT3G01220.1 (locus AT3G012 20) derived from phytozome v7.0 (chr-ID Chr3; pos 74165 to 74962)
ctctacttgcctataacaagaaactccttgctgaggtatgtatctatataagtaagtatatatgtgtgtttatatagtaaataaggtgtttaattcaactttcatttctaatttgattgtgtttgtttttttctttggtttttttatttttggttttgcactaatagtaataaccaacgtaaaataaatctaggactacaaatatttttctgattattggcttggattggtactatttatgtagtatatatatatgtgtatatatatcagtgtatatatatatatatatgtatgtatcttgtgtgtattaaagtcgtttaatacgaaatgcaatagattattgttaggcacatgatccaacactataagatgtttgtcaaaagacagtaggtgttttgtttattaataaaaaggattcttgatcaatatttacaatttaattaatacattcccatatgactatcaagtaatggcatgtgtgcgctaaccaaatttgacaagaatactgatttttatatcatatcatttttgtgtgttttaaatgattttactacttattgaaatgtaatagttacaagattttcaaaaattacttaagctaagtatatgtaaatatataatttacatatatagtcttacagtttatctattttaagttattagtcattttaaaaatattttgttaatttaaattatatataattatgtttattttaatgatatatagaaatgataatttttaatatctgaatttctaaaacttaacatttgaattgtgtgtgatgatggttaaaggta

SEQ ID NO: 2917 - DNA, 249 bp, Arabidopsis thaliana
  Intron number 6 from transcript AT3G01330.1 (locus AT3G013 30) derived from phytozome v7.0 (chr-ID Chr3; pos 125592 t o 125840 reverse strand)
ggtaatcttctttcttctagtgttttgttttgttggagtgttatcaatatccatctgctaatcactattgggatttcagtccacaacttgattctgaataaacattcttctgcaaatagttctgcattaacaaagtgctacttgatgaataaaagtttccaggataagattttctttaggagctaacttgaaatcaaactaatatcattttcagaccaaaagaaggaaaaatctctctggcttctcgca

SEQ ID NO: 2918 - DNA, 589 bp, Arabidopsis thaliana
  Intron number 1 from transcript AT3G01390.1 (locus AT3G013 90) derived from phytozome v7.0 (chr-ID Chr3; pos 150923 t o 151511 reverse strand)
ttctctcttctctcttgtcctcggaatcaacaaaggtaatgtgtcttcttctcttcaatgcgatcggtttcagttttctatcggaagtcaaactgttttgacttctttcggaaattccggtgattcaacgtggtaggatcgttgttaggatggtgttaagagttttgatttttgtttgaatatcaactaatttatacatggatttcacttacttggtgatcttagattctaattaatccttttttcgggatcttagatctatctgattctcatcccaatttgattttccacttgttttgcttccgacttatggattgctagagtaacagatctgctttgaattatgggtaaattatgtttctctaatcctgttatgtccttaagttagtagttagtcagtctcgtaattcatatgatcggccgaattagtgatcagtgacagtgagattatgtgtaggtttatgagcaaaattttaggtatgttttgcctttatggaagttcaaatttttgttgtttaggttttcctgatgcattattggaccttatatattaacagatttgtttttgtagacttttgtgtaataaagc

SEQ ID NO: 2919 - DNA, 465 bp, Arabidopsis thaliana
  Intron number 1 from transcript AT3G01460.1 (locus AT3G014 60) derived from phytozome v7.0 (chr-ID Chr3; pos 173796 t o 174260)
gagggatacggagctgaggagacgtctgattcgaggtacgttcccctgcttctggtattcgacgatgcgttagggttttataagaattgaatttgggttgagatcgagaacatagttgcaagacttggttaagctgtctttacatgtattgcgagtaatgtgttcgattttaaagcgataaactattgaagattaagctggactaggatttggtgttgttgaatttaagtttcagtataagttgagcgttctgtgctaccgttcgttggagtttttaaggggcctttgatcttctcttatgaattacttatacatacgatatattttcaatcagttgtttagactttatttgattggacttgtctggccttatataacatgagtatgtctgagaaaacacatagccgaaattgtaaagcactgatggatcatgtggttgcttgtttcttcttctccagaaagcat

SEQ ID NO: 2920 - DNA, 282 bp, Arabidopsis thaliana
  Intron number 1 from transcript AT3G01620.1 (locus AT3G016 20) derived from phytozome v7.0 (chr-ID Chr3; pos 236396 t o 236677 reverse strand)
tttgtggacaggtttggcttttgtttctttatttttcatctgatcctattctggttttgattcaaggcttaggatgtcttatcattcttaatcctactaaagagtgtttatcacttaagaccagactggatgatttctgcattttgttttatatgaagtcttgcatattcaccgggcttcgagtgacttgagtaatatcaactcttttgctaatggaatctcttcttttgttatatatatgttacaggaaggttctcgagcaggcaaggccatttcaaggct

SEQ ID NO: 2921 - DNA, 770 bp, Arabidopsis thaliana
  Intron number 2 from transcript AT3G01910.3 (locus AT3G019 10) derived from phytozome v7.0 (chr-ID Chr3; pos 316277 t o 317046 reverse strand)
cactcccgtcgaccttttctacaagcgaaatcgtcccatccccattgttgatcaccttcaaaggtctctctctcactctcattcatcttcaattttgcctcctccgctcatttctgctatttcttttgccaaaccagctactccgtcacccttactggattgatccagaacccgagaaagctctttatcaaagacatcaggtacctttatttatttgcctctctttacattctccaactttgatcttgtatctctccatcaagcaccactcttgtttcctcctcaaaattgcaggtccctcccaaagtacaatgttactgctactcttcaggttcattcttcctttgagtaaatcttctacctttagtttttctccacatttaatttaacatcacttttgtttcaatgcagtgtgccggtaacagaaggactgccatgagcaaagttaggaatgttagaggtgttggatgggatgtttctgctattggcaacggttcgtctctctttctcccattcccatgctttcaatacatacttgtcttgaaagaatttgcctttcagctgtctggggtggggcgaaactggccgatgttcttgagcttgtggggataccaaagctgactgcttctaccaatttaggagccagacatgttgagttcgttagtgttgatcgctgtaaggtagatatatattaataaattccacctttttatgctttgttatgaattcccatgaaaagtctatgctctttctatatctctaggaggaaa

SEQ ID NO: 2922 - DNA, 514 bp, Arabidopsis thaliana
  Intron number 1 from transcript AT3G02090.2 (locus AT3G020 90) derived from phytozome v7.0 (chr-ID Chr3; pos 366290 t o 366803)
caagaggtatgtatttgttatctctgtacttaaaaaactaaactttttgttctgtcctcgatttatctttcgtttttttttagtgaggtggtactatggaccgtagtttgtgtttttttagatcaatacccttagtttcagtttcccgtgtgcctgcctaaaaatgaaaactttagtatgttcttaagttatcttccctttttttaaggttgtattggcataagcacatgttctatagagagatgttattgtgtttatataaaccattgctctaaaaatgaaaactttgttctgtttttggattatctctcgcatgttttggttttattggcttagtcatatgttggtcgtattgttgttgggaaatgtgcatgaagggagatactagagcgcttggtactctgctctacgtgttggttagagttatttgtttctttaatcagttaaagatagaatacacattaagctttagttttttgataattggtttggtcgtaggtggagggacaaaccg

SEQ ID NO: 2923 - DNA, 644 bp, Arabidopsis thaliana
  Intron number 1 from transcript AT3G02230.1 (locus AT3G022 30) derived from phytozome v7.0 (chr-ID Chr3; pos 415794 t o 416437)
acgattgcttcgtaagtttccacaattctgtttatagatctgttctttttttccttcttcataggttcagtttgagatctagtgataaagtctgtagatttgactgatctttgaattgaaaattgaaaatacgatcacaattctctaggtcaactttaagaaacacactgttttgacttagatctatatattcatctgcttgatgggtttcgatctgttttcagaattgaaattgtgttagtcttatgtttgtcggcattgccatgatctctcttatgtttaggtaatgtcattgttgttggaccaacctttctatgttatgtcttaacagttaacttcacaagattcttgcatgtcattgtcctgcacatttatgttgtggtcataaggcttaaggcaaagaaaagtccaaactttatttgtggggctttctttttagaattgagttttcagttacgccatgattgtagcattgatgttgctttcatattgtgttggtttagtcatgtgtaacgtattgtctctttttcttatttttgttggctttagatgcatttgaatattctttgcttataatttaaatattattgttgttgtcatgtgttataggttgctaaggatccatctggaaaagctgtgaacgc

SEQ ID NO: 2924 - DNA, 590 bp, Arabidopsis thaliana
  Intron number 1 from transcript AT3G02290.1 (locus AT3G022 90) derived from phytozome v7.0 (chr-ID Chr3; pos 458704 t o 459293)
ctcctctctccggccagctcaattctcgatcaaaggtttactctttctttttaatttttcgattatttgaaaaattactagaaatatgttttcatcaataacgatcctgatcgttatttgatctcacaagtttgttttctgatcaaattttactgtttttttgtttgtcggttgatacactctgtttttctcagttctttggattaatgcaaatggggtttttcacttttcggtgtctcttatctcaattgagtttgtctgtttctctgttgaagcaaagtttttatctttttcttctttttgtgtggttatatatgtggttgtcggaaatttacctaatttagggttttttcctgtgtaagtgcttgcatttcactttaacaaaacctcaagttagagttgtgagtgttcagagttcagatcgattgaaactctcagttgctactcaacagaaattggacttttggtttgttgagatgtattgtttgaagttgctttgttccactagtgtaaaataacattctcttctctgcatctttagacttatcaaggaatcaaacccattttatcattgcaggtgacgtggatat

SEQ ID NO: 2925 - DNA, 211 bp, Arabidopsis thaliana
  Intron number 2 from transcript AT3G02310.1 (locus AT3G023 10) derived from phytozome v7.0 (chr-ID Chr3; pos 465646 t o 465856 reverse strand)
ttgaagtcaacaacaaacctgctaaagagcttgaggtttaatctccaacatctcttcgatcttaattatttatccttttttaattttatctaaagaaaatgtttgattttgagacaaaagcccttcaaagtttcttacatagatattcaattgtctattatcttcgcaattttcagaacagctacagagagtacttgaagctgaaaggtag

SEQ ID NO: 2926 - DNA, 635 bp, Arabidopsis thaliana
  Intron number 1 from transcript AT3G02310.1 (locus AT3G023 10) derived from phytozome v7.0 (chr-ID Chr3; pos 465903 t o 466537 reverse strand)
cgtggcaagctctacgagttctgcagcacctccaagtacttctctttctttatacacttattagatctgtgtgtagatctttcatttttctagtcttgtgatgagttttatctttcttgattgctttttaacaaaatacttgatatattttcagtttcttaatctgatctctaattaggttttgattatagaagaataattcagtactttcaagtgattgaatttcgagatctgatcttaatttaatcatcatgtcaaattcttagggatttaattgcaatctatttttagatttatcggagctaggaaagtatcataatgatatactattattatcatgtaatttcattgtctctacacggatatatatgtgattagaacttggtaaagtaaactaaagattcacagtcttcaatgaaatttaaaagatccaacgtagaataattagtggttccatgcattaaccagtctaattaaagctcatgcagacatttaagcaccacatgaatttaatatctttttaattaagggatcttctttttataaattttcttttgttagtttttaaaattttagtttgttcattaaatttatagattcttcttctcctgatttgtgttttttgatctttcagc

SEQ ID NO: 2927 - DNA, 554 bp, Arabidopsis thaliana
  Intron number 1 from transcript AT3G02320.1 (locus AT3G023 20) derived from phytozome v7.0 (chr-ID Chr3; pos 470158 t o 470711)
acaagaagaatcaagtcttcttcaataaagctcaggtttttccaaattctcttttatttttctttctcttctttgtaattgttggtgtttcttaagatagaggctgagataggttatctgaattggtgttctgttcgatttttattggctgctttgatttgtaattaaatgttgtagctttgttaagaccagtgaacattgatttgcaccaattagctcatggcttattcgcttgttctgtaacaagaatttggttgacctgttttaatcaaggaactgtcagtcattgttttaaagtttggatttttacgtcttcgagtaaccaaagtatcaaacttttttgatggattagccagtttcatagtaagttgctgagagaaatctatctttcactgagtgatatttgtgaaacttatccttcatactaccaatttaagtagctaacttccggtcatgatagtaatgtgtttgcttgaacctacatgggatctgagcgtgaacctgatctctttcccttcatgtctttatcgaatgattaggtgaacaatagagac

SEQ ID NO: 2928 - DNA, 448 bp, Arabidopsis thaliana
  Intron number 2 from transcript AT3G02500.1 (locus AT3G025 00) derived from phytozome v7.0 (chr-ID Chr3; pos 519634 t o 520081)
tccatcaaattattccttcagtagtgcactcaagggtaagtctcttccaatccttttgttttgtttagcttttcagttttcatgattctcaactcaaagattgaatcttttgagaattttgacctatatgaatctaagtatatgctaatttcaatgactaatcaataaatctgatggtacgtcgtatagtatagaaaaatgtagcaaaaaaagacatttgtgccaaaatcattacgtttcgataaccttttcttgaaatttgcatcaacagctacgtcattatattacacttgattagtttgtttatattcattgataacaataaaaagaagctctgttatgattatgaactacaacagagaaaggatataataacctttttgtttggtctttcgtttgatttgcttacacagcattgcaagcaaaatcagtgtacaagaagaattgg

SEQ ID NO: 2929 - DNA, 626 bp, Arabidopsis thaliana
  Intron number 1 from transcript AT3G02630.1 (locus AT3G026 30) derived from phytozome v7.0 (chr-ID Chr3; pos 562260 t o 562885)
gcttctacgattcgctctgcgactacgtgagttttaatctctctatttccaattcgtgagcttatttttctttaatgctttgaatttgttctgatctggagtttggtttgagtatcgatgataaacctctgggctttggttgatccagtttcttattttcatcaatttgattcccaatgcactctcattgtgtgtagttacgagttatatgatcacatgtattagtttctggtttgtgaaatgaggaatttgcttcatttgtgtttaaaaaatctttcatttttactggttttctgatttatctgggagatttctttagatcaaagaatcttgattttttttattttttatttatttgaaaagctatccttacatgcaaaggacaatctttgtctctatgttaaattttgataatctcttcaactttcccaaacgcatgcatgaattgttttgtgtttatgactttctttttacttggttgttgacccataagactactatgctaaatcattacttcgttcatttattctcttgtttgattattatgttaagaaagcttgttggtgtagtagctgcttagactttttctaaagctttatttggttttaattacagagaggttacga

SEQ ID NO: 2930 - DNA, 578 bp, Arabidopsis thaliana
  Intron number 1 from transcript AT3G02780.1 (locus AT3G027 80) derived from phytozome v7.0 (chr-ID Chr3; pos 603857 t o 604434 reverse strand)
agtaagtctttgatttttgattctctctactttgatttcagtttttgggtgttgccaaaattgtacctttgtctttaagttgtgttctcgaacctggtttgtcttcggcgtttggtcggtgagaaaatggaaggaaaattgactaaattaggttatgggagttggagtttttttcgattaacaatggtttatgaacttaggtgtgttgattagttgactttgatgtaatagtaacttggctccattgatttgttgaccttgatgtaaaagtaaaggattttggatttagtatttgtcaggggttccttttctgattattggaatcaagcaaaaaaagtcaacgctttagtgtctcctgtgaaagatgtcatagttttgggaggaacatagtcaagtttagctatgtttttggccaaaaatggattctttggatatatttttgtttgtctccttttagacttaattttacgattatgatggttgatcttttgctttgatggaagtgtttcctataagttttagacttaattttaccttaatttattgatccatctcttccttttcaatcttgcttgcag

SEQ ID NO: 2931 - DNA, 636 bp, Arabidopsis thaliana
  Intron number 1 from transcript AT3G02850.1 (locus AT3G028 50) derived from phytozome v7.0 (chr-ID Chr3; pos 622634 t o 623269 reverse strand)
atctccagaggctccattgttcatcccgataaccggtacaccataaattctcgtcacgcttttgaattttgttttctgagtcctttaacttttaatagtttcataagtaggccttatgttttattttgtattattctagtccacttactttgttatatggattttagggtaggtattgattaatttctttttttctttatactgagactaaatcttatagaaatcaatcttcctatatattttgaagctacgtactacttttattagagaaattttgaaggaaatttgttagcttaacaactttcggggtcaattgtagtgcaaacaaaaacattaggggcttgattgtggatttaaccttcctttttagtgtaataacattttcttcggttattcattcatttcccgccactttatgacacgtatcagtttctcaatggttacaaatgatcgttggttaaaaatgtaacaaccatgagtctgtacacgtcagaccagattaaagaagaaaactctgtttcgctgaagtttggagcaataatagaagtagactaagtagtgagtttagtttagctactaaatactctgtccggatctaaagattcttgaatttgcaggtggtacaaggcgtggacg

SEQ ID NO: 2932 - DNA, 488 bp, Arabidopsis thaliana
  Intron number 1 from transcript AT3G02900.2 (locus AT3G029 00) derived from phytozome v7.0 (chr-ID Chr3; pos 645853 t o 646340)
gcgtccttggtagcagctcctatctctttctcaggtagtcaatcgcttttttctcttctccagttttcagttcattgcttcctctatcttcttcgttttgaactcaaatttctgagtaacccgagagagaaagattcgccgatttgcatttgcttactcattcaaatttatcctcgtatcttcgattagtattcaaaatttccgttaggtatttaacattttagcgagatcatagtttgttcatagtctgaaactagttcaacatatagcaaatcgacgtaaaggaaatacgaaaatccactgatataacggaccaacatatgattagagacctgtgtatttgagggtttctccatatctcgttagattactttatatatgaaaactcacttgcattttcagagtttactcaaactgaaccaaagcagcttcttgattcacaccttatggctcaggtgactctcatgtcaaagcacaccgaaacttca

SEQ ID NO: 2933 - DNA, 465 bp, Arabidopsis thaliana
  Intron number 1 from transcript AT3G02900.1 (locus AT3G029 00) derived from phytozome v7.0 (chr-ID Chr3; pos 645852 t o 646316)
ggcgtccttggtagcagctcctatctctttctcaggtagtcaatcgcttttttctcttctccagttttcagttcattgcttcctctatcttcttcgttttgaactcaaatttctgagtaacccgagagagaaagattcgccgatttgcatttgcttactcattcaaatttatcctcgtatcttcgattagtattcaaaatttccgttaggtatttaacattttagcgagatcatagtttgttcatagtctgaaactagttcaacatatagcaaatcgacgtaaaggaaatacgaaaatccactgatataacggaccaacatatgattagagacctgtgtatttgagggtttctccatatctcgttagattactttatatatgaaaactcacttgcattttcagagtttactcaaactgaaccaaagcagcttcttgattcacaccttatggctcaggtgactctc

SEQ ID NO: 2934 - DNA, 502 bp, Arabidopsis thaliana
  Intron number 1 from transcript AT3G02930.1 (locus AT3G029 30) derived from phytozome v7.0 (chr-ID Chr3; pos 655309 t o 655810)
gcttctaagattaagtaagtgtctttttccttattaagattcattctccgatcctttttttgatgtcggtggaatatttcgtcgattcaaattccgatctgggtctatcttgaggttgtctatgatgatgtggtagatctgactaggtttgggtttagggtttaatctcctggtttttagtgattctatttgtaacacatttgtctgattgttcctgtttctgtgatttttttaatcttacaagcagcttcacttatatataaaaaataataataatttcattgcagagttcttagttgttgttgtgatgttgtatttatgttgatttttatttgtcttctcttctactttataatttagttaatctaaggctccatggcagagttcttagttttttttttttaatgattttggcaagtgtaatcaattctcacgtgttttgttttgttttgttttgttttgcttgcttgatgagagacctttgttgttttctgaagcagaa

SEQ ID NO: 2935 - DNA, 650 bp, Arabidopsis thaliana
  Intron number 1 from transcript AT3G02930.2 (locus AT3G029 30) derived from phytozome v7.0 (chr-ID Chr3; pos 655161 t o 655810)
ggaacccagttagagttcgagcaaatttgagtttccaggttccataatttaataatgtatatcaagtctcaatttttccttggtcgcctcctctaacgtaatttacttctcactgatccgcagcaacgagacagaggctgtgactatggcttctaagattaagtaagtgtctttttccttattaagattcattctccgatcctttttttgatgtcggtggaatatttcgtcgattcaaattccgatctgggtctatcttgaggttgtctatgatgatgtggtagatctgactaggtttgggtttagggtttaatctcctggtttttagtgattctatttgtaacacatttgtctgattgttcctgtttctgtgatttttttaatcttacaagcagcttcacttatatataaaaaataataataatttcattgcagagttcttagttgttgttgtgatgttgtatttatgttgatttttatttgtcttctcttctactttataatttagttaatctaaggctccatggcagagttcttagttttttttttttaatgattttggcaagtgtaatcaattctcacgtgttttgttttgttttgttttgttttgcttgcttgatgagagacctttgttgttttctgaagcagaa

SEQ ID NO: 2936 - DNA, 1038 bp, Arabidopsis thaliana
  Intron number 1 from transcript AT3G02990.1 (locus AT3G029 90) derived from phytozome v7.0 (chr-ID Chr3; pos 673825 t o 674862)
atttctccagcttcgtcagacagctcaatacttatgtgagtgaacttcgatcgattcttttttatttgtttttctcttcattgattcgattttcttcaatttcgtagttcgattttagggaatcttactttatgtgcttcatttttattttactctcttgttttttttgtggttgaattaagcattagttattgataaaactcacgaatgatttaaggttgcaagaaggtgctttgagaagtcgactcctatttagtgtatagtatgatgctactgattgatgttcctatatagttgttgacgctggtggttgaactatgcacgtctagtaggttgtgttaatgttgattttagttgcactaactgttaagattggatctttttgggttctgacaaactcgtgcaagataatttcacatatttgtattgttcttcagttgttttttgtacatgtataccctgtgaactgcaggcatatatgtttttgtttttctaagtatctgagcttgcatccgtgtctgtgaggctggaatgaattttcttaggtcaagcaaaactaacaagtgtatactcttgcgtagcttgttcctcccctgttcttatttacttaccaaaaggttccacgaactttgcaggcttatttggacatgtgctcatatgtgtctgacgattggttgattcagcacttccatttctggcctcttaagtcacaaaacaaaatttctatcagttgtcccatgttagctttccattcgtttgtatttgtccgtccaggtacatgccgatacactaacaactgtattagtttccttggaccatggtagtttggtgctgcagctagacccagtgaacgtatcataccatatctagaatagttgttattaacgtatttaatggtctttatgtttatacaaatcttctatgttggcttcctattgcaacggaatccaagtaacttcttgcggttgatgactgttccattctccatgcttctttttttcagggttttagaaaagttgatccagaccgctgggagtt

SEQ ID NO: 2937 - DNA, 392 bp, Arabidopsis thaliana
  Intron number 1 from transcript AT3G03050.1 (locus AT3G030 50) derived from phytozome v7.0 (chr-ID Chr3; pos 687470 t o 687861)
ctgaagcttaactttgctctgttacagactctcaggtactgtaccatccttgatctcttgtttcgtttgtgtgagagattgtcttatactcggaatgtggaaggatccagtagattttgaatttagattttccctcttaagcctctcctcttttggtggggttatgattttatcaattatcattacttttttgatgtcttttatggtttatttatgattagatttgttcttcttgaagctttagatctattgatgttctgtttgttcacctcttgatgatttggagttaaagatcttgtgtgatttgtaacaatgagtagaagatttgaccaatattactgttttgctttgtttcagggatctgccggctacaaagtccggtggatagtgtt

SEQ ID NO: 2938 - DNA, 403 bp, Arabidopsis thaliana
  Intron number 1 from transcript AT3G03100.2 (locus AT3G031 00) derived from phytozome v7.0 (chr-ID Chr3; pos 707104 t o 707506 reverse strand)
atccgagaagaaggcttcatgttagttctctgtctctcttttccaatctctcttcctctgcttaatttcttcaggattataccctcgatttcattagttagatcccaaataatctagaaatttacaagaattttcggtgtttgttgaagtttgtttgcaatgaatggttatcattcttcggtttttttcactcaaatgttaaattttcttgatgtgaaatgaaaatcaaacactttgtttttggtgaacatcaattttgaacggtgatggtgatgcttgaaattggcataatgtttctggttgcttataagtctaagatcttattgtttgtattccgaggtaatcactagtttatggaatttctctaattgcttctttcaattttttttcttcattgcaggag

SEQ ID NO: 2939 - DNA, 579 bp, Arabidopsis thaliana
  Intron number 1 from transcript AT3G03200.1 (locus AT3G032 00) derived from phytozome v7.0 (chr-ID Chr3; pos 737803 t o 738381 reverse strand)
ggacttaccaggtaatattaatttgacgtttcccttgtttatgcatgagatccacttaatcaaatatgatttaaattttttgaaaaatatgatttctgatcaacattaattacgcgattctactttagttatcaaattctgcatatattattcatttatatggatttaaattacaacatctgtaatcgttaagaattattattatttgtctaaaacccataggaacaagagagattgaagaaaagaataagaatatagcattgatgaagaaaccctaaatatactttagtctctaccgggaaaataccacatgtgcaattacacatactagttctgtaaataactattttattatttttttcatcattttcaccaaatcttttaggaattaaaatgtcaaaataatttttaaaaatgtttaaatataaaattgtaactcatgaaaacatgaatgccagcttaattgaatcataattttaatttacgtcatccaatatctgctgataaattacgttacttaaagtaatcaattatgaattcaataatagggaagtccttgcttccgagcaaagaccaaga

SEQ ID NO: 2940 - DNA, 899 bp, Arabidopsis thaliana
  Intron number 3 from transcript AT3G03270.1 (locus AT3G032 70) derived from phytozome v7.0 (chr-ID Chr3; pos 761574 t o 762472 reverse strand)
gttcttggcagtcgaggtttgggttctctcaaaaggtaaattcttatgcttacttactatatatagtctagtttcgttggttaaaaaatttcgaatttcagtaaatttaggcaatatagcttcaaataattgaaactgatttggcttttctcaaattaattttagtatcacttatttcgttattctgtggttaatcaaaaggagaattggagtgataattaataattacgttatctgtggggttttttgttgttgttgtaggatcttgctgggtagtgtgagcaatcatgtggtgacaaatgcaacatgtcctgtcacagttgttaaggctaattaaagtgtctcttgttctttaattggacccagttaataacattagtagttacgtgtgtcactcatgcattgttttgacatttatacgtttgttgccttctacaaatttgtgtgaaactgattggtactgtttcattaataaatttcagttaaatgatatttactctctttttgtttgtgatttgtgaacgttacgtaaaaatcacaaaaaaaaataattagtttttctaattcattcatgaaaaatcttcgtggactaaacaaaaaagatgtgaaaaaacaatccccatgtttgatccagattaattcgatccgttaatcaaaagatggtcttaatgagcataattcggggataaagtcgaatatagaaatagttgttgaaaagagaaatgtttggattgaatcttgtcagcttgatgtgtggttgatcacatgaccaatctatgtatggaatatggatgtcgtgtgtgctgattcattcagatatgacaagtggtggatgggataattcacgatatgggccagattatgagtttgttttaacttgaatggcaggccgaatcata

SEQ ID NO: 2941 - DNA, 737 bp, Arabidopsis thaliana
  Intron number 2 from transcript AT3G03300.1 (locus AT3G033 00) derived from phytozome v7.0 (chr-ID Chr3; pos 774847 t o 775583 reverse strand)
tggttcattttccaggttacagccttgtagttccattgttgctactatatgttatctgcaaaacccataaagttccatgagatttgaatctatggaagttttggtgtttttatgattttgattatgaagaaacacatttatagggggttttcttatgtgttgtttgatagagttgatatactatatagatcaagaaagttagaccaaattattctgtatccttttgcttttatttttttttacagctagaccaaaaaagtacaagtggttttgctcaatttggaaaaaaaaaacattaaaaatattaaaaaacaaaaatgaataatgacgtaagcgaaagcttctgtcatagtctcacagtcacaacaaaacagtcaatcccccaaagaattatggtagcagtcaataatcccataaataatcttcttcaacagtttttttctcttaaatttttgtttcgaaaaccgctcactacttcttaatcgaaatgactgactgagagctttagcttttgatcgttcgtcttcgtgattcctttcttcttcttctctccgctactgtctgtacctgaaactactgtcctcgatcgctgctttgtctttcgaggttctctaatttgttttttcttattattatctctggggtttgcttttgcgttaatcctctttctgctcgacttacggcgatttttgatatttgcagattaaaaagttaggtttttttttcgtaaatctact

SEQ ID NO: 2942 - DNA, 330 bp, Arabidopsis thaliana
  Intron number 1 from transcript AT3G03305.1 (locus AT3G033 05) derived from phytozome v7.0 (chr-ID Chr3; pos 777667 t o 777996 reverse strand)
cccttctctcgtcttaatcaccggtgatctcacaggtttatatctctctcctgaattaaggacttggttcgaaattctcaatctttcattggttcgttagatgagcttcagtgatgttgcttctgggttcttaggttttacttgtgagcttcttatatgcaagtctcaagctttgattgctcgagctcaaaaattgaaactttagctttgggaaccactgtggttatatatttgctatatcagatacttataaactctcatctgtagttgatggttttgtttgtttgaagatttgctggttgattgttttttcttaatgtggttaatcag

SEQ ID NO: 2943 - DNA, 599 bp, Arabidopsis thaliana
  Intron number 3 from transcript AT3G03370.1 (locus AT3G033 70) derived from phytozome v7.0 (chr-ID Chr3; pos 797872 t o 798470 reverse strand)
tctcacactgatcgtcatcgcaagaaggtgatatttcttgtttaaacaatctttttgcttaacaaatctctgctgttatcttaaaatccttgatgtcaccaaaaagacacagatttttgtgaatttgttatatgctgccaatgtttacattaaacgattctgttttcatcgagtaaaaaacagaggatcaaaatacaactttttggaaagtgatttgacaatttactttgtttaactctcttgataacatcacttcatagggattgctaacagactgttttatttttcaatgttacagcatctgaataatcttccatttcgttttaaaaaaaacagagattttgatttcttcagtcatctgttcttgagagatcgccttggtggtggtgatgagtctctgaaatagccaaccatatacatttagacaactgccattagaattccacaaggacaacctatgactgcagctttccatgaaaacattgcttctctggctgcttggtctgtgtcgagcatggttcttggatttgcattccacatattttgttgttgtttgcgtaaatgttcggatcgttcaatctgtctagctgaggactctc

SEQ ID NO: 2944 - DNA, 321 bp, Arabidopsis thaliana
  Intron number 1 from transcript AT3G03380.1 (locus AT3G033 80) derived from phytozome v7.0 (chr-ID Chr3; pos 799994 t o 800314)
tggttaagccaggtgcgccttttgacttgttgagaaacgagtgtcagaagattagctgggtttcaagaattcataagagatgatgttattgttgtggaactgtagaactgatcatggtttttcaaagtatttgtttttggattgttcgattttccataggtattagttacatgtttatctagaatggcttagctcgatatggatatggagattatttggtcattccttctgggtttgagtagacagagaatctctttagagttcagtaaaattgatttgtaaattctttcttcttacgtaggcccagtagttgctgaggca

SEQ ID NO: 2945 - DNA, 660 bp, Arabidopsis thaliana
  Intron number 2 from transcript AT3G03520.1 (locus AT3G035 20) derived from phytozome v7.0 (chr-ID Chr3; pos 839084 t o 839743 reverse strand)
tattaccaatcctttcctaattgcctcttttacaggtaataattggtatttctttttgttttaaatttcatataattagaaaagtaaaattcaaagttacgaattatgattttagtgtaggaaaaaatcgaatacgaatatatgttttaagaaaaaacatatggtagataatgatgaaccgatgaattgtagtgacatcttaaaaaaaaagaaggtgatgacacctggattgcaatgtctacttaattgaaacataaagaaaatgaatttaaattctccatgattgagttttattttattttattgttgaaaaagcttcctgtaatgagcatgtcctaggtatttgccacatgcctgaaatctttctatttgttgtttataagaaagtggagtagttgcttggaatatttttgaattataagaaaaaagaagaagaaaatgatttctagaaatattttggtttattaacgggattactaatcttgatatttgatttttaacctttcggatgacagagagagattcgattaggtttttgcatgtgtccaactgtccacggaaaaaatttacgtttagttaatacttttttaatactcattaaaagtgattagtgtaaaatgtaataacttaatcgctaagactcatatttaaattaggaac

SEQ ID NO: 2946 - DNA, 571 bp, Arabidopsis thaliana
  Intron number 4 from transcript AT3G03610.1 (locus AT3G036 10) derived from phytozome v7.0 (chr-ID Chr3; pos 870006 t o 870576)
ttgcaggtaatctaaacggtctaccttatcttttgaacattagataccaaaagatacgtttaagaggactataattcatcagcctataccatattcttttttaagtttacattttcacattaggttcttggtcttagcattgttgagatagctttagtagtttgtgtaagaatacttttgtaactgtaagaatacttgtgtaactgtatttgcactgtctcatttgtagactacaaatactttttattggcttgtgtttggaagaataatggtaactctggaaaacaaagagatgtatagaattagaaaatttatcagagtgtgtttctgcttggtgcctctaagtctcttacttgtgtatgtggtttattaggaagcttacttagtaaaatgatgactttctcttatggtctcaattgcttgtttttgttgctttttaaaattttaccggtttgttttgtttccagttatccatggtcaatttgactgtcactgtcaatttgatctccattctgtattttcttgcctcttattaggaagaaaggctgagaaatattaagcgaagaataga

SEQ ID NO: 2947 - DNA, 832 bp, Arabidopsis thaliana
  Intron number 1 from transcript AT3G04090.1 (locus AT3G040 90) derived from phytozome v7.0 (chr-ID Chr3; pos 1072944 to 1073775 reverse strand)
ctcttttctccttggcgattagattacctgctcaggttttctaaagatccaaacttttttctgaatttttaaacttttttcagcttactgttttgggtttacttggtttctatcaatatttgtgatctgtgatagtttctttcaaatgggtataggcttgtgtttgtctgcgaattagaatctagttttgtctgcgaattagaatctagttttgcatgaatcattgaatccaaagctatgtagtatatgcttttcccgtgatttgtccccacttgtatgccccattttagattagttgagtagaattcgacttttttggtacatatgagtctgatcttctgtttttcgtatattctcacctttgatctgtttagtatagttatactcaggtttgatatttcttggaaagaagaacacacagaatcagattctcttttgtttttgatgtttgtttttttgttgatgtatgtgtttcccacttaatttaaagtaggaaaacgaaaccttatctttctcgtcgatatgtctttgtgttttctttagccttttctagagtttcttgcgtgtccatgtgtttctgtgtactacaataacataaatagatagaaagactgttaaatttggtaacctgatttagcaaggagtaatttgtactctttttgagagttgaatcaagccagatgactttattgcctttggtaggaatagtcttcatgatcccttttttgccactgtttcttgatttcgacgggataatgtttgaaaggagatgtgatatattatatctgttattccaggcaattggtgctgcaggaggtgcattggcgatcat

SEQ ID NO: 2948 - DNA, 864 bp, Arabidopsis thaliana
  Intron number 1 from transcript AT3G04350.1 (locus AT3G043 50) derived from phytozome v7.0 (chr-ID Chr3; pos 1155529 to 1156392 reverse strand)
ctcacttccggctcctcttcctagttggccgcaaggtacaaaaaactttctttactggaaattgctaatttatctataatttcaaattgaagttgcaagattctgtatatggaattgagtttttcagctaggcttggtctaatcaaataattgagctgacaagttataatatcgatactttatctttcatgcgtacataagataaggttaattatttatggatccttccttggttaatgacaatcttatctaattgtttggcttaattttatataattgtttagagagagaattaatttctggtttattgaaatttgaaagggtagactgaggaagatgctttggaatattctgcatgggttgttccgttgtctacttgtcttgttcattcttctttggttgactctgattcaagatttttgtatacacaagttaatttcaagccttaaagagactttctatttttgctataattagatatgattggttttgttaagttttattggctcaataatgtaagcaatgataatgttgtctctctgatcatagaaaaaaaggctctatcttaaatgtgttgaagagtagatggatatggtatcatgttatttaatactcttctatgggacaaaaacttaagttttgtttgatggaaataaatctcggtattggtaatgaatttgaagctgatgaatttgtacttttgaatgcatcaagctaagcgccttcttgttttactgtttcaatctatcaattgttctatatagaagtgtttttagttctttgatgctgaaagtgatgtacttttctgttactgtcaatctctttgcaggtaaaggttttgccacaggaagaattagcctagga

SEQ ID NO: 2949 - DNA, 564 bp, Arabidopsis thaliana
  Intron number 2 from transcript AT3G04710.3 (locus AT3G047 10) derived from phytozome v7.0 (chr-ID Chr3; pos 1277586 to 1278149)
ttctgttatgcagtcttattgaagattataagcactcagattttcttttgagagataggaagaagcgaatcttttacaattaggattcgaaagaaacaaaaaacaactagaaaattttggagaaaaagagatgaaaattgtggctctgtatataactcacaagatgagagaaagaaaaagaaaaacacctcttgttcataagctgtaatgatgtatacaaaaaaaaagattacaatatgatcttggattggataataaaatgaacttttttctagataatcgattcttaaactgaaaataagcccattttgatctaacgttagaatgaaaatgaagagatttgagaagtcagggtgtattttttacaaaacgtattattgggtgtattttgtaatagttaaatatatgagggtctaagattcaaatttattaaaagataaccaaaaaaaaacctctggaatcttcttaaaacctagaagcctccgactccgaccaactgaaaaattaaaaggcaaaagctttttttcagatttctgataatcagacagacagacacaaacaaac

SEQ ID NO: 2950 - DNA, 442 bp, Arabidopsis thaliana
  Intron number 1 from transcript AT3G04850.1 (locus AT3G048 50) derived from phytozome v7.0 (chr-ID Chr3; pos 1335391 to 1335832 reverse strand)
accgcatctccgccgtttccttctgcaacttcgaggttcctctctcactccttaattatgataatctgctcctactttagtttttcttcctttatatttgtttttatttggagaaccgactcagtgaatttgcatctagatgtttcctaaattcgctcgtcttcatcggatctgctactctttgggtccataattcatataactcttactgttataaaattaggttttggggcttatgatcgtcttcgttgccttaattttcagcaatttgactcgatttgagtttttctccttttgctactagattagtatttttccaattatgcttgaatttagggtcactaattatgtatctcttcacgtttctttgttgttgaattgagttctaatgagttagattctcactgtaatccgcaggattctccagtttttcaatatatta

SEQ ID NO: 2951 - DNA, 605 bp, Arabidopsis thaliana
  Intron number 2 from transcript AT3G04870.2 (locus AT3G048 70) derived from phytozome v7.0 (chr-ID Chr3; pos 1342950 to 1343554)
agtgttaacggtaattaaccaaacaaaaattgaattctttactgtctcctctgcgtcaggttgattcctttggatgtttcggattctgggtatttcaattggattctttagaaaatcggtaaattttgtctttttagtggaaaatttgagaaattgacatgtactaggattaaaaggcttagctttatgccacgaacaatcccacttttgaagaggatgatgtttcaattctcatggcatattgatgaactcaatctatttatttcctggcatatagatgaattctgaactctcatggtttagataaaaagatgaaactcttgtggcttctctctactaatggcatagtaatggaaatggagagtttggtcgagattttacggtcgatccaagattctcttttgtttatataatcagtttagtttatccatgggaagtagtagctgttaaggaatcaaatttagatttaaggtttcatgttatgagaagctttcttcttctaataattttctggagcatcgtgattcttgatcatctcttactgtttaaatggtctggttatgaatacagctccaaaggggttatttcctccagagcctgtacca

SEQ ID NO: 2952 - DNA, 458 bp, Arabidopsis thaliana
  Intron number 1 from transcript AT3G05040.1 (locus AT3G050 40) derived from phytozome v7.0 (chr-ID Chr3; pos 1407562 to 1408019 reverse strand)
acactcgcaaatcggcggtccaattcctggattctgtaatttgttctgtctcaatttgctcgcttttagttttctgtaatcgatttgcgtacttatgttgcatgttgcatataatgatgatgtagctggtgtgatcaagcttaaaggaggatttgttgtactttggggtttaattaaaaaattgagctttttattcgtttcgatgatttgatctcttggaacatatacgcaaacgtttttttttgtctgatttgattgattgattgagctcgagttggttctaattggaaatttcctacctttttggtcagaaagataaaactgtgttgtcggaagagttgtttattatcttaacctaattttgttcaattagctgttgaaagttggtgcactgttatgatggtgtttgattgagtaatgtgcggtctttgaaaaatacttgcaggtaaaatctggag

SEQ ID NO: 2953 - DNA, 323 bp, Arabidopsis thaliana
  Intron number 2 from transcript AT3G05070.1 (locus AT3G050 70) derived from phytozome v7.0 (chr-ID Chr3; pos 1416592 to 1416914)
aagctgtcgaagaagagtgagtttgctttgttctttgcttattttgtttgtcttgactagcacatggagttgttaatgttgtgtgttggctttagcataactaggagcttctcttgtgctttgcttctcgcctttactatcactgtttgtgagagaatcaataatggtgctcttgcagcatctgttacctaacaattttttccaatttcaagttgcattgttgtgtatactttgcttaggtggttggttttgttgattgattattcgaggtagattccctttttattcatatgaattgtctttgattttacagtggtccagcc

SEQ ID NO: 2954 - DNA, 603 bp, Arabidopsis thaliana
  Intron number 1 from transcript AT3G05090.2 (locus AT3G050 90) derived from phytozome v7.0 (chr-ID Chr3; pos 1422724 to 1423326 reverse strand)
atcatcgatttcatctgaagttgagatttttaaaggtatgttgatgatttcgtacacgactgattccactttttttttgttgttgttattgttcagtttttgttctcctgttagaaattgagcaagtagttgaattaatcgtatatgttcaatggtgatgggtactgtgtatggatcaaaactgaagagtcttcttatagctgactagtgatgatgattttgtaatctatctcaattgagtgtggccttttgattttgatcttcttcttccgactattttccttttgatgagtcaatggaggattttgggagcttatcagctgttattcgatgtggataattgttgattttttttcttccggaatatttgagattctcgtgaagagaaagaatcttactctcagctggatctctatgtctgtcccttaggttcttatcactctactactaccagctttttcttagtagcaatattcggtttggtcttgttatgttttggatgatgatgataactagtctgcttgaagaagagattgcttgtccctcacttgctggttttttcccttttgtggttctcctttcaggctttcagaataatttgaa

SEQ ID NO: 2955 - DNA, 566 bp, Arabidopsis thaliana
  Intron number 1 from transcript AT3G05100.1 (locus AT3G051 00) derived from phytozome v7.0 (chr-ID Chr3; pos 1424476 to 1425041)
cgcactagagatcaacaacttgcagatctgatacagtaatcaccttctcaaaaaatcttttttttttacttcctctctattgtctgagcttcaagctcctttattgttggaaacttgagtggctagtaattgtcttcaggttccatttgatgttagcttagtgcttaaagtttggttattgctaaatccatctctaaatttcggaacaaaaagatggaattgaagatatatgtatgtgaaattcactagctatatggcttcattcctctttaagtgattagaaagtgacattgttctcagcttttgaatccatatctgtgaggtaatctgattgctgcttaaagatttagctgtggattgtattgttgttatagaattgtttcatcaatgtaggctctttgatgagatcctattacgttctgctcttttcttgattcttaatagtcactgactttgcttaaccagtagttaaataatcatttcccgttctgtttttataatctgaagacttgagctttctctgtgttggaaaatcaggtacaagggtatatcccattacgaaggag

SEQ ID NO: 2956 - DNA, 550 bp, Arabidopsis thaliana
  Intron number 7 from transcript AT3G05510.2 (locus AT3G055 10) derived from phytozome v7.0 (chr-ID Chr3; pos 1597047 to 1597596)
cagttggagctagtgttccacggattggcaagacagtaagtatatctgaatctccaattttttcttcctcgtttgtagctttcatttttgatctcttaatagtttgatgcatcatgatctctgctccgcccaaaatcagaaaacaaataaaaaaccataactttcagagaagtagttagttgcctcgagttaaaatagtttaagagtgtattgctttgtttgatttgcaagcccttggatacagatctaagacctctcgcaatttttgttggacttgactttttagtgatccgaggagtgaatcggatctcgaattaatgatttaagaaagaaaggatctatcgataattgggtgattcatattttgagtaagtggatatgtattgtccatggaaggatatagagttcaaatgccagacattttgtagtgttactaattgtcattaggttattacattgcttaattatgtatttgcaatctttaatctgtttgatttacgtcaaacatttcgcaggtgacagtgatcattggagaccctattcattttaa

SEQ ID NO: 2957 - DNA, 547 bp, Arabidopsis thaliana
  Intron number 1 from transcript AT3G05620.1 (locus AT3G056 20) derived from phytozome v7.0 (chr-ID Chr3; pos 1630291 to 1630837 reverse strand)
gcagggtcttacgacattccgaactgcaaccgttggttagtattgatattttagttaattaaatcagtagttaattaattgattgattaaccttttttgtacttttcttcctttttggtttttgtcaaatttttatatatattagtgtgtctgaaaattagaaaagcatatatgctttctgcaatccgcaggctttcaagctttaagttatagtttttttcttctcataattcattcttttcttgtgctacaatatctaatccattacttaattgattgatcaatcttttcattaccttttaatattgttttggtcaaattttgtttactattgtctctgcaaatcatggaatattatatgcttttgctttctggaatctacaaactttcaagatttttacttttcttataaattatccctttcttatgttacaaataactactttttcaatatgtttttgttacttatgtatctaattaacatgattgaccattaattttggtttgatcagctgtttccggaagaggattcattgcaaaggacata

SEQ ID NO: 2958 - DNA, 655 bp, Arabidopsis thaliana
  Intron number 3 from transcript AT3G05680.2 (locus AT3G056 80) derived from phytozome v7.0 (chr-ID Chr3; pos 1670968 to 1671622 reverse strand)
gcttcctcatcttctcaagctgtttctcttgtcgggtatgttctttttttgactgtgtgttcttatatttctttctatattttaaccattgaggatcttgaagtagtaatatccaccattagaagtcttgttgaaatgcatggtcccatactctgtagctgtgatctctattgactcttaatgttaagccttttttttggatgtaaaagttcacgattggctattttcttgtcactggaaggtgaatgataagaaacctaaatttgtgtagaaaatctgaataacccaaacttgaaactgtaacaaaaaactgaactttgcagacatgatatttcgatccagtggtttcgatgaaatgtccagagtccagactctaaagttcagcttctttatcattaataaactttagtcactttcagagaaatctagattttgagtcaattcgtcttctagaaacaaaaatagtgaagcaatattgttagctgaaccacttgtagttagattttcagctaaaatgccagctttatattctttgtgagtgacttaatgtctgacaacatttcttgagcgtgggtgatgtctatggttcgttatctcaacgttgacaatattttcgttagggcaacttcacctccttcatttgcgttggaagtgt

SEQ ID NO: 2959 - DNA, 425 bp, Arabidopsis thaliana
  Intron number 1 from transcript AT3G05685.1 (locus AT3G056 85) derived from phytozome v7.0 (chr-ID Chr3; pos 1674465 to 1674889 reverse strand)
accaaatttgtacagctgctagaaacaaactcgaagttcaaactcatcatgagaactaaggaatcaacacccatatctccaatctatggaacaccgacctagactgatgatgatcgttaattttatatagagcaattttacggtgtgatatttgaacattagaaatattgtgtaattttttcacttttattttgctattctttgctactcgtattttaaagtgaataacgatttgttcagctaaaaataaataatttttgaatttttcttgtatttatatatattttatattaaattaaactgaaaggatcaaaataaataaatttagagagcaatttttatttaattttatttaattttgagagcaaattaagtttctctctcggcgaggagtacgttgaccctaacgaggagctaaaacatcc

SEQ ID NO: 2960 - DNA, 653 bp, Arabidopsis thaliana
  Intron number 1 from transcript AT3G05720.1 (locus AT3G057 20) derived from phytozome v7.0 (chr-ID Chr3; pos 1690930 to 1691582 reverse strand)
ctcattctccttccgccgattctcttgaccagaaggtccgtttggcatatgtacacattttgtattttcgtcgcgaaacctggagattgatgaatctgacagttcaattctggagacatgtgatttctgattcgtagatgcatgctttcagtgttaggaattttgaaatgacctatccaatttcgatccattttggcgtttcttgtggttttccgtgtttgaaatttggtgttcgtaatttgtcttgagattcgtatttcttgacatgttcgttgtgaaatttgacttgacgcttgaattttcgatatatgatcgctagagtttttacttgcctcctgacattttaaattctcagagtgagctactaacctttcatgattgattttggtttatgaagaatttgcatgttctgaaacttggttatacagtgctagaattatcagaaggagctacatagcttggttaagactttccatattatttttgaactgaagatttttcttttgcatgttctggaatatgataatggtgattgcatttctcggaatgggagattacattttctattttggatcattttttctattttgagtagttggtatgttcgattggttacagttgataagctgtatttggtctgacgagagggatct

SEQ ID NO: 2961 - DNA, 495 bp, Arabidopsis thaliana
  Intron number 1 from transcript AT3G05900.1 (locus AT3G059 00) derived from phytozome v7.0 (chr-ID Chr3; pos 1763350 to 1763844 reverse strand)
attctcacactccaactgttactacacctgaaaaggtaagctattttgaaaactatccctctgttcttgactcttattttctaagctcgtgctcatgtatgtatttatgtatatgtacctctatgcgtgatgcttttgaggttgatagataggtttcttcatcacgttttgatacttgtaagatccatatgctttcactgagacagagtccaatatacttgtatgtgtattcttccattgttttactgcagcaattattagaaggaaaaaaaagttggaacttttcagaaagttgtagattatgcacatggatgttaaagaaccaactttgtccatctttttctagaaaactcttcttacgttccaaagtatgattctagttagagaaataaacgaagcaatacctttctaaggtttcttgttgtgaattataagagaggtttacttttacctgatgcagccattggagaataaggtgagcgaggaagctaagtt

SEQ ID NO: 2962 - DNA, 549 bp, Arabidopsis thaliana
  Intron number 1 from transcript AT3G06040.3 (locus AT3G060 40) derived from phytozome v7.0 (chr-ID Chr3; pos 1825077 to 1825625 reverse strand)
agagccggcgaagcttgccgtttccgccgttggaggtaagccttatctctctttctcatctccttctccgatttccaactctcagataatagattggcggttcatggatcccattgtttgatttcggaactgtgttagcagctaataacctagactatcaaatctgatacattggaatttatatttgggctattgacgctgaaaccgatcttatgaatcatcctttcttactcaccattttgtttcactgatcttgatatgttcatttgatctgcaaagaagaaacctttgaacctaaacctatacaatagaaacatgtttcttgaaattatttttatgttaagcactaatttcttgataatcagtcttattctgagatcttgatctctttgcattggaatattatcaatgtttagtagattcgctagctaaagttttcgtctttttttgaaaacacaggagagtttttactgttgctgtcctgttgacattttgagacatgaaatgatcttgggttgatgtttgtatggtagcagaggaatagtagtc

SEQ ID NO: 2963 - DNA, 671 bp, Arabidopsis thaliana
  Intron number 2 from transcript AT3G06060.1 (locus AT3G060 60) derived from phytozome v7.0 (chr-ID Chr3; pos 1828655 to 1829325 reverse strand)
tcctcctgacactaatacacccggctttgaagaaggtaaaaaagcttcagtatttttcagattcatcatggatgtatagagcagataatctaagtttaacatgtgagggtagctaggattaggtactgctactaaatactaaggcaattaaatgtataaaagagttggagacagattactaaataaggctgtactatatggttgggacatatgtagacataaactattattcatctagtttgttattatgagatcaaatatgtgcccttatctggtctgaataattgtgtactctatcaaacacgtagcatttcatgttcacatgttctatgagagtgccagttaggagaaactgatagactggtgagttaagtactgagtactgtgatagtgtttagcttgaagtctctgcgtactgtggttcacatgatactgtttagaagagaataatgggatgtagttatcttccaatagcatctgaaaatttcataaaagacttctttttgcctatctgagaatgaagtaagcacttttttttttttgataactaatgaagtaaacacattatggactgatgttctgagttccttggttcatattatgagtttgattgattttccttgggtgctctctcagaacagaagagcagacctgaagtcactgccataata

SEQ ID NO: 2964 - DNA, 439 bp, Arabidopsis thaliana
  Intron number 1 from transcript AT3G06250.1 (locus AT3G062 50) derived from phytozome v7.0 (chr-ID Chr3; pos 1892066 to 1892504 reverse strand)
gagaggtaatcttcggaggacaatacatttcagatatgtgtttcgattagtttttttgtctttttttctccctcaaatttcatttctttttagcttcaattaaattcagatacgggttatgattaatctgcacttctctagttgtctgattatatcttctcattgtttcttctttaggagttttccatttttgcgttttttggttacataaaaaaaaaaaagaatgcgaggctaattagagatctaagcttaggtgtgagatacataatctttcagtagctatctgtctttgttttgtatttactgttttctgtgtccaagaatgtgtagtttgatttcgcatcactgacattggttgcatattagataactgtctgtgtacatttggttttgatgcagtgcagatactgaacctaccagtttaaattgtgggaacaac

SEQ ID NO: 2965 - DNA, 653 bp, Arabidopsis thaliana
  Intron number 1 from transcript AT3G06330.3 (locus AT3G063 30) derived from phytozome v7.0 (chr-ID Chr3; pos 1917389 to 1918041)
attcttcttcttcttctcttcattcttcttctcaggtacatacatacatcttccaaattctgacctttttttttgtctcctaattcgctttttccggggttgttgatagattatacaaggtaaatctgaaatctttacatcattagcatgtgtctgatctttatattatagcataatctctataaaacgtatatggggtttctcttgttaatttctcagttttttttgtttctctcttctgtctgattgatataaggtttgattatccatgaaattacctgtgaaaattctagggtttatattgattgatatacgttatcttttggctcttttctcttcctttatccatatggaatctggattttgatcaaacctgaatcacttagtagccataggatctgcttttcatttttcttttattaagagaacaaactaagccacttggaattgttttagacttataattatgatttcatctcaaggattaatggcaatgtaaagttgaaggatttgttttcatgtgagaaattggttttagcatttttcgttttgttgttagtgtgttatggtggatatgagattggcctgaactttgtttgacatgtattatactttattgggtgatcatcaggtaacagaaaaatctactgaag

SEQ ID NO: 2966 - DNA, 569 bp, Arabidopsis thaliana
  Intron number 1 from transcript AT3G06330.2 (locus AT3G063 30) derived from phytozome v7.0 (chr-ID Chr3; pos 1917473 to 1918041)
tcgctttttccggggttgttgatagattatacaaggtaaatctgaaatctttacatcattagcatgtgtctgatctttatattatagcataatctctataaaacgtatatggggtttctcttgttaatttctcagttttttttgtttctctcttctgtctgattgatataaggtttgattatccatgaaattacctgtgaaaattctagggtttatattgattgatatacgttatcttttggctcttttctcttcctttatccatatggaatctggattttgatcaaacctgaatcacttagtagccataggatctgcttttcatttttcttttattaagagaacaaactaagccacttggaattgttttagacttataattatgatttcatctcaaggattaatggcaatgtaaagttgaaggatttgttttcatgtgagaaattggttttagcatttttcgttttgttgttagtgtgttatggtggatatgagattggcctgaactttgtttgacatgtattatactttattgggtgatcatcaggtaacagaaaaatctactgaag

SEQ ID NO: 2967 - DNA, 529 bp, Arabidopsis thaliana
  Intron number 1 from transcript AT3G06450.1 (locus AT3G064 50) derived from phytozome v7.0 (chr-ID Chr3; pos 1979304 to 1979832 reverse strand)
tgttcctttagtcattttgagctgatttgtctctggtaagtgtttttctttctttctctctcagtcattcttgaatccaagctcagagatcccatgacttttttacttctcgccagcttttgatttttctatgagctttccgtactaaatgtgttgtaaagttctcacctttttgtttgccaaatcacccattatcaaatctacataactccttttaaagacatcctccgcaattaacgcttttgaagacatttctttgggtttcttttaaggttcctgcaaatatttgtattcggatctgagtttcttagtaattaaaagggtattaagatttattcgttactctttgtttattttggttacactattggaatttttttcaatctaaatcattctagttgtatcagatttcctatcttggttactacatgctttatcttaatcatgcatcataatcctgggttttgagttttaacagaactgagtgttgttttgtaggacactgaaaacttgaacacaccaaatctac

SEQ ID NO: 2968 - DNA, 383 bp, Arabidopsis thaliana
  Intron number 1 from transcript AT3G06483.1 (locus AT3G064 83) derived from phytozome v7.0 (chr-ID Chr3; pos 1991979 to 1992361 reverse strand)
gtctctctgataaacctgccgttttgaaggtactctttctgggagtttcgaattttgttgtttctagaattcgaatttgtgattttgcggaactttgaattgatatttgtgttggttgattgtctaagtgttgttggttcttattagatttttttggatattgtagatttaatgtaaagttggtgtgagattattatttcaagcttcttttaattcaaaggcttttaaagctaatgctacagtgaaattgaatgcttagaagattgtttggaacgaaaacagattttggcatttttgtggatgatgtgttatgttgaaacgttgtctcattttcatgttgtattgtaggtgcgggattggtatttggaatctttcagggacat

SEQ ID NO: 2969 - DNA, 810 bp, Arabidopsis thaliana
  Intron number 2 from transcript AT3G06490.1 (locus AT3G064 90) derived from phytozome v7.0 (chr-ID Chr3; pos 2004417 to 2005226)
agaaggtcgctggaactctctttctcgttgcgccggtatgatatatattttcatatacagataatatagttgtatatatctattttccacttccatgagcatcttttaagcataaagagccaaagaacaagtcgcataacataattgatttattgctttttgttcaatccttttcatgtttcaatcaccatgtgtgatttgtgtttttttttttcttttaaattgcccaacctttactatttttaaagatagtttttagaaaaaattattattcgaaaatggtttctttccctatatgcatatatgaaaagacccttcataggtatgaatcaaaaagtgcatacctctcatgttttctctttctcgtcttcttcttatttctaaatataatttccttccaataaataaagtattgatgatttgagtgagatcttttggtaatggattcaattattaaccatctcaaatttgaataaaatatccaaatttggttattaaatgggtgaaaaaaagaagaactaatgcgaattaatgatcatcatctataagggaagagcactaactcaatgggagaaagcttgctgaagaaaaagaccctttaggacaatttgcatcataatacggtccattttatttcattggggaatttgatataactttaacgaaaatgaaacaaatattataatgagtttcttccgtataaaatcatcatactatacgtagacatgaccgaccggtaaattaatcctcatattatcttttaccaatgaaacaggcctccaacgcaccggtaaaagctgtagactaagg

SEQ ID NO: 2970 - DNA, 335 bp, Arabidopsis thaliana
  Intron number 1 from transcript AT3G06520.1 (locus AT3G065 20) derived from phytozome v7.0 (chr-ID Chr3; pos 2020693 to 2021027)
gtgggtgggttccttctcttctccaacaggtaaaacatttctctgcgtttgaattgaatctagggtttgtagaaaaatagtgaatttaatgttttagggattaagatacattgaaagatttgacgaattaattgtaaatttagtaaaaccaaaaaaaaaaaaaaaaaaaaaaaaaaaaaaaaattgtaaatttagaaaaaagacttaattatactatatatactgtatgtcaagcaatttgaatttgaagatttgttggaatttggcataataaactcacactgcttttttgatttacagagcaatttctcggaatcgacagcccaaagaattaa

SEQ ID NO: 2971 - DNA, 343 bp, Arabidopsis thaliana
  Intron number 1 from transcript AT3G06710.1 (locus AT3G067 10) derived from phytozome v7.0 (chr-ID Chr3; pos 2118407 to 2118749)
tctggctcaatctccgcggatacaagcagtgcgaggttattatacaaacctctttttctctaaagaatgaggttcttgttctatagcgttatgtgacaatttcgttttcgattaaacttcaatttctgcgattttagaaagaatatcaaagttatttactagtattttgttatgagtgatgtttttggggattatatttgtgtcatggtgttgggattttcgatttcttctctgtttcttgtaatatgggtttaagaagaatctcgcacaccaaatgtttgatgaaatgctctctgttttcattgtaggacgctccagagagacttccagttcacgagtttct

SEQ ID NO: 2972 - DNA, 635 bp, Arabidopsis thaliana
  Intron number 2 from transcript AT3G06730.1 (locus AT3G067 30) derived from phytozome v7.0 (chr-ID Chr3; pos 2124930 to 2125564)
gcccaggaactagaagtaccatggattctcataactcaactttcttacacattctccatttcacttgcttcatgtgtagactctagaatgcttatatatttccaaacgttggctcttggaacccggttgttcgttataatatacttgaatcttgaaatgtgatggtatattactgttaagtctagtgcagtactattgtaacttgcataggagttgggcagtgcattatagctttggtagctcatcaacaaatctttacagtttactgagatcttaatgtttaaagaggggctatgaaaatgtattgggggcactctggatttgtcttgggtcttggtttggcaattgactagagttgaaagaccgctctcattaatcaagtctcttctatggtttagttcttttggtgaattagataaaggagttaaacagttccaatcttacgactgtttctcccatactttatgacaaagataccttgtcgcgtagttggcatgtctacaaattcaaaagaaatgtgtgagataggagaatctaagcatcttcttattgattggctttatctacttgctttttcactcatgacactcgtgttaaatagtttttgctcattgtgaaacagcttgcagtagagt

SEQ ID NO: 2973 - DNA, 285 bp, Arabidopsis thaliana
  Intron number 2 from transcript AT3G06850.2 (locus AT3G068 50) derived from phytozome v7.0 (chr-ID Chr3; pos 2160066 to 2160350 reverse strand)
cggcgtcgcgcccattctttgttcaccctcccactgtatgtttcttctcaccaaatttccttcctttttcagttttttttttcaaattaattttgaggcatgacattagcttccgagaagctcttctaggcggaaaaagaaacatcgaaactgtataaatttagaaagaaaataaatttatcagagagacttaaacttggaaaactctgtttgcttagaatgtgtggtttttctggtaatttttggacaaaggatcaaacaagtttgtcatatttttcacagttg

SEQ ID NO: 2974 - DNA, 349 bp, Arabidopsis thaliana
  Intron number 1 from transcript AT3G07030.1 (locus AT3G070 30) derived from phytozome v7.0 (chr-ID Chr3; pos 2224800 to 2225148 reverse strand)
ccaccagtcttcttcaggtactctctctctctcttctactttgtttcaagtcgttcgctaaaatcgtgattcaccgtcgtatatgctcactggagtgtgtaatgtttcattggacttgtgtttcggctactctgttgtacggtttttttgggtcctttctcttttcgatcattttggtttcaaatgtgtcatcatgcaccattttactttgatttcgttttttttttttttttttgcatttctgatcctaaaaatgactctatttgcgatgtgatgtacttgaaataatgatgatccgtttcttttggtttcaggagaaaagtgttaaagacattgtgttgaaggcaat

SEQ ID NO: 2975 - DNA, 574 bp, Arabidopsis thaliana
  Intron number 4 from transcript AT3G07300.2 (locus AT3G073 00) derived from phytozome v7.0 (chr-ID Chr3; pos 2326186 to 2326759 reverse strand)
cacatcttcatctggtgctgattccgaaagcaaaagtaaatgtacctttttcatgcctttggctctcctttgcacatactgtttttttttcagtaggtccttatgccgtctgttttactgatgtctttgataaaccattgaagataagtgttatcgctggaatttaataatgttggctcatattctcttttacaagctgatatataaggttttctttttagctatcgtagacagatttaggtctcagtggttttggttttgctttagggcatttaggcttgggagagtttaagcaaaccctattttactggttcctgtagttttgttgctggaattacctgtgagtttgtgttgtgttgctgagttatagagataaatgagaatcatatatgttcttatcagtctacttttttaggtggttcgtctcactttattgggattatatcataaatgaaccatagatcaaaattttatatggcagcaagaatattttactgtttttggttgatattaatggtctaatatacccttttgtttagctgccgataaaagttcgttaactcggaagctgaag

SEQ ID NO: 2976 - DNA, 568 bp, Arabidopsis thaliana
  Intron number 4 from transcript AT3G07300.3 (locus AT3G073 00) derived from phytozome v7.0 (chr-ID Chr3; pos 2326186 to 2326753 reverse strand)
ttcatctggtgctgattccgaaagcaaaagtaaatgtacctttttcatgcctttggctctcctttgcacatactgtttttttttcagtaggtccttatgccgtctgttttactgatgtctttgataaaccattgaagataagtgttatcgctggaatttaataatgttggctcatattctcttttacaagctgatatataaggttttctttttagctatcgtagacagatttaggtctcagtggttttggttttgctttagggcatttaggcttgggagagtttaagcaaaccctattttactggttcctgtagttttgttgctggaattacctgtgagtttgtgttgtgttgctgagttatagagataaatgagaatcatatatgttcttatcagtctacttttttaggtggttcgtctcactttattgggattatatcataaatgaaccatagatcaaaattttatatggcagcaagaatattttactgtttttggttgatattaatggtctaatatacccttttgtttagctgccgataaaagttcgttaactcggaagctgaag

SEQ ID NO: 2977 - DNA, 565 bp, Arabidopsis thaliana
  Intron number 1 from transcript AT3G07310.1 (locus AT3G073 10) derived from phytozome v7.0 (chr-ID Chr3; pos 2328773 to 2329337 reverse strand)
aggcttctctccacaggtccgtgaaacctttccttatctaatctctcacaattcaaagatccgtaaacagctgtagaattataaacatacaaagaaatatgtgtaaatcattacttacatactcttatttaatcgaccacaaatcagtattttattagtatttatcacataagcttgtaaagtttgattataagttgtttgatggtgtttatcagtttatgatgatttgagaatcacactaatgatatggttgaattgaaacaagagaattctgtagttatgatcttcaggtgctttctcatactctgccttgtgaagcaagttttgttttagtgtttgataagggctggttttgcttttttacatttcattgttgcttagttcgttaaatagtttccgtatattttagtttcttgcctgtgttaaactctctgacttgctcaggccattttatgctctgtttgtgaacattttctcaactatcttctgctcttttacgaacactaacactctgattccatggttggcagaaggatagctgaactcaaggaacgctactgtaaaa

SEQ ID NO: 2978 - DNA, 403 bp, Arabidopsis thaliana
  Intron number 1 from transcript AT3G07360.1 (locus AT3G073 60) derived from phytozome v7.0 (chr-ID Chr3; pos 2355145 to 2355547)
agggatcccgtcgttttggcttctggtcaggtttgtgaacgtcgcatttcgattcaattcttcttcttctagggttttgaattttgctgtttctgtgttaggtgactgaaaattttggatttttgggggaattttgattggcttgaaactttttcatctgttttctcgacccgactgagagaatccgactcaggtttcataaagttcttgttttgtcggtagtttcggtaatgattttcgaaacgatgaaatctggagattttatcatgtaaatgaaaaaagtgatttttagaggataattatgtgttccttagcttgtttaataaatctggaaagcatataactaaaaatttatatatttgtgtgtgattttgcagacatacgacaagttatttatccagaa

SEQ ID NO: 2979 - DNA, 403 bp, Arabidopsis thaliana; identical to SEQ ID NO: 2978
  Intron number 1 from transcript AT3G07360.2 (locus AT3G073 60) derived from phytozome v7.0 (chr-ID Chr3; pos 2355145 to 2355547)

SEQ ID NO: 2980 - DNA, 530 bp, Arabidopsis thaliana
  Intron number 1 from transcript AT3G07565.1 (locus AT3G075 65) derived from phytozome v7.0 (chr-ID Chr3; pos 2414027 to 2414556)
gaggaacaatctctattggaagatttgcttgtcaagtaatcttctcgctctctctctgtatgtttaagatttggatttgctgttttatccaatgttctttctatctgactagatgtgactagatgtagtgaattctgcgatatgttattttccatggcctttcaagcatcatgtagcttgaatcggaatatgtgttgagaattgttagctttggtcgggttttttgaattatatctgagaagagaaacagtggtatttgattagctgattgtgagttttggatgtggtttcaagtatggtaataaataaaatactagaaaaatgactagctagctagtgtggtatcatatttatgataggctcattagtgttagagcaatgtgaaaattttaggatttaattagaggatgagttgtctacttatctgtaatgactggttgtaaatttttgtaggagccttgttaaatcctatcactcttttagtaattaatctttatataggtacgcgacagaaccgtcggtttttcgat

SEQ ID NO: 2981 - DNA, 500 bp, Arabidopsis thaliana
  Intron number 2 from transcript AT3G07580.1 (locus AT3G075 80) derived from phytozome v7.0 (chr-ID Chr3; pos 2421999 to 2422498 reverse strand)
caggaaggcttctgggaatcgccggaagtcgggaggtatgtgagctctctctctctctctctgtcttctttgcctcagtcgttctttattgattcttaatcaattcggttcttaattccgagagtatctagttctgtggagattatagcttagatcaaagattgtcgatgaatagaagtaatcttgttttgtagattcaggaattgattgcatgcgaatctgtacacattgtgtttgtgcatagttggtaacttcaagaaccgtttctaagaaagtgaattattaggagtttagcctgaaattcagatctcgctctctctttattagcaaatccgctggttgattcatttctccatgtgtgtacttgacccatttgtttgcctgttttcttgaaaataaatcgtcgttcaagctatatctggttttgctagtatgctatggttcttggctaaataaagagtgaaatgcagatcgaacaagtagccaacagaacaacgata

SEQ ID NO: 2982 - DNA, 248 bp, Arabidopsis thaliana
  Intron number 2 from transcript AT3G07810.1 (locus AT3G078 10) derived from phytozome v7.0 (chr-ID Chr3; pos 2493089 to 2493336)
gcagattggtatgttcactgttctctgcctttcgtttttgtacaatgtaacttgttttcgaagcttccttatgcaatcaagccttcaagagttacagtttgttctcatttggttccgattaatcatttttgtgctttgattggatttttgagaagaaatgagtgatctttagttatatgagcttagtttttcatttttcaagttgtttgatcttccgcaggttgaagccaagaaagctgttcccagag

SEQ ID NO: 2983 - DNA, 900 bp, Arabidopsis thaliana
  Intron number 3 from transcript AT3G08560.1 (locus AT3G085 60) derived from phytozome v7.0 (chr-ID Chr3; pos 2600816 to 2601715)
aatccgaagctccctgattcccacgaccctcactggtatacttctttccaatgtttttaaaaccgacccagacagtgaaccggattaccttctgggtcaaccgggttgaaccacggaccaattgattaaaatttatttaataaatttaatattaatagagattttatagtgtttataaatagaaaacaaaataatcatatcatgtttaatagaaaacaaaataatcatatcatgtttaataaaaaaatataaaatcatattatgtttgataaaatataaaatcatttacaccaaaaaaacatatatatatatatatatcaaacaataataagaaagtgattaaaaattttaaattcaactaaatgtctaacatcgtaataaatataatagaagatcaccaatgatagaaacaaactaatgaaacatcgtgaattcaaacaactaatctcgtttccatatatcaccattcgattcatttttaaggccgcattgtgaaaacttcaccaaaatctaaaacatcaaatgagtttaagaactaaaaaaacttataaaaataattgaagaaagtttaaaatcccacattttattccaaaatgaagagaattttgtaaaacccacatccggccggttcaaccggttcaccgggtcatgggttaatagcgagttttttgggttttttcggttttgaatttgtcgggttttagcactaaactcaaaccggaaaagtgttcgggtcacaagttaaccggtcggaccgggtggttcgggtcgggcgtgaaaacactgcttctttctcaatctttctcctctctctcgtttttttcaccatatatatatgaacaatggttttgtctgaatggtgaagctcgggtggggtggtgctggcctctcaagacggca

SEQ ID NO: 2984 - DNA, 475 bp, Arabidopsis thaliana
  Intron number 1 from transcript AT3G08700.1 (locus AT3G087 00) derived from phytozome v7.0 (chr-ID Chr3; pos 2643521 to 2643995)
cagagacatcctccagcaaactgtagcgcaggtaatctcccttttcttggctgattttgactgatagattcacactaaaaacacttttagggtttgatatatgtcacacttttatttcatcaatccacattatatgtttctgagttttttttggtaacgctatgatttgttagactctctttggttctgttatatatatgtactctgcatgaaccttttttttttttttttttgtattcgagaaaactcgttaaacctttgcctggtacgattaagaatatccagaggtttagcttgcttttatttcaagtgtctccttttgtacttcttatttattctgccaatttgtctctgttctataagaagtatcacttgatcatgcaggttttattgtctttttcgatgaataaatgggtctgattgcaacgtctttcttataggtcctgtggctgaggaggacatattccattggcaa

SEQ ID NO: 2985 - DNA, 678 bp, Arabidopsis thaliana
  Intron number 1 from transcript AT3G08760.1 (locus AT3G087 60) derived from phytozome v7.0 (chr-ID Chr3; pos 2660068 to 2660745 reverse strand)
tttcgtcctagaatttcttttcttgtctgttccaggtttgaactaattacttctctcttatgtctgcttttgattttttctagatcgaattcgtgtttttgttttttcttaccttttttttttttgtgaattttcgcaggaatagattttgatctatcctaagattttgtttaaatgacaactctgatttcaccaattagctcagttcaaaagtgaaatttgaatattttgaaattgaaaatatctatctctaatgataatgcgatttacaaaaaaaaaaaaaaaaaaaaaaaatcatggatgtattttcctggatttattattgtcgttgtctcttgtctttaccgaatttaatctaaatggatgtcttcattaaacaaatcgaaagcgtttctaactttacagtttttcgttgtttcactgttatagaattagggtttatgtaactgtcctttacttgcttcaacttctcaaattaaacttcttttttgaaccacgagatctgtcaaaatgagattttatccacttctactgaaaattaagtttgaattgaacaatttctttagccattgatctaaacacatgcaaataaacggatctgggttttctaaaaatcacttttttctgtatgtagttgtttctgttgctaaaaaaattgtgttttgaatcatttttcag

SEQ ID NO: 2986 - DNA, 465 bp, Arabidopsis thaliana
  Intron number 3 from transcript AT3G08980.1 (locus AT3G089 80) derived from phytozome v7.0 (chr-ID Chr3; pos 2741586 to 2742050)
ttgtagtgttcaggtatgttccctataatgccacatttgagtcatcctttgacaagggaagattatagctacataatacttaaatacatgttgatctcttgtttaaaccttttcttggatgcttacagcattcacaattttattaaatctaattccctaaaaccttacaaatgtttgttgtcctatttgtggtgctgaaccatgaaattcgtgcatattcaatctctggtacatttgatataatgtatttggtcatgaatacaaactctttggattctattcttgctttttgcttcctttagctcagctttttcaggtctcaaatctgttttataatgttcatctgacattgtgccgtatgtgttctaagttgtatattttgaaatacatcattaagctcctgacgatgtgaactgcatctctgtggcagctctccgacacatttcggagatagatacataaaga

SEQ ID NO: 2987 - DNA, 545 bp, Arabidopsis thaliana
  Intron number 2 from transcript AT3G09080.1 (locus AT3G090 80) derived from phytozome v7.0 (chr-ID Chr3; pos 2780875 to 2781419 reverse strand)
ggagatttgttgctgctggagaggtatgatagtgtttgcatttgcttttttactgctgttattgagttaatcagtttcatctttcgtatcgtgatagttttctggtgtttgatttgatctttctcagtctccgaatctctctgcagtcttgatttgggattgtgacactttgggacttgtctcggagctgaaaggccatctttatggatctcagtgtctttccttttcaccaaatggttagttttctttcctttttgttgctctaattgataattgttaccacattacttgttattgtggatttgcttactttggcctttaggggaatatttggtgagtgttggaggatacatatatctttgggactggcgcaaaagcatcttggtggcgaaggtcaaagcgagttctaattgctctgagataacttctgtgacattttcatctaatggaaaattcattgttacttccgggaataagcacttgaagttctggactgttggttcttttcagaggacacgttcaagtaaagtaggatctttagcatt

SEQ ID NO: 2988 - DNA, 195 bp, Arabidopsis thaliana
  Intron number 1 from transcript AT3G09080.1 (locus AT3G090 80) derived from phytozome v7.0 (chr-ID Chr3; pos 2781581 to 2781775 reverse strand)
gccagaaattaaagaagcctagctcatccacgaaggtacgtcatatcattatatcaatgcacttgctcaccaaatctcgaggcaaatgtattcaatttttgttttttttttctccatagagatttcttctaactggattttgaattcttatttcttccagctaattctacaagagatcatcggtttgacgacgaa

SEQ ID NO: 2989 - DNA, 406 bp, Arabidopsis thaliana
  Intron number 2 from transcript AT3G09220.1 (locus AT3G092 20) derived from phytozome v7.0 (chr-ID Chr3; pos 2829481 to 2829886 reverse strand)
ctaaaccattcccctcacaacatcacaattcattggtactcaattagttaattaacctctttttatattgtttgcttaactaatgaattaacctcgtcttatattaatttgcttaactaatactacgatgattacgttttgtttttttttactttacaagatgtctagtcgttagcctttcacagtctctcatttaatttgttatccttttcgcatagaataatattcaattgtgtgttctgaatagaaaatatgtgaacttgtaggataatcacttcggctcttcttcttgtttttgttttttggttttagggttatgattacgttagtgaataaacttttgtgctatgttcgatgaaattgttgaaatatgaatactttagggttttgtgtacatgacgcaggc

SEQ ID NO: 2990 - DNA, 558 bp, Arabidopsis thaliana
  Intron number 1 from transcript AT3G09230.1 (locus AT3G092 30) derived from phytozome v7.0 (chr-ID Chr3; pos 2833759 to 2834316)
gctcaatccaaatcttatacgcaattcatttactggtattttctctcttttgaaagtattcaatttcaattggtgattccatttttcctgtgatcttctcttttttttttgagttttgattcatctgtgttgaattgaggaatctagggttcttatgctgtctttcggagtgtggctgttgagcaaccttgtgtttttttgtgaaatggatgtgaaatgtgaacttggctgagagattgttagtccatttctagttttatatttttagtttgtatcgaaatgttttaaagtttgagacttgcaagtttttttggattttgatctactccttgaatcccaaaagaacaacaaagttaggttggataccatttgactacctctagttgtattgttatagctgatcgaaacacagttttatttagggggacattagtagattattgtgttcttgttctgtaacatatcatcagtaacactaaaccaggcacttctttgtctctctttttgtttttgttttggtttatgaagaggtagaggatcaggctatcatcgcagcac

SEQ ID NO: 2991 - DNA, 678 bp, Arabidopsis thaliana
  Intron number 1 from transcript AT3G09320.1 (locus AT3G093 20) derived from phytozome v7.0 (chr-ID Chr3; pos 2863174 to 2863851 reverse strand)
agattaagcgaaaggtcatctctttctctcccatttagctgttacttggtgatgaatagtcaattcagagatttatcagtattagtttggaatttggattattattatgatcggttttagttcatttcaatgtcaaagagatttgccattatctctgcattagaactttaccatatttgtcaaaataattctctagatagtctatggtgtgtagtcattttctgtacatatcaaaattcaatctttaggctctatgaatttacttgaatggtgattcttgtagattgttgactctcttgatagattttgttggcttgctagagaaatttcaacttttcaaatttgttcctagcttcttctaattattagtgagggacattaaaggttgactcttggggattgcagtaaaaacttcatcttttggctacatggattagttagagtggtgattcttgtagttttgtttgtttctctaacgttgttttgatggcatgtatgagacaatttaactttcaagtgatcagatttttttccagctaacttctaattaggaccttaatagttgaggttttgatattccatatgtgacctcatgttttgtggctttgggattcacttgttactttggttatgttatttgcagggaggagatttgaggtactgccaaaagtgttcaca

SEQ ID NO: 2992 - DNA, 436 bp, Arabidopsis thaliana
  Intron number 1 from transcript AT3G09350.1 (locus AT3G093 50) derived from phytozome v7.0 (chr-ID Chr3; pos 2871267 to 2871702)
cacgccgacggtactcgacccactcgccagttgaggtacggacattcatcttgtagttggttttttaggttctgtcttttgatttgtctgaaactgatgggatgcttggtgggtagtttaggtatctgtgtggctatgattgagctttcacttgaggagatgaatcttatgagtgaattcgaatctgggtttgtttaaagtagttttcttttttgaagatatctgttcagttcatcggtttggttaagattcaattatcgaattctgctgttatgtaggtgaaaggttatctattttctcgtttttacatgaaactctgttaattttttttaagggaattcacgatttgttcatgtcaaatcattctgtatgtgttttattgtggattgttttgttgatttgagttgttttaatgagacagtgaggaggatcgaaa

SEQ ID NO: 2993 - DNA, 506 bp, Arabidopsis thaliana
  Intron number 1 from transcript AT3G09680.1 (locus AT3G096 80) derived from phytozome v7.0 (chr-ID Chr3; pos 2969783 to 2970288 reverse strand)
gggtacggtatcctctcttagactctttatgtttcagtctcatctctccgcttataagtgatcgtgtttttgttatgtcgggtttaggatttgttttatgttttttttgtttattccggtttctctttggtgccttgccgttttcgttatctcgggtcgggatggttgaattaagggatttgaatgacattcatacgtcgtgtagtaatactttgttaatcaccctgttgaagctacgaagttgctataattcgtagttttttcttataaacgttggagttatttggtctgaaatgtggaaattatgattatgatttttgatttttttccttactacactctcctcttgtgttaagtatttgtgatttagattataactttatgttctttatcaactccgaatttgttttatatgttctgagtgagttgatttcatctgatgaaatgtcctttggttctcaatttcttttatcttctatttgaatatcttcagtaagacacgtggt

SEQ ID NO: 2994 - DNA, 353 bp, Arabidopsis thaliana
  Intron number 1 from transcript AT3G09700.1 (locus AT3G097 00) derived from phytozome v7.0 (chr-ID Chr3; pos 2975816 to 2976168 reverse strand)
agtacactgtctagctcaaatcctctacaacagtaagtttgcctgcgtatgttcttctttcggggttctctacaatttccactctttactgtttttgctgattgattttggaaaaatgatttgatgatatttcaaagcatccctttgattcgattagggtttctaaaagaatcctccttttttagagcttctgcttttatttttgctcatttgtgtttggggtttgtgtcagtatcagagtgttttttctatggtttactctgtttcatcttgtctgacgtatggaataatattcttcgcttctcgtatgctctccaggttgcagcgataattgcaggcgctgctgttgctgc

SEQ ID NO: 2995 - DNA, 787 bp, Arabidopsis thaliana
  Intron number 1 from transcript AT3G09730.1 (locus AT3G097 30) derived from phytozome v7.0 (chr-ID Chr3; pos 2984413 to 2985199)
gacgaaaactttgggtgctgcttctgcttcaaaacgtgggtcatgttatagtaatcaaggttttgcttatactctttcgagaactctgattgatttcttctgtcattctcggtttgaaaatgaagtatgaatggaatctcggttgatgaagacatatctgtagtgaggttgttatcacttgcatgatgggaaatttggatcttaagttagtttttggagtgttctgaacttgtcttatttgatgattggatcgtgtgctgagtttttctagttttggaccttgtggtatagaatgatatatagtggtgttaatcttggggaaaagctttcagggatcttgtgttatagaatgatatataatggcgttaggttttgcttcctagacttcttgagatttgagtgataaaaagtactctttgatcggtaaatcttcagacctctagattttgtaggagtgcaagagactttgtggttatagtggttggataagaggggaatcacttattgcctatgcttctatagagtagaataagccttatctatgtgttttccaagtgctaattcgcttactgcatctattaagtccccataaatgcttcatctaataagccttatttatgggttcaatgttatggtgattaactgctttgaggtttgattgtaccttgttggacttctttcagtaaaacaatgactcttcatattcctgttggcattgtccattattgaagcttcattcttctgtgtttcagatcattcctctttcagctcagcactgggtgtctgc

SEQ ID NO: 2996 - DNA, 315 bp, Arabidopsis thaliana
  Intron number 1 from transcript AT3G09740.1 (locus AT3G097 40) derived from phytozome v7.0 (chr-ID Chr3; pos 2989736 to 2990050)
gagctttcgaaacccaaatcgagaccgctctcgaggtaattatttctcttctttctgtttgcatcacaatgttgaacatagagtttgatatttttccggtccggacttaaatggatgcatgagtccaattcagtcaaaaaacttgaaaataggtcgcgattagtcctgattttgtatactgtgatcgagttttcgtgatgggaatgaaaatctttttgaatgctttaccagtttctagtttgagaatattttgaggttcatgaaaattttcgatttgcagaaagctgaacttgttacgaaggagaaaaacagggc

SEQ ID NO: 2997 - DNA, 540 bp, Arabidopsis thaliana
  Intron number 1 from transcript AT3G09890.1 (locus AT3G098 90) derived from phytozome v7.0 (chr-ID Chr3; pos 3032832 to 3033371)
tcgccgccttgcgcaccgccatcggtactttccttacttcttctcgttgctgcttttaacaaatttcaatttcaatttcatcttcaattgcgtattgcttgattagctggtcagaccaaaaaagcctcaaaatttcccacattcattgcagaagattcctctagtttgatcttcgtctcatccttttaagccaccttaagggcttcattttccatttgactcactggtttgctcaatctagtttaggttcacttaggaaggataagagaaacctctagttttatgcctatgtgtgtattcatgtctatctttgttttgtttgttgcttggggctgtgattgatctgacgtaagatttgcatactcttttgaactgatgaaaattagtttagtctagatcatctttctactggtagaagtaatggtatcagattttgcattgtgtggatatgtcttaatttgtgcactttctgctgtttttgagaagatgaaatgtttaaaggcaatcatattccttttctgattttgatagacaatttga

SEQ ID NO: 2998 - DNA, 602 bp, Arabidopsis thaliana
  Intron number 1 from transcript AT3G10000.1 (locus AT3G100 00) derived from phytozome v7.0 (chr-ID Chr3; pos 3077232 to 3077833)
aagtttctaggtctcattttttaaccctaattttttccagctttattttcccaaaatcccctttccttgtcttttttgcccttattccggagaggaaaagttaagataaaaatcagaacttggaagagaaaaaagacaatcgattatgggttttatttttgatttggaatcataattgttttgttatagattagacctttcacgttaaaatattttttttttttattaataaggagaatatgacatcatcaaccccttggttttcttaaattcaagttagttaaaaacaaaattactttaaagtataggcagatctgtggtactagttttgttttggtcgagagagtgaatgaccagacattaggagtttctgttaagatttcttcatgtgtttttaaagaacaaaaagagtatatataaccatcaaataagaaacatctattctttgacttagtttgactttttgtcgttgataatctctgctttattcataaattcaatattgtggtgcattattatgcaaattatgaattaatgatgaaatcatgaaagtgatgcatttttcattcctttgttggtatatacctcatatgtttaggatt

SEQ ID NO: 2999 - DNA, 663 bp, Arabidopsis thaliana
  Intron number 1 from transcript AT3G10000.2 (locus AT3G100 00) derived from phytozome v7.0 (chr-ID Chr3; pos 3077232 to 3077894)
aagtttctaggtctcattttttaaccctaattttttccagctttattttcccaaaatcccctttccttgtcttttttgcccttattccggagaggaaaagttaagataaaaatcagaacttggaagagaaaaaagacaatcgattatgggttttatttttgatttggaatcataattgttttgttatagattagacctttcacgttaaaatattttttttttttattaataaggagaatatgacatcatcaaccccttggttttcttaaattcaagttagttaaaaacaaaattactttaaagtataggcagatctgtggtactagttttgttttggtcgagagagtgaatgaccagacattaggagtttctgttaagatttcttcatgtgtttttaaagaacaaaaagagtatatataaccatcaaataagaaacatctattctttgacttagtttgactttttgtcgttgataatctctgctttattcataaattcaatattgtggtgcattattatgcaaattatgaattaatgatgaaatcatgaaagtgatgcatttttcattcctttgttggtatatacctcatatgtttaggattatgtcggaggaacatggatacactaggagtggcaagaagtgtagagagaagttcgagaatc

SEQ ID NO: 3000 - DNA, 804 bp, Arabidopsis thaliana
  Intron number 1 from transcript AT3G10090.1 (locus AT3G100 90) derived from phytozome v7.0 (chr-ID Chr3; pos 3109155 to 3109958 reverse strand)
taaaactctctacccatcgcagagcctctctaaaggttatcttcatgatctcactcaatacatatgtttcgttactatatgtttttgcttctgattgtcgttattctgtaatcgtttagagtcgtttatggtttcccccattttgtctgtaatgtccatgctctgtttctttacagtttcctctccggcttgttagatatcagtttagttcctgatttactgagaaaccaagcttttgagcttaagtatgttagggttctgacgttgattgagaaatattataaactggttttcaagtttatttctttctggaatttcttttgtagtctgattataaggtacactgctagatatactggataggttacagtctcttactacttatccttgtctctgttctttggaatctatctgtaggattctctctttcttgttagatttatgagcctagtttctcactcagttaaatgaaacctgatatatacaatcgtcttctagcttcttaactcatcaggtgttgcaaatttgtaagtgctgtttggttctgcattttgcaattgatcattaattgagaagttgttaaaaatcattagatgatgtgatctttaagtttttttgcttttactgattagtgtttttgtagtgttttctctgctttgtttgcatctgttgttctccagagctgtgattggtttataaaggttatacagtcttgattcaaatgtgaacaattctctttttctaaggattttcacttcttttgtaaaatttggtctctgaatgtttttgttttgttgaatcaga

SEQ ID NO: 3001 - DNA, 560 bp, Arabidopsis thaliana
  Intron number 1 from transcript AT3G10290.1 (locus AT3G102 90) derived from phytozome v7.0 (chr-ID Chr3; pos 3184212 to 3184771 reverse strand)
tccccgttgttaccggtgtcgttatcgccagtggggtacgtctttttctctacaattctcgtaatgaaaacgtctttggttgttgattttgattctgccgattttgaaatatgtgttcttttacctgtagattgtgatgtctgatttgttgttagtttagagccattcaagatgattgtttgtgttccacgtatgtgtctgaaacccaaaataggtttgcttagtttcatgaatgtgattacattcagtatacaaattcaattttccctgtcaagtacaaatttgagtcctctgtggctgtattatctacttatctaaagcttcatcctttaatgcgttattccagtcatgtgttatctaaagcttcagactttcttcttgtaactattgccattcttacattctacattgttctgtgaattatttgatctctttgctaggccttagctattgaatgttttgtttgttgattatgggatttctgtattgaatgatcctgctctgggtctgcctttgtggttacagggtgaaccaggttttcactggtttggattcattat

SEQ ID NO: 3002 - DNA, 612 bp, Arabidopsis thaliana
  Intron number 2 from transcript AT3G10520.1 (locus AT3G105 20) derived from phytozome v7.0 (chr-ID Chr3; pos 3276870 to 3277481 reverse strand)
ctgttaaagtcttcaaggtaattacttactttccgattttccacatctacatatatgtgaatcacttgcatatactgtatcattatcttacacttccttaaaattgaaagtagaatgtttcattatttacagctaagaatctttatttactcattatataccatttatatataatagaaaatagtagtctgaattaacttttcttgtcatttattgacgcagccatgtgcacacaagttgcgattttgtttgaacttggctagttggctttgtcttcttctttgagaataaaaatctcatactagtaaagaatactctgtgatattttatttttaagaacaaacatagatttctctgtcaataaagaattgttactgaagaatccaagtggttcgggtcgctttatggatttttacttttttgctaatcttattataatagaaccatataaaccaaattccgtttactttttaaatttgggtttatgacttggtttggttcaactcacttttggcttctaagactttgcataacatgttttagacagacaaaaaagaaaaagactttgcataacatgtatgaatttttattttattttgtttgtgtgtagac

SEQ ID NO: 3003 - DNA, 328 bp, Arabidopsis thaliana
  Intron number 1 from transcript AT3G10590.1 (locus AT3G105 90) derived from phytozome v7.0 (chr-ID Chr3; pos 3310663 to 3310990 reverse strand)
gatacgccaaatccttggacagaagaggaacacaggttagtcatcaaatacttatgaattagggtttcttttgattgaggaaaagtcttaaatcttgaggaaaagtataagttaacagttcaaatctcacaaaaaatgattagtttgggttttgttgattagggtaacgtatacaagtatttttcttcagatagatgtaattatcaatttgatttatattaattttaacatgatgatgctgattatgataatatctaggttattaattcttatgattttgattgtttaatgatatatttcagattgtttctgcaaggattgaaaaagt

SEQ ID NO: 3004 - DNA, 415 bp, Arabidopsis thaliana
  Intron number 3 from transcript AT3G10870.1 (locus AT3G108 70) derived from phytozome v7.0 (chr-ID Chr3; pos 3401517 to 3401931 reverse strand)
agtcctcaacaggtttctctactgtttcatttcatatataatctcaaaagatttaatgtgtttaagtgtaggaaaattcgaccaactccttataaaaataaatcaccatttaatacaaaatttgcaatgttcataactaacctttatttttatttttatatatgtgtgtttttttcttataactttaactaaacaattatacaggtatatatatatccaaaaatcttccattattaaagttaaatattcgtgaatttgtctgctatgtacgtagaattatggtagtgtggatgttacatatcgaattggagtggaaacatgcatatcaaatcaaatattacaaactatttcatcaaatccaaattccttgttcttatacttttttttgttgttgttgttgtgttggtgtaaagga

SEQ ID NO: 3005 - DNA, 692 bp, Arabidopsis thaliana
  Intron number 1 from transcript AT3G10986.1 (locus AT3G109 86) derived from phytozome v7.0 (chr-ID Chr3; pos 3444777 to 3445468 reverse strand)
cgtactaaggtcacacaaacatcactaatcacatctatttatctacgaaaatcattctgtcgtattgttgatgatcatcacatgttaattgtgttatataaactttagttcggttttaaaaattttaatggaacgactcattaaatatttcttaatacaaggtcgattatacgaaacgtttttaaatggcaatttggctgcataacctaattttgcccacatatagaacctagcttaacccatcaaggtagtattgcctaatttcattaatcagaaaattggtagatgtcaatagacgggctgagtggtaaatggcctaaaaccaaatctttttgccaacttttctccttagtttgttgcttaacagtctcaaattattagtatccagcaatggaatgactaattgattaatcggttcgattaaccatatcggcaatgacaaaatgatcaaatttttaactgtagaacgtaaaacaatgaaaatttgatttgacactcaaaagagttaaaacatatgtagtcaatagaatgtctagatatgtttagaagtatttgtgacttgaaagcataatttatgctctcgtgagaagaaaaaaagttgaatccatctcatgaccaattggccacattcacgagtaaggactaggttttctgaaagtaacaaatgaaccatgtttcagggactagtacca

SEQ ID NO: 3006 - DNA, 605 bp, Arabidopsis thaliana
  Intron number 2 from transcript AT3G11130.1 (locus AT3G111 30) derived from phytozome v7.0 (chr-ID Chr3; pos 3490509 to 3491113 reverse strand)
aacccaaactcgaggatccttgccttaaaaggtattacactgtttccttcgatcgcattatcacttataacacccataagattctccttttgaagtgtatgatcagttataagacccataagtggttcctattaaagttttctccagaactaccattgatagcttctccttcattttgttaactgtacatatgctatttattacggataggatgttttgatttatttgaagtttaaatgactctgtccatgttgtgatgcgtcacttgatagaaaacctatttttattaaagtagtatggaagtgtaactacactcttcgagtttatgttgtagtcctatactctttttctggatttggggtgatagcatgtttaatgctgtagaaaacatcagtatagcgctctctgttttccaacacgtgttatatttctcgtggcagtgttgtgtctcaagcttagtgtagttaaactagaaattttggtttgtactggatgtttccttgtataagctattacttatttcttccttaatttgttgttaactttttcttaaattcgtatcgtatatagctcaagttccaggaactactcaggatcatctacag

SEQ ID NO: 3007 - DNA, 597 bp, Arabidopsis thaliana
  Intron number 2 from transcript AT3G11180.2 (locus AT3G111 80) derived from phytozome v7.0 (chr-ID Chr3; pos 3504993 to 3505589)
gccttctttaccttccaacattaggtaattaactaagtctctaattcttatgtctttatgagttttatttgataattaattaacgaattagttttgggttccattattcctatgagttttgggaaattgagaatttatagctagtataattgtaatccgatcattttatagggaagcttgagactgaagtcagcaactagtttcagttgttctttattttctttttctatataaagaagaccaaaactatgattctggtctttaataaataatttagaaataaatcaatataaaagaaaattgattcatgtgttgttatgttgattggcaatcatgttaattacataatatatcaccatgttggttattttttctaatttacaaacaatttatagtattttaaatgtgcacttcatcaaatcaaattaacgtatttccaagaaagagttgaatattttaattgaaactaaccttcttgttaaatttatctacatttgaacaaaagattatgttttcctaaatattaatatataacagaaacattcaatatatttgtataatatgcttatttctacttcttaaaatggatatagagaa

SEQ ID NO: 3008 - DNA, 487 bp, Arabidopsis thaliana
  Intron number 2 from transcript AT3G11210.1 (locus AT3G112 10) derived from phytozome v7.0 (chr-ID Chr3; pos 3512020 to 3512506 reverse strand)
gtgctttggaagttgtcgaccaagtgttccccaaggtactctttcaactccctttttttttgcttcttctctctttagactattagtttcttcaatactagattatgataaagattcagcgttttataggtctttatattagtccgtataggttgatgtgtgcttatcatttgacctagtaagaattctttgtgaacattattttactagttcaaaatgtaccccaaaaggattacacaagtggctattttagttgcatagtctttgatttagcatacaagactctgcatctgtttcaagggagatgtctctgtttaagcataatctgtttcatccgagttttcttgatatctcaagctgttttctcttacccattataaaaaaaatttggtagaatgagcttaactttgtagaaaaccatcatattcaaagcttctgttttcttccactttgtcgcctaaaaattgcaacttgttacggatgcagg

SEQ ID NO: 3009 - DNA, 252 bp, Arabidopsis thaliana
  Intron number 1 from transcript AT3G11280.1 (locus AT3G112 80) derived from phytozome v7.0 (chr-ID Chr3; pos 3534394 to 3534645 reverse strand)
cttcaaatctcttacccaaatcaggttcttgattccctcagtatacgattcttcatttttccttcccttttgtttttcttcttctttgattcctactatattatcattaaaccttatatataaaagcttccattatttccttatatcacaaatctatcttttaagcttcctccacacatagagcaagaaaatggacttttttgagctgtgtttgtagttgaaacttattcttccctttttttgtttttaggt

SEQ ID NO: 3010 - DNA, 536 bp, Arabidopsis thaliana
  Intron number 1 from transcript AT3G11490.1 (locus AT3G114 90) derived from phytozome v7.0 (chr-ID Chr3; pos 3618672 to 3619207 reverse strand)
gaacctgaagtccctagacgagctcctagtgcaaggttcgtttacttgtaacgatgatagatgtttctggtaatgtttggtgattaggattctcttagttcttgttttagttaacaaattcttgggaataatgttgttgttgaagctatgtgttaaaaatcaattttgggtgtggttttggtttcttctatttccagtagttgccgtaattgaaatccccttctgttaatagaatctattctgtcttttacttgcaattagtgtgtcccctgacatcaatgatccatactttttgatgttcttgattcaaatccctttgttttctgtgagttgttaaggatcttgagtgaggtatatagattgaggacttcttttgtgaattctctatgaatttgggtgtaattattaagtgaatagctagtcaacgactcttgactgatcagattagatagtttaactcttttgtgtaaatcagaagctgattagtctttttctgtaaatgcagtgcaaccgtgtttggagtctctactgaatca

SEQ ID NO: 3011 - DNA, 713 bp, Arabidopsis thaliana
  Intron number 2 from transcript AT3G11590.1 (locus AT3G115 90) derived from phytozome v7.0 (chr-ID Chr3; pos 3661076 to 3661788)
atctttctgatccgtcgcatagtccagtctctgaggtaaaatgctttggttatgattggttgagaggaagagaatgtgctgtaattccaacttcttgctggctgccatgtgctttaattctgaccgatcaaaagagagagagaaaaacaataatatatatagtatagtattgattgattcggggaagttataaagatctcatctttaactgataaaattgataatctttgtgtgattctaaggtctgaatttagtcaaagttgtgatttttttggcaacctctatgagtattttaatcatcaagggagattattattcgtataagcttctggttgatgttaaggagtgggattagagaagaatagaaaactgttttgatcttaagaatcttttgtcatgtgctctataacgcacatttatgtttatatgaaagggcgtttctttataagttggtgcctattattcttgcataattgggcacttctactagtttttattctttctcattcgttggtcatatggaggtagctggttgttttttagaggttgatttattgtgaataatgtaggcctagattctcttataatggagacctaagaaaaattatatataatgctaaatctggcaatggacaatgcgaagaattctgctttctttacttctgtgtgttaggtaattggatagctgagaaacttgttgatttttgtagagg

SEQ ID NO: 3012 - DNA, 537 bp, Arabidopsis thaliana
  Intron number 1 from transcript AT3G11770.1 (locus AT3G117 70) derived from phytozome v7.0 (chr-ID Chr3; pos 3722093 to 3722629 reverse strand)
ttactagatcagccttctcgcaccgaaatctcaaggttcgtgttcctcttttctgtctttttggattgaaagatttttctcatgtttatatataaatcttcaatccaaatcaacaaaagcatgttccatccgatgaacttatttggggactttcctctgtctaatccacactttataaaaatcgtacctttgtattgtgttcatagaacccaaacgctgattagagtaaatttgttgttctggcaaaaaacccaattagctctgaatgcgtctacacatttcttgaatcggtcattctattgctgctacacactcaaaatcgatatttcaatgtctttgtgaattggaaaacatattgaaaatctttgctgctttatcagtttttcattcgattcatcgctgagcacattcacaacaaaaacagatcactgattattagaattgtattgattctgagtgtctctccaagctaatggatctatatgatgttgtgtctaatgtgtaatgtgaatatgtttccagtgatttcagaccaca

SEQ ID NO: 3013 - DNA, 489 bp, Arabidopsis thaliana
  Intron number 1 from transcript AT3G11950.1 (locus AT3G119 50) derived from phytozome v7.0 (chr-ID Chr3; pos 3785099 to 3785587 reverse strand)
aaaagagacccgtttattgcgccaaaaccagagaggtgcttctctctctctctctttctctcattccattcttgttccattttgatctcaccgtcagatttccttacaggctttcgttagttcctttctccgatttgtcattgtctgtttaggacacgatttctttctagggtaattctcgtttttttgttttgacatttctttatcaatccaacagttgaactttttgcttgtaatttgactcaattctgaaactttcgttaataatttgtcaatttacggatcgtgatcattggctgttgatcggattttaggattctactgatctagcgattccagaagaaaaaaaaagtagagattttgattaatggtgtttatggagtttgtgtcttatttcaatgctttgcattttttttaatctgatctagtgatgatatttggctattcaatttgtgtgtgtttctgcagacgatttttgatatacaggca

SEQ ID NO: 3014 - DNA, 353 bp, Arabidopsis thaliana
  Intron number 2 from transcript AT3G11950.2 (locus AT3G119 50) derived from phytozome v7.0 (chr-ID Chr3; pos 3785099 to 3785451 reverse strand)
gtcattgtctgtttaggacacgatttctttctagggtaattctcgtttttttgttttgacatttctttatcaatccaacagttgaactttttgcttgtaatttgactcaattctgaaactttcgttaataatttgtcaatttacggatcgtgatcattggctgttgatcggattttaggattctactgatctagcgattccagaagaaaaaaaaagtagagattttgattaatggtgtttatggagtttgtgtcttatttcaatgctttgcattttttttaatctgatctagtgatgatatttggctattcaatttgtgtgtgtttctgcagacgatttttgatatacaggca

SEQ ID NO: 3015 - DNA, 489 bp, Arabidopsis thaliana
  Intron number 1 from transcript AT3G12500.1 (locus AT3G125 00) derived from phytozome v7.0 (chr-ID Chr3; pos 3963045 to 3963533 reverse strand)
aaactacaggtacccaaaactcattaacaatttgacggagattgtttcaaaacacaattgctaaattttggtgtttattattaaaacatcagaatttgaagttctttttttcttctgtaaagagttttggatccaagtgctcatatatacaaagaactactatactatatatatatatatatatatatatatatgttttattgaaaaaattatagcttctcatatttagaaacgaaagaaaaaaatcaaacaaaaacgccaaacgcaaagaaaaatgttttggtcttagatgtttgcgtttacaattaaaaaactattttaaaaatatgaaattcttgattaatctaaacgcaaataaccaatcaaggaacttacgaatattccagtttccaaattatacacttttgaataatgtcaagtttgtgagttgtgactatatatatagctatatactaattaattaagtggacggttacgtcgtgcaggtgg

SEQ ID NO: 3016 - DNA, 409 bp, Arabidopsis thaliana
  Intron number 1 from transcript AT3G12570.4 (locus AT3G125 70) derived from phytozome v7.0 (chr-ID Chr3; pos 3988789 to 3989197)
gatacgcactcttcttcatcggatttgttcctctggtaagatttatccttctcttcacctttatgttcttcgatgatcgtattgattctatctgaattcaatctctcttgattttacaattgatcgaagtaaatcactgtttgatcttatcgaatctctggaatatacatatcgaatttgatactatcagatttgtggatacgattgttgatgaccttgttccagatccctagctcgtttgatatttcgtagtgttcctgatttgattcgtgaatttttcgtttttgaaaacatgatggatttgtgtttgtttctcgttttagaaaatttaggacttgttgagattagattgaacttaatcccattctttgatctctcgattgatattcaggtgggattgtagctctcc

SEQ ID NO: 3017 - DNA, 618 bp, Arabidopsis thaliana
  Intron number 1 from transcript AT3G12570.1 (locus AT3G125 70) derived from phytozome v7.0 (chr-ID Chr3; pos 3988789 to 3989406)
gatacgcactcttcttcatcggatttgttcctctggtaagatttatccttctcttcacctttatgttcttcgatgatcgtattgattctatctgaattcaatctctcttgattttacaattgatcgaagtaaatcactgtttgatcttatcgaatctctggaatatacatatcgaatttgatactatcagatttgtggatacgattgttgatgaccttgttccagatccctagctcgtttgatatttcgtagtgttcctgatttgattcgtgaatttttcgtttttgaaaacatgatggatttgtgtttgtttctcgttttagaaaatttaggacttgttgagattagattgaacttaatcccattctttgatctctcgattgatattcaggtgggattgtagctctccatgtgttgtactagtgcctcttaggacaatgttttggagcttatagtcaaattctgtgaaaactttgaggtgggaattgtgagatcctgtatgatgaagatatccttgaattgcatatatggctttgttgattgatgttctcatctcttgccacctaagggttttgattcggccactgtatctgctaggggttcgcttctggaagaaat

SEQ ID NO: 3018 - DNA, 514 bp, Arabidopsis thaliana
  Intron number 2 from transcript AT3G12590.1 (locus AT3G125 90) derived from phytozome v7.0 (chr-ID Chr3; pos 4002381 to 4002894 reverse strand)
ctgttagagcatactatagcagagagagatcgcaggtaattgatccgtacttcatatgtttttcatcatactgtgaagctttgactcttttttgaatcatagtttggactggctacatgtatttttggttctttggtaacacttgcaagtctgatagtgaaacctgtattaactatgaagaataataatcaaaggtatttgtagaatatatgataatctgaacagatgtcttaggtagaagtgtgtgcctgtgtggggaaggactcctagcagaaagcaaacaaagtcggaaaagtccctttatagatatatcatcagcccaggttgactattaaagtacttgagggcttattgctaggtggacatattgttgaatataacctgatttagctaggatgcagattgctataatctaaatatttctcaagtagcacggattaaatattagttgttgctaatgttcaatcaattttctgcagcccagctgtggttacgaggtgtgtggctctactga

SEQ ID NO: 3019 - DNA, 834 bp, Arabidopsis thaliana
  Intron number 1 from transcript AT3G12680.1 (locus AT3G126 80) derived from phytozome v7.0 (chr-ID Chr3; pos 4027810 to 4028643 reverse strand)
gccacttcctcctggtgtcaaacgcacctctgaaggtaggctctttgtttaccttactatttatgggatctgcatcattttcttatttattgcttggagaactatgccgcataacttgaaaagttaaagacttcagctttcccttttctctgctcatcgtgatactctagttctgtagcggaaattagtgtttttgatggtttgtttcttcaattgcagcataaaaaactcagctttagtcatggtctctagcctgattctttctaggatagattttaatttacatttgctcaagcacaatgatgttggtttgtattcctctgtgctttctcgttagctgaaatagaggttggattggtttggccaattgctttgttttgagtctggacaacgcgaagcttgacagttagaatcatctttcaggagatgcttagggattgcatctataaactatatagcttatggtagtgttcttgattaagtctttgttgctttaggattgcctaacgataattgtttttagttttgaccttaatgtttattggaacacttggtgattttgcagaattgattgatgatttatgttttgttgtaactctatggtttccaatagattttcagacatgattgtatgtaagccagaatttcttactgtaagtttaactaaagatacaattgattattgatgctatatcttggtttttgctatagtatctcccaaatttattttcaaattatacttatagtcagtatatatcttctcatttcgttgtatattattgtttattatgtaatttagcgctctactatccgactctgttgggtgcccataat

SEQ ID NO: 3020 - DNA, 237 bp, Arabidopsis thaliana
  Intron number 1 from transcript AT3G12720.1 (locus AT3G127 20) derived from phytozome v7.0 (chr-ID Chr3; pos 4044158 to 4044394 reverse strand)
tcatcctagttggagttccgttccaaagcttgccggttttgtatcttctatctctacttcccttttctttttactattttttgttcatgagtctaaacatacaacatgtgaaaaaataatagtctttcaattcaaaactaattagcaatgagtgaattagcctatgttttttatatactatatgctcgatgtggattaatcctaacagtatctatatgtgtgtatagggttgcagag

SEQ ID NO: 3021 - DNA, 525 bp, Arabidopsis thaliana
  Intron number 1 from transcript AT3G13540.1 (locus AT3G135 40) derived from phytozome v7.0 (chr-ID Chr3; pos 4420500 to 4421024)
ctcatcctccgtcttcaccgcctcctcggcaacaggtatatatatagatattaaaaaaaaatctcgtcaagtattcaactatacaagatcgtttagtttatatgcatacgtatgtgtgtgtctctctctacccatacactagagttatttttttgtttaagctagctagggttttatttcttccacataaacatgaaggttctgattttagcttgatcccattttttcttatagctatataaaacaattatactttgattcttgattcgatatttatatagaacaaaaggttaatcccttctctagtttctttagagtataattttaattaagttgattctggttctagagcaaattaatagttctagagatcattcattcttttttcaaattgtttatgattactaggataaaaatgcaagcttgttttgtaaccatattagtaattaaccgctcttgttcttcatggaaattctaatgtgtgatgcaggtggtcattgatcgcgggaaggataccgggaagga

SEQ ID NO: 3022 - DNA, 513 bp, Arabidopsis thaliana
  Intron number 1 from transcript AT3G13590.1 (locus AT3G135 90) derived from phytozome v7.0 (chr-ID Chr3; pos 4436716 to 4437228 reverse strand)
tgttttgatagaatttacttgctcgatattagcagttattactaaatccaagggactcagaaacaggggagagatcaagcagaggaacatgcaactgatcatgggctatctaagctctttattttattttggcccaatcaaaaccttagcacaaaatgggcctacgacaatttgaagcccaaattccaagattagcatctggcttaaacctttacgagttttacatacaaagaaagtaatcagatacgattacaaaataacattattgttctttactttgtgctaaccaaatcaagacctcacaaacaaagtattgttatggacttagctttttctccaagcatcgtaaaaccgaagatatcctcgtctttgttgtacttgtacctaaagaaggagaataacaatatatctatttatacgattatagtccttaacaaaatcacatcaccataatgtatttcccatctgatcacgctagacacatatttgaagaatctccacgcgattctagag

SEQ ID NO: 3023 - DNA, 354 bp, Arabidopsis thaliana
  Intron number 1 from transcript AT3G13640.1 (locus AT3G136 40) derived from phytozome v7.0 (chr-ID Chr3; pos 4461324 to 4461677 reverse strand)
tctgcatctccctcgccgagctcccatatagtgtggtacgagatccttttcttcttcttatcctctcttgtttctcttcttaatcgtctttcgagatgggttgattccgatacactcgtatgttgtggatgaaattgttcgattctagtttatgagttgttgcatgttggtacccttaattgtatagctgttttacttgtcaattagctctgttattatatgcgtctgtctactaggtttaatctccattcatgattttgccaaaacccaacatcctttaaagacttctcttttgattacctcgtgagcctaattgttgacttgtgtatcttgtatgtaatattctcaagagag

SEQ ID NO: 3024 - DNA, 538 bp, Arabidopsis thaliana
  Intron number 2 from transcript AT3G13810.1 (locus AT3G138 10) derived from phytozome v7.0 (chr-ID Chr3; pos 4545894 to 4546431)
tgactgtggcactctcttttctaggtaactctattctcccaaaatcaaactctttttcgtttctctctgtttattaattgattttaagaacaaatatagtaattacattaatcgatattggtgatgaatatgagatatatgctgtggtgttgtaagaattgaagggacacatggtacaaacttttctttgttgtgttatgagtaatttcatttaatttgaaagaggacaaaaatggtagctcaaaagaatcttcatttataatatggaactagttcagggtactttcttcatttcttttcatttctcataaaaaaaaagttattatgggttatttttccttgcattaatcattcgtcttataatacacatgtgattgcaacatgctttagatggaccacatgacttttagctcctcttaatttgtaaaaagagagacttttattcttttattgattaacatgttattgatcacttcatggttttttttttctgtgtggtacaggagggatagtttcataactcatagagcattttgtg

SEQ ID NO: 3025 - DNA, 489 bp, Arabidopsis thaliana
  Intron number 1 from transcript AT3G13810.2 (locus AT3G138 10) derived from phytozome v7.0 (chr-ID Chr3; pos 4544467 to 4544955)
atctctctctttctcccctctctctctacttctaggtatattggagatttcttccatcttttgttttcttttgtagtttaatttctcaacttcttgttcatgttctgtgtagtaatttgttgctaccttttattttgttttctgtgagattatttcgtgttgatttcaaacttgaacaagaaaagtggatagatattgtctcttgggttgaagccaaagaaggaaatgataatatatacatacacacacacacacacaaaaatcaaagaaggaagttttataggattatatatatagctagagagtctcatttcttgtatgtttctgtttaatcttctcttttgtctcctttttttatcagtatatgtctgtatgtatttatatatatagatctgaatatagtttgtcgatttctaacttatttcgcctcttcttattcttttgttttttgctttaagtttttttttttgtgtgatgatgaacaaagac

SEQ ID NO: 3026 - DNA, 531 bp, Arabidopsis thaliana
  Intron number 1 from transcript AT3G13810.3 (locus AT3G138 10) derived from phytozome v7.0 (chr-ID Chr3; pos 4544467 to 4544997)
atctctctctttctcccctctctctctacttctaggtatattggagatttcttccatcttttgttttcttttgtagtttaatttctcaacttcttgttcatgttctgtgtagtaatttgttgctaccttttattttgttttctgtgagattatttcgtgttgatttcaaacttgaacaagaaaagtggatagatattgtctcttgggttgaagccaaagaaggaaatgataatatatacatacacacacacacacacaaaaatcaaagaaggaagttttataggattatatatatagctagagagtctcatttcttgtatgtttctgtttaatcttctcttttgtctcctttttttatcagtatatgtctgtatgtatttatatatatagatctgaatatagtttgtcgatttctaacttatttcgcctcttcttattcttttgttttttgctttaagtttttttttttgtgtgatgatgaacaaagacatgttacttcaccagcatcagcaaccacaacaagacgagaat

SEQ ID NO: 3027 - DNA, 425 bp, Arabidopsis thaliana
  Intron number 2 from transcript AT3G13930.1 (locus AT3G139 30) derived from phytozome v7.0 (chr-ID Chr3; pos 4596243 to 4596667)
gcttctcgtatcatcaatcattccaaaaaggtttctctttctctatttttcatttttttctgtggtttgactaccatttttgatcttgtaaaactgagtttatgcattcgttcttatgtgttttgctctgccaatcatttttttctgaactgaggttcgttttccgggtttgacttaatctaatcatgaatttggtatttttaatttgatcatgggcaattctgcattttgctattgagagctttagtaacctccttgtaatctgaattgtgattaatgtagtagcttcgctttatgattcaattgtggtattagctattcattttattagtacaagaagactctacttttacagcagagtaattgtatgttgctctttgtaaacactattttgacgattgttgtgttatctgaccagttgaaac

SEQ ID NO: 3028 - DNA, 601 bp, Arabidopsis thaliana
  Intron number 1 from transcript AT3G14010.3 (locus AT3G140 10) derived from phytozome v7.0 (chr-ID Chr3; pos 4636563 to 4637163)
atcggtgttgcagaggcgttttggtttctgatcgggttagctttctgaggtaaatatcctcttcttcgattcttatatctggatttttagtttatcttcattgcttctttattcttccgcgttattgggaatttgatgatttagggtttgttttactggaatacctagctctagctcgaatacgttggagatcctatttcatgattgcagatgattgtatctttgattcactgttatgccttcctttttttgcgtctgtttgtgctgaaaactctttgattttgtttccatttcttaattgtttgtgctgcggattaatggttgaaatcaacactatctttctttctttcatccacaacgttttctagactaatcggcatgtttgatgaatgaagccaagcaagtgttgttttatgtttatttttctgtaatggcgatgcgaggctgttcactgattgtattttgctgttagatagtaatcatcggtttcaatggtaaccttctatttatagtttctgcgtcagttgagcaattacgaatgtcatgggtttcaataactgtttttttttacccttgttagttagaacagtctaaggctgca

SEQ ID NO: 3029 - DNA, 587 bp, Arabidopsis thaliana
  Intron number 1 from transcript AT3G14010.1 (locus AT3G140 10) derived from phytozome v7.0 (chr-ID Chr3; pos 4636577 to 4637163)
ggcgttttggtttctgatcgggttagctttctgaggtaaatatcctcttcttcgattcttatatctggatttttagtttatcttcattgcttctttattcttccgcgttattgggaatttgatgatttagggtttgttttactggaatacctagctctagctcgaatacgttggagatcctatttcatgattgcagatgattgtatctttgattcactgttatgccttcctttttttgcgtctgtttgtgctgaaaactctttgattttgtttccatttcttaattgtttgtgctgcggattaatggttgaaatcaacactatctttctttctttcatccacaacgttttctagactaatcggcatgtttgatgaatgaagccaagcaagtgttgttttatgtttatttttctgtaatggcgatgcgaggctgttcactgattgtattttgctgttagatagtaatcatcggtttcaatggtaaccttctatttatagtttctgcgtcagttgagcaattacgaatgtcatgggtttcaataactgtttttttttacccttgttagttagaacagtctaaggctgca

SEQ ID NO: 3030 - DNA, 587 bp, Arabidopsis thaliana; identical to SEQ ID NO: 3029
  Intron number 1 from transcript AT3G14010.2 (locus AT3G140 10) derived from phytozome v7.0 (chr-ID Chr3; pos 4636577 to 4637163)

SEQ ID NO: 3031 - DNA, 511 bp, Arabidopsis thaliana
  Intron number 1 from transcript AT3G14172.2 (locus AT3G141 72) derived from phytozome v7.0 (chr-ID Chr3; pos 4704774 to 4705284 reverse strand)
aacagacgaagatctcattttgtttctattctcaggtatggtctgatccgagcaggacttcacttgaatttcaatggcgttttgtttccttattggatttgggattttactttatgtcttgaatttgaattcgaatcatgggtcttcgaggattcgtccttattgggcgtgaatcagttttcttagtgattgggttttcaaatttccatgatcggaatcagatctagcaatgtgtttgattctgtgatttgtgttggggtttctattattgtgatgttggtttagttgggttaaattgaatccgtgtatggacactgcttttatgtatttactgatgatacttctattgtttagtcacgtttctctttgattttctctggacgcttcaaattcctatagcatttacgtttagagacgaactttgttttgctttttacttaggataagcttttaatgctgtctttgggtatgtgaagggggaagactgaaaattttgtgtaaaggggtcaag

SEQ ID NO: 3032 - DNA, 631 bp, Arabidopsis thaliana
  Intron number 1 from transcript AT3G14595.1 (locus AT3G145 95) derived from phytozome v7.0 (chr-ID Chr3; pos 4909159 to 4909789)
cggttatcctcagcctgctcagccctacgcccaaggtttctttctttcctcatctctcattatatggacaacatcatcaaagctgtcgttttgttttgttttgtgttttgtttggtatagaagcttcattttattcttgatccattatatcgaagatcctttttgatcaactttttacctcatctaagatgctaagattcgcattggattaaaatttgattatttgaaaattcgagtgatccagtaattagagagaaattgtatattgcctcttctatgatataaatcaagatgctagattcacttgagaataatgacatgaagaaatgaatcttttttataaaaaaaaaaatcaggtttttgaaatagataatgcaaatagaaggttctcttttggcgtttacgtcttacaatttgacaaatgatttttttgcttagtattttgaacattgtggattcatttggaaacaaacatcagaatctcttatctcatctgccaaaatttctagctaaactgtagtttctcaaaaggattgtatcattattgcaacgtacacacaccacttggctgttctaaagctcgttttggttatctctagttttcatcaactatagtctttggtcgcaggtt

SEQ ID NO: 3033 - DNA, 623 bp, Arabidopsis thaliana
  Intron number 2 from transcript AT3G15070.1 (locus AT3G150 70) derived from phytozome v7.0 (chr-ID Chr3; pos 5072345 to 5072967 reverse strand)
ctagaaaggtcagcaacttaataacaaatcttctctacttcttttctaaaattttctggtttatgtttcgtgaattgggtttgatttgattttcctaaggcatgtctggcaacgtggcttgtgcctcattaaattgtaatttagtgttgttttctgccacaagggtggtgagttttgctaaagccactgcttagtttctgtgaaaattattgggttaggaaaaggttcgaaggatttacttttttgaatgtttggggtttgatctctgcagctaaggtttcatattctacaatgtatccgtggaccttgaatgttctgtgctgtcaggatactgttttttttgtgtgtgtgtctccattacttgcgatgatgacgaaaaaattctgggatgttttgagacttggcttatcccattcacgggacaagttgggatgatatttacttgttgtatgttttgattccattattagatatcagtagtttgtgcactagctagaatcagcgtgcggtgtaactagcatcgagttttagctgtctttgtgggtgaattttaattgttgttttgttgcattgttgctgatctttgtaaattcaactaccaggtgttttctgcaacaagcaat

SEQ ID NO: 3034 - DNA, 283 bp, Arabidopsis thaliana
  Intron number 1 from transcript AT3G15070.1 (locus AT3G150 70) derived from phytozome v7.0 (chr-ID Chr3; pos 5073006 to 5073288 reverse strand)
ccttggatctctctctccctgaggaaaataatcaggtacttatctcttatgatcctaacgattatcagattctcgagctttttgattatgagtttttatttgtcgtttttggtgaaatatggttttgaaattgtttttaatacgagagctgctgaagaattgcattgttattggttagtcggaatttaggcttaatcttcttttgatcgtctaggttgttaattttctaaactctgtttatgcttcaggggagcttccgattaatacgagttggttggttttt

SEQ ID NO: 3035 - DNA, 944 bp, Arabidopsis thaliana
  Intron number 1 from transcript AT3G15070.2 (locus AT3G150 70) derived from phytozome v7.0 (chr-ID Chr3; pos 5072345 to 5073288 reverse strand)
ccttggatctctctctccctgaggaaaataatcaggtacttatctcttatgatcctaacgattatcagattctcgagctttttgattatgagtttttatttgtcgtttttggtgaaatatggttttgaaattgtttttaatacgagagctgctgaagaattgcattgttattggttagtcggaatttaggcttaatcttcttttgatcgtctaggttgttaattttctaaactctgtttatgcttcaggggagcttccgattaatacgagttggttggtttttgctgaattttcgaagctttgtttcttcaatctttgatgctagaaaggtcagcaacttaataacaaatcttctctacttcttttctaaaattttctggtttatgtttcgtgaattgggtttgatttgattttcctaaggcatgtctggcaacgtggcttgtgcctcattaaattgtaatttagtgttgttttctgccacaagggtggtgagttttgctaaagccactgcttagtttctgtgaaaattattgggttaggaaaaggttcgaaggatttacttttttgaatgtttggggtttgatctctgcagctaaggtttcatattctacaatgtatccgtggaccttgaatgttctgtgctgtcaggatactgttttttttgtgtgtgtgtctccattacttgcgatgatgacgaaaaaattctgggatgttttgagacttggcttatcccattcacgggacaagttgggatgatatttacttgttgtatgttttgattccattattagatatcagtagtttgtgcactagctagaatcagcgtgcggtgtaactagcatcgagttttagctgtctttgtgggtgaattttaattgttgttttgttgcattgttgctgatctttgtaaattcaactaccaggtgttttctgcaacaagcaat

SEQ ID NO: 3036 - DNA, 425 bp, Arabidopsis thaliana
  Intron number 1 from transcript AT3G15220.1 (locus AT3G152 20) derived from phytozome v7.0 (chr-ID Chr3; pos 5131761 to 5132185 reverse strand)
agtatcccatttcgtcttctctgtcgaattaccaggtaatttggatcgatcccttgaactttagagaatttgattatgattattttcgtttaagtctgattttgatcgaacgggagaaaaacatcagtgaagatgtttctcttcagtgtcctagagtgacgaatattctcggctacttgcaaatttttattggtcagctgtcacttgctccaatccacctaacttttttgctgattttgtttgctttgagtataagggatttagtttaagtttggtgctttcttctgggtacttatttatgaggggagagtttagatgtaatgaaaaggggagggagtggtaaaaagtattatagtttgttctgactctgttgttatcttcgtaatatagtggttggagcgggagagaaggtggtttttccttgt

SEQ ID NO: 3037 - DNA, 590 bp, Arabidopsis thaliana
  Intron number 1 from transcript AT3G15350.2 (locus AT3G153 50) derived from phytozome v7.0 (chr-ID Chr3; pos 5166520 to 5167109)
aaacagcatcaagacaacatccaaaaattacccaggtttcttcattttcttaatatatcgtttttgtttctggatctcctttctaaatctgtagattcaggcgtgtgtagatttagtttttttgttattgtttggatgagtaaagtatgttctacaatgcactagatctaaatctcttcgagattctgatggtgtgttggtgttgtattaaattgattttggggataatctacgacaagggtttcttttaatgttccttaggaaaatggtaatgtaacgtttaaagggttttaagagttgcttaatatagctgttgagatgtctgattgattatgaatcccgatccaagagtttttttatgaatagaagagccatgtcgttcttgattgaattaatcttaatcatactgtttcgtaattcttaaactttgagcttgatgttgcgtgagaatctgggaactttaaatgtgtcggctgggttctctagtttgcttcttctttctgtatttggctctgagaaacttactagagctctaacatttgtgcttgctgataggtttttgtgtttgaaactcgaagattgttgcggat

SEQ ID NO: 3038 - DNA, 934 bp, Arabidopsis thaliana
  Intron number 3 from transcript AT3G15640.2 (locus AT3G156 40) derived from phytozome v7.0 (chr-ID Chr3; pos 5299963 to 5300896)
atattgacttccctgaaggtccttttggaactaaggttagataagtttcttttaccagagatatgtcgtgactcctctttgaatatcttaaccttgttttttactgcaaagtcatcagtgtttctaggcatgatatagttcttatgttcatcactaacacacgggcatacgtgaaacaaaccaaggacacttaacttagctcgagtattatgaatggctttatgataaatgtagctgtttcaatgatctcaattaactagaataagtatgtatcttgaaacttattgcttcttcaaaactaatatgagtccagctggtttactgacttatatcgatcaacttgcattctttgctatggttcataatattgctttagcaggattactatatcatgcagcaatcactttgttatgtcgttttggagctaaatcatcttgatattacactggtcatatttctggatttttatttttttttgtgaataatgtaattagtatatttccttcaatcaagcactagcttggggttgaatcatatattggttttggtgaattaaaattaactctaagctgtgtttgttaatttacggtggctcactgcctatgatgcttttgtgcacgataatgacgaaaagattgcggatgtcacatacaacatgtgcaagtgtctgtagatcatggaaattcagttcttaacatccataaaaaacttgctccaaattactgaagatatgtaggagtatatgactgttttgcatgctatgacaagacatttgattttttcattttcttgtgtcattttatcttttgagtgagcagtattcattttcttttggctacacaattggatacttattttttcattttcttgatacacaaatttggatgtcattttgtattgccttaggaagctcctgctattgtgaagtcctact

SEQ ID NO: 3039 - DNA, 690 bp, Arabidopsis thaliana
  Intron number 1 from transcript AT3G15690.2 (locus AT3G156 90) derived from phytozome v7.0 (chr-ID Chr3; pos 5317111 to 5317800)
gcttcctgtaagtttctctacctgtctcttgttgtcttgcttgttccagttttcttgggatcgtacactaaattgggtttgtgtttcctcattcaaatttgaatgctttcgtagttttctgctctcatagaatcatattcatcgaaaggttgtaactttggggattctgtttattgagtgataggaaaactcagaaagggacttaactttgaacaattaggttgattttggtataaattagagatctaaagttgaagaatttgtcttcagtatctgtttcaatggagatgagattcaagttacttcatttgatattgaattgccaagctaatctaattgatgagtttggcagtgataagttaatttcataatttgtatctcttaatatgaattactcgacaacattacttaatctttcactgttgagtatacgtggagatcggttaacgtgagtttattctaagacattatattttgaattacttaaaactttctggagctatcttggattgagtgtataagatttgcttatgctcaattttaaaaagtgagggatcatattgaagataagtgcttatttagtctttctttttgactctgtcttgttttggctgatttcccatattgagaccttggcgtatgacgtatgttacaggtagcctaggagttcctaaaattaaaatctcggca

SEQ ID NO: 3040 - DNA, 568 bp, Arabidopsis thaliana
  Intron number 3 from transcript AT3G15850.1 (locus AT3G158 50) derived from phytozome v7.0 (chr-ID Chr3; pos 5360044 to 5360611)
ggtggctttccattcatcgtttggggagtatgttctgtggctagtcttgcattttgaatctattcactgttaatttttcataactagctgataggattatgatgtgttttagctcggccaaaacaagataattctaccagttttttttgtgtagctatcaatttgctgggccaaatctcctcacttgatttccctcttgcgttttcttgtaatttagtgcaacttagattattgaccttaggcacacaagttgtgtttgttgaacaaaacagaaccacaagtaaatatcttatctttcttgtaagaaagatttgtggctcatgctcttctcgtgaatggacttaattctagttgcttgtatttagttagatataaacaacatttgcatgctaaaagtgaaactacattgaatttttttttatcaaatttgtaaacggaacgaaaagaagaaaaaaggcagaagaaacttgattataactactctaacatttccatagagtcacggtttctgatttgattttcgtctctaatcctttttttcttgggttttgcagggtgtaagaatagt

SEQ ID NO: 3041 - DNA, 389 bp, Arabidopsis thaliana
  Intron number 1 from transcript AT3G16310.1 (locus AT3G163 10) derived from phytozome v7.0 (chr-ID Chr3; pos 5528107 to 5528495 reverse strand)
gctgaaattcaaacacctccattttcatcctcaaggtttgctctctctctctccctctccatcgatccattagatagtgtgattactcctatttgtgtactgtcttcgatgattggcgtcaatcttactaccttctcgtttaaaacccagtaacttgcgattttgttgaactttttcctcaattttctttcgattaatcctctagaaacccgtagctaagcttagattagtgatttcaatcgcaagattcaatattgatcttgcccaagtgaattaaagtcgcaaaattgatttgtttttgtttttttagctttcttatgtaattttgctcaaagctatatgattttttgtctttgcagggagataaataaaactctattgagtagaaa

SEQ ID NO: 3042 - DNA, 254 bp, Arabidopsis thaliana
  Intron number 1 from transcript AT3G16380.1 (locus AT3G163 80) derived from phytozome v7.0 (chr-ID Chr3; pos 5560552 to 5560805 reverse strand)
ttacgcttacatcaacttcgattcacctttcagcggtaaacaagactttcgacttttttactcgtttcttcgtttccagtctccgattttggtttcaacgtttacggtttttgattttggactctttcaattcttgttaaaaccctggaaatttcgttgtttttctctaagattgtcttgcgattaaccgatttaggtcactaattctgacagatctttgtttctttattgttgattctgtggattagcatcga

SEQ ID NO: 3043 - DNA, 613 bp, Arabidopsis thaliana
  Intron number 1 from transcript AT3G16560.1 (locus AT3G165 60) derived from phytozome v7.0 (chr-ID Chr3; pos 5637703 to 5638315 reverse strand)
ctctttggttttctccatccccgtatacgtttaaggtaaacccatttctctcatcatcaataacatccccaatgtctcgttccgataatctgttttatttaatcttttcaatttggtttgcgagttttgatttatcttatcaatggaatttttgatatatccatatattgttgtaatccatatagatatgaacacatgtcacggtgaatactttgatgataccaaatctataagtttctctgtgttttctgggtttttagttagtttatctctgtataaacattctatctgaaacatttcccaacaacttctgtggtctgcatttaatggcctcctatgaaaaatatcatttttttcttaactctcacgtttaacttatgtaactgttcgttaccttggccccatctatcttcactttcgatatgtgcttagactctcaccacgtattttgtctctaaggtcattaaagcagctaacttttttgaagtgtgaggtttttgtattagtcttaagatttcattaggattgttcaagttaaaaaaaggactaaactttatggttttgttgtggatttttgttgtttcagaacattgcaagaaagtgaagaaaaaaa

SEQ ID NO: 3044 - DNA, 514 bp, Arabidopsis thaliana
  Intron number 2 from transcript AT3G16840.1 (locus AT3G168 40) derived from phytozome v7.0 (chr-ID Chr3; pos 5741844 to 5742357 reverse strand)
aggccgcaaagaatcaggacgcttctgctggttagtatttcgtatactcttttccttaatagtttttggctcaaaagaggtaatcatcactcgtagtcgtacatgaaaattttcttagggatattaagatctggcgaggaatgccttagtctattaatggtctctcactggtctcagacactaaaactctgtggtggatagatttggcaaggataacacccagttctatcgaattagcttcattttagaccagctgaaagaaaagaaaaatctgcttatcttcttaagtttaggaattggacttcttctgttcgaccattttcacatgagctgaaaactactgaatattacaaactatacattctttcactaaatattatttatctcttgttaccgtaagttccctttaatgcactagtttatgtctatctttgaggtttgttattctatcaccaaattcttgtcaagaagtcaaattataatggtagataattttttgtagcagttagctgtg

SEQ ID NO: 3045 - DNA, 538 bp, Arabidopsis thaliana
  Intron number 1 from transcript AT3G17000.1 (locus AT3G170 00) derived from phytozome v7.0 (chr-ID Chr3; pos 5797392 to 5797929)
tctcttcctcttgaggtaacatctccgattctagctttttagatcgggaattttgattcgaatctatatttgaaatttccttttttgagaaaatccccttgtcttatgttgttgtgttatgttgtgttgtgttgtaattgtgtatctgttctgagtgatggtgtttgattttaggcgatcatgattagggaggatcgatatatcttcttgtatacactgaatttactaagtctctctactttcaacactcgtgcaacagataaagtttggatttttgtgtttttattggaataactgagtcaagtggggaagattacgaacgattccttgatccactcagctgtcatactagttcttcgtttctaatttttttaactgtgaagactttttccaacatgtcatggtccaaatagattgcgcgcgatgttatagctgttttttacaagttcttgtgtgataccaaatagtttacatgattactcttatctatcttttaacttcaggagaatatctttgagtggcaattcgccatccgagg

SEQ ID NO: 3046 - DNA, 614 bp, Arabidopsis thaliana
  Intron number 1 from transcript AT3G17090.1 (locus AT3G170 90) derived from phytozome v7.0 (chr-ID Chr3; pos 5827282 to 5827895)
tctgtgatcatctctttaaccattttcgaggttcgtaatccgattcttcattgacacagtgattcgtcattttgacattcgagcttgagtgttttgaattggttttttggggaaatacatattttagatgaatccgttgacttaattctgaactttttgttcaaatcttggtgatgaagatggtgattggtcaacaaagttaggtactttgactttttaatctcgttggggtataattaggttcccattaagctaaatgcaagtttagagctacagtctttgcatttaaaaactgtgtttattgacttcagaaatagtaaaactttagatatgagtatgctctttgatatataggagtatttgtaatgcagtttgatatataggaggactctttgcatttcgcattcctggttctttgagattgttctttgccatttagataagggtccctggcttttgcattgatggtggagtgtcatgaatattaccaggcttaagcaaactaggagtgcactgtaattatgaaaggaggttgagcctctcttatgttttgattgctcaggctttatggttatgcagaaatatcagcggaaacacaaggagttgtgacgaga

SEQ ID NO: 3047 - DNA, 430 bp, Arabidopsis thaliana
  Intron number 3 from transcript AT3G17170.1 (locus AT3G171 70) derived from phytozome v7.0 (chr-ID Chr3; pos 5853887 to 5854316 reverse strand)
aagaaaggagtaagtttatcttctttaaaccgttttgattttcatttaaatgtttccaacggcaaaatgttgttactcgttatctagaagttggttctctgttaatcagttactcattagctagcattgccattgttcctgctcttagctaagtttttgattcgaaaatgatggcttttgtaaacttttaactttcttatcaaggaaggatgataatgtaagatatagggtatgccaattttaacttaggagatgaatttagatatacatgcaaaatgtgttctttatatggtcggaagcttaccttagaatattatccatctttgtgatacattacttagccacattgtgagaaaatcatggattctgtaatcggtttgatatcagtccatttaatgatgtataaactatgtttgtgcagtgaggcact

SEQ ID NO: 3048 - DNA, 530 bp, Arabidopsis thaliana
  Intron number 1 from transcript AT3G17205.1 (locus AT3G172 05) derived from phytozome v7.0 (chr-ID Chr3; pos 5873652 to 5874181)
agaagcagcagaactctgctgctctcaaaattcaggtttgcgattgaaaagccttttcttttgggactctgggattttatttgtgttttctgagcaatgtagaacgaacacagtgagtcattttgcaagatatgtagaacttttgagctaaataatgtttactttttatagttttgaggtttagttggaaattgaaccgacattttcctttgtagatgttattctaaatctccattgtcctcgttagatttagcctctggaacaaatttatcctgttacggtgtcctgcggtacaggtcttgtggatttttgttttgagtagtagtttttaagattgaactattgcgattacaaaatgtgagcttgagctgcaaatgcaacacttcaaagtgtttctttttttcttctattatgtggacaagtgcatttgttgtgggtaaagggaaaaagtttttcaatcatttatgctcctgatgggcatggtgctgactagtttttggctacagaaattctttagaggtcgaagatca

SEQ ID NO: 3049 - DNA, 553 bp, Arabidopsis thaliana
  Intron number 7 from transcript AT3G17310.2 (locus AT3G173 10) derived from phytozome v7.0 (chr-ID Chr3; pos 5911502 to 5912054 reverse strand)
agaaaatcttgttgactttgcactggataggcttggtaatgtattcacaatgtctttggctttgcattcaaaattcaaacatgttacaaagttacacctttttgtccgtgtctattcatggtttaacatattagaatttcttcttttcaggttattttttgagtgattagacctcgtgtacattgcaagaccaatttctcactattgcacgatattttttctttgtcttcttatagattaaccatctcttcatactggaacttctgattgtatgacatttaatataggcaaactaaggaggcttatagtatattataactctctgaaaagagaaataacatttatgaagctgttgtttattaatgttaaagtggaaaatccattccctgtgaccgtattagaaacttgtaaatagtttctaaaaaattgatacttatactattcaaagctatatagaaacttagcatgcagatagcagctatcatttggcctatccccaaatcctttcttcatgattgtttgttctgtgtgataggtaaagacacaccaattg

SEQ ID NO: 3050 - DNA, 675 bp, Arabidopsis thaliana
  Intron number 1 from transcript AT3G17420.1 (locus AT3G174 20) derived from phytozome v7.0 (chr-ID Chr3; pos 5961312 to 5961986 reverse strand)
aaagaagaaacagaggaaatttgttcataaaggaggtattgtgttaattagaatcgaaatatctttatttttgaatctctgtagtttcaaaagttcaaggttcgatctttgtttgtgggtttgccttggaagcttataagtttcttacttttttttctgggtttcagactttttagcttcttacagttataatatagctcacgtgatctgattctgttgtcggaatagtttctgaggttttaaagtgtatgacttttgtatgattcagaagttgatatgtttatggaacttgtaaatttttacagcccaaaccttttgtttgtctcatctcattggtatcagatttagatgttcttgattttctcaggataagattgaatttcttatatgctctgcttttttcactttgctctgtttggttctgttgcttttagctccttttgtgatcaaagcttatgtttttggattatgattagactaaaccccttgttggacttcttcatttgattaatttttccaatatctttagagtaagatctgagaattgactatagcattcaccattagcttctgtttcttcctctttccactgatcttttaggttcttgataacattgataatccatttcaaattctgcaggtacatatatacacatacaagtctctgtgaaatat

SEQ ID NO: 3051 - DNA, 293 bp, Arabidopsis thaliana
  Intron number 1 from transcript AT3G17611.3 (locus AT3G176 11) derived from phytozome v7.0 (chr-ID Chr3; pos 6025127 to 6025419)
gtgaggtctggttcaatcctcacctcatcttcaaggtaaaccaatcttaataaattccttcattcgccaagagaaattgattgcaatttgaccgatttcgatctgaaattcgaatttgagtttcctgggaaatttgtaccaatatctggagaattagggattttgttcttcgatatctaattagatcattcttgattgattaattctattctctgttaaagtttttttttttaatcttgatgtgtatttgttgaacagcataaggacttgaagcgtttatttctatcagcgtt

SEQ ID NO: 3052 - DNA, 795 bp, Arabidopsis thaliana
  Intron number 3 from transcript AT3G18010.1 (locus AT3G180 10) derived from phytozome v7.0 (chr-ID Chr3; pos 6161612 to 6162406 reverse strand)
cgacacgcaaccagaggtatatatctctatttatacatatatttgtttctaaattgatattattttatgatatgtattatgtatatatgttgctcatattctgtgtttataatggtcttggggtttctattacatgaaagggagtgtaattaaggattgagggtttacatatataattagcatatgattacaaatagaatctgctagctaagaataagtgaattcctttttggaagtttgggtaagttattgaaagaaaaaaacaaaaggcagagagatgaggcggtggaaaagaccaagaagttaatttatggggaacttcaaaataagtatttttgtagcatatgcaaaaatacgtatattcttagcatataattatggttttattttgtttgaatattagtagtatctttttaaaaagattattgaattcatccaaaaagctgcagagactttcctttctgtcggcacagctgctacgtacgatcgatcctttagctctgtgtcttcttgtttttgctgaatttccataaattaatgtgctttttcactccaaacacatgcttgaaaagacccttttgaccctggtctttaacggtctcattcttcttcacccctgtccctatctggaattttgttttaagcataaagtttgtcgctttgccaaattttgacttatttgttaccaatttttacattttccgatgctaatttgactaatttcaacacatcttgaatgttctttcttttgcataattagaaaccttcccgtgattatcatctggaggagccagc

SEQ ID NO: 3053 - DNA, 417 bp, Arabidopsis thaliana
  Intron number 2 from transcript AT3G18090.1 (locus AT3G180 90) derived from phytozome v7.0 (chr-ID Chr3; pos 6195375 to 6195791)
cccaagttgaggtaactaaactaacaaaatctttgtcgaaattaagtaagcttgtctggatttgatgaatgatttcccttgcttgaaaactcagaaaggccagttaactatcactttctagttcaacattatgcaatatgtctatgtagtcgagagtggaataccacatggtatgaaatataaaagaaaaacatcttaagctttttatttatttagttcttccccattccctcactgttctttaattgagtgtttcatgcttgtgtgcaatgactcttgtacagtcaaagttttgatgatgtttctgttttgctgtccatgtatcttattcttgtaaatgtagtttattgtctaactgcatcttcactttataaattactaggtgttcaaaaaaattgttattaaacacgacaaatt

SEQ ID NO: 3054 - DNA, 537 bp, Arabidopsis thaliana
  Intron number 1 from transcript AT3G18100.2 (locus AT3G181 00) derived from phytozome v7.0 (chr-ID Chr3; pos 6201120 to 6201656)
tattcgtaggcgattctctgcttataagaatttcggtgagcacaattttgaaatcttatacttgttttcttttctatttgcgttaaagctactgatttgttagataatgtttctgtgttacctttgcaatgttcgttctatggttatctgaagactctgcctcaactgatagttttttgctgatggtaagattaatttgagttccttcagtttcactattggaagctagttgttataaggtgtgaaaaatgcagactttttcatcttgttatttggtttttaacagtctatttatgcaatatgtattgtccctgatggaataagttagaagctctctgtgcttatgtttgattcttgatatgatgaattcatgatgctaggatgatattggtttgcttgtatggtctctgacgttaattcccattagttcttcttatttggtttgcttgcttgtctttttatccagtgttttaagtggaaaatatgcttatgtggtcattttcttactatttttctgcagattcggaaggaaaattc

SEQ ID NO: 3055 - DNA, 537 bp, Arabidopsis thaliana; identical to SEQ ID NO: 3054
  Intron number 1 from transcript AT3G18100.3 (locus AT3G181 00) derived from phytozome v7.0 (chr-ID Chr3; pos 6201120 to 6201656)

SEQ ID NO: 3056 - DNA, 606 bp, Arabidopsis thaliana
  Intron number 2 from transcript AT3G18410.1 (locus AT3G184 10) derived from phytozome v7.0 (chr-ID Chr3; pos 6323764 to 6324369)
ttgtgtgcctcattgaggtaagaagctggctctgggtttatgtttctcgaagcattgtgttgattgtttaatttgctataatctgaaagaaaacgtatgacacatttggcatttctaggaggttaattttcgatatgactttaggagccaccatgcttgtgtttactagagtatgttgcattgttgctagttaatataaggaaagtcagccatttgaatcattgtctttaaggcctattaagtgttaagtgactagtaattgtagaaattgttaaggaaagaaactataatcggaagtcttataacattcactcatattgaggtagaggttgttaatagttatcatttttctctccaccacaaagttaatcctagcaacattggtacaataagctgaggtatgaaacatattttgtacccaacttgtggaggaagttatacatgtgttaagtttaggtgaaacctccactgttatgttatgaactgagccaaacgtggaattcaaactgctgtacgctattggttcttgtgcacaaccccctgcttgtttcactttcattacgagcttggtgattcaaaggctcttccttattttttttgatgcag

SEQ ID NO: 3057 - DNA, 399 bp, Arabidopsis thaliana
  Intron number 2 from transcript AT3G18670.1 (locus AT3G186 70) derived from phytozome v7.0 (chr-ID Chr3; pos 6425255 to 6425653 reverse strand)
cgtttcctagcggtacccgtcttgcattttggcaacggtggatatattcttgtgggtatacttaccttatgctttaaaatagatataacgttttttgttattaggaagtttgattttattaggctttaattttgttgatggtttttctcttgaaggtattcacatagagaagattaataaccctcatgaagttaataatcaccatcaccaccatcaatataggaattcgcaggatcataattcgattcaagagaagttgatgaaacacctcaaatatctttgtaagcagtaattaccatcccaaattgttaccccctcattgtttttgtttttatcaatcttagattaaactttctattgacagttccacgcataattagacgtgtatacaaactaaag

SEQ ID NO: 3058 - DNA, 421 bp, Arabidopsis thaliana
  Intron number 3 from transcript AT3G19040.1 (locus AT3G190 40) derived from phytozome v7.0 (chr-ID Chr3; pos 6574027 to 6574447 reverse strand)
tatcacttatagaggtatgtgatctgcaacggcttcctaattttgtttattctcaaaagcctttgaattttttgtgctttccattgggatgttaaaatctacaacaacaatgatttctcaagattttcagtatctcccgttcaattctaaaagccattaggtgtcgaaagcatgagaagttttttgtatgtggctctgtcttttcttggcaagaatttagtagatatgtatatttggtgcttctgaaatgatatacattattttctctgtttctctcgttatctctctgcattgttcttttctgtttgtaattcatcacttcttttaatgtaactagaatagctgagaaagttctatgaaaacaattatcatatgagactcttacatcatagccttctttggtacagacaaatacatatct

SEQ ID NO: 3059 - DNA, 403 bp, Arabidopsis thaliana
  Intron number 2 from transcript AT3G19515.2 (locus AT3G195 15) derived from phytozome v7.0 (chr-ID Chr3; pos 6770333 to 6770735 reverse strand)
tgaatcttacggtatgtacatagtctttttcacataggctaattatctacaaggacatggtagatttagttgcgcttgtgtatccacaagggaacttcagtgctcaaacttagtttcacttaggatagataagctggattctctttcaaacagcagaatcaaaagaagtttttttttaaaaaaatctgtgtgtgttgttcttaactgtttgttttggagtgacacatgactttgaaaggagactggaatcggggccaattttttcttatttccaagaggatacagcctgattctgcacaattctcagtttcttggttgtgtgatattgttctttccttgaaaacttatcatgttcttcttatttgtaggtacgagttcaagccatccgcaagcttccactgtt

SEQ ID NO: 3060 - DNA, 545 bp, Arabidopsis thaliana
  Intron number 1 from transcript AT3G19860.1 (locus AT3G198 60) derived from phytozome v7.0 (chr-ID Chr3; pos 6904034 to 6904578)
ttcatcgtcctatttagggtttcgatcacaatctggtacttctcttaatcaaaggaatttttattttgattttgagggttttattggtttgaacttagctctctagctcgtgaaagtgttgttagttcgtcgtggaaatcaattccttccctgtgttcttcttcaacaacgtttagtaattttttcgtagatgtttaaatctctaacttgttgatagagatagatgttattattgccaaattaggtgtacaaaagaatgtggaattttctgtttgagattagcttctctagtaaccttctttgcaattcatgatgccaattgctaagtatgtaactatgtctggtatgtgagctgggatcatatgatacctgactatcgactcaaagagaattatgttaagtcaatcaaggcttagttctgaggctacagtgtgtgtggtcgatgtgctgttatggtggaattggatactaaaatatgtctaagagtgggactgcaatatgaccttcttagtttattcgatgttttggttgcagaagaggaggtc

SEQ ID NO: 3061 - DNA, 624 bp, Arabidopsis thaliana
  Intron number 1 from transcript AT3G19860.2 (locus AT3G198 60) derived from phytozome v7.0 (chr-ID Chr3; pos 6903955 to 6904578)
tcgaatctctccgtcgccgtcgattcttcccgccggtgaatctctgccttattgttttcttcaatttgatcgtcctgaattcatcgtcctatttagggtttcgatcacaatctggtacttctcttaatcaaaggaatttttattttgattttgagggttttattggtttgaacttagctctctagctcgtgaaagtgttgttagttcgtcgtggaaatcaattccttccctgtgttcttcttcaacaacgtttagtaattttttcgtagatgtttaaatctctaacttgttgatagagatagatgttattattgccaaattaggtgtacaaaagaatgtggaattttctgtttgagattagcttctctagtaaccttctttgcaattcatgatgccaattgctaagtatgtaactatgtctggtatgtgagctgggatcatatgatacctgactatcgactcaaagagaattatgttaagtcaatcaaggcttagttctgaggctacagtgtgtgtggtcgatgtgctgttatggtggaattggatactaaaatatgtctaagagtgggactgcaatatgaccttcttagtttattcgatgttttggttgcagaagaggaggtc

SEQ ID NO: 3062 - DNA, 740 bp, Arabidopsis thaliana
  Intron number 3 from transcript AT3G19910.1 (locus AT3G199 10) derived from phytozome v7.0 (chr-ID Chr3; pos 6927472 to 6928211)
agagtcatacttctcaggtaggctccttacactacagaaaaatcctttaattatcttgagctgtaaacctttttcagtttttctgcttgagaatatgaaagtttgaaccttttttcccccagtttgggagtttgtttagtcatatagtggccaaaggacaaagtcgtgacattgaacccgccattgtctagttatacatcttacatggctccatctacctactatccttctgttgtggcattagtttgtttcgttttcgtgatagtttagtccatggtgttaaccattttagaccggagacccagttagattatcctccctgtgtatggggtagttattgtttgtagttaagccagtcactggaatagtgtgccatggcccatgaataattattatgtagtcttactcagtcgaaattgtttggtatttggtactaggcgtacctaattattctcggtttatgctactggaatttttcacaactgtatgtctgtatgtttgaaggtcaaaatgcatttaccagagggtaattgaatcaatttagcattaactggtcactggtattggagatggttatgctcacaccttgaagtatgggccctcgctgtacacactgaactttgtggaaaaaaatatactgaaatttagaattgcagggtagagaatcatagaaacttaagcttcattgatgtgatttgaatcttcttccacttacgttctgtacgattaatttttgcagg

SEQ ID NO: 3063 - DNA, 719 bp, Arabidopsis thaliana
  Intron number 1 from transcript AT3G19960.1 (locus AT3G199 60) derived from phytozome v7.0 (chr-ID Chr3; pos 6949068 to 6949786)
ggtgctgctgattggctttgctctaattttggaaggtatttaaagccagggtcttgaagtttataatgggtttaagttttaactcttaaatcgaacaaatttcaaatatttctgcttttgttttgtttctcttttaatgaattctgatcaaattgagaaatttcgtaccgtcttctgtttggtttgtgtgtagtgtgacataggaattagtctttgtatctctcaagatttgagctaaatttgtttgctttttgtgaatctctgattaatttttgattgttgaaactttcagcaagaaagctcttaaatgtcaaccaggcaagcaagccttagatattttggtttcttctttgtttactttcatgtgactctctttacttatctcaatctctagatatttgtattgtttactccaccaagttaaacgtttcatctgcaaagtctctagcttggtctaacattgcttatttccttgtccaattttgattggggaacttcaaaacagtgactgaagattcagaaaaagtatttcagtctatgtcctaaagtattggtccccgccattatgttcatgaaattagatagggcttttgagtggggttcttcttcaaaagcttgatggaaaccaactatagattgtcatgtatgactagattgttttattttttcttcaacatttcccatttgagcttataagtttcgttctttcttgcagcaaa

SEQ ID NO: 3064 - DNA, 961 bp, Arabidopsis thaliana
  Intron number 4 from transcript AT3G20020.2 (locus AT3G200 20) derived from phytozome v7.0 (chr-ID Chr3; pos 6986072 to 6987032 reverse strand)
caagtgatattgctgtccaggtattattccagctgttcgtttcttttcttttttttaatccagtaatttgaagattaggattgctacccttctatcttctgcattttcgtgaactgatgaggctgaccatttttttaattcataaactgtaaatggctcgggggattttataatttcaccagaacatgttttcttatgtaaaattgaaacttggaatagagaaggagttctttgatataatgtgttgcattttccctttggtgggagtatgtttagggtatgatgactgtttttcttattgtctaaagtgaggccctagattgaaatgttcacagttaagttgacccaggcttcgtttatatcaattagttttaatctaaaatcttagtctctgaattgcttcatggtttgattacctttgacgtcagttaaatcaatgaagaaaaccctgcaaatgtttctgatatttttggtcctgtgaagctgagagaatttataacgaatctggtgctttagctctgcatgtggttttcatttggtttttgttccctataaaaataaaagtggtttgtgaaatcttagtttgttgaaaggattccactcactctttttttttgtgaacaccaccaggcaaaggaagttgtgaaagccaacggtttatccgataaggtcattgtcttgcacgggagagtggaggtaatatattgtctatgataaatgcgaagttggtcctccatgttatatcccacattgttcaaattgatatttacatcatttgcaaaaaggaaaattggtgtcgttattcagaaaggtctgatataaaatgaacgtaatggagaatttgagatagtctttacttctgcaccgctcttgagatagattggttgggtgaaacatccaagttcgtatgcaaacactcctcttctgtagtaactcttcttttgttgttatgttcttcagg

SEQ ID NO: 3065 - DNA, 665 bp, Arabidopsis thaliana
  Intron number 4 from transcript AT3G20020.1 (locus AT3G200 20) derived from phytozome v7.0 (chr-ID Chr3; pos 6986368 to 6987032 reverse strand)
caagtgatattgctgtccaggtattattccagctgttcgtttcttttcttttttttaatccagtaatttgaagattaggattgctacccttctatcttctgcattttcgtgaactgatgaggctgaccatttttttaattcataaactgtaaatggctcgggggattttataatttcaccagaacatgttttcttatgtaaaattgaaacttggaatagagaaggagttctttgatataatgtgttgcattttccctttggtgggagtatgtttagggtatgatgactgtttttcttattgtctaaagtgaggccctagattgaaatgttcacagttaagttgacccaggcttcgtttatatcaattagttttaatctaaaatcttagtctctgaattgcttcatggtttgattacctttgacgtcagttaaatcaatgaagaaaaccctgcaaatgtttctgatatttttggtcctgtgaagctgagagaatttataacgaatctggtgctttagctctgcatgtggttttcatttggtttttgttccctataaaaataaaagtggtttgtgaaatcttagtttgttgaaaggattccactcactctttttttttgtgaacaccaccaggcaaaggaagttgtgaaagccaacggtttatccga

SEQ ID NO: 3066 - DNA, 545 bp, Arabidopsis thaliana
  Intron number 3 from transcript AT3G20280.2 (locus AT3G202 80) derived from phytozome v7.0 (chr-ID Chr3; pos 7072279 to 7072823)
gtacttaacggtgcttctcaagggactcgtaagtcctcatatccccctttgttttgtatagatgcagttgtagtgataagattcttttagtctttgatttggaaattacaacacttttagtatgggtagggtattctggttggtttgctgttttgctttatacgataggacttgtaaattttagtgaaggtaatcataacagccaaatacagataattggctaatcactaggcttgtagctgagtaactagccctcatgcttagaataagtataccttttgtgaatactatcgttttcttttgcaaatcttactggtcatggtagcctttctttttggttaggtttctatcctgagttgctaaatttatatgttatgtttctagttctttaatagctttttcatagttgattttgagtttgtttcatatattacttgtttcagcagtttcttccgcgaattattatgctgaaccctggtctgcccaacttccatccaccatatctttcagtactgcaccagataagaaggttccaattcaaagtt

SEQ ID NO: 3067 - DNA, 693 bp, Arabidopsis thaliana
  Intron number 1 from transcript AT3G20395.1 (locus AT3G203 95) derived from phytozome v7.0 (chr-ID Chr3; pos 7113002 to 7113694 reverse strand)
tttgttgggctcattcatcttcattcttgcttccggtaaatttacaagttatcttcattttcttatcatttaatgctgtttgttcccctttttttttttgaattctatagatgcttgctaaactaacgtacttttaaagatgaaacttgagacgccatctcattggttttggatatatgtacttcattgacatgtacttacctctcatatatgaatccacacatatgtatactatatatagttgacaacttgacatgagtgtttgataaaagaactaaaacatattaacaaaaagataaagagaaaattcttgaatggatgcgatgtgtcaagcaacttctacttaccataagagtctgatgtgggatcttcttttccattttcttagttttttcctttaacctgaattacttgttgtctatgcattccttaattgaatttaataacttatcttatgtatggattctctacccttaaattctcattctttaagaaaagtatatctttttgtcaacaatatcttcatccaaattcttagaaaaatatactttctttttggtatgtatcattttaacatatcacattgcattgttttcattccacattccatgttaaacaattttataagatcacgaaatgtcattaattttgaatgtagctagtgttgtggtagccgccattgtaggagccatc

SEQ ID NO: 3068 - DNA, 403 bp, Arabidopsis thaliana
  Intron number 1 from transcript AT3G20475.1 (locus AT3G204 75) derived from phytozome v7.0 (chr-ID Chr3; pos 7143558 to 7143960)
gaagacactgaaaccgaaccacaggtatcttcgattacatattctctctaaattcgctttctcttctgattttgccgttcgtcgtcactagagagagagcgattttatgccgattgtgatcgatgtgtaaaaatttgatatctagttagggattattgaataaaaacctcggatctattgttgaatcgatctcaatagtacagacattgataaaccctagctgtttccccttttcaacctcaaatttgattaatcggaagtagttgttccgccgatttgatcccagaaacactaatatctgaggcactgtgcattaacacagaaccaatcctacttttactctcttgcttcgtatgtgaaattgtgaatgtaccaatctgttttcaatgcaatgcaggtttac

SEQ ID NO: 3069 - DNA, 550 bp, Arabidopsis thaliana
  Intron number 1 from transcript AT3G20490.1 (locus AT3G204 90) derived from phytozome v7.0 (chr-ID Chr3; pos 7155549 to 7156098 reverse strand)
tgaagagttctcttctcctgaggattttcctacgggtaattacaattttgagcttctgcttcgtcttttcgaatatgggtcttacttaaactgctggaataggaatcgagcattgttagatctcttattaaacgtcaatgagctgattagcctatctttcattcattaggcgtcttggatcgtgaacacattgatagaaagaccatcccttagtttatcatagagaacttaaaactgatggatttaggaagcctgatgcaaaccctcttctatttagatatcaggatcagtttgttgtggctcaaagatgaaaacttgattgcagttgttgacactaataggtagactagagtgggtttggagccttcaggctgagaatttgttatttataaggacattgattaagcttcattccactcaaactggtttcttttggatttctttagtgtaatattttaagtcatccatattgtgttggtttcatcttggtataaaacttgtgttgcttcatgcagacgcaccggcctcaacaagaagtcatttttctagt

SEQ ID NO: 3070 - DNA, 540 bp, Arabidopsis thaliana
  Intron number 1 from transcript AT3G20500.1 (locus AT3G205 00) derived from phytozome v7.0 (chr-ID Chr3; pos 7158042 to 7158581)
gaaacaaaagtcctcttctgtacccgagcaggtataaattagaattccttaagctctcctctgttttgatgattcttgttccgaaaaaatcatgtttttaattgtctgaaatctttctattcttgtaactgcatgtgggtctctgtttgttttctccgaaagatccgatttttgggtttatgcttactccagagaatcccatttgctagtgtcccgaagtcttctcaacactagttttctaatggataaatctaatgactgtgtagttttgatcaacgccattagtaatcttcactaatcactactttgggtaaaaatggccttttcctaaatgattatttataacaatggagatgaattgtgttgtttcattctgaagaaaacattgatgcttgagtgaaattgtagctatggagtgcatgatacagttgatacttgataatgaacatcaaaggttctgtttttagattcatttggtcctgtttcttatactgagattcttacctgcaggtgcatatctcattggctggagataaacat

SEQ ID NO: 3071 - DNA, 798 bp, Arabidopsis thaliana
  Intron number 1 from transcript AT3G20880.1 (locus AT3G208 80) derived from phytozome v7.0 (chr-ID Chr3; pos 7314182 to 7314979 reverse strand)
caagtaaggatatattcattcaataaacctaactctaattagttgctattttccataaaatgattttcaagttttgactttttgttcttgaaaatagattagttttcttatttgtatctacataataattcttgttatttatttatttttcaaatcttcatcatgataaaacccctagtacacactacgacttttcataataattattactattataactcgagaaataacttttaatttgatggtacaagtcatcagctgtacgatggattgatggctaggaaaagatcaactaaaatcaatcaataggtttaagatcaagaagatcttctttaaccaaaagtctttttttcatactgactgtttctaaccctaaaatgtgatcagtcgtccttttccatttttattgtctctcttgatttttgcgcagttccactacacaacactcactaccctaaaaagtaaaagaaaaagaggatgataaatgtctagcagattgtgttgtacctctttatatcttcacattataacatatatatattttatgattgtttatattaattaaccctaaacaatcattcagctctagatctttcttgtcgtaacgtctaaaacttttccattaactttatatcttcagaatatttccgaggatcaacaatatagaagaaaaaaacgaaatttacagtgtgaaatctgaaaactgaaatttccattaacatgtttcaagattagtttggaatttaatctgaaagttctttagatatggtctaatgtattgtgatgaaatgttattag

SEQ ID NO: 3072 - DNA, 368 bp, Arabidopsis thaliana
  Intron number 1 from transcript AT3G20910.1 (locus AT3G209 10) derived from phytozome v7.0 (chr-ID Chr3; pos 7326466 to 7326833)
ccgtggacacctccgagactgtctccgattgagtatctcgaaatttcagtcatttatgattgcatgaacctgcttatacctttgttctagggtttttgttgtcttgttcccatctctcaatttttttttttcaaagttgcaaaattcaagtttcgactttttgttaattctgtcttcttacgtttctgggttttgattgtttcttgttactgaaatcctttcgtggagtattaagagtcaaaattgctgaattttattgaaattctgttgttttgtgttggatgtttttggtcttgtttcgatagaattggattatgtagttgtagattcatcactaaatatcggattttgaatagggaattgaagac

SEQ ID NO: 3073 - DNA, 498 bp, Arabidopsis thaliana
  Intron number 3 from transcript AT3G20970.2 (locus AT3G209 70) derived from phytozome v7.0 (chr-ID Chr3; pos 7349023 to 7349520)
aagctgctgctgccaaggatactgccatcagcgaggtaaaacccctcccgctctattaccctcgtgatcgcttcctcactttcccattagttagttttgtttagagtgtgattttctggacctcttggattcttcagggtgattgtttcttatatagtttgtgttggttgtctcgtgcatgattgaacatcttcttgagcatttgttgagggattggagagtgatagtttgctgtaaactttatatagacatgatatacttggttatggaatttatcccagttgctttaatgagctgatgaatatgagttatgattttgaagtagtagctgagcgtgacaactagaatgagagatgtcattttcccttacttatgatgttctgtttgattatggattaacgttctgcaatgctctccaaggttttggtagataagctaatggtgacaagtgtaaatgttgctatttcttgctcattggtgaaacttttgtgattcagg

SEQ ID NO: 3074 - DNA, 699 bp, Arabidopsis thaliana
  Intron number 2 from transcript AT3G20980.1 (locus AT3G209 80) derived from phytozome v7.0 (chr-ID Chr3; pos 7356603 to 7357301)
agtgtaatcttcacagcaagaagagaaaaataacatcatatgaaacttagttttagaggcaggacactgggctagctattttattaaataaagtagacaaatcgatggattgtgttcggctaattcacttttcattttgtttatttttatcggtatgcggacttgtagggtttatggtcgcgtcttttatagcttgtggtatgtagctcaatggttgcttcattcaaatgcattgcaccatcttgaatggttaggtctaataacaagtcaaaaccatcaacgattcttgttgaccatatatttgtggagagaagcttgcgtgtggattacggttagtcgatttaaccggatcaataaatttaaactgaaccaacacttaaaaacgttatttggctttcttctaaagaatatatgtttaaagaaacatgcggatacgacggcggcgaatattcagtttcgttgatttcaaaattcaaattataataggatttagggtttgtagtgatgcaactatgaatataaataatcgcttctccaagataaataaaaacagaggaaatcctatgtaagtaccacgaggagatggtagttatgtatgtggagacaccgactctacaagagctcatttccgatgaccttaactttgaagtctggtcggcgatgatgaaaaccacacttattcagaaaggactttagcga

SEQ ID NO: 3075 - DNA, 645 bp, Arabidopsis thaliana
  Intron number 1 from transcript AT3G21175.3 (locus AT3G211 75) derived from phytozome v7.0 (chr-ID Chr3; pos 7422187 to 7422831)
ttcattcttctcgcttggattcctctgcacaaaaggtacccatttgatgtcaattttggtttattgttttgattgccctgtccaagtgacaagtctttgtatgtatgatataggtagtgggttctagtttgtagatgaacttgtcgaatttggagggtttttagttggaagcatttatatgtgggatttggaattgttctgtctatttgttcttagcttaaaggttgggacttagcttaggacttatgagcatgagagaaggagactttttttccaattcgaatctgattgatgaaactttttttactggatttgggtagatattgttacgttttaaggtagttgactgttgttagttgttgtttactcgagattagattattgtcatctactcttgttataaaagaagctcctttgtactatatcagtgctgataactattaatgaagttcctttcccttaggtggagatagtttctttgtatttgcaaactcaatttatgtgagaatatatccaccattattgagtttcttcaacctataccgtctctgacaatctcgctttttcgttattaagaacgttccagtcttaattaatgttatcttcctttggatgtaattggtaacaaattgcagaaaaaagacc

SEQ ID NO: 3076 - DNA, 743 bp, Arabidopsis thaliana
  Intron number 1 from transcript AT3G21290.1 (locus AT3G212 90) derived from phytozome v7.0 (chr-ID Chr3; pos 7482679 to 7483421)
cgtttcctaacaatagcactgagaatgtgagtttctactgaattctaaaatctagagatagaggatttctctagattgagttgaattgcttcaagctagttgctcttttttgttggctgaatcttgaatttgcttcctttggtagtttatacccctcgaacatattggcaattcactggaatcaaggtaccctagataagtgaaattggggacaattgttcctatagaaattagatggtaatgtgatattggacaagaacccaatagtgtttggcatctctatagctgttcctatcctgtggaaaaccttttacgccattctaaattatagccctggagaagattatttgttgcatagaattgttgatgaagattccgttgctacttgggtgactattgtatcataaattccttggccaattctttgtagacgttgacttgcttattggttgagcatgtattgtatggtatgttggtttactcattgaattgctgctttggtgtctctttactctactggtaactttgtttctttgtataactgtggttttgccggtagtactggttgtcaattgaatttatcaacgcccttctgcatttcttttggtcatttgtctcccactgcatctgggttttgttgttactatgcctttccttcaggtatccttttgggtttttatttagttttttttgaattttgacaccgtgaagctgttttggatcttgatataaacagataatta

SEQ ID NO: 3077 - DNA, 352 bp, Arabidopsis thaliana
  Intron number 2 from transcript AT3G21340.1 (locus AT3G213 40) derived from phytozome v7.0 (chr-ID Chr3; pos 7514888 to 7515239 reverse strand)
cgatattatttcagcggttcaggccaaaacatacggtatgaatcacgccctttcacttaatcatgaacaaaatttggtttctggttctgtttgatccgtttaggataaactttttaacgaagattatttgttttaaacctttaataaatttagtgtatatattgaagtttaaagattataattacttattaggtttttggttgcacaaaactcggattgggttcatttggtatagacatttttctagcatcttggtttattaatatggattttgatttgtttcagtaagtttgtttttaagtaaaatgttagtctttaatacatgacaaaaatatttttgataggtaccctg

SEQ ID NO: 3078 - DNA, 282 bp, Arabidopsis thaliana
  Intron number 2 from transcript AT3G21370.1 (locus AT3G213 70) derived from phytozome v7.0 (chr-ID Chr3; pos 7526965 to 7527246 reverse strand)
aagcctgtgggacatctacaccaagaaatttccacgtctgtctcttttcttttctatttatttcgaccacgaagcatatatatgtccacttattagttgtcggtttttttaaaacatgcattcatcactcgtgtgttattatgaatttgattccaagaggtattataaagagttgttaacgaccagtattatagtaagtaactgtgtagcgaaccagatatctggtgataataaataacattttgtactatatttaaactgcagatagagttaagaatcaca

SEQ ID NO: 3079 - DNA, 452 bp, Arabidopsis thaliana
  Intron number 2 from transcript AT3G21380.1 (locus AT3G213 80) derived from phytozome v7.0 (chr-ID Chr3; pos 7528602 to 7529053)
accatcacggcactcctggcaagaaatctgacggcgtaagggtttaacaatgttgtaaaacctaacttttcacataaaagatatttacatgagtagcaaaaaaaataatctgacggcgttagctagtactcttcacgaccttctccatatatactacatctttcaatttatggatgttgcaatgggtttagtttggtcggtctcggtcttgtggtcttgactcttgacgggttgccttagtttgattaactgacacttaattactaaatgaaaagaaaaaatgatgggtcctgctaggtctaataatagcatataaaaatgaattagggctaggaaaattttggtctactatatttttgtttataatgatttatttattgtatactttgatcgaactaatgtaatatatttgtttttgtaggtgagcttgagcccagacgagtacataacag

SEQ ID NO: 3080 - DNA, 963 bp, Arabidopsis thaliana
  Intron number 2 from transcript AT3G21960.1 (locus AT3G219 60) derived from phytozome v7.0 (chr-ID Chr3; pos 7738083 to 7739045)
ggaggaagagttttgagtccaagctgtaattttaggtatgagctatatccttttgtagaaaattaaggctattttaatgagagttatatatatatatatatatatactttttgtgtttgaataagtattttgagcagataatttttttcttagctcttttgcaatttagtttgtataacacttttgagagtatttgcattagatgttcaaccaaaaataaaaagtacgccctagctagatatattgtccaagatggcttacggttttgtgtatgcatggtttgttattatctatcaaccaaattaattaaaaaaaacaaaaatcaatttcatttcgtcttatgctttaagagttcatccgatatcatgcatccaatccattatctgctaaagctcaggtctgcttctattttaattttgttcatatctagccaatctttgtgtgcattatcggaacccattgttcatgaactgcaattggtacgatatgtctcattgttgctatggttgttcgaaagctttataagaaccttgccacttgattcacctatggtcattggtcttgaaataataagattgattattgaagtttttagaccgaagaatatcggcattatgatcccgcctctaaggagcggtgattaccgatgttcttccaatccctcttgttcgttttatctgaatactaagaccaagcgattgcaaattaacaactttatgggtattattcaagaaacaagaagtttgaggaagaacggcattatgatcccgtccccaaggagcggtgattactgatgcttcctcaacttttcatccccttatttcctgataaccgagcccaatcatgtgcatattatcaacttcaaggataacgttctttcacctaaaagcttgaagctcaggtttggttacctttttcatgtgtcaagccgaagacaaactttgtgtgaaattcttaatctcc

SEQ ID NO: 3081 - DNA, 465 bp, Arabidopsis thaliana
  Intron number 2 from transcript AT3G21960.2 (locus AT3G219 60) derived from phytozome v7.0 (chr-ID Chr3; pos 7738083 to 7738547)
ggaggaagagttttgagtccaagctgtaattttaggtatgagctatatccttttgtagaaaattaaggctattttaatgagagttatatatatatatatatatatactttttgtgtttgaataagtattttgagcagataatttttttcttagctcttttgcaatttagtttgtataacacttttgagagtatttgcattagatgttcaaccaaaaataaaaagtacgccctagctagatatattgtccaagatggcttacggttttgtgtatgcatggtttgttattatctatcaaccaaattaattaaaaaaaacaaaaatcaatttcatttcgtcttatgctttaagagttcatccgatatcatgcatccaatccattatctgctaaagctcaggtctgcttctattttaattttgttcatatctagccaatctttgtgtgcattatcggaacccattgttc

SEQ ID NO: 3082 - DNA, 487 bp, Arabidopsis thaliana
  Intron number 1 from transcript AT3G22000.1 (locus AT3G220 00) derived from phytozome v7.0 (chr-ID Chr3; pos 7752169 to 7752655)
ctgccggcatctccggggtaacattatttactctcttcatatcatattaaatgttattttagccaaaacaaattgttttaaataagaaatattatgttctgtgattatttgtatacaacaatttatgtttgattcaagattttcttgtgcccaacagccctcaaggcttttaagtctgtccatagcgaccaattcaatgaccctagcgtacaatttatcaaattaggtaaataggaagggtaatgaatggtattgtttttttatgtctaacagattcttcattcacattttcaacttatgaaagcctattttctaatacagattcatgaattagttagaaagcacaaacgcacaatgattgtttcttatatatttatatttatttaataatattttagctattatttcataatttaatgtattaattattttaacacgtcaaaacatgaattaattatgtaaaatgtaaacgacagcttcgtaggcg

SEQ ID NO: 3083 - DNA, 704 bp, Arabidopsis thaliana
  Intron number 1 from transcript AT3G22030.1 (locus AT3G220 30) derived from phytozome v7.0 (chr-ID Chr3; pos 7759629 to 7760332)
ctaccgccctcgccggggtaatgccactttaacatgtttgcatatgtgtagtctatatcttgtcgttcgctataaacaactaccttaactaaagccaaaagaaaattgactataagaaaccaaaattcaggttagagttagaattacctagctgaaacaaatgtgagttggtttatacacatcaaccgataacaattaacataactgttatatacactatacaaccaaatttgtggtgtgctaggtgttggcttggtgttggcaagattatttacccatttggaaaagattatttacgtccaaaactttcttgttaatatatatttatatattaagtcatctctctttaagtcacaactatttgatttttcgttaggtgaaaacaacaaaggtgcaaggttatcttgtattgaaatgttaagattgctttttaacttgatttatttatcaaaacatttattatgattggtatttagtatttacatatcatccagttagagatatcttctatatcatatcatttggtagattattacgggacaacttttaggtacatatgtcaaaaaaaacttttaggtacatttcgccattttgcatacaactgatttcgtgtacatctcacggttcctacaaaaatatttatgaatatgtatatgtatattacagtttcgtagtaggtgtccgagaaacaaaggtggaataat

SEQ ID NO: 3084 - DNA, 636 bp, Arabidopsis thaliana
  Intron number 3 from transcript AT3G22235.2 (locus AT3G222 35) derived from phytozome v7.0 (chr-ID Chr3; pos 7854730 to 7855365 reverse strand)
gagacaaactccaagggcgtcaaccccgaagggtatgtttttctttcattttaatctcttcatgtgattatagatcatgatggttctaattattcgttttgcaagatattcatacgacgctcttattttatttttaatgatctatcagtatagggtttcaatttcttgtgtgtttctctgttttcctgaattattatggagtatatctaattcgaatcaaactattggttttgaactgcaaatgttttggtaaaatttgggtcaacattttctagtcaagatttgttttttttcccaacattttagttgataactagtgtttaatttcttgcaattttgttgtttgttttaaattcacccttgacttacattttatttccccttcaatgacaaaagataatataaaaattcaacttcagagttgtcagctaaaagtttgttttaccaactgaacaactaaaaagaaattaaaccatgggatattacgtacgttgctaaaatactttttctttatttaaagttttcagaaaatgttactatttcaaatataaaccaatatcttccctagtccttagacaagaatggtacgtaacacttaataaatttggttttgtctattggcagttgtgctgccat

SEQ ID NO: 3085 - DNA, 619 bp, Arabidopsis thaliana
  Intron number 2 from transcript AT3G22240.1 (locus AT3G222 40) derived from phytozome v7.0 (chr-ID Chr3; pos 7863822 to 7864440 reverse strand)
gtttttggaaagggtatgtttttctttcattcactctcttcatgtgattatagatcatgatggttctaattatccgttttgcaagacattcatacgacgctcttattttatttttaatgatctatcagtatagggtttcaatttcttgtgtgtttctctgttttcctgaattattatggagtatctctaattcgagtagtcaaactattggttttgaactgcaaatgttttggcaaaatttgggtcaacattttctagtcaagatttgttttttttcccaacattttagttgataactagtgtttaatttcttgcaattttgttgtttgttttaaattcacccttgacttacattttatttccccttcaatgacaaaagataatataaaaattcaacttcagagttgtcagctaaaagtttgttttaccaactgaacaactaaaaagaaattaaaccatgggatattacgtacgttgctaaaatactttttctttatttaaagttttcagaaaatgttactatttcaaatataaaccaatatcttccctagtccttagacaagaatggtacgtaacacttaataaatttggttttgtctattggcagttgtgctgccat

SEQ ID NO: 3086 - DNA, 342 bp, Arabidopsis thaliana
  Intron number 2 from transcript AT3G22370.1 (locus AT3G223 70) derived from phytozome v7.0 (chr-ID Chr3; pos 7907453 to 7907794)
aatctcttcgttggcctaccgatttgttcttccaggtactgttcttcttcttcttctcccatggaaaatttctttacattttttgccaattttatgatatggaaatgatccaaatctgatatcgtcattgattacgtgtaaccttaaatattttatttcattctttttatagcaactagtcaatattttgtttgattattttggaatatatgtgtttattatattaatcacttcgttagtgctttggattcttggttaattgttggttaattatcattatgtaatgaattattggttaattgttggtctgattgtgatattgtgaattaaaacagaggagat

SEQ ID NO: 3087 - DNA, 746 bp, Arabidopsis thaliana
  Intron number 5 from transcript AT3G22410.1 (locus AT3G224 10) derived from phytozome v7.0 (chr-ID Chr3; pos 7934185 to 7934930 reverse strand)
caagtaagtaaagccttactgtttccaaatttactttttaatccctagcaaccttccaaatttctatgtactaatccgtgattttgtttggttatttggttttcttattttgtggattgagtcatgtcgggaccaaaaacactcggacatgtatttgcatttatttgatgtccgatttgtccccttatgtgtcaacgtcaatttcttctgttaattatccactaactaatcataatttagttgtcttgaaaagttttaagtttttgagtaattaaaccagccaaaacgacaatttccagtctgaattttatttttgattccttatctatatttatacgatttttcacctttttttgttactaaaataatatttttaaatttgagaaaagcttaactgactaacaaatattatttaataattggcgtataccttagtttacaaatacctatatttttacaatgcaaaagatcaataccttagtttagtatcacgctattaaagatttatgcttttttacgttctgcacaaactttattttatttttttgaatcaaccttttcgaattttattcctttatataaaaatgtaagtacattttattctctgcaaaaatacaccttcaaaaaaatttcaaacccgattagacaatttaaatatttgtacaaaatcgattaatattcctttttcttaataccatacaaaaaaaacaggctttttcagatcatcctctgcatttgcgaatttg

SEQ ID NO: 3088 - DNA, 321 bp, Arabidopsis thaliana
  Intron number 1 from transcript AT3G22760.1 (locus AT3G227 60) derived from phytozome v7.0 (chr-ID Chr3; pos 8044650 to 8044970)
agatcggtactccagtttctaaactcaaagtcgaggttttttattctatatctatctcaaagtttcatgctttattagttttctcgttgttcctctgtttctgtgatgggttttttggtgtctgttcgacttttcttcattgaatcgtacggttttgtgtaaagcccttgtcttaatttgttgcattttagtcaaagtttcagtttttaatcggttattggaatgaattgtgttgaaagttatggttttgatgattggagaagaatttgagatcaaagtgtttttttgtgcaatgcaggattcaccagtgtttagttacat

SEQ ID NO: 3089 - DNA, 718 bp, Arabidopsis thaliana
  Intron number 1 from transcript AT3G22790.1 (locus AT3G227 90) derived from phytozome v7.0 (chr-ID Chr3; pos 8058002 to 8058719 reverse strand)
cattatcattttgcatccatttctcagtttcatcggtatgtttccttctctaatgatctctctcggctctcacatttttcttatgatatgatttaatcgttcttcttctatccattttggttttagtatttgttctgacacttcacttgtaagacatttggatccaatctactcaacgagtcgtttttgtgtctgtctctcattttgctttaggaaagactcaatcttttgagtttctgtagctaacccatttgctcatttctggtaaatttgatctgataaaaaactcgacatgttctgcatttttttgtccctcttgatcttgttggagttaaagtttcactctttctataagtagtgtgtttgtacatttgttccgcaatggtttgctgattagaaaatctgcctgcagtttcctcactaaaccaaaaaagtcttgatttttttccatgttgtgtaatctcttgatttacaagtatttggactaatacttctctgttaagagattctttgtctctgttctgttggaaagtaattttggtttgctttctctgtagattactttccagttagacctaaatccggatatttgtattgctctaatgattccacttaacttgagtataaaattttgctttaagcctaatcaatttaattgcttattgtgtgacattgtttcagttttgtaggtgaaaagcctgacacatagagaacaaag

SEQ ID NO: 3090 - DNA, 855 bp, Arabidopsis thaliana
  Intron number 1 from transcript AT3G23470.1 (locus AT3G234 70) derived from phytozome v7.0 (chr-ID Chr3; pos 8414710 to 8415564)
ccattgtgtcccaactcccaagtcagagaggtaacattgctgactacatttctcttcccttttttttttctttctttctcttcaatattgtattatggatgtctttgcacactctccataactccattctcctattacactcccttttctcgttaaggaccttaacgtatgtgcttcatcagtagctctagggatctaacagatacgaatatcaaggattttcaggatatcctgatccgatttttaactattggttccggatccatgcttctggatttccggatttcggatatccgtccaaacaccaaaatctccgtaggggtccgaatccgtaaaaataacaatttatttttaattaaaatagtaataataatgataaaatttaatttcatataatataattttagaaaaataaaatctgaaaataaaaaaataaacaaaataaacaaaatctgttctaaataattattaaattttaaatatcaatacattttaaaaattattaatataattaacttttaatacaattaatgatttttgattcataaattcattattcggatccaaccaccccggagattcttgtttctccatcataattggatccaggatatagtcctaggcctcagtagctccgtgtttttagatatgtcaaatctaaagcaattagttctcttttcatggtttttttcttgtctgatccttagctaaatatccatgaagatatactaaaggcaatgatcaattttatgattttaaatcaccttctcttcattccacattttcttttggtacatgtctccattccccattgaatatgtaaataactcacggttttgttatctttaggccggg

SEQ ID NO: 3091 - DNA, 627 bp, Arabidopsis thaliana
  Intron number 2 from transcript AT3G23710.1 (locus AT3G237 10) derived from phytozome v7.0 (chr-ID Chr3; pos 8534767 to 8535393)
ccttgaaggtgagttgattttacgatcgaacatatctttggatactcaaaaacttttctttttgtcacggtaggcgttagacctgctgaatatgactgtcatcattcattaacgaggagcttttgtgttaatttagttcaggggcattttgattacttcagtggtttattgtagctctgtttcagcgactatagataagtcagttagttagagaggtaactgattagaaggaagttgatgcagatggagaagggattctggattggtctagcattggtttgggcttaggagagttgagggtgctttagaattcatcattggtgctttgatttggtttgttctcagttctgtatgtggattcagagagtgagtaaataaagagagaataccttttctgcgtcaacagttggttttctttaggagtacactaattgcattcagttttggtacatttttactcaaaggtggtcgggttaatttgcagggtataggtcttatggatgtaatccttcctagatgtacgattatgtttctgaaaacagactgtagcatttggttagacacagtacaagtaaattatatatctcttctatatgtgtatacaggaaaggaaaacagctggtatcg

SEQ ID NO: 3092 - DNA, 766 bp, Arabidopsis thaliana
  Intron number 2 from transcript AT3G23780.1 (locus AT3G237 80) derived from phytozome v7.0 (chr-ID Chr3; pos 8572648 to 8573413 reverse strand)
tccaagttgaggtaacagaaattctttgtcgaaattaagtaaccttgtctggatttgatgaatgataaagaacacatggtataagcttatttcttgatgtttctactagactctttctgacacatatatgaagatgttgacatacactgaggttcctgtcatagatttctcaatttaacttgccatcaaataatttactaagggttaaggaacatatttgtctgaaactggtttcactctttttggctttacaagttttctgtaattggatttggttccttatttgcattcgctggatttcttacctgagcaaaatatctagtaaaagagatttattacagttacatgttcgtgtgaagtagaggtgtatttcaagcttggttgtgtttaagattgatgattttgtctgctcccaatctttagatgtttcttgtttaaaatttgaattgtgattacttttccttgtagtggtgggtattcaaacgaaataagctttagtttgtttcattttaaagtttggatgcaataaaagaaaaacatcttcagcttttttttttatttagttcttccccactgcctcactgtgctttagtttgagtgttttatgcttgtgtgcaatgactcttgtactgtcaaacttttgatgatgtttctgttttgctgtccatgtatcttattcttataaatgtagtttattgtctaactgcttcttcactctataaattgactaggtgttcaagaatactgttgttaaaagcgacaaatt

SEQ ID NO: 3093 - DNA, 703 bp, Arabidopsis thaliana
  Intron number 1 from transcript AT3G23870.1 (locus AT3G238 70) derived from phytozome v7.0 (chr-ID Chr3; pos 8619433 to 8620135)
tttttgggggagaagagaacgtggcagagttaaaggtaccattcgaatattctaaaacacgttcttgctcgtgatatttttttgcctactttaatttatctttttcttattggcaatcacaatctcaaatcgtttttgagtgctgtgtaattttgatgatcgtgaataaattggatttagttctttggcgtgttcttaacttaattactggagatattttattgatttgagaattaatagttaatgtgttatttaggtaacgtatatgagagggttttgaggtttcatacgttaaattttctgcaaaaaatcagagaaacaattctaatcaaaatttcaaaacttgaaggaccgtagattctctctcaaggatcggtttgattctatttttgaagtaattttttttttgtctctttcttcttcttcttgttttttcttttgggctttaaagatttgtcgattttttttctccttttgaattcgatatgattatattttctctgaatctatttgttgggaattttaatgtatttgttctctgaatctattcttgtgttttggttgatgagctaattattaaagtaatcagtagtaatgatcatttggattttgtatgtggctttgcttatcttttctctatagtttatcagaaaaatcagatttaattgccttttgatgttcttgttctgttttgtgtctccag

SEQ ID NO: 3094 - DNA, 546 bp, Arabidopsis thaliana
  Intron number 3 from transcript AT3G24130.1 (locus AT3G241 30) derived from phytozome v7.0 (chr-ID Chr3; pos 8712042 to 8712587 reverse strand)
atttcatctttggtaccggtcaatctatttaccaggtgatccgttacattcttcacataataatgttggttttgagattatgacaggatgatattaatcctaaatctaaataatttgaaacttttagaatgtctttaaaatggccaaggaattgttaacagtagatgtccgtagatagttgtgatgttcaatctagatatatctttctaaccactgcgattggaatgtttttttcacttttcctatgcacaaaaaggaaaatatcgaactgaagtttaattttatgaaaagtaaagatatgataaattaaaaattgaaccaaactaagaatgttcttgattggattttgatttgataaccattttcgaaaaaaaactaaatatacatagctaatggaaccattcttaatagccctgtagttttcacatattaataatcctttataaaactaaaattcctatttattcgggccaagtttcattaaataaaagttgtgtttggtgggttgtagagctgtgtgatacaagtgctaggtgggcagctaga

SEQ ID NO: 3095 - DNA, 601 bp, Arabidopsis thaliana
  Intron number 2 from transcript AT3G24450.1 (locus AT3G244 50) derived from phytozome v7.0 (chr-ID Chr3; pos 8880404 to 8881004 reverse strand)
gaagaaagtcgagaagcatatttctaaattagacggtaacgccaaatcttctttaattctttaggcttttcttttagggaaatacaattacaagtcataaatccccttcaataattgtgtatagtttcatattttctttgtcgccaatgtcattatttaaaccaaaatggttccgtattttctgtgtgggaaaattccaaaaagtgaagctgaattcttgaaaccacaaacataaaagatgaaccaaaaccaagaaaaaatcaaaccaaaactcagattttaaaaaaaatataatttagcatacttactgaatatttcaaatggttatcattagagaaaaaatagatctagctaactcttaattttctaaaataaaatctagctaacccttaattctaatcatttgttaaaaataaataagaaatagttttgtaagaaatcattgcaaactacaatagaacagaaattcaaagatagcagagttctgacattaaataattacttttgtatgatttatttattatattttctaaacaggaaatgcttatgaaactgttgaaagtctaaatatggattctttataataataaacaggagtgac

SEQ ID NO: 3096 - DNA, 363 bp, Arabidopsis thaliana
  Intron number 3 from transcript AT3G25050.1 (locus AT3G250 50) derived from phytozome v7.0 (chr-ID Chr3; pos 9127509 to 9127871)
ggcttctttggaacccttaccaaattgtgtacgttaatcacactccttcttcttattttttatcttctctattcatttcatgacgacaaatagcgatagtgtgtatgtaatatgcatgcaagaattagatattttgaaacaaactagaattccaaaacatttcacaatttgatatgggtgacgtacattttagtcatcattttaggaaatttttagatatatttatatatattcaactaaaaaagcatctaatttgaaatggagaaaatatttgattttaagtatatcataatcaagggaggtaaatgatgatgatgatgattgataggttttacgtggacaacatcccaataagagtataca

SEQ ID NO: 3097 - DNA, 699 bp, Arabidopsis thaliana
  Intron number 1 from transcript AT3G25200.1 (locus AT3G252 00) derived from phytozome v7.0 (chr-ID Chr3; pos 9176948 to 9177646)
cttctggagtttcacatccacctgacgaagcaaaggttctattataacaaaaacgcttaaaacacaactgtctagggttcgcatctacgttttccaagcatctgtgtaaaagcattttagggttctaaactaaagatgatcacatctatcaaagtttccattgttaattcccttctttttttcttctcaaataccaaatgcctcaacaactcacaagttttattcatatgcaaatcttcttctttttttcttttcctttttttgtggcgtaaatgaaaaaagactaacgaatcaatttacattacaagttcattcatctgtattaatgtgtctgaccttacctaatttggagacggtaaacttggtgagcaagtccatttcctctgtattaataatgtagcgactaaaagttaacatatcagtatatcactaccgaattcttcaataagggttttgtttttcccaaatctcttgccttttgctaagatcgatcattcactattttatcatgtctctgtttctcaaccagccttccaagttgtgcctaggccaacctgcgttgatgagatcctcctctcattttctctctaatggtttctaatcctcttcactgcaatttcctccttcttccatcaacggctgtggagtcgtgactcaaggtcgccacacttgtttggcaaagaaggttactgaggataa

SEQ ID NO: 3098 - DNA, 352 bp, Arabidopsis thaliana
  Intron number 3 from transcript AT3G25220.1 (locus AT3G252 20) derived from phytozome v7.0 (chr-ID Chr3; pos 9183435 to 9183786)
ctcacaaaggggataagatcaaggttcactatcgggtaagttttatttgaagcttctactactactagttgtttaacttattgctgggaaggttctttcgtgcttgcttgatagtattttgattgagctaatagaagagccatggaagggattttttcttattgcaacatttaagaatgttcatataacatcaggggcatggtgaattgctgaaaatgtggaatgaacttcattagtatttagtaaaaatgttgatattggatagcttagaacaaacaataataatgaatgaatctgatctaaaaaatgcttggcgaataacgtagttctctgttgcagggaaagttaactg

SEQ ID NO: 3099 - DNA, 550 bp, Arabidopsis thaliana
  Intron number 1 from transcript AT3G25400.1 (locus AT3G254 00) derived from phytozome v7.0 (chr-ID Chr3; pos 9213339 to 9213888)
agtatcacagtccaaggaatctccttcttgctgtatctcgcattaacaatctcttatgtcttctgaaaaaattgaaatgggtcttggttctttagtttgatggtgtcttataaacaaaaaaagttggcttctttcactatcaaatctgtttttggttttcaatctcatcgatcttcgatttgggtttgatcttgtctttttcaaatttgatgtttgtttccatgaaaaatttcatctttttgtaacttgctctgttttagctgtattgacttgaatgtaatttgtaagtggaagactcatagatctgaagtcaaatcaatctccaattaacataagcaacgacaaaaacatgtgattgttcattttcttgagtaaagtgttaaactttgatttggccacatgtgctatgccctacaatctagtcaaaatagtcagaattaaaggtcaaaactttatgttgcttttgtgtttttgttacatttgaaatgatttaaggagtatggaaaatgctgcaggtgggtgaagtgggagagctatcagagatattcca

SEQ ID NO: 3100 - DNA, 839 bp, Arabidopsis thaliana
  Intron number 2 from transcript AT3G25580.1 (locus AT3G255 80) derived from phytozome v7.0 (chr-ID Chr3; pos 9292900 to 9293738)
tttgtcacttctaccgtgagaattggccctgtaaagtaagtttgtggattcttcgtccatgtgatctttgagtttctttagagcttgtgagggattagtaagtaacaatgcttgagttttttgctgctgggcttcgaaaagtttgtcacttgttggtttgatccacaaggtcttcttctccatagctactagacatgttttagcttaagattcaagtttatatatgccttgtggattaatcattgcctgattcttccgtgtcatctctgagtttatttagagcttggaagtggtgtagtaataactaacaatactcttgataagttgtagcaatgctcttgattagtggatgtaatatgatgttgataagatatatgaggcacagaaccaaaagtggtgcttccactagacccgtttttagcctaaggttcaagtttataccttgtagatgtttctgtattgtctgattcttccctgtgatatttgaatttcttagagctttggaagtgatataggaacaatgctcttgtgtgtttgtctctatgaagattatcgctgtcgtgtttcatccgagtgtgcgggattttttgctgctgggtttagcctttcttcaaaaagttattacttgttagttttattgttttggtcttgataagagatgttaggacagacatggtgcttcttgtctatagccactagacctattttagcataaggttaacgaaattctctctacataccttgtggatttgtttacattgcctgatctttcctgtgatcgctgtcatgtttctttggaatgattgatgtttataaatggaaaaatctttgtgcaggtg

SEQ ID NO: 3101 - DNA, 408 bp, Arabidopsis thaliana
  Intron number 1 from transcript AT3G25840.1 (locus AT3G258 40) derived from phytozome v7.0 (chr-ID Chr3; pos 9456717 to 9457124 reverse strand)
aatcaggcgaaatcaaatttgaagataataatctggtctgttctaatccctctaatacgtctttttcttcctaaattctgtttggattgtgggatcagaggggtggatttgggtttgattgattttttcatattacaaacagcatttacgcctgaattaatgataaagctttggtcttttgagagttttctttagataacctgagtgttgcactaggcgttcaatggagactgatggctttcgcttgatttgtaagaactggttttatgtagatgttctttttcccttttttttaattgtatgttcttgcgtttttagtgtcatgtatttctcttctggtaagtattctgaatatcttttgcgatgctttcagcctccacttggggaaaaagggcgtcaaggagaaga

SEQ ID NO: 3102 - DNA, 332 bp, Arabidopsis thaliana
  Intron number 1 from transcript AT3G25990.1 (locus AT3G259 90) derived from phytozome v7.0 (chr-ID Chr3; pos 9505865 to 9506196 reverse strand)
caatttacagataaaggtacaatctttagcttggttttggggattctgattgatttgttgcaggtttggataaaatttcttaatgggttttggtttagatttggattgagaagataaagactgatcttttttggttttagttttgttcctcttttagtgctaaacctggttaaagaggcttttgaccattaatggctaattataaagttgtagatttggtttgttaaactagattgactttttatagtaaatttgggttttcttctaaaattgatctttatctttatcttcttgtaggttttgaagatactggtatttcatttacatctgtt

SEQ ID NO: 3103 - DNA, 556 bp, Arabidopsis thaliana
  Intron number 4 from transcript AT3G26340.1 (locus AT3G263 40) derived from phytozome v7.0 (chr-ID Chr3; pos 9651384 to 9651939 reverse strand)
attgtcaattctggcacagaaatctgggaattaaggtaccctaacgttagtttttgttagctttctgaattgatgattgggtctatcagttatcttccttgctgtggcaatccggttacttcttaccttccctttgttcataacttcatatagctaatgtattgatatccgaaagctgttgagtcatttgttagagacttaaaaacgttttgtatccgtctgtttcctggaataagaatagtctttattatctgtttggtgacctaagaacgtgtgtctctttcaattttagtaatgtatttttctgcgtggtgtggtggctttagcttctcagtactgtgaactaaacatttatatatcattatgcatcaatctttttgttttgagttgttgtattcaagggcatacaaatggtttcgttgatttcttgtatccaaaatctagtcccagttttatcctaatagtttgattgctaacttgtataccaaatctggattatgttgaaactatgaccctgatagagagtgttttatttgtgtatcatagtgccgtctac

SEQ ID NO: 3104 - DNA, 503 bp, Arabidopsis thaliana
  Intron number 1 from transcript AT3G26590.1 (locus AT3G265 90) derived from phytozome v7.0 (chr-ID Chr3; pos 9764489 to 9764991 reverse strand)
actccgtcgttgccggcttctcattcggcatcgtaaattatatccacgccttttattttgtggtttgcatttattatccaaaatgcgttttttttctttctttgactaagtttcattattaacttaaaacacacaaagatccaaaagttgggagatgtccaaatcattcaaaatgtttttgtctacatttctataaacaattttctatattttaatttatatcaaaagaccattaaattaaaaaaaataatttaacatatatacattaaaaatgtaaattcaaacgcccaaaaaaattgaagaaatgaattcatgattatcaatttgtagtcactagtcaaagtacaatttatttatcaaatggaccattttctcaagtttaaaaattaatatattttttgccttttgtaaaagtttcactttatttttttttgtaagatttaagaagttttgttttgatcattgtaatgaatgtgattatgaacgtccgcaactagcttgga

SEQ ID NO: 3105 - DNA, 413 bp, Arabidopsis thaliana
  Intron number 1 from transcript AT3G26610.1 (locus AT3G266 10) derived from phytozome v7.0 (chr-ID Chr3; pos 9777257 to 9777669)
gagtctctgacgactcaaaggtacgtccatatatttttaacatcaacttgatgcttcaaagaaaaagaaatattaatcttttatcaaaaaatatctaaattagtgtctcaattcttaatttacgtttgcgtttgatttttcgtttatatttagagtcaatgtttttttccaagtaaactcattacataaataatcatattaaccaaaactgttttggtaattgtacacgtaattaatcgccaaacacaagtggaagaaaacattcgtatgcatttgccgaatacattctgtccaaataattgatagtttatgaatttgagcttctcatgaaaataaaaacacaatttgtttttgaggcatttgtaattgagtgcgcaggcattggtcggagcgtggaaggcagcttgtaaagt

SEQ ID NO: 3106 - DNA, 575 bp, Arabidopsis thaliana
  Intron number 2 from transcript AT3G26980.1 (locus AT3G269 80) derived from phytozome v7.0 (chr-ID Chr3; pos 9946748 to 9947322 reverse strand)
gcctaaaggttagcaccgagcacaatcttttggtttgtttttcggctaatccgtgaaaaagaagtaaaaatgcgatagaagtgctctttaatgctttagatttggctttagaacgtttgcttcagccatttttttttttcttcagtttcttcacttgtggcttgatagacaaagttcagacataagtcataggatctgattgacttactaatcatttgtcttaaagtaggaacagaagaaggaagttaaactattgatcttttaaaaggttactcgatcttgtgatctatgttttaacagtttctccacttgtggtataggcttttgaattggtctgattgtattactaatcacttgtcttatactacaaatcatgtctttagagactatagggacgaatactgttctggttctttttagtagaatttcttgatcttactcttcagtcttgtgcattcaacaaaaaattgaatttgtctcattttgtttcctattgtatcttattgactaatcgaatttgggggttttgaatgtgtgtagacaagaagattgttccaaaatcagctagtgacatc

SEQ ID NO: 3107 - DNA, 466 bp, Arabidopsis thaliana
  Intron number 2 from transcript AT3G27120.1 (locus AT3G271 20) derived from phytozome v7.0 (chr-ID Chr3; pos 10002219 to 10002684 reverse strand)
actcaaccagaacgttagttgcgtaatttcttattttgattcaagatccttagcaaactggaaagcacatgcaccctttttatatcctcaccttcgacaataaataagcttatgtaatctgtttttcttgtcaatatttcttgattttcacctagataggctatgcctgtctctgcccttctctaactaagtttctatattaaacattttttgaatttatttcacattgaaacactatgaaaagtaaataaaaaatagtatatgcatgtcaataggactagcaatttaagcgtctacactcatctggtggttagccagttaggccctcgttcttatttagaatgctacttcacataagtttctaattatccagtagccttctacgcctgtaagcctgaaaagattaattttatattatgagataacatgcatgcccatttacttactatcctgttctagtttggag

SEQ ID NO: 3108 - DNA, 647 bp, Arabidopsis thaliana
  Intron number 1 from transcript AT3G27150.1 (locus AT3G271 50) derived from phytozome v7.0 (chr-ID Chr3; pos 10010961 to 10011607 reverse strand)
gaatttctagggtttttattgacttctcttcccgtgtaagtttctctttgacttttgaccagtttttagggttcaataaaattgttttgtaatctatttgttcttcagtaatttagtcaaacatatttatgtgttttcactcgttgaccgttgattttagggtttgcaatctataatccctagttgactgttttaatttagtcaaatcattctaatcaactcggattagcgacaataaattgtctttattttttttccagggaagtgaaattgtttataaacataaccagtaaggcagtaatcttattgaattggattcgattaaaaatattctgttaaggatttcaattacttacaaatcaaatttgttagacttaattagttcactattgaatctttttttctttctgttccatgattccatctaaaaaaaggttacgatctttgttgtttcagtacgaaagaaaaaattactgaaatagaaatctgaatatgctttatttgattctgatttagtttgcaatttttaatctttagttcactgtttcaataaatgattgttactgtttgattctgatttagttttgggctaaaaatttacagagagggaatgtcaaaagtgcactaggccaggattttacatagag

SEQ ID NO: 3109 - DNA, 306 bp, Arabidopsis thaliana
  Intron number 1 from transcript AT3G27420.1 (locus AT3G274 20) derived from phytozome v7.0 (chr-ID Chr3; pos 10148643 to 10148948)
cagcgacattaatctccggcgagacagtttactcggtgagtttcgcggctacatagtttttttgaacttccttgaattgttcattatttcgggatataaacggaatttgcttttccccgatcgtcgtatcactgtagagaaaccgatacttgattggttcttcgctatttttctctattttgatatgcaattcgatttcacactctcaaattcataatcctagtttgtatagtactctatctcgtgaaattgtctgcttttatcgattaaggcgttgttgcgtacattgcagtgtttattgaagct

SEQ ID NO: 3110 - DNA, 533 bp, Arabidopsis thaliana
  Intron number 2 from transcript AT3G27430.2 (locus AT3G274 30) derived from phytozome v7.0 (chr-ID Chr3; pos 10153019 to 10153551)
agactggaacaaccattgttggtttgattttcaaggtatggttttttattctctcacattagtttcttgtccatagattgcatagagtaatagtttcatgggaactgtttttgttcttagtcagctgagaactaagttttgtattgtggaagttaaaattagatctttttagaattggttagtcaagaagttgaggcctaagactgagtcgcaggcacattgattagattgctctactataatgtgattgtttacttgtgtctgttaaactctttagggtcgttattgacgagcactttcagtttcgcatgatagatccttgtatgagtttcatctaaagtaggttttgcttagtgataatgtggtggttcttatcgttagctcttgtctctccgtatagtttagaacatagtatctagacgtgtaagatgtttgagttcttgtgttctaattgttgtcttttgattgctttttttagtaaattattgtggaagctgtgtaatattgattttgatattcgggctttgtatagg

SEQ ID NO: 3111 - DNA, 551 bp, Arabidopsis thaliana
  Intron number 2 from transcript AT3G27430.3 (locus AT3G274 30) derived from phytozome v7.0 (chr-ID Chr3; pos 10153001 to 10153551)
aagctccgtcttttttgaagactggaacaaccattgttggtttgattttcaaggtatggttttttattctctcacattagtttcttgtccatagattgcatagagtaatagtttcatgggaactgtttttgttcttagtcagctgagaactaagttttgtattgtggaagttaaaattagatctttttagaattggttagtcaagaagttgaggcctaagactgagtcgcaggcacattgattagattgctctactataatgtgattgtttacttgtgtctgttaaactctttagggtcgttattgacgagcactttcagtttcgcatgatagatccttgtatgagtttcatctaaagtaggttttgcttagtgataatgtggtggttcttatcgttagctcttgtctctccgtatagtttagaacatagtatctagacgtgtaagatgtttgagttcttgtgttctaattgttgtcttttgattgctttttttagtaaattattgtggaagctgtgtaatattgattttgatattcgggctttgtatagg

SEQ ID NO: 3112 - DNA, 741 bp, Arabidopsis thaliana
  Intron number 1 from transcript AT3G27460.1 (locus AT3G274 60) derived from phytozome v7.0 (chr-ID Chr3; pos 10161152 to 10161892 reverse strand)
cataagaagcttcaagctagtaagtgtttccattttcagccataattttgtgatgaaccgaagtaagaagcttttgatcttcttctcttagtctgattttcaattggtttagttatggtattttgataatttgggtttggatcttgaagtaattagttagaactctttattacattgattgaaattagatgttgaaaaagtttgaattttgaatacaattgtcagggaagaaaaccaagtaagagactttagttattcatgaaattttttgttgtaatgtagagattggcaagtgaggatttagccaatttggtagtttatctttctgcatttgttcttgtggttcttttaacttgtttatgagttttaaaatttctcgattaagccttggtttcgtacttagaaaggatcgtcatagcggattcgatatatcggtttatctgttatggtaacaaattaatgagaatctgaagcattttcaagcgaaattagctcgtcttgaggagtagattcatgctgaataaagcttatttcagctaaagtggattgaagttaatatgactttatgactgatatttgctttcagtcgtattagatagtacatatcctcatttggtggtatcagatataagtattattgagcctctaatacttatctacttggtgaattatctggctgactcttgtgtatgtgttgaaaatgcagcgccggagatagttgagaagcctggtgatatttca

SEQ ID NO: 3113 - DNA, 465 bp, Arabidopsis thaliana
  Intron number 1 from transcript AT3G27660.1 (locus AT3G276 60) derived from phytozome v7.0 (chr-ID Chr3; pos 10243969 to 10244433)
ctgattataagagtcgcggcccctccactaaccaagtatttttgtggtctctttagtttttcttgtgttttcctatgatcacgctctccaaactatttgaagattttctgtaaattcattttaaacagaaagataaataaaatagtgaagaaccataggaatcgtacgttacgttaattatttccttttagttcttaagtcctaattaggattcctttaaaagatgcaacaatctaattgttcacaaaatgagtaaagtttgaaacagatttttatacaccacttgcatatgtttatcatggtgatgcatgcatggatcatatctagagatttatggttggatatatatttaacattttgatattagcttttaaaaaggtctgaataaacaacacttgttagataaactcgatataatcaatacatgcagatcttggcacttatagcaggagttcccattggtgg

SEQ ID NO: 3114 - DNA, 458 bp, Arabidopsis thaliana
  Intron number 2 from transcript AT3G27700.1 (locus AT3G277 00) derived from phytozome v7.0 (chr-ID Chr3; pos 10260170 to 10260627 reverse strand)
ttcaggtatgtttcttgaattaatttttgcttcaatgggattagacttatctcgaaaaacacaataatacctataggttctactggatatttgataactatttgcatgatcctcctttgtgctggaaatctcagcacatcgatgtttcttgcatatattgctagtagcatgaccactttatccctttcaactgttcttgttagtgacattaaattaaattattatgttttcagtgttagctgtacctggcatggctctcagaaacagtcaaactatattctgattcttagatgcatgttaatgaaatcttggttgtcgaattgctagtactctgtattgaaggataaatttcttatgactactattttattacactattcttctctaagtgagtaatttttttttcattttccatttgtgcagagtctatcacagtttaaccttcccgtttcagtccc

SEQ ID NO: 3115 - DNA, 801 bp, Arabidopsis thaliana
  Intron number 2 from transcript AT3G27920.1 (locus AT3G279 20) derived from phytozome v7.0 (chr-ID Chr3; pos 10362363 to 10363163 reverse strand)
ctcattattcgtctccacaagctcctcggcaataggtacataactttatgttactacaatattatacaccatgtctttttatttaatcgatcgttaactgattttttctttcgtcaaatatttgaattgttgttttaaacaaagatttggccggttaagttgatttttaaaaatctaattgaaggattttcttacttgcaaatgtaaaaataaagagagttgacaagtaaagactgttttatttcaattaaactatgtgttcgtggattatttcacatttcaaaaggtgttttcttcacaaaataaatcttaaaaataatcctttgaacttaaaatatgttcaaaattttcaagttgatatatttttctgaagaagaaaagagttgcacaagataaaagtttgtcttctcttcaatgaaactcaaccgatgtgttggtgggttatttcaattttaaaaggtgtttcctccaaaaacaaatctttaagagtatcttttgaacttaaaaatgttcgaacatttcaagtggatatatttaatgaataatagacactttttcataagtgtattagtcgtgcaaacagtcacttctcaaaattcattatagagttagaaacgttttccacaattgaaaaataaaaataaaaaatcctctctatgtatataaatatgcattcatttatgaatcacatacagatgtcgaaataataaaaagaatcataaacatatggtatgttataatttatgttatatggtatgaatttaataaaaatgtcctataatattttttccccaaattcag

SEQ ID NO: 3116 - DNA, 819 bp, Arabidopsis thaliana
  Intron number 2 from transcript AT3G28170.1 (locus AT3G281 70) derived from phytozome v7.0 (chr-ID Chr3; pos 10498567 to 10499385)
atcacaagtattggtgataagagacaagaatcaaatagaacgagtagtaggtgaaactactgatgggttattttgataagatgtgagtcttaaaattcacatctgttttgagatgaatcaagcttggggtaaagcttggtcttggcagcatattcaagtattagttgcaagttctgaaatttgcaggtttgctgaagctctgcaggttatgaaatttcagaaaagaatgttaaaaggtggcttgaaatgataaagtatagaagtgagtcagtgaattcgtcaagaagaaactgggagagaggctgcaggcgttgcagggctgtctcaaagtcttctcacttcaagaagctttgtgaaactacagtttatacatcatggtagttgggatcatcttcaagcaagtacaagcaactgatagatactctaaagaagggaccaattgcatagtcttctcagaatgcatttggaagatatcaacaagtgttatcttggttaaatatacactccatcatgggaaatgtttcagaatctaagaacatttatgatgcaagatcaagtgttgatggtttctacttactttgaaaagtagtagaatgggttttttcagctaggattaacttcatgagctcaagaggtgaagtttaaggggctgtaaagacgtgtctcttacgggtcattggttcagtgaagttgggacggttaaagatgactaacagggggttttaaacgctgttggtaaaggtctgtttaaacagaagaagtgaacaacagaatgtatcgagagtctccctaatatcgagtgttgggtggcgtgtcttg

SEQ ID NO: 3117 - DNA, 288 bp, Arabidopsis thaliana
  Intron number 1 from transcript AT3G28345.1 (locus AT3G283 45) derived from phytozome v7.0 (chr-ID Chr3; pos 10598266 to 10598553 reverse strand)
caaagcatctccaaggttctctctctctctctctttcttctctgccatataattaaccactttgttttcttagtagatcatttttttttttttgtcaagatttttggatgctttgttgtccagaatccgttgacaattttgttaataaaccaacaaaattaccaacatataagtataacaaccaaattgacttcttcaagtcttacaagtttacatgtatacttcaatctttgactaatgtttatttttttattttgtgtaattaacagaattctgtagctttgcttt

SEQ ID NO: 3118 - DNA, 663 bp, Arabidopsis thaliana
  Intron number 1 from transcript AT3G28956.1 (locus AT3G289 56) derived from phytozome v7.0 (chr-ID Chr3; pos 10981559 to 10982221 reverse strand)
catcaatatcttggtcgaaagattccccctttcaggtatgtagagaccctttgtgttgaaatctgaatttgattccatagagctaagattcatcacttttgatatggattttggactccaaagagattctgaaatgaataggctcagtttttgtattggattttctcaggtctctatcacaaaggtgctcatcgattcctctgttttttgttttcttttgaaattttcttttatgatcattggattttgataccattcattactgatcattgatcgatgagtatgatccttcaacttttggtttttgggtttcatcggattgatgctttttatctgaaaggttgatgcttttgctcgtacattaaacaatgctttttatctgaattgtatagttttgtgatgtgtattagcttatttaagtttagttaagctgaaagcattaggattattctacatatgtgtctgacttggatgaattgttttatatgaagacactgaaagtgatgattatttcatgataatcttgattagtaaacgttattgatgttgatgttcccattgcatcatgatttgtgggaacgagaaatcatctgttccttgatgttgatgttccctttgaatttttcaggagcaaaaactctgattttggagtatccttagtgt

SEQ ID NO: 3119 - DNA, 1003 bp, Arabidopsis thaliana
  Intron number 2 from transcript AT3G29170.1 (locus AT3G291 70) derived from phytozome v7.0 (chr-ID Chr3; pos 11136289 to 11137291 reverse strand)
gttacttgttcttgggatccttacttttctccctggtaagagttcgaattcttcgtcttttttatttattttgcttattgtgttcctcgtgtcgttggatatgtaaatggctaaatgcatgatgttgttttgaaagaccttgtggaatctgttgtttagtgtggagattgagtgatttagatcaactagagacacatattgtgttctttgtctgttgaaattgtgttctcgttaggtatttatacctcttgagtttcttcagttgttgttctgagtgtattatgtttaattcataaacccttgtggaatctgttgtttgatgtggaaactgagcgagttagatcaagtagacagtgcttgagttgaaactatctattctttcttcatacttaatgttaatgcttattgtttgatttgaaagccttgtggaatctgttggtagatgtggattgtggagattgagtgttgcatgcctctgaatttcttcagttgttgtactgagtgtattatgtttgattcaaaaacccttgtggaatctgtttttttgatgtggaaactgagcgagttagatcaagtagacaatgcttgagttgaaactatctattctttcttcatacttaatgtcaatgcttattgtttgatttgaaagccttgtggaatctgttggtagatgtggattgtagagattgagtgttggatcaactagacattgattgtgttctttgttaagttgaaattatgttctctttagctatttatgcttctaagttcctccatgttgctggatgcatgattcgaaaacagaatcttgttgtttcatgtagacattgagtgagttggatcaagtagacacagcttgtgttctttgccttttgaaatcatcgtttctttttttgttctctttacctatgtatgctgtgagtaaagcagtgattttcatggccttgacacatttcactattgtggctacaggtttctacgagacccgaattgcttactactc

SEQ ID NO: 3120 - DNA, 666 bp, Arabidopsis thaliana
  Intron number 1 from transcript AT3G29180.1 (locus AT3G291 80) derived from phytozome v7.0 (chr-ID Chr3; pos 11148407 to 11149072)
cctaaaattctcaggtacctaatcaagattcttctttaaattcctccacattgtgttcggatctattctaattccgctacgtatgaaacatgatcgtcatagattcgtaaagtttgagtcttttttttttggtagtgtctgattatttgaataaagttttgatttttatttgatgattctgtttcctgttttcaacgtttttttctcattgatgatgttgacgttatgaagtcatatttttatgtttaagatttgtatctgaaagtgattgaattttaccaattagtgttggttttgttatttgagaattctctgtttgagatttttcttatgagtatagtttttaatattgagatttgttgttgttgttgttgttgttgttgttacatgttattgtgtcccacttactcttttaattgggtacactttttgagctggctacattattttatagttgagagattgttttattgtatttgacttggttgttgattcttcaaaacttggtcccaatgttagtaataagacagaatgaaacaactagtttctctatgtgggtcttaactatctttatttgaaagctgtgtttatatgttgcagatttcttattcttatacttacattacatgtttttgttgaacaggatctaaataaaagtatagaaca

SEQ ID NO: 3121 - DNA, 616 bp, Arabidopsis thaliana
  Intron number 2 from transcript AT3G29575.4 (locus AT3G295 75) derived from phytozome v7.0 (chr-ID Chr3; pos 11382686 to 11383301 reverse strand)
gtctgaagttgatactcttcttcctcctgttcaaggtacattaccatagtttttgtgatctttcatgagtttgttgaatttggattaagagatgattttttttttttaaatcttcaagattgagttttgcttgtttagatctttgattattgattagggtacacgacattgaatcttcttttggatgtagtgatatcaacatatcattttacgattattagattcccttaggatggattcattgtgtggcattgtgattggtttgttgtgttgttagcgtttttgagtctttggcttttcgttttatttcgtgtctttcactaggtatcttttaggtgtcttagagttcgatttttggccattttaggtattgttagtggaaagaaacaaagtttggtgcgttgtagttactacattgtttgtgtttccattccaagggaaaaagtatgttcaaaaatgcacaatgtatcaagggattatcgataatattcgaaagcaaacattgtatatcttctaggctttgcaaagtttttgttgtcttttgtttagtgttttactgaaatacttacttgtgtttgaagcaacaacgaacaagtccgtggaaacaagcccttca

SEQ ID NO: 3122 - DNA, 717 bp, Arabidopsis thaliana
  Intron number 1 from transcript AT3G30210.1 (locus AT3G302 10) derived from phytozome v7.0 (chr-ID Chr3; pos 11838722 to 11839438)
gagcactgtagctaagtgtgcaggtaactattttgattcaatcatggcttctaaaaacacataagttttactaatctaatctttataatctcgtagacatattagtaagcgaatcaccaaattataccaaagatcttgatcttctttctgtttgagtctttttttcaatgaaagtaagatttaattataatagttatatatacatctatataattaaataacacatgcttttatgacgattaatatagataagtgtgagatcatataagtgtatatggggtatagttgacctgattaagctctttcattctttttctttgtctcttttttatttatttataatctagaagcagtctcaaactttcacaaacagaaagaggacaatgtcatggtggaaaggttttacggtttattgtttttcgaataatcaaaagatgatcttttatgattccttgttttctgttttcaggagttgactttcataagttttgggaacatttttacatatattataccctttttattcgagcattttcgtcgagataatgttaaaatttaagagattcatactcatatattatatagataaagatcatcaagttgcattattttttttatatccatgttatatgtcaaacccatttatagtgctccatttcctttcatggaatttaaaaattagggttgaatagaagtggtaaaagctgtagactaagg

SEQ ID NO: 3123 - DNA, 745 bp, Arabidopsis thaliana
  Intron number 3 from transcript AT3G30290.1 (locus AT3G302 90) derived from phytozome v7.0 (chr-ID Chr3; pos 11917830 to 11918574 reverse strand)
acgttcaccaatgtaagtatgtgccaaaattatgtattaacatgatacagtaaaatctctataaattaataacgtcgggattgataaattatatgaatttatagaagttttataatttataattattaatttatagagagtttagacaaattttgtaaaaattttaaaaagttttaactaaaaagcagtttttctttataatcattatatttctaaaactaagtacaaatagaaaacgaattattaagttaagaaaataacacaaaattaaaaaaactttgatgtagtaaaaatattagaaattaactctactaagaattaatacaaatttaagagaaaaaacaatactaaagtcacaaggcattaaacatatttacatataatatatatatatatatatatattgataaatttaaataattattaatttataatattaatggaatatatgtttacattgaattttcaaaaaagtaattatcttattaatttatcgatttgtgttattttttacactaatcccaactcgggactagaagaatttattaatttatagaaattattaatttattgagtattaatttgaagtaccgtattactgtactacaaaaatctagtatatatattggatattagaatatctaacattttctattttcaagtggttttagttaaaatcacaagaaaccttgtcacatatagtgtagtagctcacacaaatacggtattttatttcaggtgatca

SEQ ID NO: 3124 - DNA, 447 bp, Arabidopsis thaliana
  Intron number 3 from transcript AT3G30350.1 (locus AT3G303 50) derived from phytozome v7.0 (chr-ID Chr3; pos 11960862 to 11961308 reverse strand)
atagttggagcttcaagatttcaggtgcatcaaaacatttgatagtggaacgtaaattagggtttcataaaagaagtaagagttcttcatttaaaaggaaacccaagaagaaaaaatcatctggtccatttgtagctttctatgatgattatcgtggaccagcacgtcatcctcctagacataatttataatcacgacaacaacaatatataatttgtaatattttgtagaatattatttttagttcgtctgattagttttatgcttaagcttcggtaatcatctttagttgtttgtacaaagaacactttctttctcctttataaaaaaagaactttattttagattctaaaatgtttggtaaaagtagtgaacatgtcttcattctagatatgttttggctttactgcaggagagcataagcagaccaatatattggcagatcat

SEQ ID NO: 3125 - DNA, 765 bp, Arabidopsis thaliana
  Intron number 1 from transcript AT3G30380.2 (locus AT3G303 80) derived from phytozome v7.0 (chr-ID Chr3; pos 11974688 to 11975452)
gagcttagcctccatcttcgtgttaacttaattgggtaattagtttgttaactcttcttgcttggagtttgattgattttaagacaagatttgaaagttgtttttcatggattaggacaagttggttttgttttgtcggaaatgttctaaaaagtagaaagtaaaacatttgattgtctagaatcaaactgttggatctgttgtggttttggtgaacttgtagagcttaaagaaccaaatattggagctgaattgcctcaaaaaccgacacttctaggaatcgagattctatatattttgtctttggtgcatagcgttggattgatataagtgagatccattggattgatctcagcaagatttggtagataatggatctgttgtggtttttttgaattttgatgaacttgtggagcttaaagaaccgatattggagctgaatcgcctcgaaaaccgacacaaatatgaattgacatattcgatatgtatcgcctttagtcagtagcataggattgatataaagtgagatccattggattgatttctgcaatttttggtagataaaatttcgagcaatcttgaagctgttctcattagggcaagtttttgttttatcggttagtgtcggctcatcttgaggttgtagatagttagaaacaaaggagaatcatgtgaatggatcttggtttttagatcagacataagtgagatccattgtatgaatattgatttgtttatgtgactgtgttgtgtaatgattcaggt

SEQ ID NO: 3126 - DNA, 599 bp, Arabidopsis thaliana
  Intron number 3 from transcript AT3G30842.1 (locus AT3G308 42) derived from phytozome v7.0 (chr-ID Chr3; pos 12599113 to 12599711 reverse strand)
ttagtggaatcatcaagcctggcaggttcattaactatccctagctatctgtttttcatttttgttttcgactccaaattgtagcactgcaaaaactaggtaggggaataaaattaattgtatgtagctgataaattttatgatattttgatattagtccattggagattttgtgtgtctctgaaaaataatactccctttgttctttattatttgacattctagaaaaaaaattgtttctaaaagattgattttttaggttttatatgtaaaattaattggcaattattgatgaatatcaaactttcaagataaataattaaatatcattgcttgagagttataaaaaaatgtaaatcacaaaaaataatatatttataatcaatttttaatgtgtttttcaatatatgtatttttctagaaaatcgattattaaggaacagagagtagtattttgcaccaaattaaagctaccagattaagaacaatgtagttgaccagaaaaagaaaaaaaaaagatttacaacaatgaaaaaattctcagtttgcttcttcttattacagattgactctactattgggaccaccgggctctggaa

SEQ ID NO: 3127 - DNA, 467 bp, Arabidopsis thaliana
  Intron number 1 from transcript AT3G31910.1 (locus AT3G319 10) derived from phytozome v7.0 (chr-ID Chr3; pos 12909660 to 12910126 reverse strand)
gcggatacgcttcagcccttgttaatttcatcacggtatattcttcgttgctgaaaaagctaattcactgtttctcttctccgttggttaccataatttttttccgatttcatcgttttcatagttttcatcgttttaatcttgttttatttttcagttggaattcaaattgaacgatgatagaactcgaatcctgttttgtgtagattgtcttccttattttaatttcaattttgacaaaccattgattttgttctgaacagacttcaccgccatctttgaatcgagtatggtcggcaatttattcttacccacaaatttcgttattgtagctaaagattttgacactttgtttttggattaatgcaattatgatatctctattaatcatctgttatgatgatttattagtagttgaattttgatttttagggatagcatcctctagtaatacattcaaatatcct

SEQ ID NO: 3128 - DNA, 322 bp, Arabidopsis thaliana
  Intron number 2 from transcript AT3G32120.1 (locus AT3G321 20) derived from phytozome v7.0 (chr-ID Chr3; pos 13124923 to 13125244)
cagttaaagcccttatagtaagttggtctaatacgagagaaaggagaatagaaatgttcttcattttcaactaggctaaggtgagggtggtatttgcgaaacatggtatcattatcttttgttttgctttttgacgcatgatatgtaggcttagatctgattgcataggataaaattgtatgatgatatgatttgatgattattgtttgatatgtatgattatgatgtttgactatgatatattatgtatgagaatgttaagtatagtatgtatgtatgatgattatgtatgtttgtatgaaagactagagcgaatcgagct

SEQ ID NO: 3129 - DNA, 864 bp, Arabidopsis thaliana
  Intron number 1 from transcript AT3G42050.1 (locus AT3G420 50) derived from phytozome v7.0 (chr-ID Chr3; pos 14232233 to 14233096 reverse strand)
actcacaacgcagagcttcaatttctccctcgcaggtatttttcgcgaaaccctaaactctcgatctaatttcgccttttttggatctaattggggatttttaactttcacctcgattgtttattaaatgtttttagcttttgattcctttactttgtgaaattgttagcttggatctgtttatgaaattatcagattggatctgctaattctgaaataattcaactcatactacaattttactgggtagataaagttcttaaggtcctttaggagcaaagtttaaatgttttggtttgactcatggaggcaaagcaattttgaaaaaaacttgaaattgttgtttgtgtttgtgtgtgtgtgtgatttaaagaaaaaagcccgatctatttttgttttatgaaattctgtgtgtttgtttgaatcagtttcgttgtgttgaaaactttgtaatctggcctttagttttttatttgcagcccatgtttgatcgaatcttaggaccttttaaaactagtagcttgtatcagttaaatagtctcatcttgacactagactctaagatttcagaacatctgccttcctcatttgtttccattgttgttttataagcaatagaatgataaatcgagataaggttgttgttgtttccattgtggtttccttgattcttgatttgttgttttttcttttcttcttgacatttcaaatgcttgttgattaaaaggtcaaattgtggtcacgatgttaacgaatttcgtatcagattcttccatttttctttaatatgtctagctttctcttgcttgttctgtatttacattcgtagggattcggatcagttcaatttcaagtttctgaacc

SEQ ID NO: 3130 - DNA, 606 bp, Arabidopsis thaliana
  Intron number 1 from transcript AT3G42550.1 (locus AT3G425 50) derived from phytozome v7.0 (chr-ID Chr3; pos 14668512 to 14669117 reverse strand)
aggtatggattttctcacggtcttttagtctctctattccctagtgtgtttttgtgatgcatgccaaactaattatattttaatccacactaagcatcaaaaccattattgtaataaagttcgtgctgaagtaccgaatccgaactcactagattctgttcttcaatcctaagtttcttcagcttacttttgattccactatgtcacaaaacaacaataagtattagtattaggataagaaatttttccgattatgataaaggacatgggatttgtttagtttccattggacttatcttttcttattctttagtttgagctttctctatataagcatgttaccatcgaaacatgttcaataagaaaaagcagagcaattcattactttaggaattagcaagaaataagtttcattacgtttaatttatggacatgtgacatcttgaatgcgattgatatacgtttgtgcttgcagatatgagaactctattttgtagtgtaaaatcttaaagcgtatcattagagacctatacaaaatgctttcttaacgagacaaccttttgtatttgtttgtttttcaggttgatcatcgctgccatctttgtc

SEQ ID NO: 3131 - DNA, 907 bp, Arabidopsis thaliana
  Intron number 1 from transcript AT3G42570.1 (locus AT3G425 70) derived from phytozome v7.0 (chr-ID Chr3; pos 14689128 to 14690034)
acttagtccgacttgatcgattcattgattctcatgtttgtcgtctccttaaattcgatctcctttttgttcttgctgaattttcagagacaaaaccaaattttcctttgtatgacggacataagttagaactataccaacatgaacactatttattatatttataataatgatacaaaaaggtactttaaacagcaaaattatatatacttttttgctcaaactaaaagagaaaactatttaatatatgttattattctttatatagaataacataaaataatatagaaattaatataaaattatagaacggttacaaaaatatctatctatatatcttattttattgatttagaaaaacagataaagattagataataccgaatacttgtaaaaataaagttatattataaattgttactgtgataataagtttttaaattattatatagttaaatttatcattctcagcagccgtcatgtttcaggtatatatcattctgagtaataatatactcaatattaattactttaaaattttcaatcttcaatttagcataataatcaaatataccaatgcagccgatgaagtacattctctgttaaacttacgttagtttctgggtgctcctctacaacatcactctaggcacatgcattaaaatattcactgttttattaaatatatatatatatttatttattttctgacaagataagttacaaatttttgtttccatactctttgaaagagatggagaaaaaatcgaattcaataattgttcttggtatttattccatttcatcatcatcattaattgttggggacatattacatgtaacatggttgtgacgcatcaatcctactcgagccaagtggggaccaacagttcactgagcttgattc

SEQ ID NO: 3132 - DNA, 397 bp, Arabidopsis thaliana
  Intron number 3 from transcript AT3G42830.1 (locus AT3G428 30) derived from phytozome v7.0 (chr-ID Chr3; pos 14929879 to 14930275 reverse strand)
cactgttgcttggggtaagtcattgaatactgaactcttttgaatccagatgtggttttagttttgcatatagtcaaacgaaattatatgttatttgttgatctttgacattcattgacttacttatctttgatattaccacaagcactttgagtaatctgatacgacctcaaggaagattataaggccttagtgggccttaacactagttaatcgttttaagcccatattattgtcatcttttacttgttattagtatctctagttcttttgaatcggtatcgaaaatgatcaagtaaatctagtcaagaactcataataccatagactgctcaagaaacgtgccattatttgacttgtaggggtttgcaaccacgcctttcacttccactgtatc

SEQ ID NO: 3133 - DNA, 1015 bp, Arabidopsis thaliana
  Intron number 3 from transcript AT3G43260.1 (locus AT3G432 60) derived from phytozome v7.0 (chr-ID Chr3; pos 15220094 to 15221108)
actttgaaaccaaggtacccaaatgtaaaaaaacaatgacatctcgacgaagaatggaagctctcgtttaatatcggcccatcattacatgaaaaatagataaacggtgcgttttaaatccatataaacatcttgtaaataaatttctgaacactgtgacatctaagaccaaaacaagatagtagggatcaaattgatcattgtagttgtttgtttgattaatggttcaaattatggaaattatgattaattctaaaatcatcgaagcttttgaataatcgtgtcaaaattaaattttaataggtaatcttatttcttatattgatttgaaaagtatgaaatgatgatatagaaagaactctataaattaataatgccaagaccataaagctttattaattttaaaagtattaatttaccgataaattaataattattttaatagagatatgttactaattttctaaatgattttaaaaaatattttcttaaaaataaatatttttctataaccaattacaagtaaaaaagcaatttttaagtttaatatattagaaatgacttctaccaagaattaatacaaatttaagaaaaacaaacaatattagagtcatcttttctaaacttttttacaataattaatcttagattcatatatataagtttataaaattattgacttataatattgatgagaccatatgtttacatataattttttttaaaaaaatattatcttattagtttatagatttttatcaatttttacaacggtcccaacttgagatcgcgagaatttactaatttataggggttactaatttaccgtttattaacttatagagattttattgtatgtcaacgtatatatttgtacgagctttgcattttgatgaagaagtggtgatgtccaatgggttatgaagcttcataactcataggacaagcacacaagataaatttgctaatggatccatcagccgagtcttggaagccattaagcaattggaagcaa

SEQ ID NO: 3134 - DNA, 802 bp, Arabidopsis thaliana
  Intron number 1 from transcript AT3G43300.2 (locus AT3G433 00) derived from phytozome v7.0 (chr-ID Chr3; pos 15244165 to 15244966 reverse strand)
tcctgatctccagaaagctattcaagcttatcaaggttagatctcaatttctcccaattttttgctcaaaatcgttcgatcgttgcttttggtccgggtagattccacgatcatagccatctgctagatgtatttgactaaaatgtggtcgcacaagctgagatttcaggttattcccagtgtttggttttgttagtgaactttagtatgatgtggtaggatacagctaagactatgaaattcgatggaatttaagaccttctggcttatagtttgtatctgacaattagacctgtgaacaaagatgctacgtatcagaatagttttacttcttattcgttagttcgagtaatataacctttttggaagacgtaatttcttttaggttccaatcaatctgtgctttattgtacaagaaagttctggacagggattagttacttacatgattacagaatggtttgcttagttctttgttaaattaaagagaagtgacgtctgttgttacaaaatttgtttgaacttgtcatcttcggggtatagctacgcgtaagctgcatgtgctacttagattttcaactgatctatatcaatgaggtgatattagaagtagtatgaaggacattcactccctggtgctatccagaaatcaatgaattttaaggcttctctccacattttgtttttatttttggctctaatttggccttggtcacaaatgttttcatttgatagaagaaattaggtggtaatgatttttctgtcgctaactggtttagcttccatttgtgattgtttatag

SEQ ID NO: 3135 - DNA, 732 bp, Arabidopsis thaliana
  Intron number 4 from transcript AT3G43440.1 (locus AT3G434 40) derived from phytozome v7.0 (chr-ID Chr3; pos 15368384 to 15369115)
tcgcttcaaagatttctcgagaagagacgggacaggtagttagatattcagtgtttgctttattaacatattgatagttctggaagtgttagtgtgtatgaatctgatttgttagtatgtattagtttgtgacgtcaaatattgttcttgcatttaggaattttcatgtgtaggtaggttgttgaagcttaagcaaatgaagagactggatctatgtgaatgttaatttgtatacattgactggtttcggaaactgagatagtcttttagttttttttcttacaagtgtttaagcttttattctcatgtattattctacttctatatcatatttggctgacttatggccaccagataattgtgtatttcttagtgatcatgcctcacaaatacattagatgttgttgcccattctttagtatcggttttatgagcttgaatttgaactaggcttgtgtgtttgattttggtaccgttgaatgcaaaaatagccttctatctactgttagatgacatcatcagatgatttaaatttagtaggttgtttgaactgatgtattgatgggactgaggttagttgatagcctaagcggctgtaatattgtagtggaatcactattttgttcttctcccttttgcatcaatagggtcttaaaatttgggtggattattattatcttccatcattcataactagctcttgtttcttctattgaaggtccacgaagccag

SEQ ID NO: 3136 - DNA, 293 bp, Arabidopsis thaliana
  Intron number 1 from transcript AT3G44050.1 (locus AT3G440 50) derived from phytozome v7.0 (chr-ID Chr3; pos 15819018 to 15819310)
ttcaggtattgagcggttttggtgattgattcgtgtagatttgatttcgcctagcttctgtgtagtagtcacaatgcctagtttttggttcaattgaattggttgctcttgaagaatcttaatgacgaaataattttcggattttgtggttttaacacattaatgaattgattttgagaacattttagggttttgttgatttttctggataaaagaaaactaagtttgttctatcgtttcttggaatgttgaaaataggttatcataagaactcgtccacttagtagttcaga

SEQ ID NO: 3137 - DNA, 794 bp, Arabidopsis thaliana
  Intron number 1 from transcript AT3G44130.1 (locus AT3G441 30) derived from phytozome v7.0 (chr-ID Chr3; pos 15882631 to 15883424)
tcggtttgcattgttaaagcaatctcgtatatcaagtaatacagagatttgggtaacataggacaagattaactctagtaataacgtggtgtggttaaacttgatgacattgtcaatacctgattttccctcgctattccatcagctttctgatattagttacttcatccatgacatgacccttatcctgtgctgtgacgacaatcaaactggagtgggttgcatctttattgcgaggggagacttctgcaagaagattcaaatagattctgtctttcttgggttttctcaatgtgtctatcttccaagtttgacctcggttcctttggaattcagatcactacaagtttagaatttcgatttttcgagtacaaatagtctttgaaatgtgattctgttttcatgtcctttatataatactaaatgaatatcacgctacgagtgagtttgttttgaaaattgtgaagcgtgagtttgttttgaaaattgtgaaaaaaaaattactgattgttcttgctaatttatgtttattttttattcgttattatgtagttaataaaactaaatctatcttatgtaattacaattttttagattagaacttattttcgtacttgaaatataacctggcaaaaagacttacttgtcagctgagacctcttgcttattcgcgtaatatccttcatcgtcctcatggctctaagttgtttttatcctttttaaatgggatttattaaactttctcgtttatattttcagaggatacaaaagttctaactgcacaatacggacct

SEQ ID NO: 3138 - DNA, 628 bp, Arabidopsis thaliana
  Intron number 1 from transcript AT3G44160.1 (locus AT3G441 60) derived from phytozome v7.0 (chr-ID Chr3; pos 15891184 to 15891811 reverse strand)
ggagctcagaagagtatccacgctggtagaggtcatcactcttatcttagattctcgatttttcgaattttgtgttgttgctggatcagtaggtaatgtgatactgtgctggaaatggtacgattctggaatttgattgtggatttaaccttaaccaatggagggctttgctttgtttccatttttcttctattatcttacattcattttcaatgtataagatatgattcatttcatttgtatagttatgatgatgtttatgtttgtggtaattgatgaattagaatgttttaggcatgagtacacattgttttttttggtaaaagaaacatttttctaagacttttgttaccaaccattatgtgtgatacgtcttgcttttgggttttgtgaaagattggttttgatatgtggatttcctaaatgtctttttggggaaaagtatcgattttgatctgaatgttgtaactttttctgtatctttttgttactaactcatcatgtcgaatatgtctttctgttgaatatagtgaaagattaagatcggactggtttgcaattgcaatgtagttttctagcagcggcattgattttgatattcttgtgttgttgattgcagccaagattg

SEQ ID NO: 3139 - DNA, 879 bp, Arabidopsis thaliana
  Intron number 1 from transcript AT3G44220.1 (locus AT3G442 20) derived from phytozome v7.0 (chr-ID Chr3; pos 15928484 to 15929362)
gccttgacatctacgcatcttaccgcaaccaacaggtattgtagaattagcgtttcacgtttttaaactcattttgaggatttctttaatgcaattcttacaagaaaaaagtgtttataaagaatggaccgacgaatcttagtattatatgcgaccgattctcaaacgaaaactgtttagttatgtttcataattggttttctccaaaaaaaaacctctatctcatctatttttacaactttaccctttacttccaacatatgtagattaatcttatgaaatctaaaataatacacaatataacttttatacatatattataaacgtttttacgatcgtataaattaaaattttaaaattttgaaagtagagttgaactcttcattgtaagagcttcgatttaatatattataatatcaatattttacaaaattagtggtataaaaaaaaaagtaaaaaagattataatgtgtattattttaaatttcataagattaatctgcatatgttagagatcgagggtaaaattgtaaaactggatgaattccaggttttttttgcacaaaacctttcataatttgagacatcacacatatatataattctatttcaacaaactgattatatatgataaagattcatgtttacaaaatatatatactaatggaccgacgacgaatcttgttaataggccgttctcaacgtagtcttaaacaatatgattttgcatgtgaggtttgaattagttatattttaataatctttgggatgtgaattattaattaactaaaatttgttcctcttttttttttcttgttaatcgtttttttttttttgttataaggtgacgttggcgacgttattgccggcgacttacca

SEQ ID NO: 3140 - DNA, 428 bp, Arabidopsis thaliana
  Intron number 2 from transcript AT3G44735.1 (locus AT3G447 35) derived from phytozome v7.0 (chr-ID Chr3; pos 16291493 to 16291920 reverse strand)
tttcagctacatcagtggaagaggactcagttaatgtaagttcatctaaatttttccctaagataaataaacaatttgcttattttattttcctaaaatatgctatcagatgcataccaattaacattttcaaagttaatttcttaatgatatttcagagtaatgttctacttttctaaattgaaatttgaacttgaaagaattcaactcacttttaataattacaaaaaaaagatatgagaaactcaactcaatggtgtatttttatttcttcctaattgtagtaataagtatctcataattgaatagggttagggagttgacaaaaaaaaaaaagggttaaggaaactcaaagtagtttagtaaatttatatgcagaatcagagatcaatattttaacctttttgtctttgtaaaaacagaaattg

SEQ ID NO: 3141 - DNA, 749 bp, Arabidopsis thaliana
  Intron number 1 from transcript AT3G44830.1 (locus AT3G448 30) derived from phytozome v7.0 (chr-ID Chr3; pos 16369250 to 16369998)
ctttggggtgctagcttctccgagattcttagaaggtaacacattagaccgttatgttcggttcgagatatttttttagacccggtcagatattggtttggttcgtctggttaggggtatgtataattggttaagcttggtttcttcttgaattggctttacgtagtgttatactgttgttgttatggatggtctttggattttcattttggttaatgggtggagatggttctttgggttttgttattgttttgcaactagtttatgaaaatattattttctaagtaatgatggatggttttaggaaattaataattaatcgtgatttttgggatatgtttttaaatgtcattcgaatttggaaatggaaaccgtaagttttgatttctatataggaagtagaaaatcgtcctacaaaactataaaatatatttatgttcaaaacatgaatgacgatttcattgcattttaaaacttactaaatttagaatatcagttttaacatattattttagtatttctaaattttcatatatttttggttatggttttaacatggattctggaaaatatatatatatatatatatatatatatattgattgttacggtttttgatttacatgattttctggttagcatttcgattttctcaattctgaattagtttgaagtgtatacttggtcgtttaattgttgtaatttgatttataggccattgtgctggttggagcacttatctctagaca

SEQ ID NO: 3142 - DNA, 305 bp, Arabidopsis thaliana
  Intron number 1 from transcript AT3G44935.1 (locus AT3G449 35) derived from phytozome v7.0 (chr-ID Chr3; pos 16409300 to 16409604)
atattgttttttataaaggtatactttccatgtattataatagttttgacaccaaaacataattttgaaaaatgagatcagttagaaaacgttgacataattcttttcccaaatttttatggtaattattttcttttagagagtaaggtgagagttctgtttttttccttattatatatgttttttataaagtttcatgtttaatgttttctatgtatgttttgcattctgattttgattttaacaaatataacatctaagatctttaattatttttgtttgatttcttgcagggtaagaaaaag

SEQ ID NO: 3143 - DNA, 561 bp, Arabidopsis thaliana
  Intron number 1 from transcript AT3G44940.1 (locus AT3G449 40) derived from phytozome v7.0 (chr-ID Chr3; pos 16414528 to 16415088 reverse strand)
gaaaggtagagactttttttatctctaacattttggcttcctctgtttttcttaacatttgtgatgggttcactattctgcttagatctatgcataatgtgtgtctaaaaaacataaatttcttgtgtcttcttcttcgtttatgttataaacccctaagtttgactcaatttctgatttttatatcaaatttgttgaaatcacttatactctgtttctgagcttaattttgcttaatgggtgttcttaatcttaaaattttagtttaaatttcacattttgtatgtaaattagctggaaaagacaagactttggggacatttgttctgtttgaccaaaaaccctaattttgatatgaatgctcaaatttaggggtttctctgtttctttgtatgttactgggggatttgttgtgtgtttatgaccaaaaccctaattttgttatgaatctgcaaagaaatgctcaatggtttctcagtgtctagctgattgtttttgtgttttttgtacctgttgaattgttcagacaacggaagagctaagacagactctcgtgtacac

SEQ ID NO: 3144 - DNA, 478 bp, Arabidopsis thaliana
  Intron number 1 from transcript AT3G44960.1 (locus AT3G449 60) derived from phytozome v7.0 (chr-ID Chr3; pos 16427897 to 16428374)
aaggttgcaatctctaacttttgatttcatcttcttttttttcattgactgaatttgatttcgacaggagaatttagcattggttaagcttcttgaggaaagagagtatccttttgttccaagcaacttgttttaagtaatgaattcaagaagatatattttctttaactatcaaagtaaaacaattgatataagtagatacgaattgcggaatttacgcgaaggcatacacaaacttcaagtacaaaattggagccttgctcaatccaattcccaattcttaggcgtaagcttcatcgtccactttcgttttcttgattttctctttgattcaaatttctgaatagtatcaaattgttttgcaggagatcaatttagctagaaacaaggtgaaaacataacttctctatggtcacatgttttagaaatttttttttgtctaaagtttagataatgtttcaggtgaaagcgttgcacc

SEQ ID NO: 3145 - DNA, 547 bp, Arabidopsis thaliana
  Intron number 1 from transcript AT3G45020.1 (locus AT3G450 20) derived from phytozome v7.0 (chr-ID Chr3; pos 16469569 to 16470115 reverse strand)
ttcttgattagctcaagttcaatcccccttaacttgtaagttcaaccaaagttcaaaaaattttcgtaaaattttttctcttctacgatttgttgtcttatgttatctagacagagattttgcttttgtgctacgaattgttgatttcctcgtgtcttagcttctttctttgtgttattgttttctcatttcagttttaattttgaaattttagtagcttttgagtatattcttggctggaattgctgcatgtaaggtgttcgacgaaattcctctgagagattaattagtagagaagcttcatttcaaagggggttaaactaaaactaacgcaaattacgagctttatatccatacttttgtttgtagtgattatatttgattggaacgatttatcaatctcaatttcacgtgatccattaaaaacatcgaacatcgaaacaccaaaattgaaatttaatgtaaaagagataaagaatttggttcaagtttctctttttcagtgcttacaatgttgagtatttgttgtgtgtttttgtagaagcaa

SEQ ID NO: 3146 - DNA, 570 bp, Arabidopsis thaliana
  Intron number 1 from transcript AT3G45190.1 (locus AT3G451 90) derived from phytozome v7.0 (chr-ID Chr3; pos 16547588 to 16548157 reverse strand)
tttggaagttgactgctctctctgctgcttcaccggtgagtatacaaagtcttctctactcatgaattcgtacttagtatcgttttattctgaatcgattgtttctttctgaatctgctttgttcttacgcaaagtgaagatttctgaaatgttttagatttcgtttgttattgaactgattgatttcgcctgtaaattaattgtgtggaggttaattgtttcgatactgatactgaatttgatttcggatgttatttactgcttcgaatttgttgttttcttcacgccactgttattgtgtatcattgatttttgtcttccaatagtttcatagtcatggtgatgtttggttcgtgtggtttcattgttcaatatagtggcgggagctagaatttgtaatcatctcttataaacttcatttgtaattgatgttttgatggaaattgttcttggaagctggtaatgtgtagtttagagaagagagaaactaaataggaatgatgtagttccttatcttttacttgcgattgacaggttgaatccatattagacaaggaagatttcacttt

SEQ ID NO: 3147 - DNA, 444 bp, Arabidopsis thaliana
  Intron number 1 from transcript AT3G46260.1 (locus AT3G462 60) derived from phytozome v7.0 (chr-ID Chr3; pos 16999502 to 16999945 reverse strand)
agttcaccaattccacattattcaagctcaagaaggtacgtacacacatttataaattccatttacgagtttttttttgttgtatatcacgtagtttttttttttttttttttttaaaagatattcattgtatcacgtagttgaaacccattgctaaaacaccaaaaaaggttgtacaatttgtgaagaaggaaatatatatttaccaaaaacaaagaaaagaagtttacattgaagttgtatcacaagatagtcttcttcttttacaagtatgcacctaacatattaagaatgtctaaatttccttcattgtttttttttgaccaatggggtttgattactgaataatctgaccaaatcaaactattttcaaattactgatcggttatttatttcccactatcattaggtataagcattgactgtggaacaacgggttcctac

SEQ ID NO: 3148 - DNA, 570 bp, Arabidopsis thaliana
  Intron number 4 from transcript AT3G46480.1 (locus AT3G464 80) derived from phytozome v7.0 (chr-ID Chr3; pos 17103867 to 17104436)
gagaaatatcatcaagaagcattgtaagtatttgtttattatcatgaagtagctagtttatttcttcagactttgaggcaagattaaattcttcagtttactaaggccatactaaaaccatttaataattaatggattagtatgtggattcagttatggatttgctattttttaatggcatttatggatttttcaaattttttgaatagtttgtggattttgtcactttttaggctatagaaatataatttaacatgcgttttattcattatatttgggtttagtcggttgtacttgttttgaagatttaaagtttttgatataaagtacgtatttttgccaaaaaatcttaaatccgtaatttttaataaaagtgataatttcaaaagattttgatgaaaagggcaaaatcaacaataatccttgtgtttttttgacaatataagaccttacattttttcttttgatgtggataggcccctaacagggaagttttctaaacgttatactaatgatgagcttttcacatggtcaggagggtttgcaaggctattgctagattattagcat

SEQ ID NO: 3149 - DNA, 559 bp, Arabidopsis thaliana
  Intron number 1 from transcript AT3G47290.1 (locus AT3G472 90) derived from phytozome v7.0 (chr-ID Chr3; pos 17420877 to 17421435)
tttctacgaagctcaatcccccgatcggtgaccaggtgaatctcttttagttttgaccggaattgacttaaaaagtccttaggttcttctagttgattctgctatatctcgagtcttggctattcatttcaaccctatagcaaattcaattttggcttctctacgtgatgtggtttcctgcttgtaattgttagaaactgaagcctcttgttacaaagaacacaacaagcgtttcacttgttgttgtgtttaaacagaggaatttgattattagaatcagaatcgagaagaacaaagaagagtaacaggaaactgacttttattgaatggggaacttgttcattacatcacgatacaaaaagtttaaatagaaaacacagcgacagaacaagtgaagagtcgtgtctctttctctctaagataaacgacacaacctaatttaaaagtcactactctaacaaacaccttttaatacaacataattataacatatagaccaaactcaattataaactaacagtaataattataacagaagtcgtgtttctttaggttcatc

SEQ ID NO: 3150 - DNA, 492 bp, Arabidopsis thaliana
  Intron number 1 from transcript AT3G47340.1 (locus AT3G473 40) derived from phytozome v7.0 (chr-ID Chr3; pos 17440507 to 17440998 reverse strand)
gccaagagagttcgtgttcttgagctttctcgcaggcaatacatttttcctctgtttttttttggttttcaaaataagaaaattatttgttttgtcactttaaaaccattctaaattgtgcaaaattacgtgatgattagtttgatgttagacatcttaaaatactaaatttattgtttcagaaatatgttaaggaagattgatgtcatctatctcattttacacaatcacgatatacataatttgattttgtagtattgtcaatattttcattttcttggaccatttttactgaacgtgacatgaacagtgatgcttgatcaaattaaacgtcacctttttgcatagtttatgtggatatctcttaaaaaatctaaatctttttttgttggtggaatataccctagaaatggtataaatgtataattgtatattttttccaaacttttggttacagattgaggcacagaggacctgactggagtggcttat

SEQ ID NO: 3151 - DNA, 528 bp, Arabidopsis thaliana
  Intron number 3 from transcript AT3G47350.1 (locus AT3G473 50) derived from phytozome v7.0 (chr-ID Chr3; pos 17447752 to 17448279)
atttcacacaaattcaagacgctaattctatagtgagtttttaatgatattcttttacaagttcattaataatccatatatttacaaaaatgcttagctcttcttaaacatgatttgattgcttcaaacgcaagtattaatgaacttgtaaacttaggttttgaatggatgttgtggttagtgtggactaatccctcagcggtctagtctatactgtttttggggcggacaataaaccgctgcggagttagtttaaagacggtccacaattagcccgcaacggttttattttatttttttgggtctgcactgtagacggttttgttcgcttggaccgctgtaatcattcgaaaccttagaatttagacatgtaggctaaattttgattgcttcaaacgcaagtattaatgatgtagttaatgttaatctgatacatcgatcaaaattcaaaccctatatttgactactacgtacatctaatttgtattttaaggatatcaacttttggggctcaacgtacatcactta

SEQ ID NO: 3152 - DNA, 781 bp, Arabidopsis thaliana
  Intron number 1 from transcript AT3G47490.3 (locus AT3G474 90) derived from phytozome v7.0 (chr-ID Chr3; pos 17498812 to 17499592)
atcacattgttccttactccaaggtttgtcctttacaattctcacttcacgaataatgatactctgttttctggccaatgaattctagttatgtaagtttaggattgggctcaaagcctcaaacgtcgtgaaatgtataaggaaagttttgcttttaggttatttcaatatagtttcattgtgagattgtgctatttacttactccaaggtcttcctttatgttcttgtcgagtactactctcacttcatgagactctgtttttccaatgagttcttgttattaagggtttaggattgagctgaactttatgtattttgggctcttttactgtgaaacgtgttaggggattttggtgtagcaacttgatgcacagaaaattttgctcctaggccattttaatacagtttcttgaagacgttttgatcactctgaaataaatctttgaatttgtgttatacatattcttgatttgggatacgagagataagggactgaatttttctcttgtgctctcatgttgatgacagaaccaacgtctaaagttaaaatgctggaagatataacttgagaactaaacagtttttaagtattgctggtttgtatttaagaattgaatctgccaagtttctttatcgaactagattgtagaacttgcttcattatctttcaccaagtaagttgaacaatgagaggaaatggtattcttattttgcagcatggtctaatatgagctattattgtttgttttgtaatttctctttcgtcgctatcaataggat

SEQ ID NO: 3153 - DNA, 512 bp, Arabidopsis thaliana
  Intron number 1 from transcript AT3G47710.1 (locus AT3G477 10) derived from phytozome v7.0 (chr-ID Chr3; pos 17590823 to 17591334)
tccccgaacttgctaacaacagacgctctggaaaggtacaacgttctaatcaatttttcattatgattccttttaaaaaatttaatttcctctttcaaaccttaaatcttttctaaacctttttaaatcttccttggattagtagtgggtacttaaaagaacaaacctccggtttaaaaaaaataaaaataataactaatatatatcctccatcaaagtttaacagtaattctttcatctttctgttgttgcaaacaaacgagagtctttagttagaattataaataaatattaaactaatattccatatattccaatattgcatgtatgtattgattcatttgattgtgatgcattttgtgacgagtgctaaattttaatttccaaactaatcgacaataaatagcatgctgcatgcatgataattaaattgttaattatatataagatccttcttcttatcaatatattggttactttcaggtttcagcatcaagggtattacaagagac

SEQ ID NO: 3154 - DNA, 401 bp, Arabidopsis thaliana
  Intron number 2 from transcript AT3G47770.1 (locus AT3G477 70) derived from phytozome v7.0 (chr-ID Chr3; pos 17618479 to 17618879)
atcgtgactcgtgccaacgaaccggatcttgtccagtaaccatacttgttactggaaataaccaatcccttggaacaagtatacatactttccctctttaatttccatgtttttttggatatatatatctatgactatagaataaattcttgttgccttcctaactaatcttcactattgttagctttatctgagaatctgcttagtacttctttcacagtcaactcctcttctgaccttttcttgcgtaatctcgcctataatgtcttggcaagtccttctctgtttgaactctgattgtttccattattatcaaagtctctatgtctctcgggacttatctcatgaatatatatgtatttgcagagcacaacatcagagacagactataccaattatcg

SEQ ID NO: 3155 - DNA, 749 bp, Arabidopsis thaliana
  Intron number 2 from transcript AT3G48120.1 (locus AT3G481 20) derived from phytozome v7.0 (chr-ID Chr3; pos 17773122 to 17773870)
aaacgggtatgttagtcggtcccatttgagagattacattgattctgttgtccacgcttcagagcagctaagatctcattctttcgacaacttcttttgagtgggatccatctttggaatgttagaacggtggggctgtgttttggcacttaatgtcttggccttgaattgatgatgctgataaggctttcttattagtttagtagttttgtagtgattcgtagccttaagccagttagttgaggtgctaatgttaaaatggaggtacggagaatgttaggtttttggttgggcattgggtcagcaggtagctgagaattctcccatcaatcaaagtctttatggtgtagttctgtggagggctgtgttttggctctttatctcgtggcattcaggatacaatgcacgttactgttgggagaagacttttcctaacttttccttatcagcaaagcaaaatctattgacctcatagattttcatagcagctctgtatataaggaggattgagacaaaccctttcatggagatatcaaatctgtaaatgtgtttatggtagatgaagaaaaaagtcctggtgtctgagaaagaataaaaaaacaagaaagatcaactctgtccttaaaaatgagatcccttgggttgtataccttgtgaaaacattgatatcaatctcatgtttagttcttctcttgaaattaatgatctgcttggtttgcagctgagaaagataccagtaagggtgcagg

SEQ ID NO: 3156 - DNA, 328 bp, Arabidopsis thaliana
  Intron number 1 from transcript AT3G48205.1 (locus AT3G482 05) derived from phytozome v7.0 (chr-ID Chr3; pos 17840818 to 17841145)
ccacaaaccacctagtcctctatctaaatcatcgtaatttcttctcttattacattgaatttgattgttcttttatttttgagtttctatttgttattatgttattgaaaactcaacataaatgcaaaatgtaaaaacaatatgataaaatgtaatttttgtttaaacatataaaaataatatttcatcaatacaaataaaaacttgcatgtttgcgtatgaaacaacttttgtttggaaatacgtatagaaaagtgaaatagtttaaatattgcaggactgatgatgctgtagaaaggagaaacatgaaagaagttgaaggactttc

SEQ ID NO: 3157 - DNA, 675 bp, Arabidopsis thaliana
  Intron number 1 from transcript AT3G48220.1 (locus AT3G482 20) derived from phytozome v7.0 (chr-ID Chr3; pos 17852850 to 17853524 reverse strand)
cgagaagaagcgtgaaggagaagagcaaacaatgcgctgaattagagacttctagactcttctacgtacaactcattactcttctctgcaccaatattcaaagtaacttcaagtttgaaacacatcatggcttatctcaaaatccatctcaatttcacagtaagagagccaaaacaaaaacctagaaatcttcctcaaaactcataactaataaaaattaaaactaacaaaccaattcgaatgtaaaagtataattttcttctccaagttttgcttaggtgtcaggtttggagagacatggattttagtttaattgtattgattcaacaatattgttaatattacaaagaaaaaaaaaatcattaaaatatacattgataactttaattgaacagagtaaagtcgtgtactcaaaactcaattgggatggagacagagaataagaagaagaaggagatgatttgattttcttaacagatgatctatgggcaattatacttgcgagattaccactaacaatcatcaccacttcaaaactagtttgcaagcaatggaaatcgctcgtagaatctccgtttttccgcaaacttttcaacacccaccatcaaaactctcattcttcatggtcaatcctctgcagagtcctacctgaagtagtcgtggctcactacgaat

SEQ ID NO: 3158 - DNA, 201 bp, Arabidopsis thaliana
  Intron number 1 from transcript AT3G48230.1 (locus AT3G482 30) derived from phytozome v7.0 (chr-ID Chr3; pos 17855514 to 17855714)
agaggactgattcatagaatatttaacatcataaggtagttttgctactgacatcaaatttttatctttcagttgagttttgattacagtcatgtttgtgtttctgagagcaaaacttggagaagaaaattatttttattgtttttattttcattcgatgtcgttattgtttaaagtctctaacaatctctagatccacag

SEQ ID NO: 3159 - DNA, 471 bp, Arabidopsis thaliana
  Intron number 4 from transcript AT3G48470.1 (locus AT3G484 70) derived from phytozome v7.0 (chr-ID Chr3; pos 17952497 to 17952967)
tggaaaggtactcaaaaacacacttctgttttggctatttcctttgttcttttccattgagcttctgtttaagaaatgttaagcataaatccatgattcttcaacaacaatttctgcttcatgacattttacaccattggtagtttcttgtgtattttatcaagtcagcgtagaccaaagttttcacctttcgagtatttgagtcatgtataggagtcttctgaatatatctcccaagaattccttttctatttgaccccactggaaaatctgaagatgtagacagtataacactttacttaatggaccaagtagcaattctccatcttgacaatttatctcggtataacactatgaccagtgatatattttgactgtagctgaagcacgtgcaactatttgtatactcttagcctgtggtgatgtgattttacttaaatgacagattgcttatattgtgtttgcttgaaa

SEQ ID NO: 3160 - DNA, 360 bp, Arabidopsis thaliana
  Intron number 1 from transcript AT3G48670.1 (locus AT3G486 70) derived from phytozome v7.0 (chr-ID Chr3; pos 18030880 to 18031239)
tgaacagtgagagcacccatctccaacctcttcctgtaagtttccccaactactctgtttcttaaatgttctgcgttctttaaaacaaagtatagaagatttaggttgtaagatcgatctcgtttgatttcaaactcactatctgaaactctttgattacaaacccatcttcataatctctgtaaaaatcaaacatgcaattcacttaatggtgcaaaaaccccagaagagggaaaaaggaatcaaatttagtttataaaagcagtggaattgagttgcattgttgaaatattcaaaagcaagatcagatttttgataaagaatttcacttttgattgcaacttataatcaaggaacaag

SEQ ID NO: 3161 - DNA, 360 bp, Arabidopsis thaliana; identical to SEQ ID NO: 3160
  Intron number 1 from transcript AT3G48670.2 (locus AT3G486 70) derived from phytozome v7.0 (chr-ID Chr3; pos 18030880 to 18031239)

SEQ ID NO: 3162 - DNA, 636 bp, Arabidopsis thaliana
  Intron number 1 from transcript AT3G49010.2 (locus AT3G490 10) derived from phytozome v7.0 (chr-ID Chr3; pos 18168048 to 18168683 reverse strand)
tcagtctagagccgcgcaagaagacgattctctctgtgagttttcgctcctctctacttgtcgtctctctgattatcttcgttgctactgtctcgttttgtgtataagtagggttcttgcttgttttctctcatcgtgtgttctgctgctagctcctgtagatttttctaagttccttgttttgttcatttcgagttttattgatctgatataaatcgtccgttgatttgttattttgttatgctttattgattttgcagaaagtatcgtccttggaatgagtaatattacactttcagtgatgaaacttttcgtttatttgattggttttgataacatccttactgtattacgactgttaatgtaatgtgcatacaaactctcgaaactttgattctttaagagtttgagattgtcacaagtctcacctttagtatagatttaataagagtgatctttgaaatacttcaagattcgtatctgttttactctatttatgttctctatatctttgagatggtcttttgtttttgaagtttgaggttttatcatttgatttccttgagctgtttaaagtttcatcatttgatttaaagtgtgtctgattgatgttttttggcagcttgagttgaagaa

SEQ ID NO: 3163 - DNA, 583 bp, Arabidopsis thaliana
  Intron number 3 from transcript AT3G49010.5 (locus AT3G490 10) derived from phytozome v7.0 (chr-ID Chr3; pos 18167162 to 18167744 reverse strand)
gaaccggtaaaggattcactcttgaagagctcaaggtttgtaatttctatctctctttcatttattcatataactatcaagtttcatttcttgctatatatcgatgggattgttggttatgattattgaacttagttggttggattatctatttgtttacatatatagctatcgtgtttcatttcctgctgaacattgttgtgattgttgattgaaattggctggatttttctttactatcggtatcatgtttcatttcttgctgaacattgatctgattgtttgattaatataggctgctggtatcccaaagaagttggcgcctacaattggtattgctgttgaccatcgtcgcaagaaccgatctttggagggtcttcaaacaaatgtccagaggctgaaaacctacaagaccaagttagtcattttcccgcgtcgtgcccgcaaggtcaaggtaatcattataaacaattggtctatggttcagttgtttaatgaattgttggatttggtactgatttcgtacttgttctgttttcgtttgtgtgttaggctggtgactctacaccagaagagttggcta

SEQ ID NO: 3164 - DNA, 581 bp, Arabidopsis thaliana
  Intron number 1 from transcript AT3G49110.1 (locus AT3G491 10) derived from phytozome v7.0 (chr-ID Chr3; pos 18200933 to 18201513)
actgctttgttaatgtaagatatcacttttcatatatctatagcgttatgaaattactgtacttaatctcttcatcttttaaatattgattaaatcagtgtaaaaaagattatagttgttgtcagcattagcaattgttttaggtgtactcttagttgctttcaatttaatgtcattttagcttttcttttatgtttcaaaatttggattctgaatgcaaattttaaaggaaaaagtaatttaacatcacgtcaaaattaatcaaacagacaaagaatcaattagttttggaatcacgtagtagtataatggaacttattaaatttccaccatattttggtaatataaatttttcttttactgaatttattttagtgaattaaaatgggttagaacttagaagagttaattcctccttacattgttttccttaactcagttacttgcttcagaggaacaaatggttttaatggatgaaaaaagttcaacgttaaactgttacctttggtaaagatgtaaactatggatgacattaactaataatttgttaaataatattttggacttttgaaagggttgtg

SEQ ID NO: 3165 - DNA, 632 bp, Arabidopsis thaliana
  Intron number 1 from transcript AT3G49310.1 (locus AT3G493 10) derived from phytozome v7.0 (chr-ID Chr3; pos 18287210 to 18287841 reverse strand)
ggtacgtctctccgccattatcgcttctcgatttcactctcttattccttattgcggaatcagctctgtgattgattgattgattgatcggcacctgcaatttgattgatgttacctgtcatcgatctgatctaagtgattctgtgtttggacgagacgagagttcatttcgatacttcttctttttttgttttagcgtcatccacttaagtacgtgctagatcgaatccagaagtagatacaatttatgccgtcgttttcttcatccactgattggatttgttgttatagctcatatcaaatctgcaatttatcatttgaatacgatggtttgctttgctctttccatatctggtatcagtgattgacgataatccttattttaattctggcatatttgtttcatgtatcataactaggtttgatcaaatgtgtcattgatcaaatatttggatgatattgatggaataattaggaccagtgactatgatacaagttattattacgagtatgaagcaattaaggatggtagtatgttgttcttgaatacgttgatgaatcgtatcatgctgatacacttgtttgtatcgatgattatgttgtttcagctggggattggcttcagggtcctt

SEQ ID NO: 3166 - DNA, 570 bp, Arabidopsis thaliana
  Intron number 1 from transcript AT3G49430.3 (locus AT3G494 30) derived from phytozome v7.0 (chr-ID Chr3; pos 18331678 to 18332247)
accaaatcttctccggcgctgtagcgtttcccccggtacggattcattcacctctctctctctatcgctctccctctctctatctctatctatctgttgttttctctgaatttggtttccgtgttcttatgaattcgatggtttggtgtttcaatttcgttaatttcactgataattgttggtcttttggctctcttgaggtgaatatacttcgctatggtcgtgggggtagtttccttgacttcaattagcttttttatgtcgaatgttcttgagttgtttaaggtgatttttgattaaattcagaaggtcttatgtttgttagaatctgtcttttattcattgtccttactgaggaaatttttttacttgcattgaaaagaaacataatttaccaagaggttctatgtaacgatgatttgtgggtcgatctgtattttaaatagtcgttaaaagtagaatttttgttgtatgtttgaaaggaataatggtttgagtaaggaagaagaacaaggtagatgcatgagtctatgttacatgatgtcatgacacatgctttctttatgatag

SEQ ID NO: 3167 - DNA, 990 bp, Arabidopsis thaliana
  Intron number 1 from transcript AT3G49430.2 (locus AT3G494 30) derived from phytozome v7.0 (chr-ID Chr3; pos 18331678 to 18332667)
accaaatcttctccggcgctgtagcgtttcccccggtacggattcattcacctctctctctctatcgctctccctctctctatctctatctatctgttgttttctctgaatttggtttccgtgttcttatgaattcgatggtttggtgtttcaatttcgttaatttcactgataattgttggtcttttggctctcttgaggtgaatatacttcgctatggtcgtgggggtagtttccttgacttcaattagcttttttatgtcgaatgttcttgagttgtttaaggtgatttttgattaaattcagaaggtcttatgtttgttagaatctgtcttttattcattgtccttactgaggaaatttttttacttgcattgaaaagaaacataatttaccaagaggttctatgtaacgatgatttgtgggtcgatctgtattttaaatagtcgttaaaagtagaatttttgttgtatgtttgaaaggaataatggtttgagtaaggaagaagaacaaggtagatgcatgagtctatgttacatgatgtcatgacacatgctttctttatgatagatggcaagagcttggaacatgagcattgcaatggttcatagggatatagagagggattggggagatcaatgtggatattgtttttattattaatggagattcatgggaacgatctggagaaatatatatatttcaatattttaaatagcttttggagcatattggagcaaataagcatttggagcttgtggagcactgctctgacccaggattgctctcacttggtttgcttcatatatattttggtcttaccatgttttctttttcttttcttatcatcgtctcattttgatgctggggctatgtcgaaagctgtttgagtggaggttctttgtctatagcagtaaattttgatcctttatttatttcgtttcctttttattctcatgtgcagtttcccctttttaacctttgcaaaca

SEQ ID NO: 3168 - DNA, 445 bp, Arabidopsis thaliana
  Intron number 1 from transcript AT3G50470.1 (locus AT3G504 70) derived from phytozome v7.0 (chr-ID Chr3; pos 18729407 to 18729851)
gaactcagacgcagaaacttactcaagaagttcaggtttgtatacaatccatgaaatgcatgaattcttttggttcatacgaagtcttcttatttcttaaatttaatagttaaaaataaaataaaaaattgtttgttttgtcactacttaaaagatggataccattagaatctcagattgagatactgacttacagtgattaatttcatggtgttttaaaataagatatcttggattagctaggaacggtttacttcaagttcgattcaagtttttttcaagtgaaatctttttttagatgagcatttctataagtgattttcgtaatttctcaatataaatctaacaaaacttatcattttaatgaaataacatgagtattaatatttttgtgttattttgatctttaggtataagagaaggatcaaagagttagaagcttcat

SEQ ID NO: 3169 - DNA, 477 bp, Arabidopsis thaliana
  Intron number 1 from transcript AT3G50620.1 (locus AT3G506 20) derived from phytozome v7.0 (chr-ID Chr3; pos 18786268 to 18786744 reverse strand)
gcggagtatatctgtttattcggcaaggttcttctctttctttctctctctctcgtgtctctttttgtgattaagcttctgggtatctctgcatgtatgttttatcaatggaatctaccaaaaagttctgttttttgcaaagatttcataaggaaaagtcatgatttttgagtctctctgttatttctccgttgtaaatgaatgtgattggtttagggtttagcagtagattcttgtctgctctgtgttttcatattcttgattccgacttaattttgaaccaaagtgttgtttctatttgaaacaagaaaacgaagagccaacaaaagccctagagagagcaattaaggaagaagattcacttgaaatagtttgatttagggttttaaaatcaattctctaggcaactaaagactcttgatttggttgttgtttgtaacaggacagtgcagcgattgttataaagcaaccaaagaa

SEQ ID NO: 3170 - DNA, 436 bp, Arabidopsis thaliana
  Intron number 3 from transcript AT3G50700.1 (locus AT3G507 00) derived from phytozome v7.0 (chr-ID Chr3; pos 18841797 to 18842232)
caaatcctcctcgactttaacaattaagcaatcaggtaaagagtctcttgtagtgttctagattgggaattttttggtgtttttggattcatttttgtcgctatatttctttgttttaagctgaaaatgaagatggctaaggtaatctctgttaatggtcggtggtgttcttggagtttagttagatgttttgtccgtagtgtcgtattattttatctgttacttgattaagaacataattcgtttggtaagtttaatagttgttcaatggctgattggttctttatgataaacaaatcaaagatatgattgatttgctttttgtttgtttacagtttattttttcaattcaaaaagtatcaaactttatgtaaacgactaatgactcttatgatctacagaatctccaaaaacccctcctgaaatcgttcaagaa

SEQ ID NO: 3171 - DNA, 392 bp, Arabidopsis thaliana
  Intron number 1 from transcript AT3G50870.1 (locus AT3G508 70) derived from phytozome v7.0 (chr-ID Chr3; pos 18911614 to 18912005)
gtcctagaggccctaaggtgacttatttattttaatttttattaaaatgcaacttcttttaatcaacacatgaaatgaagatttacaataaccaaaaagacagttcatccctttgttttgaatatttgcctatctgttttttcactaaaaccaataaatccctttctctatagtttaatttattgaaagaaacattaaataatgattttgatggttcagtaaatttacttgaatataagttttaaaacagatatttcaataaaagacattaatttattttcttttcgaatattttcatcactatatagagatttatgtattgaacgaacattaaatataagatatattgatggctaatgatgatatggatggttttggaatttgcagtccct

SEQ ID NO: 3172 - DNA, 437 bp, Arabidopsis thaliana
  Intron number 1 from transcript AT3G50910.1 (locus AT3G509 10) derived from phytozome v7.0 (chr-ID Chr3; pos 18919752 to 18920188)
agctttcttccgtggagatctccttcgcgctcgaggtaaatccttctcttacgcctccggatttgatgttttcacctttctctgtttgttgtttcggtgaaatttctggaaattttcgttatggtaggtctgaatctcgagagattcgattcattttcatcggcttgacctattgttagcttctagattatcagatttgtgatttgattttgctagcttctttttttcgtgcgagaattgaatcaagttttgtttaggtataccgatgattgtggtttgagcacgcggtgtttgctttgtaccttcccaatagctaattctcacttatgcgaatgaccattgttggttgatttctgattcgattgaaatgaagaaacgctctttgtggtttcggtttttttttattactaatttgatacttgaatgattgcagagcc

SEQ ID NO: 3173 - DNA, 453 bp, Arabidopsis thaliana
  Intron number 1 from transcript AT3G51030.1 (locus AT3G510 30) derived from phytozome v7.0 (chr-ID Chr3; pos 18951427 to 18951879 reverse strand)
aatccaaaactcttgtaatcttcttctcccaaatttcttgatttcattttgtttttgatgagatatggatttgttattattcttgatttggtttgttttgggttgcgtttttaaatagagtctttgatctctcatacttaagcaatgtaatgatatgattcttttttgtatgaattcatgtttgaattttatgacaattcttggatctgcattaccatagattagatcctaggattggtaggagatcataatgacttatattacgagtcatgttgataattctatgaaactaagggatccctagaaaaatgtttacgctgaagatagatgtaatgttcacaattcttacgatatgatatgtttttagtgtaaatggtttttcaatgaaaatgattcatgattggttatattgttgaaggtggtggttgatttcacggcttcttggtgtggacc

SEQ ID NO: 3174 - DNA, 360 bp, Arabidopsis thaliana
  Intron number 4 from transcript AT3G51390.1 (locus AT3G513 90) derived from phytozome v7.0 (chr-ID Chr3; pos 19076317 to 19076676)
tatagaaacccatctacgacctcaatgtaagaattgttctttcgttcttgtagtggcaaaaactctatgaagtttgatgaaaaaagtgtgattgacactagaatagattataatataggggagggataggaaagtaagaatcttttgatcgtttggttagtgagagacgccttttggatataggagagttaggagagctctacaacagttttccaaggtagttagggttcttgattgtaattcagtgataagaaatacagtttgattacttgattcttatcgaagtgatggaagtgagttctacgttactgtgtctcactgttgtgtttatacttttattattatttaagcgaagacaac

SEQ ID NO: 3175 - DNA, 496 bp, Arabidopsis thaliana
  Intron number 1 from transcript AT3G51880.1 (locus AT3G518 80) derived from phytozome v7.0 (chr-ID Chr3; pos 19248492 to 19248987 reverse strand)
aggtttctgagatcttccattcgtctcgaattaaggtaacgaatttctctattgttttgattttggattcgaatctcttcgtaatttttgttgttgtttcgaattagtttctgcgtttttctctttatcctctctattggggagaatctggagcttagcttgtttgattcgagtttttattttcctctcgatttcaatggaaaatagttgttttagctaaggatttagtactttttgagcttcgaatctgttgttattctctcatctgttccttcgttttcagtttttttctaattttaggattttttgcttgcggattgaattgagtttttccttcgcctgtttgattgattgattttttttttttttttctattggtagtgtatctgttgattctgttctatgttgaatgctatgattaattcttctaaaaatctgtgaaattggttcttacactaagaaattgattcaattcgttggttgtatagttgctacg

SEQ ID NO: 3176 - DNA, 364 bp, Arabidopsis thaliana
  Intron number 1 from transcript AT3G52220.1 (locus AT3G522 20) derived from phytozome v7.0 (chr-ID Chr3; pos 19370609 to 19370972 reverse strand)
tccaacgaggggaggtgttcgcggtggtcgagatcgtaagtttcattataattcgttttggattttgcttctaattacaagatcctacataaaattctcaactgttagggttcctatgtattatccaacgttttcgttcttctctgctattttgatgattttttttgttggatctagtgtttgattgaattgtctataagcaatttgtgggagaagctgaaattcagaagaagctttgtcattctaattaacagatcgtttttggcaattagttttcaaatcaaagatgtagaacatgagctgctaatgatgagaactctattactaattgaatttgtttataaatgtgcagaattcagttggg

SEQ ID NO: 3177 - DNA, 749 bp, Arabidopsis thaliana
  Intron number 2 from transcript AT3G52250.1 (locus AT3G522 50) derived from phytozome v7.0 (chr-ID Chr3; pos 19376772 to 19377520)
tcgtttgggatctggagacttccgcagaccttcttgtaagacctccttttctctctctaatttagggctttgaattctcctgctctgtttttggtagagtctatttttctgtggatttgttagatatccacttttcctttttggttctataattttttttgaattgatttagaggcaaatccttgtttcttagattgagttctcactgtgtcatgatagcttagggtatttttggagcattaacacagctcttaagattgataggaagtgaattgatgaggttactcttcaaaggagcaatttttaatactcaggtagatttagtttcattgcaagaggactttattacctcaattgtgtttgtgttttgtgttcatgaatcttaaaacggataaaaagtcctagcatcgtggagtgttgttagttttagttttacatgttgtagatttagatgaagatagctcctacttttgcaggtttcttacttgtataatttttcctattagtattgaaaccctgtgtgggcgtaatgacacttttttctcctaacttgacttcgtgttataatgattctaagtttgacttccttttggagaatcttatactacatgttttgacagcagtaaaagtctaatttttttggatagatgtcgtttttagtttcacaagttatatatttggttgaatacaggtcttgctttagtttgtgattctcatcttccttttgtcttcaaaattttctgaaggtc

SEQ ID NO: 3178 - DNA, 559 bp, Arabidopsis thaliana
  Intron number 1 from transcript AT3G52560.3 (locus AT3G525 60) derived from phytozome v7.0 (chr-ID Chr3; pos 19495374 to 19495932 reverse strand)
ctagcgttgttggtataaaatttcgattctttcgggtttgttctcgttttttgattttgattctagggttttggaataatccctcgtttgtttttttttctctagggttttggtgaattcttcttttggttttattcgttttgatcaataggtgttgagatttctcataggttctatcgatctagtataaaaaattgtagctttgtctaaattgttcgcatatagcttgatctgaatcaatcaattttaacaaatcgctgagaatgatttgctgatgtctcaattcctgagatgggtttaaaatgctattcctgagtttcttattgtttctaagaccttagctaggaatgttttcatcttctctatagctcattgttaactttgttgagtgttatcttattttagtctttgtggataatgattaatatgatatgttctgttctctgctttgattaaaaaaagtgattgcttgttttcatttactgatatgaattgtttttgttacgcttgttattgcaatatagttccgaggaattttcggttgttggaggagcttgaa

SEQ ID NO: 3179 - DNA, 578 bp, Arabidopsis thaliana
  Intron number 1 from transcript AT3G52560.2 (locus AT3G525 60) derived from phytozome v7.0 (chr-ID Chr3; pos 19495374 to 19495951 reverse strand)
actcttggctcaggaggatctagcgttgttggtataaaatttcgattctttcgggtttgttctcgttttttgattttgattctagggttttggaataatccctcgtttgtttttttttctctagggttttggtgaattcttcttttggttttattcgttttgatcaataggtgttgagatttctcataggttctatcgatctagtataaaaaattgtagctttgtctaaattgttcgcatatagcttgatctgaatcaatcaattttaacaaatcgctgagaatgatttgctgatgtctcaattcctgagatgggtttaaaatgctattcctgagtttcttattgtttctaagaccttagctaggaatgttttcatcttctctatagctcattgttaactttgttgagtgttatcttattttagtctttgtggataatgattaatatgatatgttctgttctctgctttgattaaaaaaagtgattgcttgttttcatttactgatatgaattgtttttgttacgcttgttattgcaatatagttccgaggaattttcggttgttggaggagcttgaa

SEQ ID NO: 3180 - DNA, 810 bp, Arabidopsis thaliana
  Intron number 1 from transcript AT3G52660.1 (locus AT3G526 60) derived from phytozome v7.0 (chr-ID Chr3; pos 19521789 to 19522598)
tcaaaattagggttttcttccggcagctctctcaggtactttctcgctctttcttctttcatctcattgcgcctctcttcgtttcctttcgtgaatctttttttttggttggggatccaaaattgggatttgtgtaactcttcttatcttaattaaaaactgaatctttctctcatttttgttccaatgattgctaagttagcttaaacacgcctttgattgacatttctctgagttatagctttgtatgtgtattgggttgttcttggttgtatctatcattgtggtcaatttgtgtgaaataatcaaatagaattgtagttataagctgaggattctcttaacaggttagattggcagcataaaaaatatcacttgcaaattctgaacaatgtctgttgtgggagattctaacatggagctggagttttctaagcaaagatactattttgactttagcccttcttatctttcttgttgccatgaatattttaaccttctttgcatctaaccaaggcctatgatatcatggtttttatccgctctcaggggtcatttcgtttcttatctttttttgtttcacctgttgagcatttcatcgccctcttctctctttgtctatttgtttgtcacctttttagccgcattatggcaaagcgtcaattcgaacttcttattcttcttttctattggcctcttattgtttcttttccaacctttcctcggttttattctctctccccacttgcttcttgcttctgtgtctcctccacagttgtactgcaagcattcttttctagatatttaaga

SEQ ID NO: 3181 - DNA, 446 bp, Arabidopsis thaliana
  Intron number 3 from transcript AT3G52720.2 (locus AT3G527 20) derived from phytozome v7.0 (chr-ID Chr3; pos 19539992 to 19540437 reverse strand)
gagtccagtaagcccccggcccaattatattattattattattattattattaatttattgactgatttatttataataaattattattgttataaaataaaataaaattccagacattctttgtttgattatctaccaaattagctaggttggagctcaaataatcgagttttggattttatgccaatttgttactccacattttaaaaacccccaatattattttttatgtccataagagtcacaaactcacaagcccattggtatgtaagtgttttttttggtgtttgtctggcttgttatataagcccatgtggattctgtcttcttttctttttgaatgttactataaggttttggagtggagttatatatatcatttgaatcgttttttaaagtaaaaaaaagtgttaattaatgataataattgaacaaaaacgtagat

SEQ ID NO: 3182 - DNA, 852 bp, Arabidopsis thaliana
  Intron number 1 from transcript AT3G52770.1 (locus AT3G527 70) derived from phytozome v7.0 (chr-ID Chr3; pos 19558095 to 19558946 reverse strand)
cgttatctctgcttctcaacactccttcccaaaaggtataacctctattctccttctctctctctcactctcttactgttctagaagcttaacgtgagttttctcgacatgctctgtttctgtttcttgctctgttatctatcgcttttgcgttcatacgttaagataatagttatgtagtaacgtcacacgtacaactaacgtgaagacaaacccttaatttctctctttttctatgttaaaactttttcatcttttaaaatattcctcaatgatggaaagtttttaatctttatctttttctttgaggcaaccgaaataaataaaaaaaattgtttgatttttctttttaatagtctgtattgctacgatcaccatctttgttttgttgcttactctgtttttttctagcgtttcaaatataatcattactctctctgtccatagaggttaaaacatttataattactgcatatatatcatcatgattacttgtttttatctcttttcttcaatttctttctctttattagctttatctttttatcctccatacaaatttataatcatgttcttcttctctctttgatcattgatttcataaaaagaagaaaaagaaattcacatgaaaacgaaataaatgcgacaaatgatttttcctatagctaatgtaattcacatccgacgtgtgaagctgcacaacccatgtgtgatgtaatgatttaacatgaacaataataatcataacacaagctttggttttattgatattattactctctttttctcatttatttttcaaaattcgtaataatacttttgttttgttttacttgtagcaagaaagcagaa

SEQ ID NO: 3183 - DNA, 518 bp, Arabidopsis thaliana
  Intron number 2 from transcript AT3G53000.1 (locus AT3G530 00) derived from phytozome v7.0 (chr-ID Chr3; pos 19654817 to 19655334)
agatattggaactggattccaacggaagaatctaggtactatacactaacgctgcttgatttgaatctcaaattgaattttagaagatcaactagtaggtgtcaagatcattgcaatacttggtttgtgattatgtcatttgcctttaactcatgagctgttgatacgctgtttcttaggtctttcttgaacaatttatgtcttaagtatataaaagaataagacttgagaatttgtgtgagggttattgtttgattagttgcttgttttcttttgctgactcggcttttgagttttgatgaatagcttaataggcaatgaatgttcttgcctaatctttatgattatggatttgagttgttattgtagttatgattcttctcgacagtacatatttctgaatcaggaggttatgtgtgagactgctttataccataaaacatcaaacggcttctttatgtttttgattatggaacaaaaagtaaaatccttttttaattatccattgaataggttcc

SEQ ID NO: 3184 - DNA, 1068 bp, Arabidopsis thaliana
  Intron number 1 from transcript AT3G53630.1 (locus AT3G536 30) derived from phytozome v7.0 (chr-ID Chr3; pos 19884529 to 19885596)
cttcataggaacaacatcaacatcggttcctcaaggtttgtttcttacaactccttttaaactttctatcattctgtgttgctttcgggatgatttagttgttcattgatctagggttggctaatcaaagttttaggtcatgtattagagtatgtattcagtgagaaatataacaatggctcatatgttttggatgatttttgctgttagcgaattctgttttgaaatttgattcgctcatggtgaagcctttagtttgcttttacagtttctttttcgttgcaagacaataagttgatgaaaagagtttggaaaatgatagtttttgatcattgccagtagtgaattcagcacttgctgtttcctgaatgaagttacaggttaggccaatgtgtggttgtggattgtggtcattgcatttctgtctcgaaataacacatggtcgttaaatacgatcgattaattctcctcaattcatattagatagttgtttcccatatatgtatgataaaactgcatgttcttacaatgctttttgttaacttttttaccttgctctaggccttcaatgctgttttggacactcgatttagttcacaatgtgactagtgagacttcgtcgatctccaaatcaattgctttcatatacagttcactatattagtcagggattttcatgccaagaatattcatttttacggtgtccacaaatattgatatagaatgttgtttaaatgttcatatgatgaccacatctagatcttccgatatccatttacattacttaatgagagttctaagacgatgaattttaagcttgtggtgtgataatctactcaatagtattagtaatgcttgatcttactcttgccttttcatattctgttcggatatccatcctcttccaagtatctattagattattctcttgtttcactttagattccaactttaacttgattatcttgcggttacatactcaaaatgtttagaatcgatcactgaacttacgtggttcatcgtgaactggcagggtctaagttcctaagagcgtcttggtagggagag

SEQ ID NO: 3185 - DNA, 919 bp, Arabidopsis thaliana
  Intron number 1 from transcript AT3G54085.1 (locus AT3G540 85) derived from phytozome v7.0 (chr-ID Chr3; pos 20027017 to 20027935 reverse strand)
tcaggccgtcttcatcgccggagcgttttcttacggtaatcttgcactcgattcagctccttcattttgattttttcttcactggttgttgctagatttgggtttttcgcttccttgtgggaattgatcgattagtttggctgcttcttctattagcaaccttggatcttcatttactttctcgatctcatgtttaggtcagcagtttcaaggtttatgattcctgcgtaatttattgcatagcttaaaattgggattgtgtattctctgtttctgtaccaagcttagcttaatcggtatgcatttgctctaatatctattttcacattttggtttagacaaagtgttcattgatagattgtcttcttcacttgtgaattgtgatgaaacttagtaatcttttgattgctgaaactgggaagtctcaggattcctctcttcttcttttttcattcaagatgttgtgattgactaagtgtacttttgttgaagcagatccacaagaaaatctcatctagtgctcttagggttgatcgagcttgttgcttttctcgtgaagcatacttatgttgcttatgtgattagcatatcctcagaagtgttgatatacaatatgtctaggttaaggctctttggaatgctaactcggtgaccgtcctgccattgtttagatttctagatattattgcaaggcaggaataagttcaatctggtggcttttttgatgtgttagaaacaagattttgcactgctatcttcatggttctctgcgctttagatctacagaacacatcagtagcttacatttgcatgcacttagtctccattcattttgtttctaaacctattaaaagataactttgttccactctctttccctgattctgatcattttgagctctatgcatcacagaaaaga

SEQ ID NO: 3186 - DNA, 658 bp, Arabidopsis thaliana
  Intron number 2 from transcript AT3G54085.2 (locus AT3G540 85) derived from phytozome v7.0 (chr-ID Chr3; pos 20027017 to 20027674 reverse strand)
tattctctgtttctgtaccaagcttagcttaatcggtatgcatttgctctaatatctattttcacattttggtttagacaaagtgttcattgatagattgtcttcttcacttgtgaattgtgatgaaacttagtaatcttttgattgctgaaactgggaagtctcaggattcctctcttcttcttttttcattcaagatgttgtgattgactaagtgtacttttgttgaagcagatccacaagaaaatctcatctagtgctcttagggttgatcgagcttgttgcttttctcgtgaagcatacttatgttgcttatgtgattagcatatcctcagaagtgttgatatacaatatgtctaggttaaggctctttggaatgctaactcggtgaccgtcctgccattgtttagatttctagatattattgcaaggcaggaataagttcaatctggtggcttttttgatgtgttagaaacaagattttgcactgctatcttcatggttctctgcgctttagatctacagaacacatcagtagcttacatttgcatgcacttagtctccattcattttgtttctaaacctattaaaagataactttgttccactctctttccctgattctgatcattttgagctctatgcatcacagaaaaga

SEQ ID NO: 3187 - DNA, 860 bp, Arabidopsis thaliana
  Intron number 1 from transcript AT3G54150.1 (locus AT3G541 50) derived from phytozome v7.0 (chr-ID Chr3; pos 20051750 to 20052609 reverse strand)
gtcaggctgctattggggtaagctttataatactatatatcttctaatttagatttgggaaaatctgaaaaccttcatttagtatgaagttcttttttatttttttttctttttttttttttcctttagtatgaagttctagttagtatgatttgtgatactgagatttgctgataaatatctagcaacaaggtagctaatttacttaggagggcctctttcagtgaatcatcatgtgatcatgtctatcattctaaagattagtcaaacttggttgcggcaaatttgattgttgttattcagcctcttgatcttgttatttttatctttttagtcaacgatctttgctgttttattacgtatttaatatatgcataattttttatagatatttttaacctaaaataatgtttaaaaaaatatttacatcaaaaagaggtaggaaaaatgaagttacgtaacttatatagtctttagcaaatgagcttagactgatttggaagaaaatgtaaattaaagacaaaactgagcttagatgttgttttgttttactagattcacaaaacattaatatttcatcaacggtaaatgagaccatgcatgtggaattgtgggtatatcatacatatataatgtatagtaagtgaatttgttcaagacttgcaacctagtgataagtattactgtcgtcaccactcaagttataaactgaaatatatgttgtcaaaataagttaagtgaactcgcctcttgcagattgcctattgatgtttatgcatgcacatatagaatatagtaggtgaactaagcttgacaataccatgaaatctataatttacagcttgtggagcattacgaga

SEQ ID NO: 3188 - DNA, 535 bp, Arabidopsis thaliana
  Intron number 1 from transcript AT3G54540.1 (locus AT3G545 40) derived from phytozome v7.0 (chr-ID Chr3; pos 20189858 to 20190392)
tcgctctcgttcatctacgcaatctctctcactaggtgagtttcatattcttctctttgatattcttgtggtgaatttcgttttagatatgtaccgaattgaagttccctctgttttttttaatcagattcggatcgatatctctcgtttaacagttttaggttttcatttgcttatagttgtgcttttatgaaaagtgaattcctcttagggttcgtctattaatttgctaataaatcctaattctttgatttatcctcttttgaaacggattagatggtaaagaatcgaaattgatttgagaatgcatcagatttgtttatatgaataattatttactgggtttcaataaagttttgagcttgagctttttgtcaccattgtcaagtagaaaaaccctaattctggagctctgttaccagtaccagaggcctgagtttggtagttttcgaattagcttgctagataatatatgattattcgtttgataacttattggctgtttattgatgtttcatgtcaggtacagttttaa

SEQ ID NO: 3189 - DNA, 468 bp, Arabidopsis thaliana
  Intron number 4 from transcript AT3G54670.2 (locus AT3G546 70) derived from phytozome v7.0 (chr-ID Chr3; pos 20237309 to 20237776)
ttgacagtcaactgcaagattattttcgactgtaagtttgaaagaaataaggatttttttctcttcgcaaaaaaattgccgttttccaactgtcctgaggttatagatatgcaccaacttgatttctctatattgcctatttaatcttcttgcttgagtttttgtggtgtaatgaatactacatgggtttacatgtttaacaaaaaagtttaatgaaatatttgttgggtatgagtacttattctgtgctatgaagaacagtctaagcaaacaaatagttacgcgttttgtttgacataatgacataaatctggttgtttacaggctctattattggtgctgttgttgtgacttttgtaatatgctctattattcacccttttgaatccttacgactacctttgttttctaattaatgttccttcatgtttgtcactgtggttttgtctcagaaaagaagaagctgga

SEQ ID NO: 3190 - DNA, 636 bp, Arabidopsis thaliana
  Intron number 13 from transcript AT3G54670.2 (locus AT3G54 670) derived from phytozome v7.0 (chr-ID Chr3; pos 2024124 4 to 20241879)
gaaggtatattgattctatctttacatacatctgatgacatttttagttctaaacttttttttaatctcagtgccattttgagttgtcaatttgaggatttcattcgtagcagacattatcatgaacctgtaaaagtacattgtctgtatctatgttggagctctgttactgaattgatatattcaaatatggaattttcttattctttttagcggttatatctatggatatttacatgctgttttcaaccaattgtctgtttgcattacataatccttgatgtttggttgattgctctttgaacaaattttgggatgtacatggtctgctcgacatcttgcgtaaatgtatggttatgctacgtctgaatctaattcagaaagaaactcatatcatgataaactgcttgaggctgacagatggttgatgtaaaagttcagtatgattaattctgtagcgctgctattctcttctttgcttttgcttgtataagcataagttacagaaccatatactttgattataaccttacctgtctaatgttctttgcctagcaagaatctgcactggtatcttctttcttagagactatctaatgctcctgcttgcagagtgcaaacaaaagtcggaggagt

SEQ ID NO: 3191 - DNA, 697 bp, Arabidopsis thaliana
  Intron number 1 from transcript AT3G54826.1 (locus AT3G548 26) derived from phytozome v7.0 (chr-ID Chr3; pos 20310488 to 20311184)
cagcaaccaacaacatcgttttcctttgtctcaaggtttcatctctctccttctcaactttgtcatctttaagaaaaattaaagagttattgaaaatcgggcactagagttaaactggtctcttaatctgtgtaatttatacttgccttgatgtttcttttgatgaatttggttgagattcatgtaaatttgtggtttttatgtttgaatttacactagaagaggattttggggagattttggttttagggttgtttttgtagcttttagagatttggggcattagtgatgatgagtactcgtattctcatgtgtatatcatctaatatcgtctttgctctgttacattttggagttagagaagtgcttctacgaaacctgaagttatgaatgctcacataagtgctttgtcttcaacatatctctatgcattaagcagtagctgtgaacattggcatttcagctagacgctggttaagttttcaagtttggttatatatttcctgactaagatgtgttagcattagtctacggtttgatgcaaacattatcctaggaggttcctatgatgtcctgttatggtacagactgttttagcttcgtgcaactacaactactgttaaattgatctttcttgattatctttttttttttgaaaatagtctcaacagagcagttgtcgctatcaaactcactc

SEQ ID NO: 3192 - DNA, 421 bp, Arabidopsis thaliana
  Intron number 2 from transcript AT3G54990.1 (locus AT3G549 90) derived from phytozome v7.0 (chr-ID Chr3; pos 20375578 to 20375998 reverse strand)
aatttgtagggattgtggaaagcaagtttatttgggtaagtagatcagatttttatttaattattgggtcatctttaattacgtgtgtgtctatttttaggcataaacgatgaattttaaaacaatcgtatttttgtgataattttgatttgtagatcttctctgacaacgtctgttaaaaaagtttattttttgtcaactacctctattcttttttttttaaaggatgtatgttttttttttgtaaaaagacaaaaaaacataatagactattacagctcatttacctatgtttgttacttctgtctttcacgtttaagtgaacacaagttgattatttgtattaatctaactttttttccttgacttaattttcgttttaacaggcgggtttgatactgcttacgcagcagcaaggtaa

SEQ ID NO: 3193 - DNA, 501 bp, Arabidopsis thaliana
  Intron number 1 from transcript AT3G55020.1 (locus AT3G550 20) derived from phytozome v7.0 (chr-ID Chr3; pos 20394165 to 20394665 reverse strand)
ccttctaatcctctcgtcgcctttgagcacaagaggtttcgcgtttttccccctttcccctgtacatttctgcttcctcttttttggtttgaacttgcgcttcttctctctttagctttttgctagactcgctgagcgaaatgttgtatctccgattacgagagttttaatccgtcttgttgttagcgtaattttgcattttcttaacaatttagttgggattttgatgattattggtcttgatttgaagtacatcctagtgatttggatttgaatgctgatttttgtccagtggtgactattgttctcaatgtggcataatcgttagtgaaggtagtctttgatagcaaattcgagttgtttctgttgttcaatttcttgaaaacaaactgatgagagatgcaattttgtcattggatatagtaaggtttcgtctgagctctggatgggcttttaatatatcgtgggaactcatatcgccttttttctttgtcaacaggg

SEQ ID NO: 3194 - DNA, 412 bp, Arabidopsis thaliana
  Intron number 1 from transcript AT3G55070.2 (locus AT3G550 70) derived from phytozome v7.0 (chr-ID Chr3; pos 20408663 to 20409074)
gccttgttactcgattacaaggcctcaaacgaaaggttgatttttccgtctctctccctctgtgatcggtgttttaaattatgtagacgaaactgaatcaattaatttagcgattaaagtttctgattttgctaaatgatatccacttatctgtaaaaaatttgatcttcgatgttgaagatcaaagtaaagtatctgtctttggcaattatgtctcactagacattggatctcgatgaattcaatgtagtggtggagttggttcattggaacttcccatctgactatttgcattgtcttctaaatttttatcatttgggatagtttctatatcttctggagtaacatcacatggatatggcctggcttacgtatttttttggttttgtatctcagttggaagaagggagca

SEQ ID NO: 3195 - DNA, 380 bp, Arabidopsis thaliana
  Intron number 4 from transcript AT3G55190.1 (locus AT3G551 90) derived from phytozome v7.0 (chr-ID Chr3; pos 20458530 to 20458909)
tctcttcacatttctccaaaatatctggtccatctcttctttgacctcattacacattgacattgctaacttacttgtcataacgttagatataagcctagactgttttaaaaccaaatttctgcgtttactacatgagaaaacaaaatttataaaaacattatcagtttttttttgcaaacaaagaaaaggtctgcttaaaaaattttaaatgtttttattcatacatattcaaataaaaggtttttatttatacatattcaaaaataatttgttctaaaccattgtccattgtctacttgtctaatgcaaattaatgcactagttatccttaatactaaaccgtgtgacttggattgtgtttgttgtgcgaggcagag

SEQ ID NO: 3196 - DNA, 484 bp, Arabidopsis thaliana
  Intron number 2 from transcript AT3G55240.1 (locus AT3G552 40) derived from phytozome v7.0 (chr-ID Chr3; pos 20473987 to 20474470 reverse strand)
caaacatcactcctgtcatcacctctactggttttaattcctctctctctctctcctcttttttaatactttttacctttccgtaatccttataaacacacaaacatatctgtacctatgtactctctaacgggattaattatatgtataaattatggagctatcatcatattatgataccatcatttagaatttgatcatgtaatatgtacttaattagctacagataggatctagcgtgatggatcgatcttcaatatttctattcatataagtgctcatgcataatcaaattaatgattatatacactgacttgactacctggcgactagaacttatacatatacaaaaaaagccaaagaaaatataaaaatccttgcaacatatatatccggcctatatattttgttatcataatattaatgaattggaacaaaataaatgacagtgtggaaggagctggagaaagagaacaaggaattc

SEQ ID NO: 3197 - DNA, 1005 bp, Arabidopsis thaliana
  Intron number 1 from transcript AT3G55350.1 (locus AT3G553 50) derived from phytozome v7.0 (chr-ID Chr3; pos 20518690 to 20519694)
gattctctcgccgtatttgtatctctttttttttcctacctttcttgttggtggtgatttttgcattggcagagtttttgttttttgaatctaattgttgattctgtttcatggaacttgcaattctgaatgttgatttttatttgggttttctaggtgaaaaagtttcagattgaatttagtaatgtagacaagagatgtcctttaatcttactctgtacattggagtattgtttcgatctattgattcgtagttttgggggtttgtgagttcttattcgattctagttgtgtcgtggctaacttaagtgagctatatggatccatggaagtggtttttgtgtagatgaagttgttcttaaggctctaggggctcagtttcgagccatttagactcatctagataactttgagcatgttttttttttcctgttttcgattttggtttaaatgatatgattctttagaaccaatttgggattagcagactttgactagtcttagtttctttttccaatttggcaagttaattttgttttgtaaaagttctcattgctttctgatgatgacattattaactctctttgtgaagagtcagccagatgttttccatgtctctttcagtgatgttctgattatgataagacattttttgcccctcttcccgttgtctctccctgtgtaaatgcgcttgtaggtcgatgataatcaattgataggtcattagctcttctgcttttgcactcttcttttagctttccgagtgttggatttaagctagtccaatgttgtatgagctgatatataatgtgatttaaacagttatggatctgcatggttcttttacactgacttcattacaatgaatgtgtctttgtactaaagagcagtaagcttgatcttggatacattgttgattttgtagttactatgagaatgtcatgttttttcttttcatctcctttttcaggagggtcaacggatccaaagacatttgagtcagtt

SEQ ID NO: 3198 - DNA, 685 bp, Arabidopsis thaliana
  Intron number 1 from transcript AT3G55730.1 (locus AT3G557 30) derived from phytozome v7.0 (chr-ID Chr3; pos 20682977 to 20683661 reverse strand)
gcttgacccttgtctcaagcgtaaacctttctctggtaaacaaactttaaaaccctcttgattttgttacatctaaattcagattctttgcttttgggttttgggtttttgaggtttcgtttgatttgattttactgttcttcttgcaaatgttcagagtgattttctcgatcttcattacaaattcttgagtggtttgttttgtttgttctcgtcttcaaatgaattttttgacttgtgtgtcaaattactgggttttcctttgttttgtgtaattctgattctactgtggttagaagattgtgaagtgaatgagaacaatgtttgactgttttattgtgactttggtcatgtttttcttatgcagttttgtgaaaatgtttgctttactttatctcaatctttgtccttctttattttcttgattactttggccatagagtaagaagaagaaaagattgtttgtaattcactgagaaaaaaggataatgaaacctagattgagggttcacagtgtgttatgtcactgcaccgattttattgttaattgaagcctatagaaatgttggagaagagatttcgaaacttagtttattgttgttatccactttttggattcttttggatttggcttgaaagattgatttttttttttttcatttggtcttgtttgatctgcttgcag

SEQ ID NO: 3199 - DNA, 658 bp, Arabidopsis thaliana
  Intron number 1 from transcript AT3G55740.1 (locus AT3G557 40) derived from phytozome v7.0 (chr-ID Chr3; pos 20695842 to 20696499)
cgaagtccctgagactgctcatcagattagcagcggttcgtttcttatcctctatctttggatttttgtttttgtttttattgtccttgttttttgtttgttgctgctcttttttggtgaatctacttgtcgtttattgcataatctcgagcttttcttgaaaaaaactcatttattattggggggtttgtgctccttttttcattaagcttttcttgagaaataatacacagacagagaatggaaagggtcgtttagctttgtttgtcttctttgttagattgaatgatactttgttacttgcttttaccctataagctgctgaaatatgacacatcaaagaattgaactgatgttactttccaaatcatgttgtctccgatgatgtttgcggtgccctatagtggaaaatgttgtctttgatgattcaagaatgtgaacattcaataactttaagtttcttgatcagtttttgtcttccccaaagttttaagctatgaaaactctgtttttttttttgttttctgttactctgaatttacattgagatgaaaaatgagtggctgaggaatatagaaataattgacaaataatatatactctgttttagtgttgcatgtgtgtgaaagcttaagtgttgaagaacttgtacagattc

SEQ ID NO: 3200 - DNA, 703 bp, Arabidopsis thaliana
  Intron number 1 from transcript AT3G55740.2 (locus AT3G557 40) derived from phytozome v7.0 (chr-ID Chr3; pos 20695842 to 20696544)
cgaagtccctgagactgctcatcagattagcagcggttcgtttcttatcctctatctttggatttttgtttttgtttttattgtccttgttttttgtttgttgctgctcttttttggtgaatctacttgtcgtttattgcataatctcgagcttttcttgaaaaaaactcatttattattggggggtttgtgctccttttttcattaagcttttcttgagaaataatacacagacagagaatggaaagggtcgtttagctttgtttgtcttctttgttagattgaatgatactttgttacttgcttttaccctataagctgctgaaatatgacacatcaaagaattgaactgatgttactttccaaatcatgttgtctccgatgatgtttgcggtgccctatagtggaaaatgttgtctttgatgattcaagaatgtgaacattcaataactttaagtttcttgatcagtttttgtcttccccaaagttttaagctatgaaaactctgtttttttttttgttttctgttactctgaatttacattgagatgaaaaatgagtggctgaggaatatagaaataattgacaaataatatatactctgttttagtgttgcatgtgtgtgaaagcttaagtgttgaagaacttgtacagattcatggtttcaggtagcttttgttctaacgaccggtataaacagtgc

SEQ ID NO: 3201 - DNA, 666 bp, Arabidopsis thaliana
  Intron number 2 from transcript AT3G56060.1 (locus AT3G560 60) derived from phytozome v7.0 (chr-ID Chr3; pos 20804502 to 20805167 reverse strand)
tgcttctgtccataagatcctcttcactattaaaggtaatgacgactgataattgaatacatgtcttataatttattttatttttccataacgagaggtatgaaagaagagagaggaacgttcctgaaaaacctaaaacaaagcgagagtcagagagacgtagcttacacgtgatcaaacttgttttttttttttttaatcacaacttgtgtttaatttgttattgaaatattaaaaatcttgcttacgattatgatttttatatatttattacatgtagtaaggatctattattatattttgattagaacatggttataacttgtagatgttccttaacaaaaaaaaaaacataaagatgtttaacatagttatgatacttatttataaaacaaacattatttatgataacatacactaattacaaaaaactgaaacttcaaattagaaacctcttttttactcttaaatctctataattttgaatcatgactttcagttgttcattttggtaattataatgaattattcaattatggcgatcgtttggtcattatcaccgtcgtagtcattcgttgttgcacattaccatacatattatttgtttgtatattgctccggatatgaaacttctctattggacaggtaaccagaggcccaaagcat

SEQ ID NO: 3202 - DNA, 722 bp, Arabidopsis thaliana
  Intron number 1 from transcript AT3G56220.1 (locus AT3G562 20) derived from phytozome v7.0 (chr-ID Chr3; pos 20859020 to 20859741)
ctgtaattttattccacaccattctcttttcttactttgtttcttattttgatctatgatactaaatcaaaatcagtctagctactacttatatatttactatctctctatatatatgtgatttcaattgatatatgaacattcgtattcacatatatatataaacttttttcacatatatatactttggcatgccgatttatcattacttgatttatatatctctttacatacattaattagagagatcaaactaatttacttcgtacaaattacatatctacgtagctttaattttattttcatatacatgaatgaaactctggtttggcggctgatcattaataaattcgaaattttgactaatcgatgatagagcctttttcctttcttaaagtgccttcttcattgagaaaagagagagagaaattttgaatgagaaaacgtcaaaaactatatgaaacttagaaactatctatatatgtgtggttgctattttagtttttatttttgtctatatagttttacttctcggacaattacttgatgatccgctcctagacataatgaacatatactacaataaaatacatattataagggccgaagtatgatcgcgaaaagggactaaacttgtagtttgagtatttaaattaaactaaatcactaatatgtttgctgcgcgcacgttttgcaggagagcgaaacatctatcatagtgg

SEQ ID NO: 3203 - DNA, 654 bp, Arabidopsis thaliana
  Intron number 1 from transcript AT3G56440.1 (locus AT3G564 40) derived from phytozome v7.0 (chr-ID Chr3; pos 20926218 to 20926871)
ttttggttcttctcgctgttttcgttttctaatcggtgaggattttgttcaatctcattgtgtttttgtgttcgaatcaggaaatgttcgcagttcttattgtttgatcggattcttaatttgtgtgtaaattattacgcgattgttggattatatatgaaactggaattgtggttttgttaggattttggagtatgtatgaagttgcttaggggtttgttgatcgtaatgtatgatgaatagatagggtttttaggttgatgagtttcgatcatggtggaatttgatttcttacatggcttccttgtacatggctaacattgacggctaagaattgtggtcatgacatgttatcgccactagtcttacctcagagaagataccttgttaatttgttaacacttttgtgttgaattagcttaagtttttctaaggcattgtattagtctatgttcgactaggattctgaatcgttaggtgttgtaatgtctctgctatgagtttgggattgattgcttcaagtttagtctttcagtttcattgttttggatcttgtggacagtgtgtttcatgaagtgagatcaatcttaaagtcttatttcttggttattgatttcagcttgcaacaatttcaacgtttcacatattaaggag

SEQ ID NO: 3204 - DNA, 622 bp, Arabidopsis thaliana
  Intron number 1 from transcript AT3G56560.1 (locus AT3G565 60) derived from phytozome v7.0 (chr-ID Chr3; pos 20955558 to 20956179)
cagtcgaccttcaggcaaactctttcacaccaaaggtctttttcctatctagttgttatcaatggctctatttaaactttgtctaacattttcttttaatcaacactatttcaattttaacatgaaaacggtatatttttttcaaaaacagatttatttcacatttaatgtaatcaacgtttatttctttgttaacttgtgttgtttggagtaattcacattcttgcttacattattccacaattttaacgtttgttagctaaacatgaaacttattcttttccaaatctcaatctcaatttgatattcagcaaatcttatattatccgaaccccatattatctcaaattcgataaatttataaatcattttatatatacaccgtcttattacattcttataaataagagacaataactaacgtaactaactgaatatctcttacgaaacttacgcaaaaatctcttacgaaacttaatcccatattatctcaaattttataaatcattttatatatacaccgtcttattacattcttataaataagagacaattactaactaactgaatatctcttacgaaacttactccttgttttttgtcaaagctccaaagttacttg

SEQ ID NO: 3205 - DNA, 700 bp, Arabidopsis thaliana
  Intron number 3 from transcript AT3G56570.1 (locus AT3G565 70) derived from phytozome v7.0 (chr-ID Chr3; pos 20959382 to 20960081)
gttcctcttgcagacctgtaagtttacctcacatttgtcttcatagggcttgttaagctaaatatgtatcaaccaaagaaagttgttagaattgaggtttaataccttagaaatgctttcctgtatcagctgtttttactccctaagctttgcattaaccatagacttatatagttagttacttagtttatggtcatatagatgttttccttatttctctgttcacttcccagacttgtgagtttttattgcatcttgtatatcggccaatttgcctagttgttggaccaacatttgcttgtttatgttgtcctcaagagatttccgctgtgtagattttaaggtctcgttaggttcaatcactttgataagaccgagtatgttcccagtcctgtcagtgattgcagataatctatacagttagcaatcaatgtgctgatttttttcacagccttcttctggattgcagcatcttattggttatttacttggatctgtgcttttccgttttgattttttttttcatgtggaaaaaatgatccttagaagtcggtttcgatgaactaaatgtgattctagcatgctaggtgaatttcctgacaaatgcttgatgatttactcattgtccactcttcttagtattgcctgtttatttcattttgcagctttaatcataaaactggggcagaagacgttcact

SEQ ID NO: 3206 - DNA, 1031 bp, Arabidopsis thaliana
  Intron number 1 from transcript AT3G56590.1 (locus AT3G565 90) derived from phytozome v7.0 (chr-ID Chr3; pos 20965317 to 20966347)
tccaggggatctagatctcgatccaaggtttaaaggtatatatcgcgttttctctctgatttgtgagttccttcatactctatatgattccgtcgaggctcacgcaaatctagcttcatgtgattcgtgaattcagatctagggtttgtgattcgctggtttttttgttcttcctggattttcacatgggaaaatgtaggcagaaactaattgaatgagctgtcacaaagcttggaattcttggaataaacatttgattaatatttaatggatttacaacttacaatttttgaggagatgatgtaggacatgtatattttccattgacttggacttagaaattgctatttgtagcgttttgtttataaggtttatatatgaattatgttgaaattttatgttgaaacctgtggagttcaggagtcaaataaggatgtgttttttttgttgagttcatgaactccatatttagtattcttaacacctttattgaatcaagactgcctaaaaggtaaaatttctaataatgttcagaatgttgtattaagcttagcttgctttagcatggaattgtatttctgtgcactgatcaatttccatttatgtctatttgttactgtacaatctattcttaaagctggttggtagaatcaattatgaatctagacctagttggtgcgtagtttagtgtgtgatatagctgtgcaaacacatttcctctagtgattctgatttggttaagacatctattgtagttgctgccacttgctttggcaggcaaggatgttttggtttgaattatgaaacttgttctctgcacttctgttgtttaatttctctttcatgttacaacttgcatgtgtttataatcacctgtatcattttctgtttattcccctgcccactggagcaacaatttttagttacctataacttgtgtcatgatttatctctatgtttcatgatggagcaataatggcgctttttggtttttgtttcttttgcagatcacagaatagtggcgagttttg

SEQ ID NO: 3207 - DNA, 572 bp, Arabidopsis thaliana
  Intron number 1 from transcript AT3G56760.1 (locus AT3G567 60) derived from phytozome v7.0 (chr-ID Chr3; pos 21022728 to 21023299 reverse strand)
tggctgtcaaagttattcccaaatccaaggttcgtaatgactgtcaatctctctatgatctgttgattcctttgaagctattatgatatgtgatcatgccttaggttccacttgtcatttgccatgtgtagttcataggcttaggcttaggcttagctggaactttgactcgtgcattttgtttaggaactttgtttgatacatttttttcctggagtgttgtcagaaacaatttgcttggttggtgtttgaattatgtcaagttaagctgtgtggtatcagctcattagctagtctcatggtttacattgttcgtattggtaagatctgtgagctactgagaagctttatcaaccatcattggatagtagattgctagatgattaagttgtctgcatttatccactatagaagtcttattctgtcaattgttatctgttggttggattttgaacgtatgagactgagtacgttgtcagaatagagtttcttgagtgatgttgataaaccaattgtctcttcttgatttaaccgtttgtcttttctaatatcgtggatgctattttcggtag

SEQ ID NO: 3208 - DNA, 794 bp, Arabidopsis thaliana
  Intron number 1 from transcript AT3G56770.1 (locus AT3G567 70) derived from phytozome v7.0 (chr-ID Chr3; pos 21029632 to 21030425 reverse strand)
acaagctccgcaagttactctcttgtaactccaaggtacacaaatcttttactttactatctcactactctactctaaacttataatgaaacttagatagagacttgaaccggaaaattataaaaagcatagaagataaaaatggaagattaagcatgatgaaactattaattcttttgggttatttaagatatgaaattaacttctaaagttacatattcttcagtactcgtctaaacatgcatataatttaattaggaaaagatttatgaaatgaggattaaagttttgatgttatctcaccagaattttgtgtttttaattaaatctttatatccaaatgacaatttttttgtcttaatcagattaatcttgcttgtgtgatatacgttactacagtctagtgtctagctaagattttatttattggtgagaaaggtggaatattggaagtatatcacttatagaaaatgaaccattttaaaactaacatcagtcaaatgtaatgttttcgaataataaaaaagctgcaagtactgggaatatctagaaaattgaggagatataaaaagcttacaagcccctttttttctctgaagctgataatcactttgtcgggaaagttatcgagcttttttttttctcatttgaaaacaattgaaacatgaagacaaaatttctcgaatcaagacaaattctaatgatctgaccttttctctttccttgtttcctttatttgttttaattttctttacacagacagacaaatccacactactagcaaaagtggttca

SEQ ID NO: 3209 - DNA, 431 bp, Arabidopsis thaliana
  Intron number 1 from transcript AT3G56930.1 (locus AT3G569 30) derived from phytozome v7.0 (chr-ID Chr3; pos 21073827 to 21074257)
tcaagaggctctatcaagtttggagaggaagcaatgtaagtcctgacattttccactttgctttcgtttctttcacattttcataacctggagaagatttatcacataggttttggtcattaatgaaatcgctcttggattcctttgagtccaagtcatagcatttcagactcttgactctttattttggtaatgaaataagaaagaagcaaaccagttttgtatctaattgtcaccttccgttgactcagtttagctcttgtgttttagatcattttagactcttgactcttattcattctcttagtagttgtagttgttactatcttgagtcttgattgttcttatatggaagttttcaggcgatggtcattggaagctatggatttaaaactgactttgattttccatttttctttgaagaaatttct

SEQ ID NO: 3210 - DNA, 839 bp, Arabidopsis thaliana
  Intron number 1 from transcript AT3G57130.1 (locus AT3G571 30) derived from phytozome v7.0 (chr-ID Chr3; pos 21148271 to 21149109)
actttggcgtcgagcagctcgcgttgcttactcaggtactaattatctttatttaggttaatgattcttgttctttgatcttgatcttggtaaactaatctacggatttgttttagtttggttcggttgagatgaattctgaaactctatatattgatcatgataaacatttttttgttgaagactattaacaataaacatatgtggatatatagataggagttgttattttcttgatttcatgtgtaactaagcttaaagattgcttgcattgcacgtagtgcaactttctttccagatttagacggcaatggactgatgtgttttgcacaccgagaaatttccttaaaatggaatgatgcttttatttttttaatatacatactctttatttagtagaaaatatcttctaaaatagtaacttggagaaaaaaacagtgattttattagtagtcccaaaaattgagaattgtcttaatcattcattctgcgattttgcatgatattagtaatcgcatatttgtgaggatcgctgtttccgttcagcattcccgcaatttctcaaatgcaatgacctaatttaaaagaattttatcattttataggcttttagtgtaactagatttttctcgcttaagcaattttgccatttcattttgtattcttctccatatataataatctcttgaaccatagtcgcgtgaaacaactcctttataatgaaaatgatattcatccaatgaaatggaagtggtggatatatagtgtctctaacttcaatattgttttgtctttaaagccaactgtgtttttttccctcacagaaacatttgacaagt

SEQ ID NO: 3211 - DNA, 436 bp, Arabidopsis thaliana
  Intron number 2 from transcript AT3G57160.1 (locus AT3G571 60) derived from phytozome v7.0 (chr-ID Chr3; pos 21157863 to 21158298 reverse strand)
cttgaagggtaagttatttgctcgactttaaattgttctttcaatgttttttcagtttttggttcgagaattgttgatccttagagagaattcatggttttttatatcatttgattgaatcggtagtaccatgtcatgtcacgtttgttcataagtttgttttcatttggatttggtcctcaccttatagtaatgcatagaaagatgttgaatctgatagtgctgatctgagtgtaagatataattcaaacctcagaaccgaaggttattagaaaagatgtgtgccatcatgtcttcattactcagaagtttgttttctttctcactttgtggagttatctggctaatacatgttgtgttcagtactggatatgactgagtatggtgatttgcttttgcagtattgctgctctgtgctgttactgtgtcttggacg

SEQ ID NO: 3212 - DNA, 556 bp, Arabidopsis thaliana
  Intron number 1 from transcript AT3G57390.1 (locus AT3G573 90) derived from phytozome v7.0 (chr-ID Chr3; pos 21234057 to 21234612)
agcaccggcaagatttacgatttctccagcgtctggtatattagttatcatctcatgattttgcttctttttttttgctttggggaaataaaaagttttgcatttttatgggtttttgtgtctaaagtaaatgaaaacagagcaacccctgtttatctatatcctaatctggctaaatctttaggttgatgatgaaataattttgatgggttatgattttaaggtttggagaattgagattacgatttttgctatcggattagtttgtgtgttttataaaccctaactgttgatgaaactacaatttggtcactatctttggtatcagaatttgggagatgcatttgtctatgtatatatcagttgttagaatctcaactccagaattctgaaagatcgttaatttctaagattattagaccatagaagtgtttatcttatctttatgaagaaatttgagaatgcagaagtttagattcatgattttttcctgtaatgatcaatcaaaccaattacggggttttactaacggagagttttgttcaatttgtgaagt

SEQ ID NO: 3213 - DNA, 1003 bp, Arabidopsis thaliana
  Intron number 2 from transcript AT3G57410.1 (locus AT3G574 10) derived from phytozome v7.0 (chr-ID Chr3; pos 21249852 to 21250854 reverse strand)
cttcctcagcgctactcgaagatctgtcttttcaggtatgatgggtttgtttggatcagctgatttcgattcaaattaacgttttttggatctctctctggttgtttgtacttgaatctgagtttctcggtctgctttgtacttgctgatctctgctttaaaattgattgttttcttcttttggttctctgattatgtggtcatgcattcatcagcttactttagtatttctcaaaagtaaggctctatccgttgagaaacaagaacgaacaagttgatcatcggattattttctgacccgaaattcagttaaaagtaagctaagacagaattgaagtttgcgttgatctttaaaccaaaacaagtggtggattcgcgagtgtgtaccaatattactgcaaagttggatcactgtttcaagtcttggactttcattgtgaaaatggttgagatccacatggaattgaaggttatatgtagatcattctagagcctgactactgtagtttaattgattacttcgattatttggtggcgggagatgtttgccagaaggaaggtttgattcagtaatcatcgaggctgatcttataagagttatttgcatttcctctgcttctcatgtctagagatgtatattcacaacagagcttatagcgatacatgaaactccgagtgatagccaggctcagttttgaaccccttgaattactttccctgaggaaccattattatgaatgatttccagataataatgaattgtgggagagaactgagtactcagattgttgcagagttaatatattgctcaaacatgcttctacgtaatactgtatattctctcatatatgattgccatttagaaattcaattataaaagctagacctttgtgttgctctttagtgttttttaggctcctatccaagcgccagtttcttcttataaaacaatctcttaccttcttattttttatgcttgctctatgtttttggcaggtcgttt

SEQ ID NO: 3214 - DNA, 568 bp, Arabidopsis thaliana
  Intron number 1 from transcript AT3G57890.2 (locus AT3G578 90) derived from phytozome v7.0 (chr-ID Chr3; pos 21438749 to 21439316)
gatacttgtctgcgttatcgccaattcaggcaagtttcttactttttttggccctcttattataatgtgcctcaatcccagcgcctgcgatttgtttggtattgaaatggaactgttgtactcgagtatggaattggaacgtggtagagaataacttatttccatttcgcattgtatttaactaaaatttgcaatgcaagtttaagttttctgagtcatttgatttacctgaaacttagagttaagcaatgtcggaaatttgggtgattaattgaattgatggtggctatagtttcgtaacaattctcaatgaggaagatgcttacttgtatttaattgccagtcccctttctctgatgactctggggcaatggtaattggttagtttactaactaaagtcaaacagtcgccagcttgctttgttttgtggttcggaatctgattctttttccgttgtaccttattttgtttggtcctttcacgtggtttatttggtgataatgcttggtgtgttcttgaattttgactcgggtctccagtcctgtaatattctgtttcctgtgtggt

SEQ ID NO: 3215 - DNA, 763 bp, Arabidopsis thaliana
  Intron number 1 from transcript AT3G57890.1 (locus AT3G578 90) derived from phytozome v7.0 (chr-ID Chr3; pos 21438749 to 21439511)
gatacttgtctgcgttatcgccaattcaggcaagtttcttactttttttggccctcttattataatgtgcctcaatcccagcgcctgcgatttgtttggtattgaaatggaactgttgtactcgagtatggaattggaacgtggtagagaataacttatttccatttcgcattgtatttaactaaaatttgcaatgcaagtttaagttttctgagtcatttgatttacctgaaacttagagttaagcaatgtcggaaatttgggtgattaattgaattgatggtggctatagtttcgtaacaattctcaatgaggaagatgcttacttgtatttaattgccagtcccctttctctgatgactctggggcaatggtaattggttagtttactaactaaagtcaaacagtcgccagcttgctttgttttgtggttcggaatctgattctttttccgttgtaccttattttgtttggtcctttcacgtggtttatttggtgataatgcttggtgtgttcttgaattttgactcgggtctccagtcctgtaatattctgtttcctgtgtggtatggatgttctattgagtcttttagaaaacagtcatataatcttaagcttttcagtgttttctacagtcactgttctttggtattctatcgtttctcatcacatgggtcgaaccaactttattggagctaaaattgttatttatatctccttttcatcatttctgcagcttgttcgcagcaacagccgtcgattt

SEQ ID NO: 3216 - DNA, 615 bp, Arabidopsis thaliana
  Intron number 1 from transcript AT3G57930.1 (locus AT3G579 30) derived from phytozome v7.0 (chr-ID Chr3; pos 21447676 to 21448290 reverse strand)
ggttcacaggtgagtctctgtctctctgttttgaagagattgtaaggaaactagggcttgttttcttgtttagactgttcatgcaattagttttcgtggaagataattgattgaacttgcttgtagcttagttcttggtttctattgagctctaaaggataggtttttaagagatgaaattgtttaatgtctcgtgactcaagtgttgcttatatatgtttcctttgttcagatctttttggaaagaatttgtatttggatgttgttaaataacttgttcaatgcactgcttctaatgcatgaaaaaaatggaatcttgctttcgtgtttatgattgcgcttgtgttgattcttcaatgaatagttcctcctctatggagtgtctgccagtttgaatgatcctctacttttgtgcatatcgaaaaaaatgacattgcttttcacactttttagtctgcattcttcaacaaatttctatagtgtttgagtttagttcgccttcattgtgttgttgtgaggtatgagttactactggtaattaaaaagcaaccttttcaacttgcaggtttcttgtctagttgcttgaggtttttggtttttggtttgaatagagtt

SEQ ID NO: 3217 - DNA, 355 bp, Arabidopsis thaliana
  Intron number 4 from transcript AT3G58160.1 (locus AT3G581 60) derived from phytozome v7.0 (chr-ID Chr3; pos 21535657 to 21536011)
ttgaaggaaggacagttgaaaaccaagttttagaagtaagttgtgatgatctaattaatttaaaatttcagagtttcctacactcaaggggtcaggttgttccgcctaaatcaaagaaatttcaagactatgagcctatgatgatgactctgtccctttaatcttctctggaaacaaaacgtttttgtttgttaagctttcttgaaatttggggatatacccctgcctggacatccttagatcggagcttgttcattatatgatacacttgtgcctcttgttttggtttttggtctaattctttatgccaattgggttatgttacagtcaaatccagttcttgaggcatttggta

SEQ ID NO: 3218 - DNA, 940 bp, Arabidopsis thaliana
  Intron number 2 from transcript AT3G58780.3 (locus AT3G587 80) derived from phytozome v7.0 (chr-ID Chr3; pos 21739361 to 21740300)
agtacgccaacaacaggtacgcttctcctactctatttcttgatcttgttttcttaattttaactaaacaagatcctagttcaaatgataacaaagtggggattgagagccaagattagggtttggttaatttagaaaaccagatttcacttgttgatacatttaatatctctctagctagatttagtactctctcctctatatatgtgtgggtgtgtgtgtaagtgtgtatatgtatgcaaatgcaagaagaagaagaaaaagttatcttgtcttctcaaattctgatcagctttgaccttagtttcactcttttttctgcaaatcatttgaacctgatgcatgtcagtttctacaatacacttttaattttgacggcccatcaaatttcctagggtttacttcagtgaaaaaaattgggttcttgacacgatttagcatatatatataaaaataggggatgatcaagacttatgtaacctctgtctggtgaaactagggacaaagtctactgatgagttgtcactagggatccatttgatcatttaatcccaacaaaaatgaaacaaaattttgagaatttatatgctgaagtttttcaaccctcttttttaaataactttatattatgtagatttgtatttagggtaatttgtccaactagaagtcctaaaaatcaataaacacacggatgactttgtctaacattgttatcagtcatcaaatgtaaaattgtacaaataatgaaattaaagatttagtctcttttattttttttgtttagggtgtatatatatatatatatgtatatttgttgcattgatatatcaatgagagggagagaactcagagaagtgtcggaaattaaaatggtacgagccaattggaatctctggcattctgagcttcatttatttgttattagaaaaaaaaaaaaaaa

SEQ ID NO: 3219 - DNA, 345 bp, Arabidopsis thaliana
  Intron number 1 from transcript AT3G58790.1 (locus AT3G587 90) derived from phytozome v7.0 (chr-ID Chr3; pos 21745425 to 21745769 reverse strand)
cctcgaatctgcctccgtttgcgattcaccactcggtatagtaaaacactcattcttcatagtattagattccatataaattttgattaatcgtttcttactttagtatcttcttggtaattaatttgcaaatctacctattttctggatatgaatgattcagatagcttcaaagtgtgaattcagttaatgattattgatatggataaatcttcttcgttcgtattgaatgctatgtgcttgtcatctttaattttttgttcttctttgtatttatttattttcgtatgattcgtagatttaataacactatttttttcatttgactctgtattcacagattgc

SEQ ID NO: 3220 - DNA, 729 bp, Arabidopsis thaliana
  Intron number 1 from transcript AT3G59350.2 (locus AT3G593 50) derived from phytozome v7.0 (chr-ID Chr3; pos 21932614 to 21933342)
aaacagagagagaaatagagagacatactttacaggtaataattatcttgtttaattgtattatatatctctaactaaatttgggataaaaattgtctattcttgatcattcctctctgtatctctctgcttttgacaccttctcttagctgttttttcatcttttatctctgtttttaaaatcttttggctctttcgaagggtttcgagtccttttgagttctttgggcttcctcccaaatttctccacgagctcgacccctttcgtatcttccttctcatttttttgccaaatttattcgatccgtctttcactatgtatccgatggattctgattaccatcgccgtggtctggtggtaagaagaattagaagatctcctcaaagctttggttttttttcgaatctatctctaattttccaaattgggtttgtgtaaaggtcttaactttagggtgaatctcgaatcattgcttagcttaatgagctccagattgttatgttattttgggaatcttaatgtgattaggattcgttagattgtttctgttgatttgaggacccttactttggctctgtgttaataatatatttgaccctgttattgatggatgacatgaataaagaggtttctgctcaaatctttgtgagagtaattagtttgataatgacgctgatgatgatgacattgcaggcaaacgatcgttcaccagctcagtttgttaggct

SEQ ID NO: 3221 - DNA, 829 bp, Arabidopsis thaliana
  Intron number 1 from transcript AT3G59450.1 (locus AT3G594 50) derived from phytozome v7.0 (chr-ID Chr3; pos 21972843 to 21973671)
ccgtattaagcttcttcttcttcaacttttgctgtctaaaagttgtattatcttattttcagcttctagattttcgatttgccttgtgctccttgttgattttaggttttagttttgcctgattcttctcgatttaggttactatggttggttcaaacattggattgttgctaatttgattttgaattttgcatttggtctctgattcaaattaggcacaagagaaggcggatcttgtgcttctcatctctacttggatcgattgttgctactttgctttagtttcatatctcgtctctgatttgactgagacgacttgtgcgtataatcgattgtttttttgcaattcgtctctgatttgactgagactaagaactctctcgtgcatcatatcatctctgctatgatcgattgttattttgagtgacttttgcatttcgtttctgagacgaagaaagctattgtgcttttcatctttattgtttctgattatcttacaatgttgttaattgatgagtgtttatttgaagcatgcatttgtggtccgattttgttgactgtaactctggctcagtgatgtttgtgaatttatttttgtcctgtctctttatcacgaccttgttcttttgactgagttttggttactatcattggttgaaatgatgaagaaaacactcttgtgcttctttgctctactattgttggcgtctaagagtactcaagattcatgcatttccctttttctgccattgctttatatattttcacacatgatgtttcttaatttgacacaggatattccagtggcttaaacggtgtctctgtggag

SEQ ID NO: 3222 - DNA, 377 bp, Arabidopsis thaliana
  Intron number 1 from transcript AT3G59540.1 (locus AT3G595 40) derived from phytozome v7.0 (chr-ID Chr3; pos 21996395 to 21996771 reverse strand)
agaaagttgcagccactaaatcagatccgacagtaaagttttcttcgcctctcagttttattattctcaggaggattattgaagctaaatattatttgtttgattatctgttctcacgactaggattttagtaaagtttgcatgattgagctgaaagtaatcaatctcttattgtgggtttcttgtttggttactgataatctagtagattagagtcttcctcgtaattgacccattggtttaagtttcatcttgaaatgtatgaagtgttcatcatgcagtaacatttgggtcgaagtcttgttgtgtgttctgttttgttttgtattgattgaaaatggatgttggtttggataatctgcagccgaagcaaatcc

SEQ ID NO: 3223 - DNA, 912 bp, Arabidopsis thaliana
  Intron number 1 from transcript AT3G59670.1 (locus AT3G596 70) derived from phytozome v7.0 (chr-ID Chr3; pos 22039532 to 22040443)
gccgcaaaacctcacttgctctctctttctctctggtatatctcattatctctctatcttctgtgttgttgtatatatgtatagctctaacttcgattctttacgagctcaatttctttgtttagatggttccaaatgttttacctttttactttttttaatacctttttgtctttgttgctgccatgtgagctcaagctctgttcttgttagtgggttaaattcctttcttttatggatattctgattctttgagcataattgttgagaattgaagtcagttttgtctcggttactcaaaagtttcgagctttgtatattgctagtgatagaggcagcttcaaatccgaacaataggaatacttagagtggactttgattgtggtgcccctgagatttactctgtttatttggttgcaaatattgtacctttgcttttacctgccatgtgagctccaactccgttctttgtcgtttgctagcttcccttttttaaatagttttcagattccttgagtataattgttctgaattgaagtagggtttttcttggctgctcaaactttgtagattgctactttgctagtgatagaggcaacttcaaatccgaacaaaaaagatacttagattgtgcttctcctgagattactttaaagattttactttggctatgaacaaaagcctatagctttgtcttttatagtctaatttaagtaatgaaatcccagattcttagttaatttagagaggaaaatgggtagtttgaaaggaaagtgatgagatttcaagaattctactaagattttatattgcttgatgcattctactttcaacctgaatgttagtagcagaggtactgacagtcttttatccgcaggatctttatcggggagcattacccgcgttttaact

SEQ ID NO: 3224 - DNA, 1007 bp, Arabidopsis thaliana
  Intron number 1 from transcript AT3G59680.2 (locus AT3G596 80) derived from phytozome v7.0 (chr-ID Chr3; pos 22044271 to 22045277)
caagattcaaaggcctcacctgcaaggtatgcatattaaattcactcctttagtcactgcttactcaattttggatttttgtttttgatgtgttaatacatattgcaaaacaaaaaactcacataattatgtaactgtctggggttttctcttaatagcaaattaaaaaaaaaaataccatatcacattctcaattattactaggaggggtcaaattcttataggtctatctatattattcaatcccatgttttttggaagttttgattccaaaacacatatgcagtcccagttcctttgatcataactaaatatttgaagtacttagaagttaaaagacattaagatagatcaatccagaggcatctttgttatcaatggtgatcaaatagactttgctatttaacccaaaaaaaaaaaaaaaaactgttaacttagtttgggcctattgggcttaatctcaaccgttctgcccaatattatcaattgttcgattctttttcttctttatcgttggttgatcctttaaaacggccataaatattactagatacgtatcgaatacaaaaaggacatgtaccataataaagatgctttggtttaaatgggattcatagatttcagattctttatttatgtataggttttatggatcatataacacaactgtctcaaataattactaatccataattggtaaataaataaaaatcctaaaacaaattaatatttagtttccttgttaaagtcaaaattaatagttttcttgtttcctttgatcctaaacccaaacttggaacctctaatcaccccatttttagaagttgaaagcaaattagctagcttctcccatttcaattctcttacgcgctttaacgaaagtgatgatgatgattcattttatgttaaatttttattagtactcaatcatcatcgatagaaaagagatgtgtgagtgtgacataaaaaaggttatggcaaacagaaaaccttggtaccagagagct

SEQ ID NO: 3225 - DNA, 947 bp, Arabidopsis thaliana
  Intron number 1 from transcript AT3G59680.1 (locus AT3G596 80) derived from phytozome v7.0 (chr-ID Chr3; pos 22044271 to 22045217)
caagattcaaaggcctcacctgcaaggtatgcatattaaattcactcctttagtcactgcttactcaattttggatttttgtttttgatgtgttaatacatattgcaaaacaaaaaactcacataattatgtaactgtctggggttttctcttaatagcaaattaaaaaaaaaaataccatatcacattctcaattattactaggaggggtcaaattcttataggtctatctatattattcaatcccatgttttttggaagttttgattccaaaacacatatgcagtcccagttcctttgatcataactaaatatttgaagtacttagaagttaaaagacattaagatagatcaatccagaggcatctttgttatcaatggtgatcaaatagactttgctatttaacccaaaaaaaaaaaaaaaaactgttaacttagtttgggcctattgggcttaatctcaaccgttctgcccaatattatcaattgttcgattctttttcttctttatcgttggttgatcctttaaaacggccataaatattactagatacgtatcgaatacaaaaaggacatgtaccataataaagatgctttggtttaaatgggattcatagatttcagattctttatttatgtataggttttatggatcatataacacaactgtctcaaataattactaatccataattggtaaataaataaaaatcctaaaacaaattaatatttagtttccttgttaaagtcaaaattaatagttttcttgtttcctttgatcctaaacccaaacttggaacctctaatcaccccatttttagaagttgaaagcaaattagctagcttctcccatttcaattctcttacgcgctttaacgaaagtgatgatgatgattcattttatgttaaatttttattagtactcaatcatcatcgatagaaaagag

SEQ ID NO: 3226 - DNA, 751 bp, Arabidopsis thaliana
  Intron number 2 from transcript AT3G60260.1 (locus AT3G602 60) derived from phytozome v7.0 (chr-ID Chr3; pos 22274353 to 22275103)
tctagaacgaggaagtgtttatcattcttcttctggtaaatttcatcttcactttgtacgatgattctttctattttttttgcttcttctggaacaaacgcgttttctcatcattatacatctctatctctatttctctctctctctctctctcccactttttccacgttttctctttctctctgtgtattcgctggcgattgcctttttatctgagatttagtgtcgcagatctacctttcgccatttgctttttcgttgctctttctcataaattcgtggagtttttgttatgtgtgttgatcttctttgtaagtcctatttttagtatttcccatacgaaattgtttgcgttgatttctctagttgagattagtcttcttccctgcagattccatttctctttttgactatattgctagtttgtttttccatggaagcatgttttgctaaaatcttttgttacttgcttcgattttgatagtcaataagttgaagctaatggatgatgtgttctggaatctttgatttttctttcatcgttctgtattttgacaagtctgatgcttaaatgacattgtatgcttctcacgtattagttatcgtatttgtaatataaaagtcagctaaaagatgtttgactagtcaccctcttgcattaagaaatcatttctttatcaaaaaacatcacaattctgattttaattttattgcagctgaggttgtagctggatcggcagcgtggttaggc

SEQ ID NO: 3227 - DNA, 456 bp, Arabidopsis thaliana
  Intron number 1 from transcript AT3G60260.3 (locus AT3G602 60) derived from phytozome v7.0 (chr-ID Chr3; pos 22274648 to 22275103)
tgtgttgatcttctttgtaagtcctatttttagtatttcccatacgaaattgtttgcgttgatttctctagttgagattagtcttcttccctgcagattccatttctctttttgactatattgctagtttgtttttccatggaagcatgttttgctaaaatcttttgttacttgcttcgattttgatagtcaataagttgaagctaatggatgatgtgttctggaatctttgatttttctttcatcgttctgtattttgacaagtctgatgcttaaatgacattgtatgcttctcacgtattagttatcgtatttgtaatataaaagtcagctaaaagatgtttgactagtcaccctcttgcattaagaaatcatttctttatcaaaaaacatcacaattctgattttaattttattgcagctgaggttgtagctggatcggcagcgtggttaggc

SEQ ID NO: 3228 - DNA, 542 bp, Arabidopsis thaliana
  Intron number 2 from transcript AT3G60820.3 (locus AT3G608 20) derived from phytozome v7.0 (chr-ID Chr3; pos 22473014 to 22473555 reverse strand)
attcttagtcgcgattactccaaaatccataaactgtaagtacccattctctttcttctctcactgttgattctttgggagagtgattccatgctggcaatcgaactattattgctgtagattattagggtttttttgcaatcgtaattcgtagatctgggtgaaaccagttatatatgggtggagataaaataggtttcttaattattattagacatggcttttgatagtggttacaattatctctatataaactttgtgattacattgatcattctataatccggtttattgcttagcttattcgttttcttataacgtttattgacaatgtgtgtagttctttgagtttgttcaaccttacgtaaagagtgtttgttactgtgttgttgatcttatataccacaagtattcattcgtatggaaatagatagaattctcgtgtttttcatcttatgtaacttgtaagactcttgttaagctgttgtcttcttttaacttttccagagcggacagagctgttttgtcttcctctggcttcc

SEQ ID NO: 3229 - DNA, 389 bp, Arabidopsis thaliana
  Intron number 4 from transcript AT3G61050.1 (locus AT3G610 50) derived from phytozome v7.0 (chr-ID Chr3; pos 22598419 to 22598807)
tggccatatattgcagaggtgagattctaattttcttttgttgcagtattaggtgttttaatttcccgtgtatgcggttggaagttggctattaaatctttagcatatttaccctgaataatggtaactgaagatatcctaggaagagtagagttgttatactgtcaagttgtactacaaagtccgaaattattgaaaaacagtaagatttagcttatctagattggactcgtagactgccttttttatttctgctacacaaatcgagtgtttcttgacacctaagataggtccaatttgttggaatggaaaacacttgccataatgcagcttggaaatcaaagagtgtaatattcgttgttgtgttgactaatttccaggcagcaaca

SEQ ID NO: 3230 - DNA, 660 bp, Arabidopsis thaliana
  Intron number 1 from transcript AT3G61120.1 (locus AT3G611 20) derived from phytozome v7.0 (chr-ID Chr3; pos 22619629 to 22620288 reverse strand)
tcgggtacgtatatccattcattcaagatcattaattcggttttcctaatgatgaaaacctaggttttcatgggtaatatgattaagatcatccatgtttgatttgtgtctgttcttaagatcaagaaaccaaattctgtcttgtgggtatctgaaaaaggttatgtctttttattctaaccctaactagttaaggttgatcaccatccatcgatctctcaggatccatcggacatatgggtcagtttagcttttagatccggtaaatcttttgaaagaaaacttctttgttttattttgggttttaattgttatcaccagctttgatatgtgtatgtccttaagatccatgaaacctcatatatacgttttgcctctttaaatagatatgtctttctaattctaattagagaaattaattagggtttatcatgggtagccgtagatctataatccattacgcagatatatcttcccagagatttttgtgtaattagaatttcctttagacatgcattaaaagttaacacagaacttaaggttttcgttctttggttttgaatttaagcaaattcagattattaattaaaatatcttgtggtttcttttgttttataaactgtagagttggcagaaccattgagaggtactatcgctgta

SEQ ID NO: 3231 - DNA, 323 bp, Arabidopsis thaliana
  Intron number 1 from transcript AT3G61250.1 (locus AT3G612 50) derived from phytozome v7.0 (chr-ID Chr3; pos 22671409 to 22671731)
gaagctggagaacacttcctaaacttgctggtaaacttcatattcttcttcctctttcgtttttgttagattcttgaggagatttcggggaaagttttcatctttacatcaacatttttactagaaactccataactatggttctttgacttgttggagaaggaaagttatctcatttattaaggttttgttccctttggagaaaattccattaactggggttcttcagagattacatagagaaaagctttaatctttataactttcttgtcggtcatggtgaaacaggtttacttcgctgtgggaagagttgcaggctgaga

SEQ ID NO: 3232 - DNA, 355 bp, Arabidopsis thaliana
  Intron number 1 from transcript AT3G61310.1 (locus AT3G613 10) derived from phytozome v7.0 (chr-ID Chr3; pos 22691669 to 22692023 reverse strand)
tggctccggcaagaagcaacggctatcttccattggtaatatccctaatctctaacttatgagttttattttccgacaaggacattggctctgaatatggtgggaagttttgagcttaattgatgatatagtttttcaaatgaggacattggtgggaagtttattataagctaattcgaactgttaaggattaattaaagctgtggaattttataatgtcaaattgttgaattcaatatttattcttttattattccttggcctttctcttaaactttgttattgctctgtttctccctgattacaattagctgtgatttttctgaagacatttgattcttttttgtaaggtgaa

SEQ ID NO: 3233 - DNA, 764 bp, Arabidopsis thaliana
  Intron number 3 from transcript AT3G61500.1 (locus AT3G615 00) derived from phytozome v7.0 (chr-ID Chr3; pos 22760693 to 22761456 reverse strand)
tgtaacctttaaaggacgtgaaatcattcgtgacggtttatttgattcaatgattagggagttaactcatggaccatacatatatgattaaatctcattttttctttatctttagacaatgcctctaatactatatgtatacattaaatccatttggaactattttgaaacaaataaattgaactcatgaccctatatgatcttcttttcgattgtacaatatgactttggatatataagattttcaattttacccattttctctcagtgttgtaatctctttatgtactgaacaataaaacccttcgtactggtacagtggtacattaataacttaataatgaacacttacactagtatcttctgatctcattttcaatgaatggtaatatagttttcttcattttgtatttatgttcatatatataattctcaaaccaatattcctgctccgaattagtcatatcatgaagcttgagatcagtgatgataatgtttatatcattatgtgtatcataacgtaattccatagcaagaatcatccaaggtaaggtgagaatctcatctttattttgaggtatgagtttcttcaacctctcggttaatgatgaacacgaagtggaggagttgaatccaaagcaaaaggccacaacgtgttgacaatacttatactactgcttgcagcagaagctcacaagatgttacaccgcatccaacttctgcttgtagcggaaggtcacgtcacgataatagaggcagtcgaa

SEQ ID NO: 3234 - DNA, 452 bp, Arabidopsis thaliana
  Intron number 3 from transcript AT3G61510.1 (locus AT3G615 10) derived from phytozome v7.0 (chr-ID Chr3; pos 22764466 to 22764917 reverse strand)
ctgcgtacgtatatatacacactttactagtattcaaataaatattattttggtcattaataattaaaaagacacatgaattagggattttgatgttatgaaatagaataagtaaacattatactatattaaaataaaagtaatcgaaaagggcaaaagttctaatgatttcataattacataggtcaaaaaacaaaagtctcttttgataatgggttttcacttttcagaattatttgtgaaatatacctcatttgattgattcaatattttaatttggtaagcaaccccgtccacacaagttacaactatgatcaaattgtcgattgactcttcacaaaagtcaaaccattaattaacacttgcttgacttgctctcttcagtactaattatactgggtttactaaaaattccagattcgatagagacttaaggtggagaactggagtta

SEQ ID NO: 3235 - DNA, 436 bp, Arabidopsis thaliana
  Intron number 1 from transcript AT3G61590.2 (locus AT3G615 90) derived from phytozome v7.0 (chr-ID Chr3; pos 22792478 to 22792913)
atgtatgttgttatcagatgtttgattgatgtctgcctatagtctaatttcattattaagaacgttttttttttgtatacctaacatctaaattttgttgtattaattgtcatcagtggaatcttgacgttgaaaggatgacacaagctttctcctttttgtttttcttttgtctgaaaaatgtattgcaatgttagacaaagtcttaatactatctctcttcttcgtcttctgcattttcgatttaccattatgcatgtatgctaaagcaaatctgattgacaaggttttctcttgatttatgtattgttgttttgtgttgttgaaatgaatgatatttgggattcagattcgtaaagctttaaatctttatgtgttcttttcttggtaatggatttatttattttttgtatcgttgtttcagaggctcttgaga

SEQ ID NO: 3236 - DNA, 580 bp, Arabidopsis thaliana
  Intron number 1 from transcript AT3G61590.1 (locus AT3G615 90) derived from phytozome v7.0 (chr-ID Chr3; pos 22792334 to 22792913)
agaattccgaagattcagagtctccatagtcgaaggtgtgtagcgaatcgagatgggtttctgtttgatttcactgtcgctttctctgctttcatttctgagtggttcattgatctcttccgtgttcgtaatctatgattgatgatgtatgttgttatcagatgtttgattgatgtctgcctatagtctaatttcattattaagaacgttttttttttgtatacctaacatctaaattttgttgtattaattgtcatcagtggaatcttgacgttgaaaggatgacacaagctttctcctttttgtttttcttttgtctgaaaaatgtattgcaatgttagacaaagtcttaatactatctctcttcttcgtcttctgcattttcgatttaccattatgcatgtatgctaaagcaaatctgattgacaaggttttctcttgatttatgtattgttgttttgtgttgttgaaatgaatgatatttgggattcagattcgtaaagctttaaatctttatgtgttcttttcttggtaatggatttatttattttttgtatcgttgtttcagaggctcttgaga

SEQ ID NO: 3237 - DNA, 824 bp, Arabidopsis thaliana
  Intron number 1 from transcript AT3G61620.2 (locus AT3G616 20) derived from phytozome v7.0 (chr-ID Chr3; pos 22803046 to 22803869 reverse strand)
aggctccgaccactctgcttccgaccagcagcaaggttcgaacctctttgtttgtcggtgactttttctgtttaacctattttgtaactggatttcatctgtgtattgggtcttagcccatgccctattgggttgtttttaatatattaaaaaaaaaaaaattgtatatggaacattaaattgcatgacattcgttaggatagtcgtagtaggtactacttttactaggtagagactagagagtggtctctcttaaattgtctaatatggttttgtatactttttgatccaaacatacatacataaaaaaagaagatgttagcaaaccttagtaaataattccatcatctcctccgtcaggaacccgtcattttcatatacctcactttgcattcatttgtcggcattgccacacgtaactcccgacacgttgatactactatcaatatactattgacttagaaattgatctagatactatattactattactaatacatacttgaaataacagagtcaacaagaaaagccttgataaaagaaaacaacaacaatttgagctatacttttgaagggatctcactcttaattctcttattgcatgcatgttcccgcaattttgagctttacttttctttgcaagcgaattaccaatttgcctggcttcataaactagaagttataaaaaaaaatcctcctgtgatttgacggttttacccttaaaatctcacttaattcacaaaaaggaaccaaaaagccctaatctttatgttgtcgacactctttcagttctctcgacgccgtccatcgccctccgtcatatc

SEQ ID NO: 3238 - DNA, 437 bp, Arabidopsis thaliana
  Intron number 1 from transcript AT3G61730.1 (locus AT3G617 30) derived from phytozome v7.0 (chr-ID Chr3; pos 22849811 to 22850247 reverse strand)
tgctctgctcagacttaccagtctcgcttttcgtattttcttctcccctatgaacgaaatagatctattctcagatattatttgtgtgtgtgagtttgggttgagctcgaatttgattttgaaatgtttgtacggcgtttaatcttactgtattggatggatctaggagatagagttcgatcaatcatcttcggtaccttctggaatcaatttgatttgtatgagattcagatgcttatatcgatctctgatcgtgactgtgtggttgctgaaacctgggatttgagtttttcttcatattattccgctttcaatcgtcaaaaactgaatccagattcaaacgaggaagaattttgaaaatcacatcgctatatcacgtttcttagatctaagtctctatatcagcgtatcttataattttctctgcaaaatcaggt

SEQ ID NO: 3239 - DNA, 318 bp, Arabidopsis thaliana
  Intron number 1 from transcript AT3G62060.1 (locus AT3G620 60) derived from phytozome v7.0 (chr-ID Chr3; pos 22980293 to 22980610)
caccttgattcacggagctgactctaaaggagctggtacacacactctctgtctctctctctccttctctttcgttcttcttctttgggatttgaggatatgcttgaaaggagatgttttcactatcacattgacctttgttatccactattcagtttagattttggctctcttagttggaatccgaaattttatggcgtttgattttgttctgttgctcgatttcgtagacttctttgaatctttggtggattactttttgaatgttgtgatgatgattagtgtttattcaactctaaattggtgcagtgtgcttag

SEQ ID NO: 3240 - DNA, 141 bp, Arabidopsis thaliana
  Intron number 6 from transcript AT3G62750.1 (locus AT3G627 50) derived from phytozome v7.0 (chr-ID Chr3; pos 23215255 to 23215395)
gatcaaccacaaaatcatgtaaatgatcaaagaagattatgatctaacaaagtcacgttttaaaatatgaatagaaaaacaaaaatagaattaatgttgtttatttgttatattgcagagaagactttacagcttttgcag

SEQ ID NO: 3241 - DNA, 569 bp, Arabidopsis thaliana
  Intron number 3 from transcript AT3G62830.2 (locus AT3G628 30) derived from phytozome v7.0 (chr-ID Chr3; pos 23233352 to 23233920)
ggttgagacttactggggcaacgttaatcccattggtaataatcttccctcattagttattcaaattaaagtttgagtttttatgccttgtgtttggttgtgaattctctaatcggaatctgatgaaaaggaagcgttattgtttcccaatgtttattccaccgtcgcgtgacacgacgacgtgtatagagcttctatgtcttttgtgctttctatcattttctgtgtcggaaaatgcgcacgttaggagagagggattgttcaaaaaacaggtgttttttatggttcagatctggtcccctgtctctctaaggtcaaaccattgaagcgtaaataacgggtctttgtgatcgtgcggctctattatacgtgtctctaccttagacgcagcctccacatttactgctagcctaacatttcaattgccgactttcaaaattctagagcttacttgcttttaattctaattttactggcacggtaactattaccaacacgtgcatgttttcttgtgatttgattgatgactaattgggtttgttatgtaacaggtgttcgtagttgctacg

SEQ ID NO: 3242 - DNA, 518 bp, Arabidopsis thaliana
  Intron number 1 from transcript AT3G63070.1 (locus AT3G630 70) derived from phytozome v7.0 (chr-ID Chr3; pos 23302755 to 23303272)
ccaaagtcaaaggatttcctgcttggcctgccgtggtatgtgcatctatggctttgctttttctgctatttcttctcttttctgtttggttctgcaagaattgcttattagattcatgatttagtttccagttgacggtagaaatagctataaatttagggtttgaagttgcatgtatgtgcatctgtatataattcagatgaaagttcctctctgggattagcaactgcctaagggatatggatattttcagaggggttggtgaccttatctagtttttggcagattgcaggaatacccgtgattagttgttgtagttgttagtagattaccactgatccagactttcgtttagcaactttataggccattttacatcttctaagttttggatatatgatgattattccctataatatcccatttgccactttccagaccagtttgaatttgattttttggatcacttgctcctgtgctaattgctgggagtgatttcaggttgacgaaccggaaaa

SEQ ID NO: 3243 - DNA, 800 bp, Arabidopsis thaliana
  Intron number 1 from transcript AT3G63300.2 (locus AT3G633 00) derived from phytozome v7.0 (chr-ID Chr3; pos 23385576 to 23386375)
aattcgacgacgtcatcaaggtacttcttcccttatactatctctctaatccttccttcctaggtttatccttggtttatcctttttcttagaacgtaagtctccgccatactttagagtttgttagcaaagtaaacaaaaattatgagtcaaaagaaaagcagaggcagcagacagaaacagatttgactttgactctccactttacaacctgtgtttgtttactttaacctctctcattcatttcacccacaaaaaaactacattgtttttttttgtttcttgttcattcatatgaccaatctttagttggtagaaggtctccttaaattgggtcgttgccatacataattttaaggaagtgctgcaaggtttagccttctgggtcttgggacttataaagctggtcggcgatcattaaagcgatagattgatagtaatgcagtttcaatgttttcttttttttcttccattgaatgctctgtctctactgcatttacttgatgaattggagttcataaaagattaaagacataattggttggacacaggaataggaatgttacggtaacgcctagagctcctctttggttggctcattttaagaaagttatcggtaaatgcttttagagcgagcagtcactttacctccatttccaagcagttcattaatcctttatttgctttttgtagtccaatataatgccatcaacttgttggatttttcattaagtcagcctatctaataaaccaatcctaatgcagtattttcgcacccacaacaccatacatcctctctt

SEQ ID NO: 3244 - DNA, 737 bp, Arabidopsis thaliana
  Intron number 1 from transcript AT3G63470.1 (locus AT3G634 70) derived from phytozome v7.0 (chr-ID Chr3; pos 23438923 to 23439659)
agattcttctcctctgcttctctggctcaacggcggtacgtttccactgtccacacgcatacgtatatatatttcttttattttggtttgcatctttagttaggggcactgcattatgggtttatatctgtacatcttatatctgagtacaaagatgaacaagaatgttagtttgatcgatcgaggctgtctttttctcagtgcttattaatctatcatatgctatatgattttcagaatttaataattgtgaggaccataccatatttatgccttataggtctgctaattttctttttcttttataatttttaaatcaaattatcggaactaattattatttgcgcaacaatagtagtgaataatagggaaaagatccacaaccccaatcgaaaactcaactgagaaaagaaaaagaaaaatgatttgccttttttcaaaaatggcacatgctgaggatttctcggcgtgctttgtttgttgcacagctctactggtcaattatttagccagccactacgtatctatctatatattatatactgatttctatattatgtatgtacataaaaataaaatgcaatgtacaacatatattcaaattcaccagagacgttaatagtaagctcatcagtgaattagctgtcacaaaatcgagaatttgattacagaaatatgggtgactaataatacatacatatgcataaagtgtgttggaaataattaacaggaccggg

SEQ ID NO: 3245 - DNA, 620 bp, Arabidopsis thaliana
  Intron number 2 from transcript AT4G00180.2 (locus AT4G001 80) derived from phytozome v7.0 (chr-ID Chr4; pos 73673 to 74292 reverse strand)
cctcggccaccaccagccaatagacgtaaccttccatcttctactctttatttcaacatcttcatatatatatatataagaaaacaaaaaccctaattcacaaaaccttatccattcatttcttcaaccttttatatatacactccaaagaatctcgtttgtttataatgaatttataagttttgatttcatttttgttccctcggtatgtgacttctcgcatgcactttttttttggtcagaaaacaatttcgacaacaaaaggaaaattaataagtgatgtgtttatcccccggaaatctagctaaacctatagatgccaactgatatagttttgggggtagatcgtaagaaagataatgatgaagtgatgatgataacgagcaaagtgagagggagagggagagagagaaaggaggaagagtcgaagagtgattgtttttttttttttaattgtttttttttggtgaatttttagattttttggggaggcacaataaaaaccaataatgttttttttaacaaaagggtttgatttggaattaaaattgaatatgttctgtttgtttgtttgtggaaaagcagccccagagaagcgacaaagagtaccatctgcatac

SEQ ID NO: 3246 - DNA, 310 bp, Arabidopsis thaliana
  Intron number 1 from transcript AT4G00180.2 (locus AT4G001 80) derived from phytozome v7.0 (chr-ID Chr4; pos 74422 to 74731 reverse strand)
ctccccctcctcctcctcctcctccaaatcttttggtacatcggtttcattcatcgaaacaaattagggttctttcataaaaaaaacagagagtaataattagggcttttcttctcgagaaacgcaaaattgtgaaactcaatccaaaaatgtttaattttgttagcatcccgggatagatctaagtagtttggcaatggctagttaactagggtttctttcgaaaacatcatatcaaagtagtttggtttgattagtgttttaagttttttttgccaattagtttgctgatttcatttattaggaggaa

SEQ ID NO: 3247 - DNA, 567 bp, Arabidopsis thaliana
  Intron number 1 from transcript AT4G00210.1 (locus AT4G002 10) derived from phytozome v7.0 (chr-ID Chr4; pos 86062 to 86628 reverse strand)
cgttggtcatatcttcgcccttcaacatcaggtattcaactatataaaacccaatattgtcacatatttatgtatatataatatatgtttgatgatctatatacattgaaagatttactatgcatgcatgcgtgtatttagttatatagaagttcattgtataataaaatcatcccataacattaggttaaagatgagatttatatatccgcatcttttagccacgtaacttgttacttttataacagttccatttaatcgcctcttggtttcctgtttattagttttgaaaattgcatagtactaattccacaataagagtcaaagttgctaatattgaaaatagctaacgtgtgtcttcccaatggctcgtttgtcgaaaacagcgttaaagaaagtcaaatcgtcattctttgtggttacattccgacttgtttgtctttaatagtatatcggttgaataaaacagtttgaaaattttcttctaatacgaataaattaggttttttaaaaactaatgttatatgaactttttaattaaataaacgtcccacatgtgaacaggtg

SEQ ID NO: 3248 - DNA, 523 bp, Arabidopsis thaliana
  Intron number 2 from transcript AT4G00400.1 (locus AT4G004 00) derived from phytozome v7.0 (chr-ID Chr4; pos 175528 t o 176050 reverse strand)
tctctctgcaaggtactgttccaatctttttatccaatcttggtcgattatagggtaaagttaagttgaattattgagtgttgattggtttagtgtaagatgtgttttggaggtaacttgagaatctaagcaaacgtttgatttgcttgttgattaagctagataatctaatttaacttgttgactggtttagtgtcattatgtctacgcgtgaatcttataaaaataatgaaatttttgatttggaagcaattagtaaggttcataaatgtatccaaccaatcacttcacgtgaccctctggattatttttctatccccaaccaccttactagttccaccaacattttgggctgtccatttaatgaacacatacttgaaatatcataaacaatcttctgttgtttaatgcttagttttttgaatcttgattacacaatttagagatatgttacattttcctagtacttttagttataagtttgaaatgaataacgtttttggtattataacagaaaggttac

SEQ ID NO: 3249 - DNA, 674 bp, Arabidopsis thaliana
  Intron number 2 from transcript AT4G00420.1 (locus AT4G004 20) derived from phytozome v7.0 (chr-ID Chr4; pos 182661 t o 183334 reverse strand)
gcaggaatccaaaagctcagcttcttgccataactgtgagctcctagataactgtctctcctttttattttcctttttggttacttcattgcaatagccactgttctttctgtaactgtgcatttatatagcctgcttaaacatgtttatttaagatggttaagctggaactagtatgagttttgaccaaagggaaagcagattatttagttaagtttaaagctttacttggtaaacttcatactgattctttagctctatagaaaacagaacaaatctcttgtgttaaaagttcggtcaaatttgatttcagaaaaagtctctgcgacaatctcctagctttgtcaaattataagtttcttagcaaatgttcaggcaactgagacaatattattgaattaagagtgattatgcgtcgtggtcctgaaagttgttgttattattgaattctttgtatgtatagattatgtcatgggtcatatgtggttttgatgggtaacgtttttactaataatagcactatgcttctggattttgatctaggtgatcattaactagtctatatatatgcaatgtctttgaaacactttttgttgtagttaaagtctgtctgatttgtgttggtttcttattataaaggaataaggtagctgaagctaattaatccaataaag

SEQ ID NO: 3250 - DNA, 926 bp, Arabidopsis thaliana
  Intron number 2 from transcript AT4G00420.3 (locus AT4G004 20) derived from phytozome v7.0 (chr-ID Chr4; pos 182409 t o 183334 reverse strand)
gcaggaatccaaaagctcagcttcttgccataactgtgagctcctagataactgtctctcctttttattttcctttttggttacttcattgcaatagccactgttctttctgtaactgtgcatttatatagcctgcttaaacatgtttatttaagatggttaagctggaactagtatgagttttgaccaaagggaaagcagattatttagttaagtttaaagctttacttggtaaacttcatactgattctttagctctatagaaaacagaacaaatctcttgtgttaaaagttcggtcaaatttgatttcagaaaaagtctctgcgacaatctcctagctttgtcaaattataagtttcttagcaaatgttcaggcaactgagacaatattattgaattaagagtgattatgcgtcgtggtcctgaaagttgttgttattattgaattctttgtatgtatagattatgtcatgggtcatatgtggttttgatgggtaacgtttttactaataatagcactatgcttctggattttgatctaggtgatcattaactagtctatatatatgcaatgtctttgaaacactttttgttgtagttaaagtctgtctgatttgtgttggtttcttattataaaggaataaggtagctgaagctaattaatccaataaagaaaaaaaagaattttctgcttgaaatcaacgatggatcttcctcctccagagtcttcatcaaatcccatatcttccttctctgtggtaagaaatgcggaatataaatagaaatattagtctttccttttgggcttagatcttcttaaatgagaagaaataatcattttgtcatgtctttttgttaatttttgttggattggatcagttattattattattttttctttgtctctattcaggctcaaaagagg

SEQ ID NO: 3251 - DNA, 908 bp, Arabidopsis thaliana
  Intron number 2 from transcript AT4G00585.1 (locus AT4G005 85) derived from phytozome v7.0 (chr-ID Chr4; pos 251235 t o 252142 reverse strand)
gcatccccatcgccaagctatctgctaagcttgaggtatacttcattactttggtccttcattacttcattactttggtccttcaatacttcattatagtacgaataacatatgagtagaagggaatagcttggaagttgatactggaatctacgcatattcttccctcacatcttctttgttcttggtctatgtttgtcaatagttttatcggtttgtggaaatagatttggatgattcaaggaaccgattgtctagctattgaatgttttacagtagatattaattgctacctgcatcctgcaaatttggatgtttgggaccatgcagtgtgtgtgaagatattctaacagatagcgttagttatatgttgtacactagtgtgtttttatgaaacgaacaaacttcgtgtacccagttctgtatggaattcttagtcattgccattaattcattgggcattagtgtatcagtgactgtatagattgtgtaatatctcgcaaaatgggaacctatccgtgatgtttttctctgacttgatttagatttgcaccctttgagctccccaagccctgtttcccatcaccatgttactttgtgttgtagcctgtatggttttgtaatagctatgggagatttcattgattatttttgtagtttgcctggttctttgagaagaattcagttgaatgtgtagttcgacactgaaatcttggtttgggtgcaaatgcctgaagacttgcaattgctcttataaattgtagcctaatgcttgagtcccttgtgacaaaaaatctgcacttgaattgttatgttttgtgtatgtccgtgctactatatagtttccacttcttgtttgatgttcacaatttgagaaaagccctttctgatttcagcaaaggccacac

SEQ ID NO: 3252 - DNA, 502 bp, Arabidopsis thaliana
  Intron number 1 from transcript AT4G00770.1 (locus AT4G007 70) derived from phytozome v7.0 (chr-ID Chr4; pos 331742 t o 332243)
cagtaatactagccgacactgaagtgggacctgaggtaagaatactatattaagagaaatagaaactcgtacttataacattaattaatcacatactttgactactacatgcataaataaagagaaaacagaatcaaatcaaaattaagaaagaaataaagtgacaatgtgatctgagaatagagatcttatgggttgactttgcttcaaccgtaaggtcgcccatgctgtctctaaatgcacgtgcagctgtttgttaatataaattcacatgaagacaaaacagaagctgtctttgtccttggtacatataatagcatgtaccctttaattcctttatgactacgaatctaacaacttaatgaatgagtcttataagagtaacatttaacatactgaaattattaccctatgcactttactagttggatgatttggttggcctaatatgtaatgatcatggtcaggagaacttacagtgtgaaaaggagcacaacagccc

SEQ ID NO: 3253 - DNA, 157 bp, Arabidopsis thaliana
  Intron number 2 from transcript AT4G00780.1 (locus AT4G007 80) derived from phytozome v7.0 (chr-ID Chr4; pos 334982 t o 335138)
gaatcctctgttttcgatctcgctggtcacaagtgtgaagctttttgatcttcttattgacatacaaaagaaaacaaagaaacagtagatgatcattaacctcaatatatcgttctcttggcttgttatggtaacaggaaactctctgtgtacccaa

SEQ ID NO: 3254 - DNA, 203 bp, Arabidopsis thaliana
  Intron number 1 from transcript AT4G00870.1 (locus AT4G008 70) derived from phytozome v7.0 (chr-ID Chr4; pos 363211 t o 363413 reverse strand)
tctgtggaaacaagaacaacaattcccaagaaaatgttcatttttctttgcctcttatgttatctaatcaaaatatccaaaatttatttaaatcaacttcttaaaaaagttctattaagaaaataatataattttccttacccttgattttttgtttttgtttctttcttaagtatacaacaaacagcatcgagtgtgagctg

SEQ ID NO: 3255 - DNA, 654 bp, Arabidopsis thaliana
  Intron number 1 from transcript AT4G01130.1 (locus AT4G011 30) derived from phytozome v7.0 (chr-ID Chr4; pos 486077 t o 486730)
tgcttcagacggtcgtcttatcattgattttctaggtaacaaatgactaacaaatactctcaaaattttcaaaaaacgtataatatgacagcagtatcaaatcccctctacaaagtataattttttgtatcctttagtattaaaatattttttaaaaatatttaagatatacttagtagttcgagcgttcagttatccattcagtttcagttcgtatctgtttgggtctaatgtttaatatctattcgcttattttgaaatttgggtttggttccggttctttcggtttaaatatttagtatccattcggttattttgctttgaatattttcggatatttcggttctttttgattttttttggatattttcaagtatttttactatttagtcaaaaaataactaatatttttgaaaagataattatatttcggatattttcggttactcaaaatattttggttcggtaccgactcggttttcatttcttcggatttggttctgtacgttcggttcaatttatttttccaggtctaataattaggattttagattgaaattttaaacaaaatctataatacttactgttattacccaaaaattatcactatagtgctaaacgtagtgttaaattattttagccaaatctcttgga

SEQ ID NO: 3256 - DNA, 589 bp, Arabidopsis thaliana
  Intron number 1 from transcript AT4G01220.2 (locus AT4G012 20) derived from phytozome v7.0 (chr-ID Chr4; pos 514603 t o 515191 reverse strand)
tcgattctcagaccgctcacaaattcggttctcaggtataatacatctacacagagttttcatcttctcgatccaattttatctctagcttccagttcatgaaatctagctgaaaaatggctttgaaatctgagaatccatacttagttttgatcagtgattcacttatcttgaatgttcgttgattagcttgtttagtccctgaggtttcggttttaagctgtgttttggctgatcacatgaataacaaaagatagtgaacttgtggttaatatatatgcttaagagcttctattgcaatggaatcgattgtttaaactaacttctcgtatgcatatcttgaatgttcgttgattagcttgtttagtccctgaggtttcggttttgagctgtgtttttgtacatccatggctgatcttatgaataacaaaagatagtgaacttgtggatctagtagcagcagccatttttcccctgtttctgtatgtgatactatatatgctaagagcttgtattacaatggaatcgattgtttaaactaatttcttgtatagggattcttcaatttcacagcacggaggccgcaaca

SEQ ID NO: 3257 - DNA, 330 bp, Arabidopsis thaliana
  Intron number 1 from transcript AT4G01330.1 (locus AT4G013 30) derived from phytozome v7.0 (chr-ID Chr4; pos 551275 t o 551604)
actaaagtcgctgtcaagaatctgcttaacaacaggtacttgataaagttttgatttttaattttcaattcttgatttttccaattctcaaaattgattctttcgaatttagaagattatagcttttgttttgctatctggtaaagataagaaaggaatgattttagtgttctttgtacttgaatgtggtcctgggaaggtggtgtttgttgtgtcattatatggtcccttgtgatttagtggattagggacaacttctttgctgatgatcattagtctttaattatgttggaaggggtcaagctgagaaggagtttagagtggaagtgg

SEQ ID NO: 3258 - DNA, 273 bp, Arabidopsis thaliana
  Intron number 1 from transcript AT4G01500.1 (locus AT4G015 00) derived from phytozome v7.0 (chr-ID Chr4; pos 639364 t o 639636)
gatcagaagaagaagcaaacacaaagagtgaaagagtacgtctgtcttcttcttctggatttagggttttctttttcactttttgtttttttggttatagctttttttcttcttcttgttcttcacttcatcttccatttacttttaattatttgattgaagtattactttttttccttagtattggggtgatgatttttatttgatttctaataaaattatttcatgtatgttgaaggattttgtattggatcttgtcaagaatcactcatt

SEQ ID NO: 3259 - DNA, 545 bp, Arabidopsis thaliana
  Intron number 2 from transcript AT4G01550.1 (locus AT4G015 50) derived from phytozome v7.0 (chr-ID Chr4; pos 675207 t o 675751 reverse strand)
agtatcacatcacttgtttgcctcaagatcaggtataataaactcagagtttcttgaatttgagcttctgtgttagtttgacttagcgttatgtttctgttagttgatcttcttgaattggatttgggtttgattcatctgtccctgtgttggttgctatctttatcccaatttgaggttaaagtcatgttcttgtaagaatagatttgggtttgacttatcttttccctatgatgcttagtacatcaagtttaggttctgtgtatcagagtttgaagtgttatatatagaagttgtggcctagaaggctagtgtatttgcttccctgtgttgaatatattactgtaatctcccctgtgttggttgctatcattagtacgttctgtgttgtcacagagttttaagcgctatgtatagaagttgtaacctagtgttcttacttctgccaaagcttgtgattgtttgagttatgtgtgtttgattttttgttttgttggcaaagaacttatgtgtgtgtgtacttttggaatttgttcagaggaact

SEQ ID NO: 3260 - DNA, 754 bp, Arabidopsis thaliana
  Intron number 1 from transcript AT4G01850.1 (locus AT4G018 50) derived from phytozome v7.0 (chr-ID Chr4; pos 797480 t o 798233 reverse strand)
aggctttaggctccccagatctctaatcgccgcaggtttcgctcttcttctccgtcttattgatttcgagtttttaggcgatgcttttacgggttttgttgttaaatctgaaacgaaatgagatttttctatgggtttcgattcagatttgataatattcgaaccttctacgcctgttattataattagatctgcgatagtgtgtgactattgaaatgagattctcaagttcttaggttatatcgtttgtgatttatacagatttaaaacgtatgtggatccgttaattttccagtgctgtgtagcagatctgcttaataggtttatcttttttgcaaatgattttgattttcgcatcgatcgtgtactctatgtagtagtagtagtatatgatttgataaatgtagtagtagtagtatatgatcgtgtactgagccataaatgagccttcctcgttaattattgtccatgaattgttagttaagcttgaaagttccttaaacgtttaattagatccttatcactgactgttccactatgaatatcagaagaatcgaatctctttggatgagatgcgtctgtttttatgctattccacaatgatttggaatctttcttagctttttatgtcacttgagtgtggaatcttttttttttgttctcttcctttcaattgtaaaaagtttgttatatgtgtatgatttttatgtggttgctgattcaatttttctttttgttgttatagctttaagaa

SEQ ID NO: 3261 - DNA, 758 bp, Arabidopsis thaliana
  Intron number 1 from transcript AT4G01850.2 (locus AT4G018 50) derived from phytozome v7.0 (chr-ID Chr4; pos 797480 t o 798237 reverse strand)
tttgaggctttaggctccccagatctctaatcgccgcaggtttcgctcttcttctccgtcttattgatttcgagtttttaggcgatgcttttacgggttttgttgttaaatctgaaacgaaatgagatttttctatgggtttcgattcagatttgataatattcgaaccttctacgcctgttattataattagatctgcgatagtgtgtgactattgaaatgagattctcaagttcttaggttatatcgtttgtgatttatacagatttaaaacgtatgtggatccgttaattttccagtgctgtgtagcagatctgcttaataggtttatcttttttgcaaatgattttgattttcgcatcgatcgtgtactctatgtagtagtagtagtatatgatttgataaatgtagtagtagtagtatatgatcgtgtactgagccataaatgagccttcctcgttaattattgtccatgaattgttagttaagcttgaaagttccttaaacgtttaattagatccttatcactgactgttccactatgaatatcagaagaatcgaatctctttggatgagatgcgtctgtttttatgctattccacaatgatttggaatctttcttagctttttatgtcacttgagtgtggaatcttttttttttgttctcttcctttcaattgtaaaaagtttgttatatgtgtatgatttttatgtggttgctgattcaatttttctttttgttgttatagctttaagaa

SEQ ID NO: 3262 - DNA, 447 bp, Arabidopsis thaliana
  Intron number 3 from transcript AT4G01900.1 (locus AT4G019 00) derived from phytozome v7.0 (chr-ID Chr4; pos 822181 t o 822627)
gagaatccagcaagtttcatcggtaagattttccttgttctcaactttgatatgtgaaaagatttgaactttgctaatcacttgaggtttccattattacttgttatccatgaagagtctatagtgttttaaatgtggattttgaatactataaaacagaattttgagaaataagtaagagtagtagttcttatcgatgcatgcgaaaatcaaataatgtcagtgaactcgacaggactggtcaaatcttcgtttctctagtgtttgaaatgtgaatttgaattgaagggtttatggttctcatagttattgtagatggtacttgttacttccttagtatatagagatgattattacacttttgaaaaatccaaaactaaatcttgagtttctctgtttcataaataaataggctttactgaaaatcgggattcgaggtgttactgt

SEQ ID NO: 3263 - DNA, 465 bp, Arabidopsis thaliana
  Intron number 1 from transcript AT4G01960.1 (locus AT4G019 60) derived from phytozome v7.0 (chr-ID Chr4; pos 852519 t o 852983 reverse strand)
cttgaattcgtgagttttttaaaggtttcttctggggttgtttgtttgttgtctgaagaatttctctgtttccttctcgactttcgttataaagttgaaatctttgatgtattagaggtcttctttctagattctgggtttcataaataggtatatttatgttgcattcgttctttgaattggagaaaatataaataaagttcgaagctttttctcgtttagcttgttccagaaattagaggatttacgaaatatgattttaaggtatcactggttgtttggtgttttcaaaaggcttaggtgatttggtgatgttagggttttagctatttatgttagcatttgtgggtaacaaaatttgtttatgtttctttgcagttttgttgttatgttaatcgtatttggtattattatcttgtgcatatgttaggaggacgcaaggagttaaaagagcaagtcttttga

SEQ ID NO: 3264 - DNA, 506 bp, Arabidopsis thaliana
  Intron number 1 from transcript AT4G02030.1 (locus AT4G020 30) derived from phytozome v7.0 (chr-ID Chr4; pos 892427 t o 892932)
gatctcgttagtcttcgtttcttgtcagaatattcgtgaatcgtcaacacaagcgtcaatagcttgtatattgtatcaaattattgagtatttcgattcactgaagttagattcggctctttgatcttggtctaagtggttagttcgaaatttagaatatgtttagatccgactgttatcttttggagcaggaatatagttgctagttttgaattctacccttcggatgaagtttacagtgcaaggttcttgtagaggtctcttgatcaatgtggtctggtttggttattttctatgcaaacttatgagaattctgcaaatttagttgttcttatcaaagatcttcctgcaatggttgatagttcggaactaaattgggtttatgaggtttgtgttaagtgtggtgacagtagtgctagcgatctgattgagatatatgccacagtctggtgattttattggcttgtgcagatcaaaaagtcgaatttggaggtgcttctgcaaag

SEQ ID NO: 3265 - DNA, 410 bp, Arabidopsis thaliana
  Intron number 1 from transcript AT4G02290.1 (locus AT4G022 90) derived from phytozome v7.0 (chr-ID Chr4; pos 1004451 to 1004860 reverse strand)
gctctgctcttcatgtaattcacctcaacttttcctcactctcttcttctctttttatgaaatatatgaaatgggtttcgttggttaatgagagatctcaacaatgtaggttaagtgttgtatcaatatcgccaaaagattcaacctttttacataactctactgcatcaaaaaacagaggataaaattagggtttttgttttttcccccttttttctaaaatccctaattttaacaaaatgggcttgcttagaaagctatagatctcaagattctcaacaatgtaggttaaattctgtatcaatatcgtcaaaagatcaaatctttattagttgttttctttcccctctttccaaaaaatctctaatttgtgtgttttgttgattaggtggatttggttggagggtact

SEQ ID NO: 3266 - DNA, 591 bp, Arabidopsis thaliana
  Intron number 3 from transcript AT4G02485.1 (locus AT4G024 85) derived from phytozome v7.0 (chr-ID Chr4; pos 1093575 to 1094165)
accagctcattgtcaatttgtaccaaccaggtgaggtgtgatactttcactttgctcttaccatctttctacttagtaaacatattcacgtttctttagtagaaccactagactaacagcttttatggtttcttggagtgttataaatagattagtttaagagagtttcaaaataggtgataggagacagggttacagagacattagatcatgatttcgtgacaatgcaaaaatggatggtttttaacagggataatgcaaaagctaaaagaaccaatagaataacagcttgttatagtttcatggaacatttaattatttgaattagatagctcaagagagtatgagtatcacaatgagtgaaagcagataaccagtcatagccagacattagatcaagattcatggcaaaatgcagagaaaaaaaagagggaagatagtgcaaaagctataagaaccaatagggtaacagttagttggtttaagagagtacacaatgggtgaaagcagatcattagtcacggataattcagactttagatcaagttttcatgacaatgccatggatctttcaacagggaatttgtgcac

SEQ ID NO: 3267 - DNA, 771 bp, Arabidopsis thaliana
  Intron number 3 from transcript AT4G02840.2 (locus AT4G028 40) derived from phytozome v7.0 (chr-ID Chr4; pos 1265137 to 1265907)
agtacactagattttacttgaatcgaggtttatgagatagtttagttcttcttcaaactttgatcacccatgaggtagtttactttctcctttgatggttgtaaccaatggagctctcgaatttactaattctgatgtgtaattctgttaatagacctagaaatgcattgtgggtgttgaatctctcttgtttgcaataagtgaatgataatggtggtctagtcagatggagatgatacattttattttgctttatagttgggtgtatgagaatgcttagttcttctgggagtgagtttagcacatgattatatatgagatagtttactttagtttccctctttatcattgtggacctctcttgttaacaaatcctgaggcttaattctgttattagtgatagtatctgaagaagttagagtttagctgagtcttaattatttttttacctcgaaatgctttgttggtaaccctcttgttagcaagaactgagtgatacttgtcgagtcagatgcagatgattagatttagcacatgaaagtcactcttatctctttccttgtaaagaaaatctctgatttttcacagaacagttaccgtgtggcttcttgtttcaacttctcttttagtctgattgatctaatacaagtggtctctgctgttaatgtttggtttggtttcctttttctgccatcatcttgtttagaatgcaattatcaatcaactcactgactggtactatctacttgtgatgacttaatgcaggtgtag

SEQ ID NO: 3268 - DNA, 979 bp, Arabidopsis thaliana
  Intron number 2 from transcript AT4G02840.1 (locus AT4G028 40) derived from phytozome v7.0 (chr-ID Chr4; pos 1264929 to 1265907)
gaaccattactggtacgcttctcttaaaaacccagctctattcgctgtttagggttttgtgtaaaatctacgatgcttacctgtaatcgatggttactcgcgtattcacaaattctgatggtgtagtttgagtttagctagtgtctttcccctaataatgctttgttggtattaaccctagtgacactggtcaagtcagatgcagatgagtacactagattttacttgaatcgaggtttatgagatagtttagttcttcttcaaactttgatcacccatgaggtagtttactttctcctttgatggttgtaaccaatggagctctcgaatttactaattctgatgtgtaattctgttaatagacctagaaatgcattgtgggtgttgaatctctcttgtttgcaataagtgaatgataatggtggtctagtcagatggagatgatacattttattttgctttatagttgggtgtatgagaatgcttagttcttctgggagtgagtttagcacatgattatatatgagatagtttactttagtttccctctttatcattgtggacctctcttgttaacaaatcctgaggcttaattctgttattagtgatagtatctgaagaagttagagtttagctgagtcttaattatttttttacctcgaaatgctttgttggtaaccctcttgttagcaagaactgagtgatacttgtcgagtcagatgcagatgattagatttagcacatgaaagtcactcttatctctttccttgtaaagaaaatctctgatttttcacagaacagttaccgtgtggcttcttgtttcaacttctcttttagtctgattgatctaatacaagtggtctctgctgttaatgtttggtttggtttcctttttctgccatcatcttgtttagaatgcaattatcaatcaactcactgactggtactatctacttgtgatgacttaatgcaggtgtag

SEQ ID NO: 3269 - DNA, 781 bp, Arabidopsis thaliana
  Intron number 1 from transcript AT4G02850.1 (locus AT4G028 50) derived from phytozome v7.0 (chr-ID Chr4; pos 1267777 to 1268557 reverse strand)
ctcgtgaagaaacctgtgaagtacttcgtaattgtatattcttcttcgtcttctttggtttttgtttctcgcaatgtactagtataacttccttcctttctactttgctctgagtacttcttttagaaatgttattatccttgtaagcttcccaaagtgttacctgtccttttttggagattttaagaatacctaccaaatcttcccatgtactatcaatcagttattattgtttgagtgttcctttttgactaaccaatttttgtttgatttttaacgactagtaagctatgcaacacaattcatcacatgcttagcataagaataatggaataaacataccatatttgttttgtcaataagtgcgtttttgctttatgagtgcttgcttccacttgattagatctgtcctttgctgaatataaaattttgcaaagctgcagatttcataatgatttgagtacaattcaactgttagcatataaacaaaacaaaaaagattaaaagccgagatttgtttcaataagattttgccctacaaagattgtctgtttctcttaaaagatgaagtggcattgtaaattaaaagcctccaaaatggtataaaagtttagctttggtctaacgaaaacatcaatggcaaaaatagaaccaaaaacgtcaatggatatgaattttcctgtcaagtacttcgtggtaattgtatattcttttctttgtttttgctctgataatgtgatcttcttcttctttatgaacgagtattgctaaacacaggttg

SEQ ID NO: 3270 - DNA, 689 bp, Arabidopsis thaliana
  Intron number 2 from transcript AT4G03110.1 (locus AT4G031 10) derived from phytozome v7.0 (chr-ID Chr4; pos 1378186 to 1378874 reverse strand)
cttgccataacaagaagacattgcctggggtttgttttttttttgttttttttttcatttctctgactatttgttcttctttcagatgcttgaatgtgatttgatgttctttagtttttaattattggatttcctcattcgcacatttttttttttcgttgagaatctcgaggtttttcttaaaaaatgttattcttaaatctggtttttggaactgcattgttttggtttctgttggattccagaattggcaaattctgattttggatatatgttttgcacgaagcatttctttctgtttaggtgaacatcaatttcttttgcccgaatcagaatcagaatctttcgatttaagagtctgtttcgttggagtcttattgacattgttttggaattgtttcttcaaacccaagaaagtgcaatcaatggtaaaactaggaaattgctataatgagattaatgcgaaagaaacacttttggtttactctttaatagaagcaaaatgttagtttgatccttgttcttatggaaacctgaaaaatgttggcattagtgtttttttaccatggttgtttcagtgtgttcttcggccttttgactgtaacatttaggatgcttagatccttgtcaggtctctaactaactttttcttttggttgctcaggctaacagtctattgcaagtaaagt

SEQ ID NO: 3271 - DNA, 205 bp, Arabidopsis thaliana
  Intron number 1 from transcript AT4G03110.1 (locus AT4G031 10) derived from phytozome v7.0 (chr-ID Chr4; pos 1378928 to 1379132 reverse strand)
tatcatcaaggacaagattacacgcgcctctcgaggtttccttttctttttttttaatcttcttcacgcctctgttttcgatttttttttttataaagtttttgattggagaatgtggtgtttgattcgtgtgatttgttgagatttatttgaatttccgaaaccctaatctgtgtttttttttgttaatcttccgattttcagg

SEQ ID NO: 3272 - DNA, 597 bp, Arabidopsis thaliana
  Intron number 1 from transcript AT4G03156.1 (locus AT4G031 56) derived from phytozome v7.0 (chr-ID Chr4; pos 1396088 to 1396684 reverse strand)
atttggttctgagacggtcacatgttaaagtgttctgaaaccctcttaattagttttatttttcttgttagttaatgtattcttgaaagaatgataacctctgagaagttttagtgatgtctcactgtgtttgagttcttttataatgtgatcaatgtaacattgctttaagattttctatgtggaaatgatgccttaagctcaccattgtagtgtacattcctttgaagcttccttataagaatgtgtgatggaatcgagaactcgagactgtctttctctgatttttttttgctctcacttgttcttgtgcatgagttccctattacttttggcgaaatataaccattgtagttcaatctgtacctaagaggacgacactttgaattgatgttttatgatgttttgcttgacgataatagtgtcacttcaaatgcaggacttggcacgaaatagtaaagttagtacacatatgttttcaagcatctgtggtagtagtgaagacagttgcagcaacaacaaccatgaagaggaagatggaagaaacttaatgaaagaacagaacaacacagagaataagaacgatagctgaggaag

SEQ ID NO: 3273 - DNA, 880 bp, Arabidopsis thaliana
  Intron number 2 from transcript AT4G03540.1 (locus AT4G035 40) derived from phytozome v7.0 (chr-ID Chr4; pos 1570373 to 1571252)
gtttgctttggaaattcgtcgtcgtcttggatttggtaccaatttttattctctgcatgcattcatttgcataatatattataagttcccttggttattataaagtgatgttgttacttatacctggttaatatatattaacaactgatcctaaatattatttaaaaagattttttgtttttcatcgcatattaacaacattatttattggcaacaaaaatgcaatgaaattagtattttgtagcaacattttcacaactattttgcagcatgtagattgtgattttctcgttatactaagttttaagtggtgtaatataagaattgaaaattatgatgttactaatttgtgttattcttataatgatcattagctcaatttgtgttaaatatccacctgactttttattcgagtgtactgttttttttttttttctgttacaatttgagtgtagtgacgattttatatatatttttgttaaagactatctctctagattaattaaaaacttatctatactcgaagttgatatattggttctaaaacgaaaacgctcgatgtattttaagaaagtgttatgaaaaaatgatagcaacttgaacacaaaacgactgcatacatagtagatgattgattgtctaaattaatttatttccattcgaatataatttgatggtgatttgtgtgtaagaaggataggtgaatcgttgggtggaaagttaaaacgtttgaatgcatatctaattactaactagtattcgtgtcttaatacaaagatttcttatcgtttcgtttgttaggtgaagattagctaaaataattaatatgtttaatttgaattggtgtatcatttttttgtcattaaccgtgatgaaggtg

SEQ ID NO: 3274 - DNA, 934 bp, Arabidopsis thaliana
  Intron number 1 from transcript AT4G03590.1 (locus AT4G035 90) derived from phytozome v7.0 (chr-ID Chr4; pos 1601842 to 1602775 reverse strand)
tgcatagcttcgaaggtttggagtattatacatcttcaaattcgtaactttccttcgatgaacagtcttatcccgacatggaaaaagctaataaatactatcatatctataaactatatatcgttaagagcaaggtatgtaatccaactctgttttgcgtttgtttgattcccaagacttgaccaatatagaagactcgaaggtatgttcttctgtgcgttggttttgaaaattatcaaacaaaaagattaggtatgtccggtaaagaacagaaactatcttatctcgtattcatccgagtttttgtcatatacaatacccgttttttctgtcaaataataatcttgtttttaatatgtttaacttaatgtaacaagtatgtcgttacgtatgtcccaaaattttccatttttaatattatttaaatatatgaataattgtctcaaatagacctttaaatatccccaaaaaaatagaaccaattagctagaattcgaaaaataaaatttaaattttcaatcttctcgtttcgaagttttttactcatattatatcaagaatagttgtggtaatttttttttttctaaattactcaaattattagttatggtaatgttttttaaactttaatttttatctcatattatatcttttacatgttattttgattatttacaaaaagaagcaaaattcaacagaaatctgagttatttttcaaaatgtcccgaaaagaaaatgaaattaggagggcacttgggttaatatcacacacgtttcctgggcaaaaggtaactaggtgatttaaaatctaatttaaataccatcgttatttccagagaatcttccgatttcaatttcccaatttgttcggatcagagagagttttagggtttagtcgatcaacatgcttctcaatcaatgcgcagagaaaacg

SEQ ID NO: 3275 - DNA, 504 bp, Arabidopsis thaliana
  Intron number 2 from transcript AT4G03630.1 (locus AT4G036 30) derived from phytozome v7.0 (chr-ID Chr4; pos 1609085 to 1609588)
ggcactgattctctcctcacctacattgctgataggttctctctctacccctatcccacatgcacacaaatatttatcgttctaacgaagtttataaagttgtacgtctacataagtgggattgattttatatctaaaacggttatgctaatttctaggtctaattctagtcaggattgaagaacaaaatatctcagttggtttagtggtaaaggatatgtttgttccttagtgccttttccttatgaggattaggagaattattttggttaattcgtatttgacatcaacgtatattgagtatggacatactgtatataggttccacccgtctctcttcttatactcgcaagcattagcacacaggttttgagttcatcgctactagtacagtttcataatgatattatatttgtatcttgaattgttcttctatctcttgatttttgtttgttaactatacttgcagatcaagtaatttgagacaccttggacttgctaagt

SEQ ID NO: 3276 - DNA, 386 bp, Arabidopsis thaliana
  Intron number 1 from transcript AT4G04020.1 (locus AT4G040 20) derived from phytozome v7.0 (chr-ID Chr4; pos 1932598 to 1932983)
gatcctcgcgtaagtacttttagttctgatactctcctaggcacggcatgtaatattagttttgtcccaaacattactcaaaccggtgatctctaagcttcgtctaggatctttaccaattaagttaatgatactttaaacttaccggtggaagtttaatttcccggtgaaaactgtttagttccgttatgaatgatttgattttgatagtgaaaagcaagttgtggttacaaagaagatttaattatgaatttggattatgattctgtgtgtagttatgagccttcgtttatttttagccgttattgttatgaatcaagaacttagtttttaagtgtttatctcgtgaagctacacgtcgttcgtggggttgttcccattgctct

SEQ ID NO: 3277 - DNA, 610 bp, Arabidopsis thaliana
  Intron number 3 from transcript AT4G04040.1 (locus AT4G040 40) derived from phytozome v7.0 (chr-ID Chr4; pos 1939892 to 1940501)
ttacttctgagtttgtgtacccttatagaaaccaggtatgagatgttctgtcttttagatttttgtcggtttattgttccggtttggtttggtttcggttttagatgtttaggttcatgaaaacatagatagaaagtgaatggaaatgaccatcatttggtttaatctcggcgaattatatatcttaataaccgaaccgaaaaacccgagtaccgaaccgatccgaaccgaatttttattcggttcaattcggcaggatttttagaaaccgaaaaaaccagaaaaccgatcaaaccgaaccgtttaacccgattaaaccgatctcccaggcctagtttattgtcttagcctttcggtttcttcagatttcagatatagaaaaagaaccaaatcggtttatttcatctttcacttcagttttggtttggttcggattgctttaaccggattagatagaagcttgtttggatcaattgaagaatgtattgttggagtaatcaaattttcatcatgaagagttggaactaaaagctttgttacttaaagatatgcattttgtgtttattcttagtagtttttgttgtgagtctctttgcagggtggatttgat

SEQ ID NO: 3278 - DNA, 783 bp, Arabidopsis thaliana
  Intron number 3 from transcript AT4G04200.1 (locus AT4G042 00) derived from phytozome v7.0 (chr-ID Chr4; pos 2027780 to 2028562)
agaagaacgctatcttgttcacctatcctcttgaggtttgttctcttgactgcttagaaaatgtggttaggttgtgtgcttttgggctacattcttgtttttgcttgtatcataaccagggactgttgtttctgtgattcggtgcatattttctcttcataactagaactatattttgatgtccttctgttttgtaaccacttagaattgttcttctgctagcttcacatgtgttgtagagttctcatatcttaggtgatcttggtgtttggcatttgagctatagcaggtgctacatctccctttcactccactcattctaaaccaactttttctcaatgtgttacttgattcgtcgatatcttgattattcggggtgtggaagttcgtgtaactcttggtatttgtgattctggcgatgtcttgttatatgagacacacttgttcaaaatgattctggaatttaatgttggtgtttgtggcttttgttatttgtctcatcagctggaaaaagtttcccatctcaattaatttgtatacgaaaaaatgcgatctttcaaaacatttgattagttctcattatggttaaggtcagaataggcaacaaagctagagaactccatttgttttgccatttcagtttctatgataatttggtttgcagattattcatatattttgctactgttaggacatgtatatttggttgttttgctgacttgaaattcggatggttaataatatgcagggatcattcaccagcactggtttggtggtatcttc

SEQ ID NO: 3279 - DNA, 324 bp, Arabidopsis thaliana
  Intron number 1 from transcript AT4G04340.3 (locus AT4G043 40) derived from phytozome v7.0 (chr-ID Chr4; pos 2123514 to 2123837)
gactctgttgtctatctccggatttactggctcgggtatgaaaaaacttgagtcttattgagtcaaccaattagtttaatgtctcataaagctgaaccattttttgaatgtagattatagagtagagtttgttggtcaagattagataaaaaaattatattttgaggctaattttgtcatcaagaagaggaaattacgttgactaagtctttagagagaagaagcaattctcatgtctgtccattagatttgagtcatttagtagtgaagattttttcctttgttttcttatgttgcaggcttaagatttttgctccaatagca

SEQ ID NO: 3280 - DNA, 540 bp, Arabidopsis thaliana
  Intron number 1 from transcript AT4G04402.1 (locus AT4G044 02) derived from phytozome v7.0 (chr-ID Chr4; pos 2164041 to 2164580)
ggatcggatactttgttgggtcgtctgggtttttggtcttttgccaattatttgaattttctctcatttatttttaattcgataaaaaatgggaattagaagagtggcattcctggttactttttcgcagatagtggcattcctgccatttattcgttcaattccgtgattacaccatttctctctaccaacaggtttcaattctacaaatcttcaaacccaattcattcaaacgtctttctttagctaatatagatcagcgatactagatttactcagattcatgattaaagtgaagaaagtgtgaatctttatgtgtgaaattgttgtggttcttacaagttatgatttctagggatttgaattgtgtaaaggtttgaacttcagattcatgtgtttgttttagtctgttagatcattgttacaagttatcatttttagggatttgaattgtgtaaaggtttgaactttagattcatgtgtttgttttagtcgtttagatcattagtttggtttttgtttttgtgaaggggtttttgg

SEQ ID NO: 3281 - DNA, 540 bp, Arabidopsis thaliana
  Intron number 2 from transcript AT4G04450.1 (locus AT4G044 50) derived from phytozome v7.0 (chr-ID Chr4; pos 2219028 to 2219567)
gaagagaaacgtacaaagtgtgaggtacacttattattcaattagtatagatcatttttgagtaataataacaaaaaaaagacacaactagtgtatttatcgcacgaaccaaagaaaaagagattgtcaaaatccaacaaataaaaaatgattgtcaaaaaccatcaagagtgtatatttttgtgcgtctgttacgtacgtaaacaattttccgcttttctgattcgtcagaattttaaataatatctgatgacaaaaaaaataaaaatatttttatgctaaattttgattatttttactgttcatcttcattttgtcacataattaagcataaaaagatattttctgattttctctacaaattttttatttcttaagaattagtaaaaatataccgttttcgtagacttagacattctatttttatatgttgttcgtatcggtccgtaagatccggacatgttagagagatttactctttcttactagaatgatttaatgtctgatacatgatttttttgttttttaataaaatgaaga

SEQ ID NO: 3282 - DNA, 942 bp, Arabidopsis thaliana
  Intron number 1 from transcript AT4G04740.1 (locus AT4G047 40) derived from phytozome v7.0 (chr-ID Chr4; pos 2406917 to 2407858 reverse strand)
aaccgatttcgggttgtccgcgttcatcgaagaaggttagctatagagattgatcttttatagaatcatcttaggttgatttggtatgctaatggtacgaatctatagattgtcttgcacaagtctctttagtatctacattcatcttaggagttcactgaatcgtgatgtcatatactctagaataagaatagaatgttatgcataaaggagtccgatttgaaattgataggtggtccctcctcaaagccaaagagatgtgttttgtcttaacacaagaacacacaaagtaccaaagagataaactctgttttgtcaattttcaagtctgattccttaacttgacattgaagtctttaaatacacaaaaataagaaagaaaataaccactaaatctactactaacatcgtggggagtggagaatacaatcccattaatttaggagccataacaagaccacatctcttttctatgacaccggtttactctggttatgtgcttatcagaaatgttctgtgttcattgaataaagtgagctcgagattgatcatattcttagtgtattgatgattgcgtttgataggttttgggtcctataggattgtctagcacaaatctcttttagtatcaagtacttgttttcgagtaacgatgagactgttatgctcaaagcaattgattttggggtttctctgttcattgaagattgatcatattctttcacgaatcgaaaatatgcactttgtgctttaatcatgagctagattggtgacttatgttccaatgcatagagatgggactctactctttagtaatagaatcaggtttatgttgtcttattattgtacagatttaactatgtttatgttttcgttttagtttattttgatttttatgtttatctgtttgtgaaaccaaaattacaggaaaaatttacaagg

SEQ ID NO: 3283 - DNA, 783 bp, Arabidopsis thaliana
  Intron number 1 from transcript AT4G04800.1 (locus AT4G048 00) derived from phytozome v7.0 (chr-ID Chr4; pos 2439754 to 2440536)
gaacagtttcggattcttcgtcaaaagggcactgagtaaagtttttaacctttcctcagcgattttcatggttcaatttagctttcaaaatttgagcaaatttggtaactatcttccattaggaatcctggttttagaaatctagggtttttatttcataactcgcttaatttgtgattctcagagttaataaaggtttgaacttttttttttttgccaattgttggaacatttatttttcaggggtgtgtcttgatgatgagcactatgttgatgattagatcttctctctgtgtagattacatagaaagtttctgctatagatgttgatctgttaggataaagtctattcttttgagtgattggaaacaatacaaatttcctgctattatagatgttgagctgttaggataagcttacatgaaaggttatagttcttcaaggatactatctttcattactcttaaactccagatgagtttgtttttttttcttattaaagataagatctgagtattggttttaccaagaatgtgctacgactttaagagctcgactttagaacttggttgctctgtcaggttttgtcagttcctatagagcctttactattattagcttctgtcttagaatggattgctatgtaaatgaccattaatatgtctgagttcgtcgttggggttttggtctttctagtatttggatatcttattgaatagggaatgaatgtttatattgcgggtttgtgttttgttgatttcagatatccaggaacaggggaat

SEQ ID NO: 3284 - DNA, 692 bp, Arabidopsis thaliana
  Intron number 1 from transcript AT4G04810.1 (locus AT4G048 10) derived from phytozome v7.0 (chr-ID Chr4; pos 2441475 to 2442166)
gaacagtttcggattctccgtcaaaagggcactgagtaagtctttgttttctttataaatttgggtttagggtttcatagtttgtgatctcaagttaggccttgttgtttatgtactcatattttgaaagattggattcagaagattgttgatttttgataggttcactatgttgttaccttttcaaggataagcactgtaattaggcttcaagtaatcatagactgaatcttgaaaacaaaattaggggaaaattggatctagatgcacatcaaacaagtgtagtgttgcttcttgcttttggtctttgttttgattgtttcaaacgcggtttctgcaaacggtttgcgttttgcgtttatgttttcaattaacaaagtctttttagcttagaatgcttaagattgttgatttattttgaaaagaaaaaactacactaaacgcaatcgcaaacaaacagtaacgaccttaaaccctaaaccctaaacctaagtgttttattggttttctcagttactatagaactttgtttttagatttatccaagtatagattgctccttcttttgttacgatttttggggtgatttatttcagttcttactttgaaacatagtatacaaatgcataatacaattcaatccaagtgttcttatggttaaaaatatttcagaacgccgggaacagaagaat

SEQ ID NO: 3285 - DNA, 1031 bp, Arabidopsis thaliana
  Intron number 3 from transcript AT4G04840.1 (locus AT4G048 40) derived from phytozome v7.0 (chr-ID Chr4; pos 2450135 to 2451165)
ctattcctggcgccattaaccgaaccgtaaacctaatctcctcttttttttttcttttttttaatgaatattgaatttttatcataactctaaagaaacctaaactaatctctgataaatatattttctattttcataaaaaaaaatgggcatgcttgcatttaaaacgtctataataatcattttatgtatatttaaaaatattggtatgcttgtccgtattagtcacgtgtataggaaagtgcagacgggttagctaactatgcttttttttgtcattagagttttattctttggaggttgttcctattgattttgtttctgttgtaagcgatgatgtgcttaggttgggtctacgtgactaaggcaagtgtctatgtagtttttttttgaagttttaataaaatttagatagattttttcccggtgactagaagcttcatcgagataggagcgatactacgaataaggtatatggggcagagtgccctaccaaaaaaaaaacactaaaaaaataatgaagatatgtggagtttaatgtagttattttgaaaagaaatgtgattgaatcctaactatactcatctaaccaagcttataattcgtataattcgtataattcgtattgggctgcatgtttgagaaagactgaccatattttttagtatcataaagttcgatcagtaaaaataagaaatgatagcttagttagattctagtaatactatcatgttttaattgtttatatataacaattgtatcttacgtaatataattcatataacaattgcatgttgtaaaattataaaatatcttttcatttaaaagattcgactaaatacatatctcaaaaatgacatttttagtatttattaaataacaacaattgtttttaaaacacatgcaatttgaattgaatgaatgaaaataacacaacatcactagaatataaatcactactttagaaaatcatagtcaatgacatactttttaaacaatatttttgcaggaggagagagctggattaagat

SEQ ID NO: 3286 - DNA, 592 bp, Arabidopsis thaliana
  Intron number 3 from transcript AT4G04900.1 (locus AT4G049 00) derived from phytozome v7.0 (chr-ID Chr4; pos 2486389 to 2486980 reverse strand)
ttctacttctttcttcacttcttcttcttccactggtaagttatttatttgtttttaactttttcatttccttggttttttttctttaaaattgatgtgattaaccatccacttactttcaaattacaatttgaataggtaaacaaatatagatgggttatccaaattttatatatagattgaataaatagaagatttgtatatcatcattgcagataagagatggaatttggtaatatatatttaacttaaaaccaaaaatgaactttattgaaataagcaccaaaatattataactttttacgaaggtttcagaatgaaatttgcaagatgggaaaaactttaagttatgatttatgaattgtttttaatctttgaaaattaggacccaatttggtatattgaagtttattcattctaccaaaaagatttgaggtttattcacccttttattttcttaaatcaaaacattttgttcacctaatgtcttttttactacagttttaggcttttagtcaaaatttactaatcacattatgttctttttgtaaatatagattttgatcaaggatcgagtcaacgaggaatatca

SEQ ID NO: 3287 - DNA, 485 bp, Arabidopsis thaliana
  Intron number 1 from transcript AT4G04900.1 (locus AT4G049 00) derived from phytozome v7.0 (chr-ID Chr4; pos 2487254 to 2487738 reverse strand)
tatctctcaaatatttggtaatatactttctttaccattttctctcttcatataatatattaattgtttacctatatttgatgaaaattgctaaatagggatacagtgaagatttattaatttgcaaaatgacacgatgataaaatcgtaaatgagcgtggtttcaaaagtggtttagacaaattattgtgatattcatgtataataggggtttttcatgctatttaatagacattttatgattttacgattttactactgcattattcttgctaataaactttcaacatatatatatatatatatatatagtcatttagtgcatatatcttttgatatttgcttctacattatgtttttgatgtgtaccaagaatatttgagtacttataccaaatgtctatcacatatttgtagagtgttctcatgtaattgtttggcttttaagaatattatcttatgtttcagccgttgagaaagagagag

SEQ ID NO: 3288 - DNA, 732 bp, Arabidopsis thaliana
  Intron number 1 from transcript AT4G04930.1 (locus AT4G049 30) derived from phytozome v7.0 (chr-ID Chr4; pos 2509403 to 2510134)
ggctttcctcaaggttcttattctctaccatttttctcggatcttagatcgatatttccatttttctaggacgtctagttttgttctttgtcctctttttaaaaatgtgtttgatacataaacgaaggttgtcgaagaaacaaacgaatctgttattttcttacgtttagaaatttcggatttgtttttgatcctacaacattttgagtttgtgtaatatctcaagaaaaaagcatttgagtttgtgattcgtatgtgatcttgctaactccattaaccaattattagggtttgtgtttttttgaggtccgcaaatttgagttttaggagctgaaaaataaaactcatgttttagggtttctcacattttggagatgattccaagcaactgaattttatttcagttcgagttaggaattttttttattttttaataatttgtttagtagaatttttgtatttttgttttcaattatatttttttatcatatattttagttacaaatattatgtttcaaaagattctgcttatttggcataaaagtttctctatcgttagggctattagctaaaatttggttagattttgggttgatgaatgtcacatttcacccaaaatctttcaaaatattaaaatttgttttgatgttatctaaacccaaatgaataaccaattttgtatttgttgtctatacagatcacattagtagtaattcttcaactctcaacagc

SEQ ID NO: 3289 - DNA, 530 bp, Arabidopsis thaliana
  Intron number 2 from transcript AT4G04950.1 (locus AT4G049 50) derived from phytozome v7.0 (chr-ID Chr4; pos 2519102 to 2519631 reverse strand)
ctgttgctgctgtgccttatttcgtcttcttcaaggtaaagttacgttttttttgttccctatgatttgatcaaaacttaggatttagggtttttgtttttgcttaaagttgtttgtctaatttggtagaagaagaagacattgatgaagtcatacttattgattctttatgttgctttgtttggttgcaattttctgtctttatagcattgagagtgtgttcaaaagtttgaatctttgtccctatgttttgatcgaaagtttaggatttagggtttttgttttgattagtttgcgtctctgttagattactgaaagctgtttatctaatcaggtagtagaagaagatggttcgcctatccatttagctccagacttattgattctttgttttaattggttggttgcaattttctgtctttataggattgagagtgtgttcaaagcttgaatctttgtcactgcactgtaatgattgttctgaaagttgttactttcttctgactgtgaattcgttttcttattgaagg

SEQ ID NO: 3290 - DNA, 752 bp, Arabidopsis thaliana
  Intron number 1 from transcript AT4G05400.1 (locus AT4G054 00) derived from phytozome v7.0 (chr-ID Chr4; pos 2742008 to 2742759)
atttcgtttaaaaggttagagattttgtcttatctcttgcttttgctttggagatgagctttgaatgcttgtgtttcgaacaatggaatgattcaggatttaagaatgatggttagtagtttactgagtcttgggtttactttgttgtagaaagtgtctgaaataaagagaagttgagatgagtcaataaaggttagagatttttgtcttatgcttatcgttttctcttgtttctgatttggatatgagatttaacagtttgtttttcgaacaatggaatgattcagggtttaggattgatggttggtagtattgatctctgatgtcaaagctgtgttcttgggtttactttgttgtagaaaatatctcaaaactgatggttagctagatttcaggtagtatgatacttattggttagtttgagatcgagttatatgcatattagcaaataagtgaatgagaatcactcacttgtacatgagttagtgtttgcaatgttaaaatggaaacttttggaagcatgaccttcctctggaacttctctgcatataggctcgagtctttggattattatgtatcattttcgttttttttgcaggatatgttcttgtttagttattctttcaatgctgtttgcatttttcttgtttcaagtcttcattttgtggtattctatgtatgttttggatatttggaactttcttatcaattctctgctggtttttcttatccagttgaagctattagtcaga

SEQ ID NO: 3291 - DNA, 571 bp, Arabidopsis thaliana
  Intron number 2 from transcript AT4G05400.2 (locus AT4G054 00) derived from phytozome v7.0 (chr-ID Chr4; pos 2742189 to 2742759)
agtcaataaaggttagagatttttgtcttatgcttatcgttttctcttgtttctgatttggatatgagatttaacagtttgtttttcgaacaatggaatgattcagggtttaggattgatggttggtagtattgatctctgatgtcaaagctgtgttcttgggtttactttgttgtagaaaatatctcaaaactgatggttagctagatttcaggtagtatgatacttattggttagtttgagatcgagttatatgcatattagcaaataagtgaatgagaatcactcacttgtacatgagttagtgtttgcaatgttaaaatggaaacttttggaagcatgaccttcctctggaacttctctgcatataggctcgagtctttggattattatgtatcattttcgttttttttgcaggatatgttcttgtttagttattctttcaatgctgtttgcatttttcttgtttcaagtcttcattttgtggtattctatgtatgttttggatatttggaactttcttatcaattctctgctggtttttcttatccagttgaagctattagtcaga

SEQ ID NO: 3292 - DNA, 456 bp, Arabidopsis thaliana
  Intron number 1 from transcript AT4G05460.1 (locus AT4G054 60) derived from phytozome v7.0 (chr-ID Chr4; pos 2761642 to 2762097 reverse strand)
ggtactgttgatctcctcaattacatcgcccataggttctctcttttcccactcaaaatttcgccaatttttatttccgtcaaaaggagtttttgattccttgtttagagaacttggattgatttgatttcaatatgtttgttctagggttagaacagtttttggttgtggaagttactatttcttgtgagaattggggaaattatttgtagcttatgattgtgttgtgttacattgtatctaaattctatgttggagtagtaagtagtcacttgattataagattgttatgcttctgaggtatgaatagttaggttcaggtttttatgggatgctagaaaaaagatgttttggatctttgtcattcttcttctctatcttagatgttgtttttaactttgttacacacaattatttgcaggtcgagtaatctgagaagccttagacttataaggt

SEQ ID NO: 3293 - DNA, 430 bp, Arabidopsis thaliana
  Intron number 1 from transcript AT4G05530.1 (locus AT4G055 30) derived from phytozome v7.0 (chr-ID Chr4; pos 2816562 to 2816991)
aaggcgcttccgtcgtcgtctcttcccgcaaacaggtttcaccatctctcactttcatcttccgaatttgaattaaaacgatgaaactaaagaatcgttttctagtgatgggatctttgtatttgtgcttcattaggtttcttttcgtaccgcgaattgttgataattctggatttgatttgttacagatgcaattatacaacaatcactgtgaagtgtatgatcgcaattttcaaagattttaaaggaactttgctctttctgtttttttgtcgaccgatattaattagattaagctcaaaagagtcattcctaaggaattgaactttactcttattttcgtagatttgttcctctttgttcttgaattgtagttttgcaatttttcttagactaaaagggttgaatttgattatatatgtgcaggcaa

SEQ ID NO: 3294 - DNA, 525 bp, Arabidopsis thaliana
  Intron number 2 from transcript AT4G06676.2 (locus AT4G066 76) derived from phytozome v7.0 (chr-ID Chr4; pos 3899215 to 3899739)
gtttgattttcttaggaaggtaaaaatctcatctttatggtctctttactttgactttgctttgtttgaagaaaacgaatactttatgattgtttatgattcagaattaggttaatttgcaattttgtcaaattttctaaagaaagtttgagacttgattaaagcagagagcttgttatgagtagaattcgcccaattcagtacttttaggtcgagatagcttctattacgaacaaactagtgttttcttttgaatggtttgattttacttaggaggtaaaagtctcatttttatggtctattttgcatttgttttgattgcttgagtgcatacaagtgacccgaagactctctgatgactgatgatccagagaataagtattgattttgggatgagttttataattaaagaagagagatttgtgtgaatagattctctcaactcaatacttttagcttacttttggtttttattttgagtttggtgcagtttaggtgtgtttaagtggtttatagatccatccc

SEQ ID NO: 3295 - DNA, 492 bp, Arabidopsis thaliana
  Intron number 1 from transcript AT4G07675.1 (locus AT4G076 75) derived from phytozome v7.0 (chr-ID Chr4; pos 4466653 to 4467144 reverse strand)
acgggtttttttggttttttctctcaaaaatcttacacagatattttcttttaaagatatgtaattaatttgtagacattttaatagttcgatactttaaaataaatgtggttaagaaaaaagatattcacaaaaaaaaatcatttagattctgagaatcttttaatctacctgaatattaaacaacagagttagttcttttctctctcattcgcgcaatcttccgctttttaatgaaaaacctgagaccttgttcatcattattcatctgaaccaaaagctgcttcctctttttttttttgtgaaaacaatctctctttgttgagttatgagcagacaccagtatattctgagaacaatagattatgtatgttagactttattcttttcccataaatatttaagaattcgtttgtgtgtttgacttttcagaaacaataaaattcatgtgtttcaggtcaaggaaaaaatcgagaggaggtgtattctaga

SEQ ID NO: 3296 - DNA, 1006 bp, Arabidopsis thaliana
  Intron number 1 from transcript AT4G08039.1 (locus AT4G080 39) derived from phytozome v7.0 (chr-ID Chr4; pos 4884976 to 4885981 reverse strand)
tctcagtcagtcaggttttcaaatatactataaagggaagaaatcttataagttttgttactacctttatagtaacttttaacataaaattttcccacgtatagtttcgttgtctaaagtaaacacaagggaagataatataccttaatggatcatctccagtaattgggttaaattctctcattttcatcaccaatttcatcgttagagcatttcaaatcacttaaaataaacatcaattataaagatatagaaatgggtcatagcctcataggtaatcatatcaatgtaaaaaaaaaaaaaatgcaaaatgactctttctagcaaaattgtataacttttgaataatgcatgagactcacaaatcgaatcatgacacttcttcaagaaaataagaaattgttctcataagacacacttttcatttttgatgttgaatgatcaggagaaaataaatatctactaagcttatacttaagaacaagatcataaaaagcagttaaagtttcatcaatgtagattggtagatggagtgaaacgtgcactgattgcatggaattaatgctcgttagacttcaataagaatacaaactaatggtattttcctacactttccttgcgccattgatcaaaacaatagaggatcaaaaccatcattcacgaacacattatccttaacatttagataagtcaactttttttataagcaaaagaaattttaaaaatgattcaatggaaaattttattttttaatgaaagtttttgaaaaatataataccgtaaagacatttctccgttgacaaaaaaaaggagtcatttctttaaatttcgttataaatattaaataactcactcaaaaaagtaatatgtaacgggttcctatgtttgtaccaatgtaagctatttggtaatcttcttcctatgtaacgggtttgtggaagatcattcgactagctatgacttcacatgtttcagaatacttaatagcctttgtctcaaagctctc

SEQ ID NO: 3297 - DNA, 1019 bp, Arabidopsis thaliana
  Intron number 1 from transcript AT4G08170.1 (locus AT4G081 70) derived from phytozome v7.0 (chr-ID Chr4; pos 5165047 to 5166065 reverse strand)
gcgtcgaattctcgaggttagtcttacgattgtttccgtttttgtatttgctgtggcacattctatagcctaagattattagatcatgtatgtctgtcattctgtggtgatgagtaccatgttgatgtagttatgttatataagcctttgttagatgagagatggtggtaaattgcacaagttagcaactagttccttttaatttctaaatcttgtttctcaatggaaatttttttccagagcttttactctttccttgtcgtgagtcattagttgatacaaattgaggttgagactactgcaagtgagaatatttctacttccagaggcatagaactgtaacctcttcaggttttctagagttagatactagtaatgttttttgaatattgggtttacatgttcctggtaatagttgaatgcaaaatcatttcatctttaagtagaatgtaatgctctcttgtctacatatataagagccatcatctgatttctcgttggggaacaagacatttcacatctcataattgctagaagaatagaaatgaaagtatgctgtttggtgtagaaagtaatcggcgtttctgtgtgtttagatcctagagctattcagatctcaggagatcagactatgaatcattagaatgccaacttctgagtatagttgaatgctagatttatactcttcagatagtatatactgatgatatagaaaagtgtctacaatgaaactttagttgcaaagtgcaagtttcatcagtagattagtttaattcttaatcttagttgcaggatagtgaagagttcaacgttggggatacagtttttagactgacactgtcgctgtgttaataataatatcaatgtagatcaatatctcaggagatctcagcaatacagagatagaagttttctgtttatgaccattagcagggatgcacttttgggtgttgaaaagtagactatgtgtgagcataactgtttctaataatttcaggaatttaggctagcacatccag

SEQ ID NO: 3298 - DNA, 964 bp, Arabidopsis thaliana
  Intron number 2 from transcript AT4G08300.1 (locus AT4G083 00) derived from phytozome v7.0 (chr-ID Chr4; pos 5245354 to 5246317)
ttgttccttaggattcttgcccttggattcctagagtaagctcctcatacatatatcttatccccttttcatgtccatatatatatgcaaacacacatacacacacacataaatatacgtgtatatatatatagatataaatttatacgatgttgggggttttctattttataaagaataattcttattttgcattccaaatatttgagggttttgaggacctaagatgaatgaaacaaaatgagactttgatacattttccctgataaaatgtgtcgtaaatttatgaaatgattagagataattaacgatttctttttaatttatgaaataaccaaaaataatcacacaaaagtacaaatttcaccaatataaaaattgaaagtttttagaaatcgattaataataaactattttttttttaataaaaaatttaaaatttattcgaaaaaactgtattacatcagatgcagcgtttgcgttaagaatttcttagatacaaacaaacaaggatcaaaataaagatttaatgtgtagagcttcattagcgggaaccaaaccagagtaataaactatttcgatataagaattaattcaataattttaacaaatcttttcatatcgatgaatccttaaatcatataaaggtaaaatataccatataaaagaatattatatacgaagaatctatacgaaaagattctagtcgtttggcaaaaataaaaaaagattctagtcgtgaatattcttgattagatcatcacccattgccgtcttctcatagctttgttttcctttatcttttaatttaacttgaagagaatgataacgaaaaaaaaagaaagaatatgattggttaagcagaagatgatgcaacattaaagcatatgattaataaatttgtaaatgttggttgtttgtctattcagaccacttttggaccagaacttgtactacataggaa

SEQ ID NO: 3299 - DNA, 399 bp, Arabidopsis thaliana
  Intron number 2 from transcript AT4G08360.1 (locus AT4G083 60) derived from phytozome v7.0 (chr-ID Chr4; pos 5296304 to 5296702)
tctcggtgagtcttttgcctttaaccaactccagaattttatttaatacaaaagagaacagataatgataaacaggatcaccacaattcaaagacaaaaggaccggcgatatgatgctagcttccaatgctggctccaaagtcggtttttagtcttctaagctttctttacgaagaaaatcttagctctcaatctacctcctatatataaattacgatgcacttgatgtaaaaaagtttatttacttttgaatcttatttaacattacgtacataaaaaaaataatgataaacaaaaccatacaacaaagttcaatgatcttgattacgagaagtgattataaatgatagctcctttctaacgcatacattcttcccatgtgcttacttttttgtcagg

SEQ ID NO: 3300 - DNA, 411 bp, Arabidopsis thaliana
  Intron number 2 from transcript AT4G08470.1 (locus AT4G084 70) derived from phytozome v7.0 (chr-ID Chr4; pos 5385811 to 5386221 reverse strand)
aagccatttcagagtaagtcttactggttgcttatgtttgttgaacttaaaattagatacttagtttataggaaaataaactttaaattgggaaatgtgatgcagtgcgagagtttttctttgtgtgttttgttgatgctttttgatggatgtttatgttatcctttagatcaaattatacactctttagttgggaagaaaagaacaacatgcctatttacaataagatgtttaatgagttgaaaaatacggtgcaaagcgacttttatggttgcattaccattgtggcattatctcattgtcttctctttcattttttatgggagattgcattacttagtcagcttcagcgtcattatatcatgtctttttctagttcctctgttggttccgagtcgacttgttccttga

SEQ ID NO: 3301 - DNA, 888 bp, Arabidopsis thaliana
  Intron number 2 from transcript AT4G08520.1 (locus AT4G085 20) derived from phytozome v7.0 (chr-ID Chr4; pos 5417890 to 5418777)
gcagggactaatgtaagtacatctctaagctcattgtatactgttaagaatcattatattgttgtctgtaaatagtcttgtgatgctttatggtttgttacacttatgagattctttgcattgtggtgtaatataatctcctctgtttgtgtataagatcactatgttaagattgattttttcttgttttgtttgttgagtgggtaagtatgttttcagaaggtgtgacgaatcttaggttcatgcccctattgttctaagattgtttgcatctttcaatctggaagcataattaggctttgttactgtctaagtaacataagttctggtagatttttgtaaacgttcttttgctgctgagaaaattccaattgcttatgaatctgcttttgtgcaatatcatcatttgtttgttgatgcaaaataatttggattctatctgttggagctgccatttgtctggtgtgtcatgtttttgtatgtccttttgttggccaggttgaatttaactaaagcttgtattatcttttgtcctaagtgtttttagcaaatttatgtattagcatttagcaccataggtttgattggcctatctggtcaagccatagatgatgagtattgagtagctgatttagctttttagtttgattggtggcaacaaatactcaagaaacttaggctttggaccctgtgtaattgtccatatgattggtgatagttggactggtgatctttatctactttgctgttgtagaagttcaaacttacatgatccattttaaggattctcgcttctgcttgtgcttctctctcttagtacttacatgctgactatctggtctacaatgaataggattcttgtcctttggtaaagaacattcttcttct

SEQ ID NO: 3302 - DNA, 637 bp, Arabidopsis thaliana
  Intron number 1 from transcript AT4G08590.2 (locus AT4G085 90) derived from phytozome v7.0 (chr-ID Chr4; pos 5465671 to 5466307 reverse strand)
ctctgtgtaatcaattgcctgataggcccgtcacggttcgttctctctctctctctcgctttgtgttttgcctcttatacttgttaatgttagtgtatatgattgtttacacttgagttactaatttcacacaattttggagtagattccttctttttgtgcttaccatttatgatgaactacatttatagataacagaattgctaagttcaattaagttaatacttattatatacctgtttttgtatctctttttggttggatttgacattagttagttttgagttacttctcaaggtaacaaatctattgtgtagatgaaatttattagttaagagtagtagtatatgggttgtttctttatcatgttgaaattatgtgtgttggacaagttggtgttgttaaattttgtagtatatgggctgtttctttataagagtagtagtatagtagtatagtagcctaacttatatgtgtagttgaaatttatcatgttggtgttgttaaagtttgtgattgtttacagttttttaagtattaacttcttcttttcaaaataagtatttcagaaaaagatgaagactattacgttaggctgatggataatcttgtatgtgtatttttcttttcagatatt

SEQ ID NO: 3303 - DNA, 756 bp, Arabidopsis thaliana
  Intron number 2 from transcript AT4G08730.1 (locus AT4G087 30) derived from phytozome v7.0 (chr-ID Chr4; pos 5577590 to 5578345 reverse strand)
gttatacaattgcggccttcttactttataattatgtaaatatgactttgcttttacttttaaattgatcaggaagttcctgaaaccaagaatctcgtagcgagcagttcctctgaggatgattaatcttctgatgaggaagaattagaagatgattctcatgatgagaaggtgatatactttatatctcattcttgtcatgtcttgagttttgtatatttttttaatcactaactttgtatatatagttttttttactatgatcaagctactttttgtgtttttgtacctatataaatatcaaacggttctctaattacttgtttatgaaaatgtaaacatgctacgacagaagctagatccagcagataaagattctaatgatgaagtggttgctgagagaggcaggtaaattgatttttccatgtttttgttagatgttcttgtgtacgtagataatgtatctctcttgaaattattggactgatctcactggtggtggtagtgttcaaacgatttacgttaaaggatttggctcttcgcttccggaggatgatatcaagtaaacatttcagtgcatgtggagagatcacaagggtttttattccaacaaaccctgaaccggtgctatcaaagggtttgtgatttcctcaaatttatgacaagtaaatttaaaggttaactaaaaagtttttagtaaaaacccatgttttttttacagatttgcttacattgatctaaaagaaggcgcaaata

SEQ ID NO: 3304 - DNA, 304 bp, Arabidopsis thaliana
  Intron number 1 from transcript AT4G08760.1 (locus AT4G087 60) derived from phytozome v7.0 (chr-ID Chr4; pos 5590655 to 5590958 reverse strand)
attcacaacagtaaaggcaattgacaaagaagaagatcaaagcatcctaggttagggcaaagcaaaacagaatcaaagaaggaagaagataacgggaaaagtgtagtttcaagttgtggtttacgagggagaatcccgtcatgacaaggagtatcagataatgagtaagatgtcgttgaaaagattaatttgtcaataatccatagcaactgacgaagtttaaatcgggtttatgactgagaagttatgagtgtttcttttgggccaagcaactacaaaaatattgcaaaactaagccctaagg

SEQ ID NO: 3305 - DNA, 791 bp, Arabidopsis thaliana
  Intron number 1 from transcript AT4G08770.1 (locus AT4G087 70) derived from phytozome v7.0 (chr-ID Chr4; pos 5599300 to 5600090 reverse strand)
tccttcgtcttcatttccacgactgctttgttaatgtaagataccattagaatcaatatattcatgtatattttaactcttttggttccctatagtgtagccctaataaagagcgcgagggaatgctttatggatattataaacttgaaattaggatataaaaatgtgatagactttttgttttgttgttcgactcaaatagtttgtttcatggtttattcatttcaaactgtgaaattattttggtagttttgttattgaaattttggctttcttttagttagttaaaaaattgaaaaaaacaggaatgaaagaaatttacaaaaacaatagaaatttacttttacatacaaaatttatgtctttttagttaaattatttttttggaagtttgattatacttattttgactagttttggttgaattatggagactggagaggctatatataaaatggaccaacaacttctcaaagacattaatttgatattattagtacaagtctacatagattgtagtgctttcttatctcgagtttcagattctgtgtcaaagtatgctcgaagatgtttatagtgaactcatattttttggatttcaaatattctgtcttcggattcacgtgaaaagattatgctatcgatagtgtgatacatgtagtagtataacttgtttatatttaaattcaaagaatctaagatcaactgtttacggatgttaagattttctttatgtaaacaatgttgttagttactaaatgtgaagaaaaatattttgttttgaaaaaggg

SEQ ID NO: 3306 - DNA, 620 bp, Arabidopsis thaliana
  Intron number 2 from transcript AT4G09060.2 (locus AT4G090 60) derived from phytozome v7.0 (chr-ID Chr4; pos 5799038 to 5799657 reverse strand)
gtgaagtaagagtttcttcatattaaccctaaattttctttaattgggttaagttgggtttagaattgcattgccctcgagtaaattagtttgctttttgcacttgctggtttatagtttggttagcttgttcttgatgaaatggttactcaagtgctattgtcttctctctactctttaattagcacatggggtaccatcatttggttttctttgttaagttgacaacttgatttatctaagttctcatgaagtttgacttctcattgagtctctttgcagaaaagtcatagaatggtagatatgatgcacttgagagagagactatgctagtccacattaagtttctcttagtactatgaaatataaaatgtccttccatatcgcttttctcgctgaaggtgataacttgaggtggatatcaaatgggtttgtcatatatcctctattgttagttgttttcaatagcctgaggtggataaaggtagttgataagtttttggttgtctatgtgcttcagagattgcttgttccatccaatgtttaatggtactaatacgaggtgcatatttatcaaacaaatagaaattagaaagatctgttagagtcaacattagtaa

SEQ ID NO: 3307 - DNA, 559 bp, Arabidopsis thaliana
  Intron number 1 from transcript AT4G09180.1 (locus AT4G091 80) derived from phytozome v7.0 (chr-ID Chr4; pos 5847934 to 5848492)
cactcttctcttctcctgagtttacttctcaagtaaaccaaaattagttcttaaattagggttttcttatacttgccaaaaataggatgaacttaactgacttattacttgttttagttaatttgctgaccaagttctcgagattgaaaagaccagtcttgtcttaaaattgacaacttgtgtttttctgaaccaaactaagcaagttgcagtttctattttaactcaaaaaaaaaaaaatggcagtttttgttgttggctctgtggctttaatgtgtcaatgtgaacattaaagaatgctcctatgggtaaagtgtttagaagaccataagtccacatgatgatacatacttcggtggttaatgtgtacaaatgtattgattctccacaccttttggtacattggtctacttagtattaagtaactacacttgatcaaaattttgggaacatatgtgttacctatgtgttgattaaggtattagtgctgatttgcgctttttggaatttttttctgtaagtagaaaggagagcaaagcagcggtcaagttcctaccgg

SEQ ID NO: 3308 - DNA, 534 bp, Arabidopsis thaliana
  Intron number 1 from transcript AT4G09550.1 (locus AT4G095 50) derived from phytozome v7.0 (chr-ID Chr4; pos 6039172 to 6039705)
ttcatactttatttttgcaaattccgtttctaaacgtaagttttcttatcttcgtttctatcagattactccttaattcttagtctcgaaataaaaaatttgaaatttattcgatgttatgcaaattgccgccgacataaaaaccctaatttcaatctcatttttcatctgaattacatttcttttgaattgaatgtttctgggttgtgttttggttttggtattaactgatctattagactaatccttgttcacctatcagataatattattgggctctgaaacaaatttgactcacttttgtgtgtgtgagcattgtatcttcactacaaagctctagcttgaaatgttgttgtgtaatttataagactctagtttctaacttcttatgtcaaaatcacctaagagtctttgacttggttcttgttagatcatagttcacttacttttgtctaatttggtttggtagaaactctataattcactaactaccttaggactttaaaattgtggagtttaacaggtgtgatcagt

SEQ ID NO: 3309 - DNA, 624 bp, Arabidopsis thaliana
  Intron number 1 from transcript AT4G09580.1 (locus AT4G095 80) derived from phytozome v7.0 (chr-ID Chr4; pos 6053435 to 6054058 reverse strand)
gttcctagaactatctccgatcttcgattgctcaagtgagattaaaagcttcttcttttacaattgaaagtgtttagctttgagtagttatctcttaaatcttaaacccaaattgaaagttcaaatctttcggaaaattgatggaaaattttctgtttgtgataagcttgttcgtttgttctattgattgaaaaaattgagtttaagctaatgtaggaattgaaagtgtttagctttttaatagtgatctgttgaatctgaattctaattcaaaaacccatattgaaagtttgaatctttcgaagattccgataaattggtttagactttagagagcagaaaattagcttaaagacatgattctagaatcagcattctcagtttgtttgtatgtgattagcttgttgtttggtattatagattgagaattgaatttatgcaaatgtagaaactgaaagtgtttagcttttagtagtgttacttgaatttcaaaataagtacatgcattagcattaagacttgatttgaaagttgcgttttcagttgaatgtgatatgcttggacttactatatgatgatgatatattgatatgatgaatatgtgcagagagaatcttgggtctt

SEQ ID NO: 3310 - DNA, 642 bp, Arabidopsis thaliana
  Intron number 1 from transcript AT4G09670.1 (locus AT4G096 70) derived from phytozome v7.0 (chr-ID Chr4; pos 6107978 to 6108619 reverse strand)
tttctgattctgaacgttttggtcagcttaaaactgtaagttttcatgaaagtttatggctttttgaaatgttttgagttggaattggatttgacgttttgggtttctctgaagttaaaagctttagttctcagattagctttatagagtagatgttttttgggtttctttaaagttagtagctttggttctcagtgtataggtttgatcaagtttctggcttgtgtagtttctctcaatttttggtttatagtatcttgaattcttgatgattagatagttcatagtgttcttgaaaggcttgatgtttgaatctgtaggtacagattttttttcatttgaatagattggagtttgttttgggtttctttaaatttagtagctttggttctcagtgaattggaattggatttgtggttcttcaaagttaaaagctttggttaatggttctcagattagctttatagagtagatgttctcagtctatatgtttggtctggcttgtgtatgtttgatagtgaacaacataaaatagtttagtttcttaaagattagatagtgtcaagagatgtttcttgaaagtcttaatttctacttgatgtttgaatctgtaggtacagagttgtttctcatttgctggag

SEQ ID NO: 3311 - DNA, 620 bp, Arabidopsis thaliana
  Intron number 2 from transcript AT4G09720.2 (locus AT4G097 20) derived from phytozome v7.0 (chr-ID Chr4; pos 6133703 to 6134322)
aggagtttcttaaacaggttcgtatgacaatttccttctttctgtcacactttgttttggtatgatccatttgttatatgttttgctttgtgtgttatgttataggcatggaacataggaatgtggtagtttttgttttaataggaattgttagcttttgagtatttagagtcacaatcttcagatttttggttaacatttcgtttaaacaaaacccagagtcaaactctcttttttgatgatgttgtgggaagagtttttgattatcgtcgtatgtcttttggttctcaggactatagctgaagttttgttttcccgtgagtaacaagatgattgagcaatggaacatgttttttatgtttgaatgatcatttgcgtttttttacctagcggtttactggttaagccaagtatattactaacttgctttcgtgttcataacagttttagaattcatgactctataaaccctgttctctaatcagtgtgttttcctgcactcacactttcaatccttttaacaatgtataacatgctaacttgtattgactcccttttccatggcatcgttttgggactgtccaggcaagtccatcagatccaaagacatttccgtttat

SEQ ID NO: 3312 - DNA, 502 bp, Arabidopsis thaliana
  Intron number 5 from transcript AT4G09720.4 (locus AT4G097 20) derived from phytozome v7.0 (chr-ID Chr4; pos 6133826 to 6134327)
tggtagtttttgttttaataggaattgttagcttttgagtatttagagtcacaatcttcagatttttggttaacatttcgtttaaacaaaacccagagtcaaactctcttttttgatgatgttgtgggaagagtttttgattatcgtcgtatgtcttttggttctcaggactatagctgaagttttgttttcccgtgagtaacaagatgattgagcaatggaacatgttttttatgtttgaatgatcatttgcgtttttttacctagcggtttactggttaagccaagtatattactaacttgctttcgtgttcataacagttttagaattcatgactctataaaccctgttctctaatcagtgtgttttcctgcactcacactttcaatccttttaacaatgtataacatgctaacttgtattgactcccttttccatggcatcgttttgggactgtccaggcaagtccatcagatccaaagacatttccgtttatagtgc

SEQ ID NO: 3313 - DNA, 493 bp, Arabidopsis thaliana
  Intron number 1 from transcript AT4G09880.1 (locus AT4G098 80) derived from phytozome v7.0 (chr-ID Chr4; pos 6214649 to 6215141)
tcgtagaggtaagaagaaaaagaaggaaaaactcagattaccgtgtcttaaactaaagaaccctatggcaaaatgataagacatggaagcaaaaaacaactctctgatttatcgacaatcatttaactttagttcacttttagcagttcaacaaagactacaaggagatttagttaagaaagctctcactggtaggcctactaaaagtgttttaactcgaaagatatttagaaccaataatgtaatatcccggttttaggaatatgataatgcatgcaaagaggtttaaaatatttgatttggctacttcagttatcttttcggtcaaacgttcaaagagagctccacaattaagtacgtttgggctcgagtaatttcaggatgggtcaccttctgggaactggtttttaaaactgtgtgagtgaggaaaaaagacgggaaaatattttgtggtgatttgtagggttggtaaataagtctttaaacctcccgg

SEQ ID NO: 3314 - DNA, 287 bp, Arabidopsis thaliana
  Intron number 1 from transcript AT4G09970.2 (locus AT4G099 70) derived from phytozome v7.0 (chr-ID Chr4; pos 6245964 to 6246250)
tcttctaagtggtggaacattttcctttcttcttctttaaatctttctgattgcctcttaaattttctgggtccatggcaagtttgcaccttggaggtgcttcgttgatcaatgaggtcgtttttggctcctccttgattggtttcagaagtaaacggtttaaacgagcttcagaggttaggttacaagcaaagtgcaaagattctaattcctttttgagttttttagtttaattattgttgatttgttgtttggtattgtagagatgtaggttttgtgttcaacaa

SEQ ID NO: 3315 - DNA, 1035 bp, Arabidopsis thaliana
  Intron number 1 from transcript AT4G10140.1 (locus AT4G101 40) derived from phytozome v7.0 (chr-ID Chr4; pos 6322580 to 6323614)
aaaatcactgatcctcttctccagatcttgcgtaggtttgtcttctttgactctttgtctctcttttacatagatctgttaattaggactagtttggtcactcatattctgcttattgattattgaatcagatagatctcatgtgcaactttgtgatcattggtctttaaaagctgtagttttgcattttgcttcttgttggttacttaatttggaacattagagactatacagaatagttaaaggtagagtctttatacttgtagcttctaaaggatcttaaaaacatctgtttagttgttattggaacacaagagagaccatttagaacagctaaaggtagaggctttattcttgtatcttcaatgtagcttctcaaggatctttaaaacatcagtttagttgttattggaacacaggagagaccatttataatagttaaaggtagagtctttattcttgtatcttcaatgtagcttctcaaggatctttaaaacgtctgtttagttgttattggaacacaggagagaccatttataatagttaaaggtagagtctttattcttgtatcttcatgtagttttaaaggatcttgaaaacatctgtttagttgttattgtaacacaagagagaccatttacaacatttaaaggtagagtctttattcttagatcttcatgtggctcttaaaggatcttttgggcatctgttagagactgatgtatcagcacagttaaagacagagtctttatgcttgtatcatcatgtagtttctaaaggattttaagaaaatctctttctttgttattggaatacaagagagacccatttagaactgttaaaggcaaaagcgttatccttgtatcttcatgttgctcatataggaacttttgggcatctgttagagatagatgtatcaacatctctgtctctgttgcagaaaatttgatgttgtgaagtgatttgagtttgattttgtttttgttttcaattttcgtagaggtactgagccaaagcagcttgctttctctgctg

SEQ ID NO: 3316 - DNA, 646 bp, Arabidopsis thaliana
  Intron number 2 from transcript AT4G10150.1 (locus AT4G101 50) derived from phytozome v7.0 (chr-ID Chr4; pos 6328531 to 6329176)
atctacaaggagagtttcatagtcaaagattcacagtgagttctcatattcataaagattttatcctttttttgtgtcagatctttctaaggcttatcacattaaaaaataacatttttgtgatagaaaagttcaaagctatgttgcgtgatatgaattataccaaagtacgagatgggaacaagaaagagaaatgacaattttgctttgcgtaataattttgtcttgtgattgataagtggatgattgtcttgtgaatatagttgcattgaaactgttacttaggctatatatgttaaccaaaaaaaaaacagttatttaggctgagaaaattgtcatcattttattcggattggacataagcaaaatagggatctcattcgagtggaggcatacgtaacgctcgacaaattcaatggtgcaatttctgttttgtacattgagttgtttaaaatagttctttatgagtttgtgatttggaagaatcttttattcttagataaattatgggcctcataatgtgggtattagctccaacagaaacctgacaaaactgcttttgggtttttttcttgtttgaatagctaaaacataagaaagtatgattatgaatcacctgattttgactttgagtacttgaaaacag

SEQ ID NO: 3317 - DNA, 1040 bp, Arabidopsis thaliana
  Intron number 1 from transcript AT4G10300.1 (locus AT4G103 00) derived from phytozome v7.0 (chr-ID Chr4; pos 6384729 to 6385768)
aaactaacccaactcggtgttcgtagttggcccaagtaatctacttgcccttcttcttcttcatttgttagttgctgaatatgaaagttctagcctttgtttttcttttcctgagaagaaagtctctagctttgtttgttgttgttgttgttgttgatgaatctggtctttatgataatcccaaatgtagaagcttgatagctgtagtatcgtagtgaattgcttttaatggcataagtcatctccaagagatctagtttctgttactattggttaattggacaatctttgcggcaagtgatctatctggaattgaaagtttgcacctttattgttgcccggagaagaaagtctttagctttgtttgttaaagccattagtgatctccaactgatctattatctcttattatgtgtaaattcaacaatatttacgtcagttgatccacctccaattgaaagtttcaacctttttcgttgcccggagaagaaagtctttagcttgttgttgttgttgttgtgttgtggaattcaatctccatgatcatggcatatgttgaagccagagagctgcaggttctcattatcgatttccatggcataagttatttgcagttgctgcattttttcatattttgtgggtcaaatgatggtacaagtggggtttgtcctccaagcaagtttcatggcattagtaactttcaattgctaaaactcatatttgtgtggttaaattagacaaatctttacatcaattgaccgaaagttttcacctttattctttgctcaaagaagctttgtttgttgttgctactgtataagtcatctgcaattgctctagtttctgtttttgtttaagtgtattcaacaatcaacaatcttttagcttctttcttttgtcatatgtagaagctagatagctcaagtttctcagtgttgattttcttttggcatttgctataaagcagttgatgaagatttttcttactttgtatgtgaaattgatggttacaggtggggttgtcctccaagcaagtttcc

SEQ ID NO: 3318 - DNA, 922 bp, Arabidopsis thaliana
  Intron number 5 from transcript AT4G10430.2 (locus AT4G104 30) derived from phytozome v7.0 (chr-ID Chr4; pos 6456224 to 6457145 reverse strand)
atattaagagctaacggaagcgatattcgtccgtacttttatgcgttccctcctcgttcggttatgactgttatgatcacttaagtttctcattgctattactgttggttgctttgaatttgggagtgttcttgtgttgtggtagttttgatttaaggacctgttaactgagggcaggtgttgctagtgaaggccatatgacataaaatttaagtccggagtgatgtgtcattctggtcctatgctcaccaagcacatgtgaactttaatgagagtcatagggcataatttagtgtggaaactattgtgtttctaagagtgttgtgtcacgctacaacctacagtatgtggatcttaggttctatattcaactttgcccaaaaataaaagggttcttatgtggatatcatccatggtacttttcctcagtcgattataactgttatggtctcttaagtttctctttgctcttggtaaattgggaatgttctcagtgcatctgttacactatatatataaagttatagggcataattttccgagatagatatagatgcgccatgataatgttgttgttcctatatttaccaagcatgtgttgcttggtgaaagtcaggggacataacttagttttgacagtaatgttgttggtacctcttcagagtacacttagtatattggttaatcatttggtcaagtagaaattagatatctgaatatttcatgggtaaatatagggagctttagcatctgcggaatcctctttctgtgggggtttgaattcggagagaatctctttatctggattgacttaggtgttttgtttggctttttttgttcgaaatattctcataagttggggtgactttaacctctgaacctgatgtgggtcttcaggtggctatatcatcattattgtgcc

SEQ ID NO: 3319 - DNA, 348 bp, Arabidopsis thaliana
  Intron number 8 from transcript AT4G10955.1 (locus AT4G109 55) derived from phytozome v7.0 (chr-ID Chr4; pos 6715373 to 6715720 reverse strand)
gtaaccaaacttcagatctgaatcaacctcttaaggttcgtttatactcattctgtttttcactgatagtttatgcacaatccgaatctttcttctatgtgattgttttggatttgattataaatttgacattatcattaatttagaatgattttgtgtgtgttgggttgtttacaaaatcatttctttgaatgagtttgttttaattttgtgttagggttataacgcgattgggaatttagttgaatttagaactaaatttgtgctagcttgtgatttattgtctctaattttgaactactaatatttgattaccatatgtttagtggtacagaagaagagaaagga

SEQ ID NO: 3320 - DNA, 731 bp, Arabidopsis thaliana
  Intron number 1 from transcript AT4G10955.1 (locus AT4G109 55) derived from phytozome v7.0 (chr-ID Chr4; pos 6717591 to 6718321 reverse strand)
cggctgaacacggagaacgcctctccttccaccaggttcggtgaaatttcgctttcttagggctaggaaacgtgtgattgaaggatttgtgtttgtgtagttgatgatttcaacgaatttgggattatgatttgacttgttaatcattgatttgactacgaggctcttttttttgtgtttatttatttatttaattttgggcataaattctcgtaataaaatatcagtttttctaaaagattgtttgattccaaaatcatgggtatctttctttggtattattgctttgattggtaactactacaatggtactgggtatttaccgttttaacaatcataaaaacgataccaaaagcgttatttaccgttattttgtaccattttaactattcgcattttcggcttaaaaacttgtatagcgttgtgtcaatgtaattttatatgttaatgttaattattacaatttctttttctctaagttttataacccaaaaataattatttatgtattaaatattagtttaggcctaatgagtaccatgtgaaagagtaattgttctactttctatttttgtatttcatataaagtttaatcttgttcttctgaattagtttgtattatgtttacttacggtcaaaagaatctgttagttactgtcaaaagttaaaacttgattgttctgtcttaatttgcaggtggatcttcgagacaggtctgctcttgagaagat

SEQ ID NO: 3321 - DNA, 348 bp, Arabidopsis thaliana; identical to SEQ ID NO: 3319
  Intron number 1 from transcript AT4G10955.2 (locus AT4G109 55) derived from phytozome v7.0 (chr-ID Chr4; pos 6715373 to 6715720 reverse strand)

SEQ ID NO: 3322 - DNA, 583 bp, Arabidopsis thaliana
  Intron number 1 from transcript AT4G11030.1 (locus AT4G110 30) derived from phytozome v7.0 (chr-ID Chr4; pos 6738247 to 6738829)
gtatccaaagctgctgggatattttccggtccgaatctcttttcttttaatgtgttctattgtttaagtctattgtttttttttttctccatgcattgctatttggacgacattttgtgtgctcatatacgttttgatttagagtgtagcatgcattatcattttgaaacatgttaatatgataaacgtatatcgatcagggatcttgggaattttatttcatgttttgtacgtaagaatgattactaagttatatctttggctcaaaatgaatgaatactgaattgtttggtgtcaattcttgtaagatccatttttagcttcttttcttgctcttacgtgatggttttgtctgacatggtacatggcattatttaaataattttggggtggccttctatattaattgcaatcggtcgtttaaagattttgtttaacgatatatagttctttctctaacaagtttttaactttttattattatccagtagcttctgaattttaataataaatgtgtttttttttttttctattgcgtgcttctgcttgcagcacggctgttgagaagtatccaaacaatcga

SEQ ID NO: 3323 - DNA, 408 bp, Arabidopsis thaliana
  Intron number 2 from transcript AT4G11150.1 (locus AT4G111 50) derived from phytozome v7.0 (chr-ID Chr4; pos 6800396 to 6800803)
ttcgcaagaagatgtgagttttctgatttcaatttttttgatcttggttaagttttaagttagatcgcttgttctggattacaatatctctgaactttgaaaaaattagaagtttatgatttatagatttgaagttttgacttgattgatttcaaacttgtaattttcttcattgatgaataagaaacatagtctggtttagtctaatcggcaaaactgaagactaatttagcaattagtctgatgtaagattatggtgtagtagtgtactgtgttgatctagctttcaaattctctaatattgttagttctctgtgaaaattatgttgatcttgttcatttactgtgttatcgtgtattactttgccagaaaataactgtcatacatgttttttcagtgattactct

SEQ ID NO: 3324 - DNA, 236 bp, Arabidopsis thaliana
  Intron number 1 from transcript AT4G11380.2 (locus AT4G113 80) derived from phytozome v7.0 (chr-ID Chr4; pos 6920660 to 6920895)
ctgagctcaaggaagagcttaattcccagtataaggttttttttttcttcttaatcttactcttgtctcattccatgtggatctgtgatccgccattattacattcacgatctctcggtcgatgatccttctctccttgtaatttagttatccttatacaaattttggtagatctgtgtagttctggattttgaattttgaattgaaattggtttcgtgattttgtgggaagtgcg

SEQ ID NO: 3325 - DNA, 515 bp, Arabidopsis thaliana
  Intron number 1 from transcript AT4G11380.1 (locus AT4G113 80) derived from phytozome v7.0 (chr-ID Chr4; pos 6920660 to 6921174)
ctgagctcaaggaagagcttaattcccagtataaggttttttttttcttcttaatcttactcttgtctcattccatgtggatctgtgatccgccattattacattcacgatctctcggtcgatgatccttctctccttgtaatttagttatccttatacaaattttggtagatctgtgtagttctggattttgaattttgaattgaaattggtttcgtgattttgtgggaagtgcgatgattccgttcatttttcagtaactgattgggatataggttagaattggagaggaattggtaggtttttgagaatggctaatgtggagatgtgtgtgcaatctcgtagtaactttagtgaagcttaggttggtgaatcagaacttgttcgatctggatcagtggatttggatgaagagtttatgttaatgatttaagaaggaatggttcttttctgctttggctacagttttgttaacccttgttgtttatttactgttgcataggataagagaaaag

SEQ ID NO: 3326 - DNA, 392 bp, Arabidopsis thaliana
  Intron number 1 from transcript AT4G11485.1 (locus AT4G114 85) derived from phytozome v7.0 (chr-ID Chr4; pos 6975528 to 6975919 reverse strand)
aaccattctaactatcttcatcgtccttgcaataggtttgtagttagatttacaaacatattttcttaaaaaatatttatatattttatcatatgaaaataaaattagatattaagaacatgcaatctatctgaataatgtcaattctatatctcacttaaatagctaaatttaattatttaatagcaaattcaatatttttatatcaaaaccttgtcaaatagtgttaaagatcaaagtcattccaaaaccatagtatccatagtttttggatagcttttttccattatgtccaatactttattaattaatatatgcaaaagtatttaaacattaatcttcaaaaaaaagaaactgatatttttatgtctcaaatatttactatattaggg

SEQ ID NO: 3327 - DNA, 492 bp, Arabidopsis thaliana
  Intron number 1 from transcript AT4G11655.1 (locus AT4G116 55) derived from phytozome v7.0 (chr-ID Chr4; pos 7038854 to 7039345)
aactcctcgagttttgcttcatatcctgaactgttgtaagaaactaaagaaccttatcttctttaattcattgtttaatactaatattttatatagaatatgatgttgttatttccaagcaaatctggattatcgttgttcacttactaaaataataagggatacttgaaaaaaaaaagtctaaaaaataaaatgaaaagattggctgatttctgttaaattaaagatatatgaaccgaaaattgtaatggaaatgaattaaattgggatttttgataaattaaattaaagtattaattatctttaatatgcatggaaatgaatattttgatagtttatatatgaaccgaaaatattgtgtaggcgtgttaaaaataaatatccattaacaaaatcatccaaaaattttcaacatttttttctctctatgctaattggtacgttaagatatatgcaggtattgttttggagttgcagtgataggattcgtgt

SEQ ID NO: 3328 - DNA, 433 bp, Arabidopsis thaliana
  Intron number 2 from transcript AT4G11670.1 (locus AT4G116 70) derived from phytozome v7.0 (chr-ID Chr4; pos 7052077 to 7052509 reverse strand)
agaaatacaattttgattcatcataccctgtaacagtaaggaaacgtttctataatgatccgtgtttgttggtttccttatacgtttaattgagcttagaaaatttgcattttaaatggcatctgcgtataattgaagtgatacagacatacagtgataacttttcttgattgttttgttgcttacctcgatgggaactatagttatagtaaacacttcaagctgttggtatacaattcatgaaaatgtattattggtgtgaagtagagtggtgacgattggaagtaaaacatttgcaattcatctggcttaagctgtggatgtcaaacactaataccttttgttgatgatgattaataatcctgaagatgattagttttgatgctttaaatttgcagatacactctgagtctggagattcctattttcttgt

SEQ ID NO: 3329 - DNA, 600 bp, Arabidopsis thaliana
  Intron number 1 from transcript AT4G11730.1 (locus AT4G117 30) derived from phytozome v7.0 (chr-ID Chr4; pos 7067084 to 7067683)
atttggtatgaaatttcttcttctttttactctgtaaattcttttgttacttcaatttcgttacgtttgtttaaaagtttacgtaaggaaagttcagtttatttgttttctatttaacgattcgattaagttagggtttctattcattctgttttatttatttattttgcgtctgactataagaatttccattggttgttatacttagttgtttgttatttgtgtaaaaataaaattctctctgtttttttttgtttgattgtttagggtttagggtttagggtttagggtttaggaaaaaaagacatattaaaaaaacatattaaatattaattataaatgtattattttttgtgttttacagttttctataactctaaaccaatgataattaactatttttcttgaaaattacagttcgacaatactaaccaataaatattgcatgaaaaacttataaaatcaatttttttgaaacaattttttttctagaaaaatcaatcatttaggaacaaagagtgtaatgtacaccagataattagatcatgttcatattatattgcaggagaaaatcccaattgaagaagttttcaagaagtt

SEQ ID NO: 3330 - DNA, 758 bp, Arabidopsis thaliana
  Intron number 1 from transcript AT4G11780.1 (locus AT4G117 80) derived from phytozome v7.0 (chr-ID Chr4; pos 7086760 to 7087517)
ctgtcaaccgcaacaacagcctgtgtaacagaaaggttagttagtcaaaagctcgttttcaatctttattacaactgtcacaagtgttgaaagcatttggttttgtcttttcgtatattaaaaattgaggagattttgaaacttgtcggggaaagcgtgcgagtcacgtgaggtgtgggatttagagtttaatgggttataattaagattcttcgacgtagcttctaatgcgtattatacggcacatgatcccgcgagagttcatggtacttcacgtaccatattattttacagacgatgtaaaattatcgtacacatttaaatatactttacatatatattattagatacgcagatcttcacacatttatacgtaggagtacttttaacattataattaagagttaattttatattatcacccatgttcatgattttttttactaaagtaatgaaatcgcgcgttggttatttttattctttgatttgtataagaaatattctcaaataattaattaagtaaccccacataatctcaatcaaaacaaaagtgaggatacgatcattaattagataggggcataaacaggtagatagataaatgatgttgtcatggggttagtgtcactattatttctcatatcgttatgtttttgttcttgttgagaccacttttagtttagttattgtttgcggtgttgattacatgtttaacagatttgatttctcatatttgattattgcgatattctttagga

SEQ ID NO: 3331 - DNA, 874 bp, Arabidopsis thaliana
  Intron number 1 from transcript AT4G11800.1 (locus AT4G118 00) derived from phytozome v7.0 (chr-ID Chr4; pos 7098601 to 7099474 reverse strand)
gtttcttcttcggtccgattctccgctgcgtaaaggtatggtttttatcgattctcgagttcaataaagtcttgggctttgaaattggattgtgtttgcatgttactgattttcaaaatcttaatttattgcgattggttttcgtttttgatgggttactattgaatttaagatcatctaatgatgtaagttttatttttttcccatttttgggattctgcaacaaaagagtcacagggttgccaattctggtttgttctttagctttctctatggagttagttgtgtgttcttagtgattctgtatgatttgtatgaagatagttacttgttcagttcttagttgaagtgttttcaccatttcctttgataaaaccgaggagcttaagtaacttcagggttgttgacaaaaattgtgtaattgggaatatgttgattagatataactggcatacaagaattatgaggaaatttgagttcttggctaacaatttgggttgctttatgctgttttcttcgttatggtttctagtatgtttcttcatcttcgtgggtgttgtacagtggctagtagctgttctagtatcagtgacgaacttttggaattaacggatcaagagtatcttcatttcagatagcagttcagcttctctttaagtgaaatttgatgccaagtatctttgttgttagtgttggcactagtgtaattcaggatttcattgaatttgtagctgttttctccatcattattaatttgttgcatcatggatactgtattactgttaatattactgaatcacactgctgactttattcttttctttttcttgtttcattaggcacaaggttttgtcaaaccggaagctcaaattta

SEQ ID NO: 3332 - DNA, 718 bp, Arabidopsis thaliana
  Intron number 1 from transcript AT4G11970.2 (locus AT4G119 70) derived from phytozome v7.0 (chr-ID Chr4; pos 7180505 to 7181222)
tcattcgttatcccaaaagcttttgataatccaaggttcgtttttttcttctactggtaactgtactgttctatgttgttcatattctcacactgtaatttgttggctgttcaatgggttctgtttggttatggggcacagtcaatagaggaagaaatgggtttcagaatttaatttgatactagttcttttgaattgttatgctttatgacattctgtttggttatggggaagaagaaatagagaaagagttaggttttctactgaattgttttgattaggtgaagaaaattactttatgtcatttcgattataaatagtatctctctggttagtgttgaactttcgaagttagtttcatggatactagtttatcattgtagtagactaatgagtaatgatcactaactacttcttgttagtatgctaattgatttggtaaaatgcttactaactacactagtttatcattggagtgtagataatttgaacatgtaaagtgagattttttctggttatgtttatagttgcactctgatttgagtcaatacatgttttattcttgttttttaaatggcttagtgtgacttctgtttgtggtggtgattgatattttattgcttttgattgatattcatttttctccttttgctgtcaagttttatcgttttaattgagtgttgttgttcttgtgtgttaatataggttttaaagaggc

SEQ ID NO: 3333 - DNA, 443 bp, Arabidopsis thaliana
  Intron number 1 from transcript AT4G12130.1 (locus AT4G121 30) derived from phytozome v7.0 (chr-ID Chr4; pos 7264070 to 7264512)
aattgcttgaaactctcaaaaagtaagctttttgaagaagaaatttgaaaaattaggtcttttggatcttattgttggcattgtcaatgtagattaggtttttttgacttgtagatgattgtaagataatgcttaggttttgattggtatattatctctattgattttactggaatgagtaaaaagctcagatttttagaaaagaaacgactcacattttcagatattcgacaacattaggtctttttggatcccaattttagcaatgttaatgtagattagggttaatttacttgatgatgattataagataaggcctagaatttgaatttagatgtgtcatctctattgatttgttggagaaggaaccagttttagttctgatttgtgtgatatgaatgttgatagatatcgcttgaggtccaaagtggatattgaaaacg

SEQ ID NO: 3334 - DNA, 372 bp, Arabidopsis thaliana
  Intron number 1 from transcript AT4G12170.1 (locus AT4G121 70) derived from phytozome v7.0 (chr-ID Chr4; pos 7274286 to 7274657 reverse strand)
gcttgggtaacttaactagatttgttttaaagttaattataaaaagttaaaaaaactccaatttgtgtagaaggtattttgaaaacatgaattgttttaatatcatatctatactttcgaaatattgtaatgaagataattttcacttagatttttaggttatcttacagtttttgacttttgttcacaggaatagcgacataatttttcattttctatgtagaaaattgttactattcccacaacatctttaccaaaaaaacacatgttgtaataaatttatctgtatttcgcttgagtaatatttctatataacgttttaaatctctatattcaattgatgtatgtagtacaaagtctatctgcatcgga

SEQ ID NO: 3335 - DNA, 880 bp, Arabidopsis thaliana
  Intron number 1 from transcript AT4G12350.1 (locus AT4G123 50) derived from phytozome v7.0 (chr-ID Chr4; pos 7325159 to 7326038)
ctcttctcggcaacaggtttgagcttgttttaaccttgtatttcgtttatatgtaattgatcatttgttatatatttttactacacattattaaacatgcattaactaagccgaatttgttagtaatcttttttttaacaacaacatgaattacggatataaatccaaatatcgacagcacgaggatattatcataaacaacaaggctatattccaaaaaacaattttcggtaggaatgttaagtactatatgccaaatttcaccaatatattgtatcatatgcatgttgttagctaattatgtatttaccaaaaatggttaatcttctacatataatcatatgattgtcatcattatagtcatataacccgaggttaaataacgttcacctatacttatatacaaataataataaaaattagtcaattctaagatgttactttttgtgaaacacagtaaaaaaactattaacatatatgttgactaatgataaatgctgtagaaaatgtatttgtgatgtacaattgaaaattaatccataatattttaatataagataatgtatggatcatttgagactgaatagttttataagaaaacgatatatcttaattcagtttcctttctttgaattaaagtcttctaaatatttgtataaaaaagttgtacatcttatttcaacttcgagacaaagtaacgttcctcgtttccaaatagaatatcatagcgtatatatattgtcaactttcttgtgttagattccaagacacaagactttgacatctccaccaacacctagctcaaatcattatttttcaaaggtaaacatattcaatgtaactaaacatatttcttaaaattctttttatgtatatatag

SEQ ID NO: 3336 - DNA, 342 bp, Arabidopsis thaliana
  Intron number 1 from transcript AT4G12380.1 (locus AT4G123 80) derived from phytozome v7.0 (chr-ID Chr4; pos 7334107 to 7334448 reverse strand)
ctcgtatgttattttttaaggcaagatgtgacattataacctctatgaggcttgatggtaggtcagcaaaactcgggttcatgatcttcttacacatatcttgaaatctacaaaacaatcaactttaaattattctcaaagtgatcaaaccaaaaaaaaaacaaaaaatctaaaaccatgcctatagaaattagaaactatactctagtttgatttaatctagaacccaacaacaggtgaaatggagaaaaatggttaaaaatttctaaaggctttttagtatctattgcatcgttctggttctggttctcatagctacataagaaaagaaaaaacaaacaa

SEQ ID NO: 3337 - DNA, 311 bp, Arabidopsis thaliana
  Intron number 1 from transcript AT4G12382.1 (locus AT4G123 82) derived from phytozome v7.0 (chr-ID Chr4; pos 7334041 to 7334351)
tttgtttttttgctcttggttgatctctgtatcgggtacgtttcttatctcgatttcagtcttcatttgtttgttttttcttttcttatgtagctatgagaaccagaaccagaacgatgcaatagatactaaaaagcctttagaaatttttaaccatttttctccatttcacctgttgttgggttctagattaaatcaaactagagtatagtttctaatttctataggcatggttttagattttttgttttttttttggtttgatcactttgagaataatttaaagttgattgttttgtagatttcaagat

SEQ ID NO: 3338 - DNA, 367 bp, Arabidopsis thaliana
  Intron number 1 from transcript AT4G12680.1 (locus AT4G126 80) derived from phytozome v7.0 (chr-ID Chr4; pos 7475163 to 7475529)
cttcttcctcttgctgctccttggcgtcaccaagggtatgaatcttctcttctttcttctctccatccataagaatggagatgttagctttgcttattagctcttgagtttgttagagctccagagtcgtgtaaactcgaatctgattttctgcactcttaaggttagattttggtaaatggaatactttaggaggctactgaagctatttgaattcatattaataatgagtaatgatgtttatttacacaaaacttattgagtattttagtaaagcactgtaagttatgtacggtgtaacgttctccctcttgtttcgttttggttctcagccctgattattggtccaatatcatctgctataatt

SEQ ID NO: 3339 - DNA, 435 bp, Arabidopsis thaliana
  Intron number 2 from transcript AT4G12740.1 (locus AT4G127 40) derived from phytozome v7.0 (chr-ID Chr4; pos 7496200 to 7496634 reverse strand)
atcgttagtagatcaagagagctttcttttcttaggttatgttgcttgtcattgttttggcaaatgggctactttgtaaagagtgtgtgagtgtgttagaagaaagagctttcttttcttgtgttatgttgttgcttgcttgtctttgtttggcaaattggctcttttctagagagtgtctgtgttttctatcttactctgtgggagattgagaatatatcctacaaatgttccatttgattccctatgtggttgtgtttttttttttgtaaagaaggttttagagaatcatgtttgatgtgtaataactgggaagtaaaggcttaatcttcttaggttttgctctgcattttcccatcattagtaaggaaatgagtactctattagtctctatttttcaatgcacaccattgggatttgttttcttcaggggga

SEQ ID NO: 3340 - DNA, 470 bp, Arabidopsis thaliana
  Intron number 1 from transcript AT4G12840.2 (locus AT4G128 40) derived from phytozome v7.0 (chr-ID Chr4; pos 7535791 to 7536260 reverse strand)
aacaagaaacccaagattttgagctctgtaagcttttttctcttgctcttcgttcttttcttcttgtcttgtttagttctttttgtttgtctcccattttgccatttctggattcaaaagttgtcgaaataaaccaaaaaagttctgaaatttcattagctcaagaatccaattgaagttttcaatcatgaaatttcaagtcttttatcttcttcatgtgttgatgttctacttatatgcccattctctacgaaactgtggatcgttatgagtttacacaattaaaactctcaagtctttcacaatcttgaatctttattgtggcattgttgttcaatgagatcatactactttccctattaatgtcattttgtgtgtgtttgggtttaaatactgattaggttcttgtgatttgagtttaatgtgttatggatcttctttattcgttgccttttcagggatcattaagt

SEQ ID NO: 3341 - DNA, 401 bp, Arabidopsis thaliana
  Intron number 1 from transcript AT4G13020.5 (locus AT4G130 20) derived from phytozome v7.0 (chr-ID Chr4; pos 7603280 to 7603680)
attcttctccaattctcattctccttacatcagtgagaatttttttttatagattatgtttttaattcttgtgttcatgtaagatttttttttttttttttttttgtgttttattgttttcttaattccgattggatttgttttttgtttatttttctcaattttatctcaatttcttggacaaattgatctttttttactctacaaataaataaagtttgagactttatagcagaatcttcatatgtagcaattgaagatttttttttcttttctaaaccgatctaaatagattaaatcatcattattgaaaacaaaagattttgtttttattttgattaaatcctttttttttttttttttttttgcagataaactttgtagttggagatttgttgtgg

SEQ ID NO: 3342 - DNA, 701 bp, Arabidopsis thaliana
  Intron number 1 from transcript AT4G13040.1 (locus AT4G130 40) derived from phytozome v7.0 (chr-ID Chr4; pos 7613399 to 7614099)
agaccttgttgtcacttaccaccttcttagaggtacctcaatcgtttccttaattgctcagattttccggtttaactctttaaccggtctctgttttttttaatatcccctaaagctttgattttgatgcaatggattggtttctattgagtttgtgtgcaatgggtatgtttagtttttgtcgttgctgattttgtttctctggagaagactaatccattctcatatttggcttcttgttttttctttcctcttcttgattggatcaaatccatgaacccatcttctgttgactctggtttttagatttagcttaggtttatgagaatccatgaaaaaggtggcggtggtaggttttgttcttattgaggagttgacttgatttggttaaaaagtcttccttgattagttaccaatttcccttttcatcgagtacagattcatatcttcacgtactttgatgggtttgatgagctgtttaatttgacttttggagaaactaaagtagctgttcttgtcggatctacgtgttaacttttacactttatggtctcaaaacactaaacatatggttaatgaggctatattttgtgtaatcttacttaatttagacattttctgttttctgtgagttgtttcttgaagtgagtagtgctttgtttgtggtctataggagaaaagtaaaacattcagaagtcgat

SEQ ID NO: 3343 - DNA, 367 bp, Arabidopsis thaliana
  Intron number 1 from transcript AT4G13040.3 (locus AT4G130 40) derived from phytozome v7.0 (chr-ID Chr4; pos 7613733 to 7614099)
aaaaaggtggcggtggtaggttttgttcttattgaggagttgacttgatttggttaaaaagtcttccttgattagttaccaatttcccttttcatcgagtacagattcatatcttcacgtactttgatgggtttgatgagctgtttaatttgacttttggagaaactaaagtagctgttcttgtcggatctacgtgttaacttttacactttatggtctcaaaacactaaacatatggttaatgaggctatattttgtgtaatcttacttaatttagacattttctgttttctgtgagttgtttcttgaagtgagtagtgctttgtttgtggtctataggagaaaagtaaaacattcagaagtcgat

SEQ ID NO: 3344 - DNA, 552 bp, Arabidopsis thaliana
  Intron number 3 from transcript AT4G13080.1 (locus AT4G130 80) derived from phytozome v7.0 (chr-ID Chr4; pos 7626995 to 7627546 reverse strand)
acttacgcaattctgtggaacccgtatcaaattgtgtacgtcccactcgttcctttattctttaacgaatttatctttattattaaacagaatttaagcaatcataatatattatttcttccattatatcatgctaatacttgataataaataagaagaattgaatagctaaaggtgaaaatttactaattttttgtttaaaatttaatttttatacatttcaccaatttcaatgtttatatacacataaaattatatcttaaggaataaaatatataactaataaatttttattaaaaatattatactgatttatcgtttttaacaaaaaaaaaacttttattaaaaaatattttaaatctcataaacagaaatgaatcgtaccaaatcccaataaacaaattttgagctcattttttcagataaccatttcttttttcaatcaaacatttaaattaaaaaaaaaacttctacacccttaagaaatcaaattatttatatatcacttatctatatattttacaaagcatgtgttgattaccaataggcttt

SEQ ID NO: 3345 - DNA, 599 bp, Arabidopsis thaliana
  Intron number 1 from transcript AT4G13170.1 (locus AT4G131 70) derived from phytozome v7.0 (chr-ID Chr4; pos 7655707 to 7656305 reverse strand)
gctccttccaagatcttctggcgcactgttcgcgggttcgttcgttcactctaattttcttcatttttattggagaaagtttgtaactttatgattagtgcaaatgcgttttctttgtatagatttcgattactctgtttttttttttttttttttttctgtgtgtataagagaattggtagttcaattgtgtaattgtgttttgtatttgttgtgtgagtgatagaattgtagtaggtgtgttataatgttagaattgtggatatgttactctggaattgttatgattagtttcgataatagtttttatagttgctgtgtgagtagtagaaatgtagcatttatacaaagatgtatttttttatttaattgagttttggatatactgctctcaaattgttgtgataagtttttgataaatggttctgtatttgctgtttgagtaataaaaatgtagcatatgattagtttcaataatcggtttatgtgaaagtgttttctttgtgaagattcagtgatgtagcgttttaataaagatgaagtctttctttttttttgagttttggtgaaattgaatttttggcttttgtggttgcagg

SEQ ID NO: 3346 - DNA, 842 bp, Arabidopsis thaliana
  Intron number 2 from transcript AT4G13600.1 (locus AT4G136 00) derived from phytozome v7.0 (chr-ID Chr4; pos 7911394 to 7912235 reverse strand)
cgtgtatccaaattctgtgcggtacgtaattttttatgctatctgtatattttgcatatattactcgtaaacagtaaaaactggatttaagtttcatttttctattaatatatttacgaactttctcttcgtttctgatttcaatatgtttaactgataaggaactccacctcacgattttttcattcatttgactgaggatgttgtgattctattatatttcatgcgtcgtactaatttgcatgacttattatatgcatatcccattcaatgtttctgaaccgttggatgatctttacgagtaatcattcaacggtagagatccatgtcctctttagttctattattctgtttctgtccgttggtctagcctttttctggtcagaatggtacaagtttgtaataactaaaagaaaataaattaaaaggcaaaaagaaaaggaacaaagcatgttgcagtagtgttctactttagaggtttcgtgacgaacaagcgtatacaagttgatgagttgcatttacttaggaagataaattgtttcttttctccatttccaattctgactttaatccttttttaaacaatatctacattataaattttatttcaaatattgtcattgtctattgtaagaaaagattattaccttcgttttaagaggtaagctagaaacactaaatataatcaatacatttatcatcatattaaaatttggacgtgaatagtgcatttatatatttaattactgaacaagaacattctatttataaactatattagttaaagttttggtttggtcatggcagtaacgctggagggtcagcttcaactaccacagtgg

SEQ ID NO: 3347 - DNA, 474 bp, Arabidopsis thaliana
  Intron number 1 from transcript AT4G13930.1 (locus AT4G139 30) derived from phytozome v7.0 (chr-ID Chr4; pos 8048900 to 8049373 reverse strand)
gctcacatcagtggtctcgttgctgctcaggtatattataagcctattctcatttgtattgatattgtgtttcatgtagatctggttttgttttagcattatgaattgtttagaacgaagatctgcattcattgtgtcaagtctagtgttttcagggttatcaaatgttcttcttcccaagaacgaatcatatcacattgttaaagtcgtttgattttacttgtgccgtctcattttagtctcctagtttatagtttaactcctataagaatgtttaagtgaacacaggatgagattcaattcttttcagtaactaaaaccaacctattagcctgatgaagtttggggattactctaatgttacttgccaagattgagttttttttttttttttttgcattcaccgacagaactgattgagttttaatcatatttacaggaagctgcaaacccatttgagtactgtgacgttgt

SEQ ID NO: 3348 - DNA, 665 bp, Arabidopsis thaliana
  Intron number 2 from transcript AT4G14070.1 (locus AT4G140 70) derived from phytozome v7.0 (chr-ID Chr4; pos 8116598 to 8117262 reverse strand)
atcctcctttgaaactgacgtacaagcaggtagttttcttactaaggttactattcatcaatattgttgcaaagaagaataaacagagacctgtccttgaatttttcaccaaaacttgttctatgatttaggagctatgtattccagaaagcagggtctgcttattttattttttgtgtttgatgtgattgtggaaacctcatactgtgttattggtctggtcactttgaataacattaaaaactatagtatagttcttaatagctgatgaggggagatcagctgattcttaatagcttgttaaggtgatggtgatgagggtagagtagctaattgacagtcttgttcagttcctcatgatgattataagttgtagatgttttcaagaatccaattgatgtttttactgatttttagagttttagtgaggcatgccattgctctttgttatatgtacttctgtcttaggatcctagaaccaataagtactctgctcctggttattgcaaccgtgtgttctgcagggaactattattcttgttgttagataggtcgttgatagattgtgattgtagatattaattcttggtgagcaacggaaaccatcatattctttatttaaatttgcagttggaacaagaaattttggactttgctgagggctt

SEQ ID NO: 3349 - DNA, 588 bp, Arabidopsis thaliana
  Intron number 2 from transcript AT4G14368.1 (locus AT4G143 68) derived from phytozome v7.0 (chr-ID Chr4; pos 8278106 to 8278693 reverse strand)
accgtgacatcgaccaagtttgttttctccaattttttttctttctattcctctattaatttgaatggatttccaatagtaaaccttggattaaattaaatcggtagagaaaatccttggatttcaatttttccacgaggaatagtttttcatttttgtagcttaatcaaatctcaatcgcttaccaaaactttcagtgttgtttttgaattgatgttttcttcttcgtttataactcacacacacgctttagagtttaactgtttaaacctaaattatgacatgacgttgacactaatacaaactacaccattaggctacaaccagccattaatctttgagtgtatgttattgattataaaacatcattcattttaagttacttttactcaaacgaacaaacaaaaactataatcaaactacaaagtttgtgattagctaacaacgaagatggattaaaatctgttttagggattttcttgtttgaatttagaagcaaaaacttcatatgtccatcatctttcttctaaatatttacattaacttcttgtaggcactcgtttctttgaaaaaaggaactcaattact

SEQ ID NO: 3350 - DNA, 1015 bp, Arabidopsis thaliana
  Intron number 1 from transcript AT4G14520.2 (locus AT4G145 20) derived from phytozome v7.0 (chr-ID Chr4; pos 8341456 to 8342470)
agatatcgaattttcttctcaaggttagatttttcgctttctactaaaattttgcaaaaattctcattttgttttgttgttgaagatttcgttacaagttccttttttttttacttctcggtgtaaaattagaacttgcagggacctcgataattaactgatgtctaattttatcgtggaacggttgagaattttggtgattaagggtttcgattttgattttgggtttatcatgtttttgaaaaagtagagggaaaaaaattaagacttttgatttttacgatgttgggtttcactgtaaatgaggttctaatggcggagtaataacataagtgtgtgtttcatttactggtttagtgatttttcaaatggtcgtttgtctaatcaaaaagatatttcttttaagtttttggagatcagacagttacatatgtttatgttgctagttcttgtctgagacagttacatatgtttatgtagctagttcttgtctgaatcgtggatcaatgcccatatctctggaagcttaatgtgattttctttgagaagtgcaacatatatcttcttgtatcttgttgagatcacttcaggttgtgtgattttctcagaaattattgacctctagtcttgttactgcagtttcagtaccttttttgtttgtttgatgtaaaattagcagtttcagttttgagtactttgctcttaattttgtctcttggttgattccttttctctgatgtagaattgagtgggctgatcagtaactaagttcttcttatgcaggtaccatataaggttcaatgctatataacttcaatctatttagccgtcaaaacattttatatctgcttcgttgctttaaacgttatgttttctctatgacctatgacctgcgtttatactgctttataatctttattaaggcttgatggttatcatttctggttgcggattttatgattcatccttcaacttagaatctcctgtgtttttttcaggtaacagataaacacga

SEQ ID NO: 3351 - DNA, 777 bp, Arabidopsis thaliana
  Intron number 1 from transcript AT4G14520.1 (locus AT4G145 20) derived from phytozome v7.0 (chr-ID Chr4; pos 8341456 to 8342232)
agatatcgaattttcttctcaaggttagatttttcgctttctactaaaattttgcaaaaattctcattttgttttgttgttgaagatttcgttacaagttccttttttttttacttctcggtgtaaaattagaacttgcagggacctcgataattaactgatgtctaattttatcgtggaacggttgagaattttggtgattaagggtttcgattttgattttgggtttatcatgtttttgaaaaagtagagggaaaaaaattaagacttttgatttttacgatgttgggtttcactgtaaatgaggttctaatggcggagtaataacataagtgtgtgtttcatttactggtttagtgatttttcaaatggtcgtttgtctaatcaaaaagatatttcttttaagtttttggagatcagacagttacatatgtttatgttgctagttcttgtctgagacagttacatatgtttatgtagctagttcttgtctgaatcgtggatcaatgcccatatctctggaagcttaatgtgattttctttgagaagtgcaacatatatcttcttgtatcttgttgagatcacttcaggttgtgtgattttctcagaaattattgacctctagtcttgttactgcagtttcagtaccttttttgtttgtttgatgtaaaattagcagtttcagttttgagtactttgctcttaattttgtctcttggttgattccttttctctgatgtagaattgagtgggctgatcagtaactaagttcttctt

SEQ ID NO: 3352 - DNA, 619 bp, Arabidopsis thaliana
  Intron number 3 from transcript AT4G14600.1 (locus AT4G146 00) derived from phytozome v7.0 (chr-ID Chr4; pos 8377301 to 8377919)
aactggtatgttgttgagagatgtcgcttaagttctttattcatccatcatagtaaagttgaatgtaaacaccttacatcagcaacatgcattttagtctttacactgtaggctaatcacttattattatccgagttatgggttacctttatcttgtttcaaatggctgtcattatttgggaaactacagcttcattcccaacgtatgtataaattataccatagcttacaaaccaatgaaaatcttgataaaagggactgtttagattatgttcagacttatacgcagggactggtctgaactctggtgggtactgggtaggaatatatatcttcaatctcggctagttaagtgaatgcactacaaaatggttgcagcttatcattgagtctatatataccggtttccttataaaggagagtatgatgttgaagatgaacattgctcttatttgtttctagtttttctttttgttacctaaagaacatcagctagattttgttgcgtgagactgcattaagtgctgttatacagaattactctaggatgcaaataacaagggggagaaatggtgttcttgtctgaaacataaagctttttgtttttgtgtgacagcaa

SEQ ID NO: 3353 - DNA, 755 bp, Arabidopsis thaliana
  Intron number 1 from transcript AT4G14615.1 (locus AT4G146 15) derived from phytozome v7.0 (chr-ID Chr4; pos 8383965 to 8384719)
ggcaatgtaaaaccatcctctctctctctttcacaaaattctcatcactgattattgcatcttcgaaaatgataggcttagattgatgggtttcgcttcaaaaattaggaatagtaactctaaacgcttcatttgcagaatttttgattatgagtaatatttctaattgaatctcttttgagatccgtttgtggattaggcgatgggattttcaattagggattttaatgtttggttataaattaaccttgttaacttgtttgtactctgttaggaacatagattgattggttagctgaataattaggaaatggtaactcttaacttggttaacgccattgtcactttaaatcactgtaacacagagtaatttactacaatcctagcaacattcaagatatggttcaatctccttgaattgtcaatgattcatttgcttccatcgaacttttcgatagtgttgtggggtttgtcgggtctggcatatagaaaacagtctacaatgtcggttttgcggtgcaccgaaggataaaatgttcattctaaaatgggtaacacttattgttatcaaattgtctgctgcgcttaagtcactgaaatacacttactaggatcttagaaacatacactaccccattttgatggtagtcgggttttctccgctctatcgagcagtctgtaatggttattttgcagtgcgatagaggcattctctaaccctcccaaattttggctatttgttgtgcagcgttcat

SEQ ID NO: 3354 - DNA, 525 bp, Arabidopsis thaliana
  Intron number 3 from transcript AT4G14713.2 (locus AT4G147 13) derived from phytozome v7.0 (chr-ID Chr4; pos 8428350 to 8428874 reverse strand)
gccacaagacgactatttctcccaggtttacattttcgtatttgaattttttttgatacctttctgcttctatgcatctggaactggaatgttgtttaattcaagaaaagtgtaatgcattgcattattaagtttgtgatattaggaagtttttggttcaatatcacatccttagagacagaatctatatatggttcaaggcattgatggtggatttgtcagatagtatttaggttggccacgatcgtgtgatcgaagatcatcttcgttatgtcttagtatcctggatctctttagaaatggaaaataatagtcaatatgactgatgtgacttgaaataataattagttacttgaattccttaatgatattttgtaagttagagggttttttccctagtccatctacgaaagcttaagaaaaggttttgctgcatgtgcctgttgttctacaagcatattaaacattcttgtctgtaatcttgcatcagaagcccagctgaaacaagtgagctcgttgggcaaa

SEQ ID NO: 3355 - DNA, 724 bp, Arabidopsis thaliana
  Intron number 1 from transcript AT4G14770.1 (locus AT4G147 70) derived from phytozome v7.0 (chr-ID Chr4; pos 8484074 to 8484797 reverse strand)
agatcggaactccaatttccaaatccagattcgaggtttttcttcttctgtataactctaataattggtttggtcaaagttctgtgtttttgtattttaatgaaatgttttgctgtttttttgtgccaattatcagatttctctgaattcttttctaatttattgtcatagaaattcagatttcataggtttaatggaccaattattcaattcatttttttacaaaaaaaaaaaaaaaagtactttggttttgtgtttgaagtcaatgcagttagttcaaagacataactgtaactggttttagatttgtttgactttgacggttttagttgtttcacatgttacagtgaagtgttgttaattatgatcagttatctccaattctcactacaaattctatactttttgtttctgtcctgtttttcttaagattctttgaattgtggaatctgtaaccttaatggtacaaaaaagattcataattataatgcaaattttagttgttttaatctgatggtttagttgtttctgtcatattatgattatttatccctaattcgctaaaagatctgtacttttgtttctgttctgtctcataagattcttttaattggaatctgtaaccttaattacagtaccaaaataagattcataatcttcccctttttgtgttttgtctgaaaatgcaggattctccagtgttcaattacataaacagtttgtc

SEQ ID NO: 3356 - DNA, 1029 bp, Arabidopsis thaliana
  Intron number 2 from transcript AT4G14800.1 (locus AT4G148 00) derived from phytozome v7.0 (chr-ID Chr4; pos 8500736 to 8501764)
tcactcgtggagaacttgccactgctttgagaaaggttctaacttttcttctacggttttttatttttttatttcagaagtttctctgccttattttagatttggggaattagggttttaatctctttgaggtacatatacttttatgaaatagtgagattgtggggtatcatcagatcagcgattggtgcttagtgcttattcttggttttttagtttcctcttttgatgcaatgtagttgaacttgtctttcttctttagttaaacatgtcaatttttttgaagctttcctctgtcatactatggttttgattgtgttaagatgtttgatgcttaatacttgttgataagtttatataagcctttgtgtttcacttcctcttgtatggtggtgtaaaaccattgttgatacaggtagttctaatacttgttaatattcattacctcagagtagctaaatgccattagaaactttacctaatgtgttcattatgtagacatagtgtggcctttagaaatattcaaggtatttcagactattctacacattgttgcagttttatgtccttggatgttacagaagattatctttgagttggacgaagttatgaaatttagaattatgatgcagaaaagatgaaactcggattacagcttaatagttttcttatgccaagcttgataagtaatattatttcattaactaagaatttacaagactaggaattttgtgctaccttccaaggttactctgacttctgtgtcttgatggtgaaaatctgatactcaaggctaactgatgtgtgatcatttttaccggtttagggtagatcttccaactttggacagtgttgagtggggtttatacccatgtagccttagctatagattgttaaatgatctgattgattccctggatttttttgggttgtttaggactggtctgcatattcgcacttgacattttgagatttcccattgttgtctgttctatttgattccagaatccatattcggtgaacatcctg

SEQ ID NO: 3357 - DNA, 759 bp, Arabidopsis thaliana
  Intron number 2 from transcript AT4G14800.2 (locus AT4G148 00) derived from phytozome v7.0 (chr-ID Chr4; pos 8500736 to 8501494)
tcactcgtggagaacttgccactgctttgagaaaggttctaacttttcttctacggttttttatttttttatttcagaagtttctctgccttattttagatttggggaattagggttttaatctctttgaggtacatatacttttatgaaatagtgagattgtggggtatcatcagatcagcgattggtgcttagtgcttattcttggttttttagtttcctcttttgatgcaatgtagttgaacttgtctttcttctttagttaaacatgtcaatttttttgaagctttcctctgtcatactatggttttgattgtgttaagatgtttgatgcttaatacttgttgataagtttatataagcctttgtgtttcacttcctcttgtatggtggtgtaaaaccattgttgatacaggtagttctaatacttgttaatattcattacctcagagtagctaaatgccattagaaactttacctaatgtgttcattatgtagacatagtgtggcctttagaaatattcaaggtatttcagactattctacacattgttgcagttttatgtccttggatgttacagaagattatctttgagttggacgaagttatgaaatttagaattatgatgcagaaaagatgaaactcggattacagcttaatagttttcttatgccaagcttgataagtaatattatttcattaactaagaatttacaagactaggaattttgtgctaccttccaaggttactctgactt

SEQ ID NO: 3358 - DNA, 667 bp, Arabidopsis thaliana
  Intron number 1 from transcript AT4G15396.1 (locus AT4G153 96) derived from phytozome v7.0 (chr-ID Chr4; pos 8807748 to 8808414)
cagttaccaacattcgtgaaggagaaagtactcaggttattgatcttatctattggtttggtttttgatcttacctacatatttgacaactacaatgaaatattagtcatcctataatatataaaattaattaacattgaacgcttttaagaaatgattatgataaattttatatcgatgaatttatatagtattataaaaaaaattaaaaatctaaacacatatctattaaataaagagaaataacaaaactgtggatgttcttacttccttataataaatgagcggatgtttttgtatatagttgtatcctacatgtaaaacaaattggataatttttaaagaaatgattaactgtatctcgtaaatattttactagatggaatttatatacataatcaaatttcaaagaacaaagaaaaatcgtaataaattaaacttctctttggataacatttcagcgaaaaaagaagaagcaagttaaggtttgcttcttgagaatatattgttgaagtgttttttatttgaaaattcccacaatttattaagaaaaaaattaacgatttgcacccgaacatatctagtcctcataatcaattcctccgagttttattagtagattaccgtgtctcaatttttgcatttttttcccccaaaaaaaatagac

SEQ ID NO: 3359 - DNA, 343 bp, Arabidopsis thaliana
  Intron number 1 from transcript AT4G15560.1 (locus AT4G155 60) derived from phytozome v7.0 (chr-ID Chr4; pos 8884343 to 8884685)
tctgaaacccaacaacaattcccatgtaagttcacttctctcttctctgcttcatcatggaacttgatttaagaactatgagattttgtagcttgcccatttgctgaaatcttgaattaaataatgggtttactttgtttttgacaaaagtcaaacaaatttgactccttttcttagttactttattggaaatctgtggaaaatatagtgaaattagaccaataatattgcttctttggttctgatttctgggaactgattagagaaaatgacagcttttgcgatttgggttttgtgttgtggtacagtcaaacagaagagcaaaagtgtgtgcttcacttgc

SEQ ID NO: 3360 - DNA, 510 bp, Arabidopsis thaliana
  Intron number 1 from transcript AT4G15730.1 (locus AT4G157 30) derived from phytozome v7.0 (chr-ID Chr4; pos 8956650 to 8957159 reverse strand)
ctgttgttgatcttgacgttgatctctcttacattgtgagtctctcttgtttgtgattttttttctcattattaaatgatcttttttgtgtggtgttatgtgaagccgttgttgatctttgtgtgatgcttaatttctgattatgttttggaagtgttaagatcatatgaatagtacagtactctgtgtttataatgccaatgatgattaagttttgtgcatcttagtttagttggaggagatatacctttaataagatatttcaattgctatgaatcttgcttgtttctactgagttttgagttttaaacagagaactatgtgtctgtcttttgtagcatatgaaatctcaattttatgtatctcaataaagaatatatagtgtggatactcattttttctctgtttttgtatctttgtgtgtcgaagtctttttctttgcctggtggttttattatatatgtgctcaagttttgttgctttgtgtatctaaggacaagaaggtacaga

SEQ ID NO: 3361 - DNA, 496 bp, Arabidopsis thaliana
  Intron number 1 from transcript AT4G15850.1 (locus AT4G158 50) derived from phytozome v7.0 (chr-ID Chr4; pos 9001513 to 9002008)
tgcgctctcgataccctcccttgccttaatcccaagtaaacatcgtttatctgtttaaaagtttttcgttttgattgaattatctttctgtttacgacttttgactgaaacttgggcttcgggaaatctaggcaacacaacagcgttttgaccttactatgtcaaagttgttcgtttctaaaggttaaattttgatttggttgcagttagagatttctcgagttattatttgctctttcgaattggagtattagatactcaaatagtatacacttctgttaatactgaagtaaaacacctccaaatttgcttagtgttaaactgatgttctgtctcttgctcttcttcttcttagatcaatttcttgtttgaaaattttaccatatacttacaatattcatacgagtaagaagaactgttttggatcacttggtgcgtgatgaatgcctcatttttcaagttttgatgtgataggttgaagaaggcattggagaac

SEQ ID NO: 3362 - DNA, 951 bp, Arabidopsis thaliana
  Intron number 1 from transcript AT4G15955.1 (locus AT4G159 55) derived from phytozome v7.0 (chr-ID Chr4; pos 9044116 to 9045066 reverse strand)
actactacatctgcagattccaggtttatgaatcttgaatttgattctaatgaatctttggtgttcaacatttgaaatgtgtttggaatttggtgttaatcacgcttttgttagtaaaacacagtagtaactagattgttgataaacatttgagtattgctgattttggatgtttgaagaagagattagtcattagaaagagatcaatgcaactaatcagttttgaatgtatcttttggttgtggtggtttgatctgattatatttggtagcttttggaaattctcatcaagattcatgtgtgcattgttggtgaatgaatagacattaggactgttttctaactggtgggattatatattttgtaggaatatggggaaatagagtcggaatttgctaaggttcttaacatatcgtaaccctggtctatctactacctaaaggaaaacgctatgatgactctgtttcacttccctcttggctaactgattcagatgtcaaatattatgtgtcaaagtatgagaagaatggcttcactggaccagtaaactactaccgaaatatggaccggtatagactctgctactctcgaatcgcttgtttattttaagccttataaaacttgcttgaattcattcaggacccagatgcatttgcatgtatatctttgagcaatagttgaggtagtgtttattcttaattcattaggcctgccctgttaaatggagtcctttagtctttatgtaagatcagaagggttattgtgattgtaaatgcttcttataaagccatcgtcattgagtggcctctttgtaattgtgtgtttatataagttggtgacgctgaactttgatttagattttggatccgtgtaatcacaattttcagacataaaactcggatcaagatctttatgttagtgtcacatttctttctttgctctttgcagaac

SEQ ID NO: 3363 - DNA, 538 bp, Arabidopsis thaliana
  Intron number 1 from transcript AT4G15970.1 (locus AT4G159 70) derived from phytozome v7.0 (chr-ID Chr4; pos 9049427 to 9049964)
gtgatctaccaaattggtgtttatccactacaactgtttctccacttctccgatgatgtcgttagtattcttctccgattcaccttatcatctttgatctatcatgtatgtatgtgtatatttgtttttgaatatctattttttctatacttttacaaatcctctttttcaacttttgcttattttttcctaccaaaaaaaaaaacttttgcttatttttttctctttctaatctcttttataaaatctttgaatttaacggaatcataggttttttttttcttacataccattcgcttatgattccaactaatttgtatgtgctgctgtacaattaactttaactttaaatcagttttatttgctcaaattttcttgttattaattggtttttcattttggcaagtactcttccttttaccactgtatgagtagcttaaaaaggaacgaaacgaaaataaacaattatctgttcttgaatcttgtttttaattattggacagcatcatcaagaagatctgaaaaaattggggaaaat

SEQ ID NO: 3364 - DNA, 491 bp, Arabidopsis thaliana
  Intron number 1 from transcript AT4G16070.2 (locus AT4G160 70) derived from phytozome v7.0 (chr-ID Chr4; pos 9099824 to 9100314 reverse strand)
cgtaggcaggtttgagctttttatctcatacttcttctgggtttgaatcttatcagtggatgcataaattattgaacttgatttgatcttttggtatatatatcttctgtgagtctgtgactatgtatacaaatgggcttcatataaagagttgttttttctaatgtactttgtgtgctttcatctttatggtgggatattatgagtcctatattgtttactttcctgataagacatatatgtgctctgttcatttcagtgtaggatggttgtttggttattttgcatgtggaaaaaaatttacacttgtaatctatgactagtgaatagtgatgcggtcattatctactcttttcatgtgtgtgttgctgttccaatgcagagtttcttttttctgattcatgggacaattttgtgtgtagctagtgacattgcttgcttgcgtttttcttttttttttttccagggaaactttccaactgctagtgttt

SEQ ID NO: 3365 - DNA, 480 bp, Arabidopsis thaliana
  Intron number 2 from transcript AT4G16100.1 (locus AT4G161 00) derived from phytozome v7.0 (chr-ID Chr4; pos 9106582 to 9107061)
aagacccatctagagcctgcacaactaggaggtgagttcttacattctgcttatatttttgattgtttcctatcaaccattagcagtagtgatcgggttctttgctcgttgattggttcttcttctgatagaaaaaaggatagcagttggcttttttgtcaatttatatattttgagatgaagccacttctttcttgggttgttcttaatcttcggatgcacgttctttaggagataggaaaaccaacttctaagcgttctctgctacaatatctagagatattcatttggatgactaatacacaacaacttttatgctctcaaatactagtcagtggttcaagtttatcatggtgttgaattccaaatttgtttcatctcgttggttttctctttaattcccaattcgtttctgctttctagagtaaaattcgttgttttgatgtttgttcttaaacaggagagttggtgaagaaagtg

SEQ ID NO: 3366 - DNA, 588 bp, Arabidopsis thaliana
  Intron number 1 from transcript AT4G16120.1 (locus AT4G161 20) derived from phytozome v7.0 (chr-ID Chr4; pos 9118012 to 9118599 reverse strand)
tcccaaagctactcaaaaaggtttaaatttgattttggtttacttgatttatggcttaataatcttttgactgatcttggtttgctatatttaggagttttggtatgttaaggatgaagtatctagtgtagatccctataattaaggaggaatttcagattagtagagatagtcaaatgctagcaacaattgcattgtttaagtcccatgtgctcactcgttgataaaagtcttatgtatgttacttgttagcttccttttacacctaatgtttgaattagtcaaatgtgagagtctttgcaacacattctttgtgattgatctggattcaatcataagagccttaagatcttctgcagaagtaatcgaatagctagtatatgagtcgatccactttcatcacatttctaaatatgaatctgttgataaaagaaatgacttgacaagatagagttaattctttctaattgatcttaggaatctatgttgtgttgtggcgtgtaaagcataagtaactttgaaggtttttacaggtggagtccgtgcttgcttattttctgtgttttttctctgttttgtcaggtacaa

SEQ ID NO: 3367 - DNA, 349 bp, Arabidopsis thaliana
  Intron number 2 from transcript AT4G16180.2 (locus AT4G161 80) derived from phytozome v7.0 (chr-ID Chr4; pos 9169348 to 9169696 reverse strand)
atattgagcatcgagttgtttataatatctttcctgtgagtaattttataaacctttaaccagtcttcacgaattttgtgttgtttatgatttacctgcttcaacatccgatattatatatgtaggataagatttctattcaagttctggattcttgtatttgatttagctgatttgcatttgcgtctcgagctgattattattgtacatgaagttttttgcactcaatattaagttttactgacttctgatgccaataatttcattgtttcccccattgacctaaatgttcatctttgtttttctttctctagagtgggcaacctgaattaatagctctggagaaggc

SEQ ID NO: 3368 - DNA, 971 bp, Arabidopsis thaliana
  Intron number 1 from transcript AT4G16220.1 (locus AT4G162 20) derived from phytozome v7.0 (chr-ID Chr4; pos 9182525 to 9183495)
gtacagtagttacacaaaagttaataattctacgagtaatagattaaatttaatacacacaagtttccttgcaatgtttcaagccgtaataataaagattgtatttaatgtgaaaatattattatacactgatcgttgacttccaatatgaaacaacgttttcaaattgtagcatttttttcgagaggttcgttttaaaacaaaattttggtttacttcatatacggctcgataaccggaaattttgaaaatcgcagatcaagcattaggttccgacgaattaactccaccgtacttagcaccaacgacacgcggacccctaattctcaacggcgccaattatgcccccggtggcagtggacccctcaattcccccgggtaattatatgtatgcatatatatatatatatatatatagaaaaatatatatatatttgtaaaaatattatagataagtgacgactctgttggaataaagaactcgtaccgactccctattgcaacggttgttgatggtggtgatgataaacctgtaatctttagttcctaaggtattttatttaatttgggccattttagtcttgtaatgtttagacccttttactcgttaaacactatgaggattgtaattttgttggagtttagacaaaacaataagaaaagaacacgaatggatcctctcgaagggtgtaattttgttggagttttgacaaaacaaagcttttatcttcgcgattgcttttgtcatttgttagtttagtttccttagttaacagggcccgcgcaattaatttaatttccttacacttgtaccaacttcttgattctggttaggacatgataggtattatttctgaaattttagactcgagtgtgtgttgaattcgaacttcagttccacaagtttctctacaatagactcatttcagactggttctatgtcttatttgatcggtttacagcaaatacta

SEQ ID NO: 3369 - DNA, 472 bp, Arabidopsis thaliana
  Intron number 1 from transcript AT4G16380.2 (locus AT4G163 80) derived from phytozome v7.0 (chr-ID Chr4; pos 9254641 to 9255112)
gccgagaagggcaaagaaaaggttttcttcttctcttctcttcttattcagttaatggtattctcttattatagttgtttttttaatttgtgggtcttgaggatatattcaatctttatttattattaacctgaggaggtttttgtatatgtggttttatgtttgtttgtttttgtgtggattaaaaaaaagagttggctactttgtagaaactatgagaagaaatcagattctctttaaaccccaaaaaaagtaagaaaagaaaagaagagatcagattcttcttctctttttctattttgtgtcagaggtcgaatctgttcttctgctcccttcccttttttgttgtttctttcagtaataagatcttataaacgtcaaatccattagtacatataattttttatcaaaaaagcaaactatggaagaagcagaggatttagtgatgttgatatctgaaaaacaggtaact

SEQ ID NO: 3370 - DNA, 881 bp, Arabidopsis thaliana
  Intron number 2 from transcript AT4G16590.1 (locus AT4G165 90) derived from phytozome v7.0 (chr-ID Chr4; pos 9345788 to 9346668)
attctacggatccggccgtaagggtaagtagcttgttcgaattccttttttttcttatttattaattagatattacaaaaaaaaaactaaacaattcatacaacatgttaaaaacaatggacaaaccaatctaaagttcaaaacgcattggttaaatatttattcaaccgattttttgacctagaccgctctaattacttggttaagaacatcagactaatatatttttaaaatttaaatttatttaataaataaccacaaaagtggaaaaatattttgaagatacgaatatataaaaataacatcatgttttattttaatttgaaaatagaaaatatattgaaacatacataatttctgtaactatcatatatattttattaattaaacaaaaataaaataatatgaaaatgtttccgaaattttttgtttaattagttaggtgttagacttagacccccttcaagcgcttgattagtgcctaatttttttgcacaaactttattttgtgtttcttatcttttattggagaaacaaacaatataattgtttgcttaattttttcttttataatacttttaactattaaatttaaaatttgtttgaggtttaaatagttctccttatatatagaatttccgataataaatagtatagtgtgtaacacttttctcacaattttttcacctaagatgtttatctttttcctataattgaatcttcttttgatttacaaatcaaagatatatcacaaaattttgatatagacgggacttctatatcgatccatcacatattagaatgcaaacattgtaatttgtatatatagtatgatgaatgtgaaagtgtaagcaggaaggtgtggacgtagagattgcaaa

SEQ ID NO: 3371 - DNA, 723 bp, Arabidopsis thaliana
  Intron number 1 from transcript AT4G16810.1 (locus AT4G168 10) derived from phytozome v7.0 (chr-ID Chr4; pos 9461504 to 9462226 reverse strand)
gctaaggtccctgctaagcgatcaaaggctacaaggtttgttgataaatgtggttatagtatttgaaaactccccacttctgaaactgaattttagggtcccaatttcatatgtttctaatgtcaaaattttgtatattattggtttcttttgagtaatgatttttcgaccaagaaaaataaatatgaagtcgaagaatgattttctaaattttgttttttactttgtttcttagtggatgtttcttcttttaaaaatctcgttttaattttattacacagtttacttaattcatttgattttatattttctagatttttaactttacttttagattcaatgtattaaaataaacaaatcttttatagatactactaatacaatcttaatgaaaatgtctatatattattttatttttggtatatatagtacattgtatagtttgtattcaaaccaaaaattctatatctacctcttgataacactattatatactatattttatcaaattttcacatatctctatttgtatatttctttctttaaacaaattctcaaaactatttaagggtccacatttccgaatctcgcccaaagccctgtgttttttttcatcatgacaggctgttattttaatttaccatttttgtgtatttaatctaccattactgggtaaatttgtttccagccactacttgcctcttcataaacgccagttctatc

SEQ ID NO: 3372 - DNA, 579 bp, Arabidopsis thaliana
  Intron number 1 from transcript AT4G17140.1 (locus AT4G171 40) derived from phytozome v7.0 (chr-ID Chr4; pos 9635978 to 9636556 reverse strand)
gaataaggaagctcttaagatcagtgtttggcaaggttagattgtttctattttctcgctgattttgtgtaatgtccggatttgagtttaaagttcaaatgtgctattgagtagcgattttgagttgtgaacgaatgtgagaactggttaggttttgtgtgctgtgattgactgcgatttatggaattgggttctcttcgagttatattcgggtagctagctattaaacggagaagtcaatagtcacacttctggatttttgagtttagtgtttcttttttcaggcatgtgttgggtgttttagttgatcggaactgttcaatttcccgtgtggcatattacatgattaaaatgatgtaggattgctgcttgctttcaggctttatagcttcttcgctcatggtttatcttggtttgtgctggttgttcacttataattgcttagttacttctcacagttgttactaagaacagatgattaaataaaaagaaggttttagcatacccatgtcaataaatttgcttttattttttccatttggttaatatagcttgtggtttaacttgatttcgcaggag

SEQ ID NO: 3373 - DNA, 901 bp, Arabidopsis thaliana
  Intron number 1 from transcript AT4G17230.1 (locus AT4G172 30) derived from phytozome v7.0 (chr-ID Chr4; pos 9662808 to 9663708 reverse strand)
tcaacaaaatttcttcagcttctctccttcaaaaggttagctttcatggtgatctctgtagtcactttctcctttttattttcttgtcaaaacgattcaatttcatttgtttctaaattgaacaattgcttcttccttagctctgctctcatctggttttaagcttttggtcctaggggttaggaatctgagcttatatgtgccttttttgattgtttgtttttgaaaggatatgacttgtttgatttggttttggcgcaaaaagcgattattccctgtaacccaacatcgatttgtctacctgtccctttgtttgccttgtgttgattcaaaagtactaaactttatcctgatgattgtgtaaaaatcttgacttggagcctaggttttaaagctttgaaatcccttagtttaacctgattctggtaaaaaaccctgctttagggtatgactccaaccttcgaatagatgtaatttcttctgtagagagagatatatagagagtgtaaagcttccattttttggggttccttttatctggcaatagaaatctgaaggcagtagcaaaaaccgatatatgatttctgaaagatgtcagatctgttttctgataaccctatgatgacttgagtgattgattgtgagagcagactttgtcgcatatgtttgagtttgtttagagaaaaattcacaactagaccttttttttcttcttctatcacaaatcacagtgtctgtatttagttgctttactctgttgtagctcacttgttgtttttggatgttttcatggaggcaggtttttattctccttggtttgaacaagttacactgtagagagtgatttggctaaaagaagattgattcaggagctgtgtagtgtattgctggggtttttcca

SEQ ID NO: 3374 - DNA, 1044 bp, Arabidopsis thaliana
  Intron number 2 from transcript AT4G17310.1 (locus AT4G173 10) derived from phytozome v7.0 (chr-ID Chr4; pos 9685420 to 9686463 reverse strand)
cttttctctttacttttcttgtgagttcacttttttgctttcctccatttgcatttactctccttctttgttttaatttttgctcttttctgcttgcttttgatttatggctaaattgatcttaggagctaattgattgctacaatgaaacgctgtatgtgtttgatacctttgcttcttcctagctgcgtggaatcttggccttatgacatttcttgcttttgagactagtttatttggttaagtggaaagtaaagtactcctgaatgtctttttttgtccggtgaattagttacttagtgtggctcagtgctgtaagattatctctttgggtcttaacaagtaggagagaacttatacggctaagtgaacagagtttgtggaggaatgttagagtttcgaggtttagtgtctaactatgagtacctggttgatgcaggcacataatttcaccattaccatgtggaccctcttgcatctttatcaagtacgaacctttgtcatagctccaatagttgaaacgaaatcagggaaattaaggattggggtaactaatgtggggtaagtcactgaaaacgtgtacaacttagattggaaacttagtaaacatactgtcaagttgcatcacatctgctcattgtatttccttcttttgtttttttaactggaatgccggtttctgcaagttagttcgtgctctgtgcataagagtgtcacacagtaacatagtaatgtacaatgctctttgtccagatggagtcgatggcacgtgagatgtgtttgcagttttttttaaaggtgggttctgtgaataatgatctctgacaagttagttttgggagaagttatttaagacgagattttattgtctagttttaaggtagcattgctttgtcaagctaaattattatagtagattcattaagccatttgcatccatcttttgtttcttcacctcattcagtgccctaatttaatcgtggtgatcatttatgttttgttgctctagaacttggcctttcagttccaaggtgactcaaaaac

SEQ ID NO: 3375 - DNA, 756 bp, Arabidopsis thaliana
  Intron number 5 from transcript AT4G17590.2 (locus AT4G175 90) derived from phytozome v7.0 (chr-ID Chr4; pos 9801093 to 9801848 reverse strand)
aagctgacatacaacgctttggtgttttgcaaaaggtaaaacttgcttggctttaacaattaatgagaggttatgtttttaaccataattatctcatttgacagcaaagccaacagatttatctgattaattaagcaaactttttttttaaaattttgtaatccaaatctaagcaatgtacaccttagaatatcttccattttgcaagaaatttaaggtttaactttttaaaaaaaaccaaaaatttactaaactaaattcattaacaaattatttaattaatttttttattaatctaaaattttaaataccacaatatatggagaaaataaagattaacaaaatgaatttataaaaaagacctataatatttttcttaaaaaataaaagcctaaaaataaattctaaagtatgcctttttattttgatgcctaagcataaaatgcattgtatttgttataatataacatgatgaccaaagggtacatcaagttgatattcaagtatgatttgtatcatgtgttatgatgaaaaatgctattatattagactctaaacttagtacttgttaatcttagtgaatttcggattaaaaaatgtagatttgtcacaatcggttattataatagcatcttatacaacttaattgtacgagatacgctcacatcaacttctttaccaatcttgaatatgagtgtctttaccaatcttgaatatgagtgtcggatataattatagatagtagaaggcgttcac

SEQ ID NO: 3376 - DNA, 649 bp, Arabidopsis thaliana
  Intron number 1 from transcript AT4G17720.1 (locus AT4G177 20) derived from phytozome v7.0 (chr-ID Chr4; pos 9863847 to 9864495 reverse strand)
acggtgagcttatctaatctcttcgctttttgaaactagttagttttggtttttgttttggatttatcctgagaaaggtcgatgtttttgctgttgatttgattgaggaagatgtgaacagatctgttgattttgattgttgttttctaatttgttttgcgagaaatggcgttgattattagtgaagaatcgctagtttttttattttagaggatttgaagctgttctctgtttttgatttgggtgaaaattactgtttctgatatgaagaaatttttttttagggtaaaattgcttttgtttggattaggatattcactttagcatttgttttgttttgtaatctgttaatatctgatctgtgccataggattagttttgagacaagtatttgcttttcctagattctgaggttctttttatcttcttgtattgatgatgcaatgtttctgtgttttctgatcattgtattgataatattggttgctttaggagtgtgtgtgtgtgtgtttagtcattgttttaggcgataaggaatcgagaaatgtgtaatcgaacaactaatgaataagtctgagattttgtttagctggtgaaatggtttgaaattttagtttttaagtcacacgagattatatttcacttgcag

SEQ ID NO: 3377 - DNA, 590 bp, Arabidopsis thaliana
  Intron number 1 from transcript AT4G17770.1 (locus AT4G177 70) derived from phytozome v7.0 (chr-ID Chr4; pos 9876465 to 9877054)
cgcactcacacactcacttccattgctccaaaaaagtgagcttttttcttcctttttcctattttcctgatcatcttctttgcatcttatgtaactgtagaatctgactaactttcagtaacccaaagttttgttttttattttcattttttcctccagctgtgtgttctgatcttgcttgtataagtgtaagctctggcttaagcttttttttttttagttgttctaactataagacatgatttctgactacttgaggttacatttatgacgcattttgattatttgtcgttgttccggcatgtgtttgtctgcatataagctgttcgaggttttgtgaaatttgttcttttgatttcagatttagtctccactaattgtgtctagggtctgagatctgctggttctgtccccagtttttgtaaaaaaggaaacctttacctgagatttttagtttctgtttaagtttgaaatgaatgatctttgattaaagttttggtcttttgttaaattagactaatcaaagttctgatctttgttgtgtattttactgttgcagacattgtatctacttcacttgctgtagagat

SEQ ID NO: 3378 - DNA, 655 bp, Arabidopsis thaliana
  Intron number 1 from transcript AT4G17900.2 (locus AT4G179 00) derived from phytozome v7.0 (chr-ID Chr4; pos 9946077 to 9946731)
tccgtgaaatcaaacctaagaacagaagaatcgtacttttttaaaacaatactctgtttctatgttacttcttctctgctctgttcttcaaatgtgcaatggtttctatgtgttttagcttctgggtttggggtttttgattgaatttgaaagttaaaaccttgaaaatggtgaaaagttgttgttttttttcttttcaatttaaaatgggttcttcattgaagtgctctgttttctttttttgtatacctaacaaaaagatttgatttttttttttgattttgaagaatcagaacaatgctcgattccgttagttaaattttactttatttggtgtcacgaattggtacaatatgcttttttcattagataccaaattatatacttttaaactcttagaaatccagtgaaatagtgagcacgaatctgaaaaagataaatggaacagaatcaaatttcaaacttctatcacaagattaattcaatgaattgaaatgaaggtttaagagttatgtctcaatgttctcttgaggtatatgttgataatataccaaatggtaatgttgattaatgatatagatgatgaatattgattaatcttttgttttgtgtgtagggagctggtggtccggaggaagaggagaaccggtggccg

SEQ ID NO: 3379 - DNA, 651 bp, Arabidopsis thaliana
  Intron number 1 from transcript AT4G17900.1 (locus AT4G179 00) derived from phytozome v7.0 (chr-ID Chr4; pos 9946077 to 9946727)
tccgtgaaatcaaacctaagaacagaagaatcgtacttttttaaaacaatactctgtttctatgttacttcttctctgctctgttcttcaaatgtgcaatggtttctatgtgttttagcttctgggtttggggtttttgattgaatttgaaagttaaaaccttgaaaatggtgaaaagttgttgttttttttcttttcaatttaaaatgggttcttcattgaagtgctctgttttctttttttgtatacctaacaaaaagatttgatttttttttttgattttgaagaatcagaacaatgctcgattccgttagttaaattttactttatttggtgtcacgaattggtacaatatgcttttttcattagataccaaattatatacttttaaactcttagaaatccagtgaaatagtgagcacgaatctgaaaaagataaatggaacagaatcaaatttcaaacttctatcacaagattaattcaatgaattgaaatgaaggtttaagagttatgtctcaatgttctcttgaggtatatgttgataatataccaaatggtaatgttgattaatgatatagatgatgaatattgattaatcttttgttttgtgtgtagggagctggtggtccggaggaagaggagaaccggtg

SEQ ID NO: 3380 - DNA, 692 bp, Arabidopsis thaliana
  Intron number 1 from transcript AT4G18020.2 (locus AT4G180 20) derived from phytozome v7.0 (chr-ID Chr4; pos 10006741 to 10007432 reverse strand)
ggatttaagcagatctgcaagaaacactctctcaggtaaggtgagaactctaaaatatgaatttactcatttgacttctgaattgtgaaagtttgtttgtttggttttaaatttccaaagcttttcttttgatcaattacatgttcattgcatgtgatgtgagcatgatctcttatctggatataagatcttctccttcttctgcttatggaaagaaaaaaacatcagttttatcgaaagtgcaacttatgatttgatcacaattctttttctctctgggtatatatctctctctcaatttccctaaattctagggatttgcctttctccttcattagttgtcataagcctatgttttagtatttgttaaaggtcattagtctgtgttgttaagttaactaatcactgcatgcacgagttaaacaacactaaactaataatatattcactcttaaatgattcaaaagctttgttagatttcatggcatggtggtccactctttataaataacaaaatcaagttcctcatgaattattcttatctcatcaataatacacacaccttttgaatatttacttttcttgtatctttattctgtctaatttttttgtttattctattcatttcccctttttttattaataaaatctagccagtgtttactttttttccgtagaatcaaaccggcggc

SEQ ID NO: 3381 - DNA, 707 bp, Arabidopsis thaliana
  Intron number 1 from transcript AT4G18020.6 (locus AT4G180 20) derived from phytozome v7.0 (chr-ID Chr4; pos 10006721 to 10007427 reverse strand)
taagcagatctgcaagaaacactctctcaggtaaggtgagaactctaaaatatgaatttactcatttgacttctgaattgtgaaagtttgtttgtttggttttaaatttccaaagcttttcttttgatcaattacatgttcattgcatgtgatgtgagcatgatctcttatctggatataagatcttctccttcttctgcttatggaaagaaaaaaacatcagttttatcgaaagtgcaacttatgatttgatcacaattctttttctctctgggtatatatctctctctcaatttccctaaattctagggatttgcctttctccttcattagttgtcataagcctatgttttagtatttgttaaaggtcattagtctgtgttgttaagttaactaatcactgcatgcacgagttaaacaacactaaactaataatatattcactcttaaatgattcaaaagctttgttagatttcatggcatggtggtccactctttataaataacaaaatcaagttcctcatgaattattcttatctcatcaataatacacacaccttttgaatatttacttttcttgtatctttattctgtctaatttttttgtttattctattcatttcccctttttttattaataaaatctagccagtgtttactttttttccgtagaatcaaaccggcggcgacagtgacggcggcgaaaa

SEQ ID NO: 3382 - DNA, 687 bp, Arabidopsis thaliana
  Intron number 1 from transcript AT4G18020.1 (locus AT4G180 20) derived from phytozome v7.0 (chr-ID Chr4; pos 10006741 to 10007427 reverse strand)
taagcagatctgcaagaaacactctctcaggtaaggtgagaactctaaaatatgaatttactcatttgacttctgaattgtgaaagtttgtttgtttggttttaaatttccaaagcttttcttttgatcaattacatgttcattgcatgtgatgtgagcatgatctcttatctggatataagatcttctccttcttctgcttatggaaagaaaaaaacatcagttttatcgaaagtgcaacttatgatttgatcacaattctttttctctctgggtatatatctctctctcaatttccctaaattctagggatttgcctttctccttcattagttgtcataagcctatgttttagtatttgttaaaggtcattagtctgtgttgttaagttaactaatcactgcatgcacgagttaaacaacactaaactaataatatattcactcttaaatgattcaaaagctttgttagatttcatggcatggtggtccactctttataaataacaaaatcaagttcctcatgaattattcttatctcatcaataatacacacaccttttgaatatttacttttcttgtatctttattctgtctaatttttttgtttattctattcatttcccctttttttattaataaaatctagccagtgtttactttttttccgtagaatcaaaccggcggc

SEQ ID NO: 3383 - DNA, 712 bp, Arabidopsis thaliana
  Intron number 1 from transcript AT4G18020.3 (locus AT4G180 20) derived from phytozome v7.0 (chr-ID Chr4; pos 10006721 to 10007432 reverse strand)
ggatttaagcagatctgcaagaaacactctctcaggtaaggtgagaactctaaaatatgaatttactcatttgacttctgaattgtgaaagtttgtttgtttggttttaaatttccaaagcttttcttttgatcaattacatgttcattgcatgtgatgtgagcatgatctcttatctggatataagatcttctccttcttctgcttatggaaagaaaaaaacatcagttttatcgaaagtgcaacttatgatttgatcacaattctttttctctctgggtatatatctctctctcaatttccctaaattctagggatttgcctttctccttcattagttgtcataagcctatgttttagtatttgttaaaggtcattagtctgtgttgttaagttaactaatcactgcatgcacgagttaaacaacactaaactaataatatattcactcttaaatgattcaaaagctttgttagatttcatggcatggtggtccactctttataaataacaaaatcaagttcctcatgaattattcttatctcatcaataatacacacaccttttgaatatttacttttcttgtatctttattctgtctaatttttttgtttattctattcatttcccctttttttattaataaaatctagccagtgtttactttttttccgtagaatcaaaccggcggcgacagtgacggcggcgaaaa

SEQ ID NO: 3384 - DNA, 491 bp, Arabidopsis thaliana
  Intron number 1 from transcript AT4G18040.1 (locus AT4G180 40) derived from phytozome v7.0 (chr-ID Chr4; pos 10017397 to 10017887 reverse strand)
gtgtttacgttttcaactgttgaggaattttggaggttaggtttttgattttattttatttccgactcaatatctggtttgttcaattattctgcatctgggttttgttataggtttcgatttgttgaggaaagttatgttctttattgggggattagaagatcccattgaagtcattatatgtttttgatgaattgctatgtttggtgtttgaattcgtagctaaagcttatgttagggtttagctttgatattctgttcacttgtttgtgaagtaaagtagaagagcaaagtttgtgagagaaagagaccaactttgaaatctttcttagtggttttctaggtatcagaatttgagcaaacactttcgtgatgactgagggttgatgttgtatagttcttgctcttcccaatgagattcataggtttgtgtattgttctttcgacttcttattttaaaagacattttggtttgcagtttgtacaacaac

SEQ ID NO: 3385 - DNA, 686 bp, Arabidopsis thaliana
  Intron number 1 from transcript AT4G18070.4 (locus AT4G180 70) derived from phytozome v7.0 (chr-ID Chr4; pos 10030913 to 10031598)
ttctactctaatcaacctcaaatccaacaaccgtttttaattcttttaacaccccataatctcactactactttcttctttttgcctttttcttcttgttgttgtctctctgtatctctcaattattcactcacaccacacacgtttaggccacctttcttgtttgtttatatatttgcttcgctttaaatctgagtttttttttaactttgttctctgtatagtttcttcaagttttgatttttatggttttgtgctcattgatctaaacaaatgggtatcttttttactcttctttgtgttttgattggggttttaggctcacaattttgggatctcaagctgtaaaaatttgatctttcggttaattttagcatgttctgcttcgtaatccatatgggttgaatctagttttctgttttggactaaaggatagttttgtttatcagattcatgattatgattgaagttgtttatcatttgctgagttttgtttatctctgatgctttggtttcattagtagtagctgtgcctattttgtttactagtatatgtttcattctctggatggtacaatagttagatttgacttgaatagtcagtgttaagtcactctgtttgtgatattgattggatttgtaaactgatgtgctagattcgagaagccaaggtgacaaggagagcg

SEQ ID NO: 3386 - DNA, 410 bp, Arabidopsis thaliana
  Intron number 1 from transcript AT4G18070.2 (locus AT4G180 70) derived from phytozome v7.0 (chr-ID Chr4; pos 10031189 to 10031598)
ggtatcttttttactcttctttgtgttttgattggggttttaggctcacaattttgggatctcaagctgtaaaaatttgatctttcggttaattttagcatgttctgcttcgtaatccatatgggttgaatctagttttctgttttggactaaaggatagttttgtttatcagattcatgattatgattgaagttgtttatcatttgctgagttttgtttatctctgatgctttggtttcattagtagtagctgtgcctattttgtttactagtatatgtttcattctctggatggtacaatagttagatttgacttgaatagtcagtgttaagtcactctgtttgtgatattgattggatttgtaaactgatgtgctagattcgagaagccaaggtgacaaggagagcg

SEQ ID NO: 3387 - DNA, 389 bp, Arabidopsis thaliana
  Intron number 1 from transcript AT4G18150.1 (locus AT4G181 50) derived from phytozome v7.0 (chr-ID Chr4; pos 10050359 to 10050747)
aagctgttaatcgtcttctctctcaaggttcgttcttccagcttcaatagctttttatctcttttttagtttctgggttttagcttcgaatttgtttaatggaacttgaatagcaaaaaaaaaatcaaaacttcaaggagttttaatttaaccttgtgaagaaatttttgcaatcatgttgaatctgttagaacttcttgtataagagaatgtgtcagaactttatttgatttccttaagtttcttgaaatagtaatgttattttggattttgttgaatcttttttgttatctgtttctggaaataaatatataaatcagtttttttctctttttttatgttacagtttcttataatgttgtttcgttaaaacttttcagatacttttc

SEQ ID NO: 3388 - DNA, 368 bp, Arabidopsis thaliana
  Intron number 1 from transcript AT4G18320.1 (locus AT4G183 20) derived from phytozome v7.0 (chr-ID Chr4; pos 10124695 to 10125062)
agaaatacttaaagactgctcgatctcttcaaaatgtatctaaacaaacttcccactcacaatttaatatattcttgctatcattccataaacagattaactcatttcttgcaatgatttttgtttttgaaaatgtagctagcaacaaaacttcttccattttttcgtaactcatatatatagcttctgccttctgctatcagatttcatttctctcaaaattatttttcttggtttcatctcattttttggagggatttttgagaacatctttaaaaaaaaaataatcttccagttcttatttgttaattcttatagtttatgctctcatctcacttctctcaaatttgtttctctcgcagggattc

SEQ ID NO: 3389 - DNA, 291 bp, Arabidopsis thaliana
  Intron number 2 from transcript AT4G18390.2 (locus AT4G183 90) derived from phytozome v7.0 (chr-ID Chr4; pos 10164310 to 10164600 reverse strand)
aagcttatacgaagctgtatctactgactttggtgaaatatcaaaaaccctaaattaattttaaaaaaaaacacattttttttcttcttttggtttttcctctgagggtattcatcatcaatgcttacaaagtacagtgggtaaacaaaacaaaaacaaaaacccatttttttctccttctttaaatcccaaaccaaccctaaagttttgatttttaattttgggggtaaccaaaaaaaaacaaaaccctaattttttttctttagtgatgagattattggtgatgatgaa

SEQ ID NO: 3390 - DNA, 835 bp, Arabidopsis thaliana
  Intron number 1 from transcript AT4G18390.2 (locus AT4G183 90) derived from phytozome v7.0 (chr-ID Chr4; pos 10164643 to 10165477 reverse strand)
tactaactccaagctcaagctcctctgtttcttctgtaagtctcaatttatctcatcgaattttccgagaaacaaacaaaaaccaatctttttcatagaaagaatctgaatttcgtgtttatacttaattctgattccaaaaaaacaattctagatctaagatttttatttcttgatgagaatttcactgtagaaagaagtgtatttgttcctttaatttgctttaaaattttggtttcatataatctcaaagccaagagcttgacacctgtgatctgcatagaatccagaacacatcaataatgattcctttttaagaatttttaaattgatttaatcttcttgttggttactatgaaacaactctttttctttcataattagaaacaccaaaatctttatatagagaagaaaagcttaaaactcgatttctgcattttttgtcttcttactctttaaagccctccattgataatcgcttcagccgaaagcagttgattcagcttaattatttatcatagcttctgattcttcttctagctccttcttctttaatcacgatcattaactttaaacccgttttatcaattgttgtgatatgtcagatctacaatgagtagagcataaattcgaatcagaataactgatatcttaattatgtgtatatatgaatgaaagtcatctgtagaaaaagtcgataaggatgtaacatatatatatatatatataagcatttatgtatatatatatgtgtaaagatttgttcttatgagattgtttctttgtttttgttattgcaggcttgtggttaaaaatcatttcagacacagtgctt

SEQ ID NO: 3391 - DNA, 737 bp, Arabidopsis thaliana
  Intron number 1 from transcript AT4G18430.1 (locus AT4G184 30) derived from phytozome v7.0 (chr-ID Chr4; pos 10184301 to 10185037 reverse strand)
aaagctcagctttgggacaccgctggtcaagaaaggtaataaatcctcgaaatttcactgttttatctctatatgttctgttttgtttcattctttgaaccaaaccaaaccgaaatggttgaacaaaaatcaaactggataattttacaaatttgtttgttttactattttgaaaccaatataaactgatttagtgtaaccaaataaaccgcatttttttagaaatcctctacttttgattatgtatctctatggaaattaaattgaaatagttatgttacattaatataatattaactagatcatgatttatttcaattatcaatttcgattttttttataaatataatatacttttaattatgtatatgtatggaaaattggaataagtatattgcactgatataatatttgactagataatgattttattttaataatcaatttctatagattaaccaaatataactttcttggtaaaaagttttttttgctaaaaggaaccaaatataacttaattcaaatcaagaacaaattggaaaataaaccagattacaaattattttatttggttttaatttctattaaccgatataatcaatagccgaaactaaccaaccgtaaaccgatctcccactcctatgctctctttcttctctatatgctctgtttttgagtaatagcgacttatttgttatacagatacagagcaatcacgagtgcatactacagaggag

SEQ ID NO: 3392 - DNA, 171 bp, Arabidopsis thaliana
  Intron number 3 from transcript AT4G18460.1 (locus AT4G184 60) derived from phytozome v7.0 (chr-ID Chr4; pos 10196132 to 10196302 reverse strand)
gagttttacttggtaatgatgcatctctttattattcatataccatttgattagagaaaggtttagcttgtggtttatgtactgaggtttgttttctttgcttgccctggtctttggatcatgtgtgttaatacagttagtcaattcacattatacggattcttgaaaggt

SEQ ID NO: 3393 - DNA, 677 bp, Arabidopsis thaliana
  Intron number 1 from transcript AT4G18490.1 (locus AT4G184 90) derived from phytozome v7.0 (chr-ID Chr4; pos 10203711 to 10204387)
cctactacatatacaactgcaaagcgattcaatcggtaagaatttaccctcgttgctcgtcgattgagtagaatctcactgtcaggcgttgttttagcttcggtttgctaaggttcgacgattgacgatcggttgatcataatcgatgaacatttctgtgttagaggtgacgtttatgcgtagatttgagtaagaaatgttcgatcaatgctaagatgcactttctcctaaacttagtttcgtgctgctcgttgtccctgaaatttagtctcgagtggcgtctccttgcttaaaatcgacgaaccgcctggttattttttataatttggtgttgaatctcataatttgattcctgctactgttcttcttcgtttagattggttctcggataatcacattgtttgatctgttatgtttctcagtctctccgataatcatacctacgtacgttatgcgtcatatcgccttagaaatagttttagaagagtgttaatggaactgatgatttgtctatgctagttgagtttgtgacgtagtaggatgatttttttgttggttgccttgtgattatcataacataacagataagtgttttcgtgagtgagtgctagaatgattatgatggtagttttttctttgcagttggttttcaagagtgatactgaacagatattgcc

SEQ ID NO: 3394 - DNA, 683 bp, Arabidopsis thaliana
  Intron number 1 from transcript AT4G18600.1 (locus AT4G186 00) derived from phytozome v7.0 (chr-ID Chr4; pos 10246564 to 10247246 reverse strand)
atcggtattcttcgtcagttaggcgatctcgctgagtatgttctcgttttcgactgttgcatacatacagaagattgaaattttgatacttgtagctgattttgtaggttttgaagttgtttcgtgtgattaggatgagttttagctcatcaattttatctttagtttgagtattaggggtttcagtaacatgctatataatttgattttcttcagggcttagggcttttcgcaaaagttttgatatttgagcttagttcgtagacttagtaacaaattaattgtctttgagtaagtgtaagtcttatttattgaatgatgagttatgtccttgaagtacctcaatatagttgttaacttgagtatcagctgaaatgaagtaaagattgggaatttatgtggacatctaatctattgatgatgagaaactaaagtttcttacttaactaggaattatgaggttttggttgtttacccggggaggttagtgaattggcatagtgcgttttgcaaacagacgttaatctcccataatcaaaattcttttttagtcttttgtatcattcctccatggaacgaaacatagatggtcaagtgaatgtaaactgatagagagttctttaaccaggtggcatttcttacatgtagattttctgcagaagtatttaacggcttacaagaag

SEQ ID NO: 3395 - DNA, 522 bp, Arabidopsis thaliana
  Intron number 1 from transcript AT4G18720.1 (locus AT4G187 20) derived from phytozome v7.0 (chr-ID Chr4; pos 10300584 to 10301105)
gggagtgagaagattcagaaggaggttcaaaggattaaagagagagcaagatttaaggaagagagtcgcgtgaagatgctttcatcagcagatatgatcatcatttagttagctgcagagatttagtcatgagtttcattattgtatagaatcagtattcgtgtcaattttctatcacaaactcgagatattagtagattgtaatttcaatacgatgatcgttttcaagttgcttcattgaatggtgtttctaaatctgcgtttaaagaatctagtcaaagtgtttcgtttcataagagggagctctgcagtttatgcagtttaaggggtctttggttttttcttttgaatgtttgtcttctattcgcattaggactcattgttcttatgcagccattaattcccggagaaaatgctgtacaatggttccttgcaaattacattctttggctacaaaatcctcattgtatgaagttgttgtacataggttcttggtacaccaattcgagaagaaatccgttg

SEQ ID NO: 3396 - DNA, 652 bp, Arabidopsis thaliana
  Intron number 1 from transcript AT4G18860.1 (locus AT4G188 60) derived from phytozome v7.0 (chr-ID Chr4; pos 10344783 to 10345434)
acgatcacggtgagaccggtggagggagagggaccatccaaggccgaagcgaaaccatgatcgacgtccacggcggtatcaaagttatgaataaataataactatggttgtttctgttaagaaaacctagatgacgattgtatagacaaactttaatatataacgatagggtatatatatgctctgtttttttttttaatataagatggtgtttctgtgaagaaatctgatacagtggacaagtaattattatacgaaatggttgtttttgttaacagattcttaatttatttattttaagtgttgagtagagaactagatgatgacggtattggtacagtggacaaacagaatcaacctactgatgcagattgtcaatatattgagtctccgcatgtgactctgctacagtacttgctcatcatttatagtatttcttaaagtttctttgaacatatgttaattatatgtctaaacatgttaaagagaatatcagtgatcacaatccgaccactttcatctgatatcttgatcaaaaaacaaatggaactctctccccatttttccaacaagacacgtaatagttccatatcgaaatcatcaaatttcttcttcagaaacacaatcttgctcttcaattccgtagttttat

SEQ ID NO: 3397 - DNA, 756 bp, Arabidopsis thaliana
  Intron number 2 from transcript AT4G18910.1 (locus AT4G189 10) derived from phytozome v7.0 (chr-ID Chr4; pos 10366693 to 10367448)
cattcgcttcttgcggccgtttccctcttaaacaggtctatactctatatccctatataaattataaactataaggattgatcaagtgttgcatttaagtatgatttttgagtttgataaaccaacattagacattattgtctttgtgtttgataggtttagtttaaccgtcgtttgattctttttgcacgaaactataggttataataaaagttataatgttttttaataattctttattggattttaaagaagttgcatcttttaagtttttcttgtgttgtatagtgtatactgtatacaacctttaaatcatttatatctttcactaatgactttattttttattagaattctttcagtaatgaatttgtacgatagacgtatttatgagcatatgcgagtcatgagtgattgagtgtagataatttcaaatgtatgcgtctacgactctacggtgatatatgagtatagccggaaaactagggggaatttgttttttgtttaactatttgttaaaaagttaaatgtatttttgttagtttccaaattgaaaattttaaaagtgtgtgtttaccatgtaacatttgtccgtatatataacttctccacacaaacaaagtcaaacaaaattgtgttatataaacgtcaaaatcttcacaatcttccaaaattgggtccctagttaatatgatatcgcatatcaaataattggtcactaaattttatttcttatatttttgtaggttccggctt

SEQ ID NO: 3398 - DNA, 469 bp, Arabidopsis thaliana
  Intron number 2 from transcript AT4G19030.1 (locus AT4G190 30) derived from phytozome v7.0 (chr-ID Chr4; pos 10422471 to 10422939 reverse strand)
ccttcgcctcttgtggccgtttccctctcaaacaggtccttaacacatacacaattacatatagcctttatataatgatcgatcaagttttgtattttatgtgtgtttttgagtttcatgaacaaactaattaaagaacattagtgtattttgtttccattgatctagtttagctatcggttgcttgtattgcacacgagactttgggttattcaaatacgtagcgtttttaatgcaacgtttactatagatgagtgaagatacgtaaggacaaatctacttttgctagtttccaaaataaattaaaatgttatgtaacttttgtatgtatatagtttttccacacgtccatattttgttatataaacgtcaaaatatcttccaagattgggtcccttccctagttagtgtgaactggtgaattaatttattttatttttgttctttgaatttttttaggttccagctt

SEQ ID NO: 3399 - DNA, 515 bp, Arabidopsis thaliana
  Intron number 5 from transcript AT4G19040.2 (locus AT4G190 40) derived from phytozome v7.0 (chr-ID Chr4; pos 10435701 to 10436215 reverse strand)
aaagccagtaagtgcctattttaaaatacttatctattacttcctccacgtcgaatcattttcccaacaacttaatggctaaagtttcttacttataggatttcctgactcaatcataacaaattatgttctgattattctcattgttcatagacttgatctccttgttatgggatgaccgtccagattgttcaaattaaggggtttgtggcggcaatttatgattagtaaataattgaaaaatgtcattctattagataaaaaaatattggaagtaaactaccaatcataatccgtgtctggcccctatcccgaaccgcctgtctcagtcattctaagactgtcagaatttacaaaggccagaagaggctaacaaagtgctgcatgtagagagtacccatcatatatcattctttttgatgtttgtccctatgttgtttatcttttgagtttgatatgcatatacttatgcaaaacaagatctgcaatttcctttagatttagtgcggcagagg

SEQ ID NO: 3400 - DNA, 515 bp, Arabidopsis thaliana; identical to SEQ ID NO: 3399
  Intron number 5 from transcript AT4G19040.3 (locus AT4G190 40) derived from phytozome v7.0 (chr-ID Chr4; pos 10435701 to 10436215 reverse strand)

SEQ ID NO: 3401 - DNA, 265 bp, Arabidopsis thaliana
  Intron number 4 from transcript AT4G19045.1 (locus AT4G190 45) derived from phytozome v7.0 (chr-ID Chr4; pos 10438762 to 10439026 reverse strand)
actgctggtcccaagtacagatttctcttcttcattatataagtaattttggtgctcatgattgatatagtaatttgatcactgttttctcttaagatcttgaatacaaaaaactttgaaactgctggagcaatatgggcatttgtaaagtggaaaagagtctttgtttttgagtgacaattatctcgatgatcaactactgactcatatgtaactattccattggtgaaatgcgtcggttgcaacgtttcaggtacgaatacag

SEQ ID NO: 3402 - DNA, 620 bp, Arabidopsis thaliana
  Intron number 1 from transcript AT4G19110.2 (locus AT4G191 10) derived from phytozome v7.0 (chr-ID Chr4; pos 10458503 to 10459122 reverse strand)
cgtcggcgacggtggttttgcccgttggctctgaggtatttctttcgcagatctccatctctccatttcatttctctctttatggtctcgaatttgatcagagtggatctaatttttcgttttgattaatataaattcatttggtatgcttggattcgtctgtttgggatctgtttgagtcggatttgatgtgttcggattatttgattgaaatttagggtttcttaggtagaattattgatttagtattgattgatatatcctcgaattggatatgtttgttttccagctttttccagcttttttcagatctgtgaggtataaagtgggccaatagttaggtgatgatggcaccacggttcagatattgtgctttgttatcttatctgcattttaattattgctgctaggtttttatggtttcgtgaacgatgattacttttgctaatgttgtttatgagactgtaatgtaagttgagtccatttttagagcttgcctggcttttggatggttttcttctagctattgttgtgtccatctttggatttcttataattttttaattgctttttcattgctatcaggttatatcaggctttaatttaagtggattgtcatc

SEQ ID NO: 3403 - DNA, 951 bp, Arabidopsis thaliana
  Intron number 1 from transcript AT4G20050.1 (locus AT4G200 50) derived from phytozome v7.0 (chr-ID Chr4; pos 10852091 to 10853041 reverse strand)
caatagagaatctcacaatcaagatcaattcagaggtaacgttttactttttttcttgctttaaaaatatatattataatccgttttctgatatttaactagacgagagaaagtaatgtttcttatgtcaatgtcatattaaaaatcagttttatatatgaaaattttcatttttttatttatgaaaaatgtgcaaatgcaggtaaccaaacacaaaaaaaaaagttttgtttcatcctccattgttcttaaaagcattagtagttatcaacataataagttactccattcttaagcatttcaataaatcttaactttggaaatcagaaaaagaaagagtggacgaaaatacctttagttggaagaaatattcaaataaagaagaaaaaactctaccaaaaacctatccaccactcaaacctccccaaccaaaaccccatgacctggtttacccttttacatacaatatctaatctcataatgcatgaatctatacctttatgcacttttgcggatctttttccaacttccgcatactaactagcatatctatctctaagtcctccctatatatttaaattaacaaattaaatcaacgtaaaaatgtcaaaaatatatattaatgttttgaagagaggtaggtttcaaggtaagttatatgatagagtttagtattcataacaaagattcattatagtacaaataataagttatagcgtaaaccggtagagaaatagagaggaaaaagaggatcaaaaatgtacaagagtgcgaaatgtgtgactcccattagaaaagacacaagtttgtataatgtttcattggtaaccttagttaggcctttctctttccatgtgctaacaacaacatacgtatatatataaatgtctcacaaacattaccttcagccattctcttatttggctcattcgattattataggaggaaacc

SEQ ID NO: 3404 - DNA, 382 bp, Arabidopsis thaliana
  Intron number 2 from transcript AT4G20095.2 (locus AT4G200 95) derived from phytozome v7.0 (chr-ID Chr4; pos 10872573 to 10872954 reverse strand)
tttgggctaatcgggtaattggatttgattgtggatgtatgaactttaggtctcatcactcatagagatatttgcattttaaagcttatagattctgtgttttgtttagagagaagaaaagtttgattataacaaatactacattaaacaaagggctgacattgcaaaatatggaggacctcatccaaatataatcctcttcggtagagttggacttcattgctacaatctgcaaaatgtaatatattcctacacgttcgttctagtacgattcaagtgaactttgtttctgtcggagtactctcaccagatccttatttttgtctttgcttcttttgatcttgtagggcacaaacttacaatttctgactgtacacaattt

SEQ ID NO: 3405 - DNA, 754 bp, Arabidopsis thaliana
  Intron number 1 from transcript AT4G20240.1 (locus AT4G202 40) derived from phytozome v7.0 (chr-ID Chr4; pos 10933075 to 10933828 reverse strand)
aaggtttttttcctgcatagaatattctattaattaccatgcatgcataatattcccctttagataaaattatatgggaggaatttatatgattgatcatcatagaaaatagactatatatataattttcaaatcctaccgtatcatatagtattaaagtttatggtaagttcatacgagttgaagttgattgtttctaaatttttttttattactctatccttttcaaaacaactgtcgttttagcttttttattaattctaaataagtattatctaaggattttaattttaattaaaaatttaatattatttgtagtgcgattttaagatttcttcaaaaatgaaattatatatttaaaatctagacaccttatatttagaagaaaattaaataagaataaaaatggaaataaatattttaacgaatggaaatattttttagatagatttttacagtttttttgttgtataaatataagcaatactgtgaatttttccaaacatcaaaatgatcttagttttttttgaatatattgaagagaatttgacccaaaaaaaaaaaatttttaaagagaagttatccttgtttttatttatttttttgtttttttgtgataaaagagtattttttttcttagtaataaaagagtgtttctaatgttacacgtctaatttttgttccatatattgtaatatatcaactggtgatgcttgcagagtctgggtgtggtacatctgctcaataacaaaat

SEQ ID NO: 3406 - DNA, 490 bp, Arabidopsis thaliana
  Intron number 2 from transcript AT4G20320.2 (locus AT4G203 20) derived from phytozome v7.0 (chr-ID Chr4; pos 10975063 to 10975552)
atcctgtggcttccgagtcaccgccattaaaatcggtcttattttcttcctctctctaacaaccatacttgtcaattctttcatgtaaaacgaacttgtcaccaaaattttttcttctcacgcaaagttcgttcctttttttgctcacttttgcttttgaattttttctcacaacttggagaacaaaagagaaaagtttcagatttgattttttttttccttggccccagtggttacaataaacatgaaaaaggacttctttttatttcctctaccttctcacgcgtgtgaaaaagggtacaacaaacaaaaagttcaaaaaagatctaagaatttccaaagatttaatctttttttctatttcccctgttaaaccctgtttaaagtttcatgattttttctaagaaaagttgaacacttttttggatagttactgtactaatcgctgattttaaggttggattatgtgcagatccttacttaaacattg

SEQ ID NO: 3407 - DNA, 133 bp, Arabidopsis thaliana
  Intron number 5 from transcript AT4G20340.1 (locus AT4G203 40) derived from phytozome v7.0 (chr-ID Chr4; pos 10985834 to 10985966)
cacaggtatgcttcatgtcccctaatatttatttttttctttcagtttgctgttatgctttttgttttttctttctggtttcttttttgtttaatcaaactaccctttatcacttcttctctcttacagatat

SEQ ID NO: 3408 - DNA, 591 bp, Arabidopsis thaliana
  Intron number 2 from transcript AT4G20370.1 (locus AT4G203 70) derived from phytozome v7.0 (chr-ID Chr4; pos 11001502 to 11002092 reverse strand)
ccaagcaaccctcaccaacgagaatatctccactggtttgtatcatatctcttcatttcatttaacttaactttagatcgtgcatcacacttattttcgagtataaatagaaaacaaataggtaaggtatatatgggaattagaaaaagactttaaaatttagagattcaatacatatctcaagtgacacacaaaaaacgatattttagatttttactaataatagaaggggacatacagaatcaactttaagagagcagcaacttgtcaagaaaaaagatgtcttacgtatacatccaacatagagactttaaacaggaatagaacatgactttgtggtcagagttagtttttgttttagtgtgtgtgtgtgtcatgttatatcatagcttgcacgcaacaaacgtctattcttcatagtctgaccttttctacatgctttagacgaaactttcaaaaactttgatgcatgctttgttttttagtcgaatttagttaactatctgcaggttgcactgcaccatatctttaactttaatggataatactctcgttacaggttggtgactgatatacctgccaccactggaa

SEQ ID NO: 3409 - DNA, 683 bp, Arabidopsis thaliana
  Intron number 1 from transcript AT4G20370.1 (locus AT4G203 70) derived from phytozome v7.0 (chr-ID Chr4; pos 11002117 to 11002799 reverse strand)
ttggaggagacgacttcagaaatttctacaccttggtgatcttctctccttcattcctcttatcttcattgatttagttcctcgtagctcactctttcgttttcgtaagctccatatattgacgaagaaaccttagatatatccaaatttaagcgtaactagatttgatcattcttttctttcgtagcctcatctatatacctgctgcgtttcctctaacttcttgcatgcataactgttattggtttgattattattttaaatcaattttgaatctttctcgattatatatattacgttttcaagagacggttaacttgattttgtttcgcttttatttttattttagtttttttattctaggatacatacctttagaaaagcataaatatcttaattgacacttattttaacgacttttgaatctgaatagtaaagccagtatttttagatacccttatattaatggaaaatgttactattacctttttctaatttaagcttcttcgtctttacttctttttctattaacttttggttaacttcttcgtcttaatgtgtgttatcacttttcaagagttaaaaaaaaaaaatcaaactcatgatttaatttcttgattgctttaatatattcataatcgatcttctctcttatacggttgttgatgggtttaataaaggtt

SEQ ID NO: 3410 - DNA, 547 bp, Arabidopsis thaliana
  Intron number 1 from transcript AT4G20460.1 (locus AT4G204 60) derived from phytozome v7.0 (chr-ID Chr4; pos 11031876 to 11032422 reverse strand)
cctctctctcaattcgtgttttcccaaattctcaggtactctctcttatctatgtcttgactcttcctatttacccaattcattaacctgattttgttctgtttctgcattttgccccacttttgaaacgaattcggattctgatcaaaataacaaaattggggattgaaagcgtttctgggtatcttatgatccgtgatttctcagatgggtttttcataaagcagagaaatttcgatcaaagtcgatgactttaacatagactctttctacatttttgttgctctgtttttgttctgttctgtgacaaacatgctctctgcctttttttctctttccaattaacatgtagattaataaataattgaactttgatcttatttttttcataaatgtaattcaaacttttgtctgtctttttccttgtttttgattctttcattaaggtcccacttcccaaccaaatattattttattttgcttatatatggttttgactttgtattcattcatcttttactctaaacagcaatctgcagctaacttg

SEQ ID NO: 3411 - DNA, 487 bp, Arabidopsis thaliana
  Intron number 1 from transcript AT4G20680.1 (locus AT4G206 80) derived from phytozome v7.0 (chr-ID Chr4; pos 11095352 to 11095838)
ctgccggcatctccggggtaacattacttactctcttcatatcatattaaatgttattttagccaaaacaaattgttttaaataagaaatattatgttctgtgattatttgtatacaacaatttatgtttgattcaagattttcttgtgcccaacagccctcaaggcttttaagtctgtccatcgcgaccaattcaatgaccctagcgtacaatttatcaaattaggtaaataggaagggtaatgaatggtattgtttttttatgtctaacagattcttcattcacattttcaacttatgaaagcctattttctaatacagattcatgaattagttagaaagcacaaacgcacaatgattgtttcttatatatttatatttatttaataatattttagctattatttcataatttaatgtattaattattttaacacgtcaaaacatgaattaattatgtaaaatgtaaatgacagcttcgtaggcg

SEQ ID NO: 3412 - DNA, 588 bp, Arabidopsis thaliana
  Intron number 3 from transcript AT4G21110.1 (locus AT4G211 10) derived from phytozome v7.0 (chr-ID Chr4; pos 11268048 to 11268635)
gaaaaaggtatgtttttatatcattcttgaattaacttctgtttgtatgcctttttagttagttgtctaaggccaaattgaagcgatttggagtttctattatgtaaaatattgttgtattagtttagagagtctagtatcgccttactgcacaatgagtcttgaagctgtttctctgaaatatatgtccttagcatatgcacttacttggaatgatctcactaacgaataggttctagaattggtattgttgctttgtttggtgaagaaataagatttctggtaattatacttcgaacaaagtgcattgcctccacgatttgccaaattttggatagttctaacttctaaccatactcccacatcttaatgatggtcactcatgaatcgtttattaacaaactcctccctgtcaattctgttgcatcttctctttgtaggttatactatccagacatatacctagatttcacttttgttttctttcattgaactaagattttgtcatttatacgtgtctctatactttgtgttaagtaactctaaaaactctctgttttgtgttttgcagtcgggatacgaacgttt

SEQ ID NO: 3413 - DNA, 799 bp, Arabidopsis thaliana
  Intron number 2 from transcript AT4G21200.2 (locus AT4G212 00) derived from phytozome v7.0 (chr-ID Chr4; pos 11303171 to 11303969)
gatatttctgacaacaaggactttactactctcaggtacacaaatattgttatcaattacatttttttagaattaatttacttattaaacttaattatttgaaaaaatatgtggagaattatcccaataacaagatgtaaattaaaatacaactttacctttcttttggttaagttaccttctaaacaactagtgttttgaggattagtaagtaaattttaatgacatatataatgatacaactatagtattaattaatatcaagtttttgactataagtaacactatttgcaaagaaaattaattaattagtcaaagattagacatgggagacaaacacagtttttaattcagtatatggtggttttgaagcatataatagagtgttgtcatttatatttaattaataatagttttggatattttagaaatttaatcctagaaaataaagttgttgggcattgggtcaaagatttattccccatatctcatgcgtttctatgttttccatttttaatactatttttgaatacgtctaattttgggatagcaagttggcatgtgaaatacaatgaataaataaacaatattaagacttttcaaacaaaaataaaatattatgtatttggaaaatatataagaaataaatcttaacgtagattttttttgtttgttaaagaacaatcttaagatagttaattaaactctagctaactttttttaagatacctctaatgttgttatttattctttgattcttcgtattcgtaggaacttcgtcaacttcaaattctttaac

SEQ ID NO: 3414 - DNA, 483 bp, Arabidopsis thaliana
  Intron number 2 from transcript AT4G21560.1 (locus AT4G215 60) derived from phytozome v7.0 (chr-ID Chr4; pos 11469667 to 11470149 reverse strand)
agctctaccatcgaaatctcccaacttgcttccttgtgagtttctctctcacttcataaattatggtttttgcttcagtagaacgtagaaatttggtattttgattgttgggtttcaatgatttagggtaaagattcattgggttttctccatttctagctttagtgattatgatcatgatttcatatcatcctctctctcggtttttgttcatcaatgtcttctggttcttgagataacctcctaagctttttggtttaatgattcctcttttctatcttctatgatcacctgcatttctcttgttttggttagatgttaatctccttagtgtgatttattaacttggtactattgattttgatatcagctaggaagctttttgctttttgttttcgtctttgcgcgtgtcccattctcttctccaaagttccctataatagtgaaagctcatcaagttatttagctctcagtttctgaaag

SEQ ID NO: 3415 - DNA, 811 bp, Arabidopsis thaliana
  Intron number 1 from transcript AT4G21560.3 (locus AT4G215 60) derived from phytozome v7.0 (chr-ID Chr4; pos 11469667 to 11470477 reverse strand)
tctgataacccgattgtcaactccacagcccacaggtcagattatttccgatttagggttaatcgagttctcgtttttcgaaatcgatcaaatttatatttaatttaatttgcgcgagaatcgatggtgattgatttgttgttgatccagacagagacagagttcgttgccttgcctccgtgttgttttgttcataccgcgtgaaaagctttcatcatcaattcatcatcataaagaggtgtcgtgtgagcacacgcaatctcccaatctctcttctctctctctctctccaatctccatatctttgtcctctataatccggagaagtagctctaccatcgaaatctcccaacttgcttccttgtgagtttctctctcacttcataaattatggtttttgcttcagtagaacgtagaaatttggtattttgattgttgggtttcaatgatttagggtaaagattcattgggttttctccatttctagctttagtgattatgatcatgatttcatatcatcctctctctcggtttttgttcatcaatgtcttctggttcttgagataacctcctaagctttttggtttaatgattcctcttttctatcttctatgatcacctgcatttctcttgttttggttagatgttaatctccttagtgtgatttattaacttggtactattgattttgatatcagctaggaagctttttgctttttgttttcgtctttgcgcgtgtcccattctcttctccaaagttccctataatagtgaaagctcatcaagttatttagctctcagtttctgaaag

SEQ ID NO: 3416 - DNA, 846 bp, Arabidopsis thaliana
  Intron number 1 from transcript AT4G21710.1 (locus AT4G217 10) derived from phytozome v7.0 (chr-ID Chr4; pos 11541141 to 11541986 reverse strand)
agcataatcctggccatcagtccgattttgcggaggttgtttcctcgtttttgtttttttctagggtttctatgggaattcgaaattatgtgcgggtttatcgtgtttgtggcggttttaaagtgtttcgatttgagcttctaccgtttgggtgcgattagggtttacctgaatcttattgatgtcccgagattgtcttgttattcaatgcttgagctatatgctgttcaagagtcaaaaaatgattttgactattgatgtccggatattgactttgagctggtaatcttattaatgtcccgagattatctttgagttaatgcttgagctcatctctttcgaggaggatttatagtattggttgaaactcaaatcagttttggcactataaaaatgagtttggtatctttttttgctgtccctttggtctgttttcctgcagacagtctattgttagcccttatctgagaagcttatctcaatgatttcccatgattatctttgtattcgatgcttgagctcttcgcttttttgaggtgtattttcagtggttttgaatattggttaaagcttaaatcagtttttaagttttgttgcaattagggtctgcctttgtcgagtagctaagctcattgattttccgagattatctttccatttaatgcttgagctcttcgcttttttcaaagtgtcctttcagtggtctttattatcggttgaagctcaaatcatttttgactttgtgtgagctgagatatagctgttttgctatctgtttttctgtatgtctgatatagctgttttcctgcagacaatctacaagattagctttggacagatttatct

SEQ ID NO: 3417 - DNA, 699 bp, Arabidopsis thaliana
  Intron number 1 from transcript AT4G21895.1 (locus AT4G218 95) derived from phytozome v7.0 (chr-ID Chr4; pos 11614243 to 11614941 reverse strand)
atttcgtgtggtttttgcgtcgcgtggtcagaggtaaaccaatatctaaccgtgcttttttttgggataacatcagactcgctagtgtttctctcgggaaaattttcatttgtatgatcatttctaagtcatgataattctgaatccacgttttgaattttattagattcagtttatttgatgttttctcgattttattctggttctttctcttgtttaatatagaggtttgatccgtttttttctcgttttatggatttgaatcttcactttaatgttatttagacactaggtttttgataattctagtgtaaatatgtgtgtcctcgagattgtccatgagaatctctttagtctttatagttgctacagcgatttttcttatttggatggaagtcagtttcataatttcatttttttcgtttggtgtcgctgtttaaacttcgtttctgtctttgataatttcaaattcatattaaaacaattattagattggattagtctgaaatcctagattttttttgcactaatgtaacaatctacatttgtgtttgtgtattgaactaaatattttgtctgttcatttattatttaggagctattcaatgcaaataaattatgatagtttgaaacttaacaaaatcacatttcttggttttggttttatgtagaaggttgaatcagcagaatcaagacatc

SEQ ID NO: 3418 - DNA, 564 bp, Arabidopsis thaliana
  Intron number 1 from transcript AT4G21903.2 (locus AT4G219 03) derived from phytozome v7.0 (chr-ID Chr4; pos 11622859 to 11623422 reverse strand)
ccctcgtacgtttaccttacatatgtatggagacttggggtactatgggatcaccaaaataattcataaaagtttttaaactaagactgtgattggttaacccaattaactatagtaaatgaatttggtggaaaaacgttttttttcctctcttttttttgttctcaccaagtgaaatctatgcatggtaattagatttgcataaaaagaaaattcacaatttggagtgcgtaagagtatatacatataatctttcatttccattcatacatagcttgtaaattttttttttaataaactataattcttttttagtgtccgagaagttttaaaaaaataataatgtaaaaacaatttcaacaaataaatatatttatatagtatatgcaaccatagtgtcccagaaattatagcatcatttacttttcttgtcttctgaaaattcttgtctgcttcggaaaagtacgtatagtcaaaaacttattattctctttctcagaataagtcaaagaaaacaaaaaattagctttttataatgtttatttcttccttttttagttgggc

SEQ ID NO: 3419 - DNA, 324 bp, Arabidopsis thaliana
  Intron number 3 from transcript AT4G22285.1 (locus AT4G222 85) derived from phytozome v7.0 (chr-ID Chr4; pos 11780870 to 11781193 reverse strand)
ttttaaacccaaggtatattagatcttgtgactactacttcatagttcttactgcattttgtgtattgatttgtgaacatgtgagcctttgcacgtagttaacaacaacaaaattgctttgactattatctcaatcagtttcttcttgctagttctctgtatcatctaccatctatttatatttttattcttgatagcttgaacatattactcttctttcatgtcttgtcaaattttctttgattttacagttcctttttatgaaggcttcggtgttatccatttacaggtttagtagagcacaagtaaacgagcttgacaaga

SEQ ID NO: 3420 - DNA, 714 bp, Arabidopsis thaliana
  Intron number 1 from transcript AT4G22330.1 (locus AT4G223 30) derived from phytozome v7.0 (chr-ID Chr4; pos 11797754 to 11798467)
tctttttccgtcgcgataataataaaaaataaacggtttgtttttcgttctcttgctgttcatgtggatcggatttttgttttcgtgctagattccattagttttttggtttcgggatcgactagtttcgtaatggatctgatttttctattggatctccctagttttgacctgagcaagcgtttgtgaggacttcatgttcttatgacctagattcgttgttttagatgtggaatttggtgtttcactaatcgatttattcgatttctctggtttttggtgatgattgatcaacgtgatgatttgaagatattcattgttcatgtgcattgttgtaaagatgttttcaagtttccagtgtcttgattaatcaatcactgtgttatgggaaaagtttggaatcttaactgctaccattagcgtgttggtttgttaaatcactactttatatacttattatggtatgttgcttgtttctgcaacttaactcttattggttactgttggagccttgagaaacaatcagttaataaagtcaattagcagagataatcttgttctttcttttgcgttatttcatttcatgaataaatcagatgttagtgttgtctttccctcttctgtttggtcttctcagatggtttttgactgttttgtggcttttattttggatctctagtgtctagaggctgttactgaagagttgattcatac

SEQ ID NO: 3421 - DNA, 329 bp, Arabidopsis thaliana
  Intron number 2 from transcript AT4G22330.1 (locus AT4G223 30) derived from phytozome v7.0 (chr-ID Chr4; pos 11798721 to 11799049)
ccactttgcaacacgtgtaagtaccagtcagcttccacttaattgctatcttgacttatatgtacttgtttgattcatgcatatatgtttctagactgttagcatactgatccaaatttcggattataatttgcaacaagtataagtacctgtcagtttctgctgctattcttcctattttgatttttacaggcatgttgaattcatcatgacttatatgtagttgtttgattgatgcatagaacttttcaaattgttattagtattctggtctaaatttcggattaaaactctcggtttcttgatttcaatcaggcaacaacagagtg

SEQ ID NO: 3422 - DNA, 531 bp, Arabidopsis thaliana
  Intron number 1 from transcript AT4G22380.1 (locus AT4G223 80) derived from phytozome v7.0 (chr-ID Chr4; pos 11812199 to 11812729 reverse strand)
ttcttcttcatcttcctttgcttgccgaagataaggttaccatctctttctctctctcgatgatttggttgcaattttaattcaactcgtgtagaatagagagctattaggttgcaatttttgaggctgtgtatcgttaggttagtgtttctcagattttggtggttgttagaagcttaagaagccattcttagctttatgcaattttgtgttgaacatacttttctctgttgagttctttcaggaaactttctctgtttactctgttttggtcttcaattgaatcattgtatctatgtaattattggtgtatgcttcaaatttactcttgaggaagacatgattcatcatagctatagtttctcctagtttatgtttaaaaattgtagctttgagttcactcttgaggaagacatgattcatcatagctatagtttatcctatttgaacaagcttcattactatacaagcaattattacgtggtctgattttgaactaacgcttttttgtactctccatctaaatgcaga

SEQ ID NO: 3423 - DNA, 568 bp, Arabidopsis thaliana
  Intron number 2 from transcript AT4G22440.1 (locus AT4G224 40) derived from phytozome v7.0 (chr-ID Chr4; pos 11831591 to 11832158)
taataggtgtgcatgctaatatactccacaaatgtagcaattgtaagaccagacaaactacgatgcagattcaagagaattggttttcagcagagcatatatatgattagaaggttaccaggtcatgtggcaattgtaaaacagtggattaaggtactaggacctacctactgtaagtgaagttttgtttttcaaagtcctttgatttgagtgtgatctatacatgtgaaaactcggatttatctaacccttgtaaactgttgataacacataaggattctttgcatattcttagcattgaccggtttgggaaagctttgttggaagcatggttgtaagagaggtcagattcttctatagagggtggttgcagccagtgtgagtcactagctaatgaactttgcgctcatgaatctaaaagacagcaacaccatgaagaggtcaacgaaagtaccttttgtccagctcaagcaaatgctgataggttatagaagattgagtgcaaaccactatcattgatgttttgtttctaggcttgtagccacgactcgagaagagtgtaccttgc

SEQ ID NO: 3424 - DNA, 358 bp, Arabidopsis thaliana
  Intron number 1 from transcript AT4G22720.2 (locus AT4G227 20) derived from phytozome v7.0 (chr-ID Chr4; pos 11937109 to 11937466)
agctacttctgattccggccatcacgcagcttcaggttagtttttgatttaaatcaaacaacagtacatgggttcagtgtgttgtgtctcgaatggaattggtttctgtgtttagattagggtttagggctctttcatctaaggaaacgaaacctaggttatacgaatctctttgttgggtctctctcaataccaataccaatcaacgaaaggattaattttgttcatcatcttcaacgtctaaggctataatttgtgttagttcaaattgattcagaataaagtttggatttttacttcacctagtcctgaatttgttgttctctgtgtagaaagtttctgtttttaaatcaaagaa

SEQ ID NO: 3425 - DNA, 358 bp, Arabidopsis thaliana; identical to SEQ ID NO: 3424
  Intron number 1 from transcript AT4G22720.1 (locus AT4G227 20) derived from phytozome v7.0 (chr-ID Chr4; pos 11937109 to 11937466)

SEQ ID NO: 3426 - DNA, 320 bp, Arabidopsis thaliana
  Intron number 1 from transcript AT4G22740.1 (locus AT4G227 40) derived from phytozome v7.0 (chr-ID Chr4; pos 11945566 to 11945885 reverse strand)
aacttcaaattcgattacggtgaattttaatgtttgattttgatttctgattgaatttcaatttcgggttcttcgttaggtctagttcgcttcaggtctctggttttttcttcatgatatttacgttcctgagttgtttgtgacttgattgtgatcgattcatgtaatcttcctgatttactgttgaaattgctttgcagttagagaattgttatcttgctagagattgtgttgaattgcaaatttcagatttgtgtttgatgatagcgttttatgaattctgtttttgtttttgtatactttagtttttatcagggaag

SEQ ID NO: 3427 - DNA, 360 bp, Arabidopsis thaliana
  Intron number 1 from transcript AT4G22740.2 (locus AT4G227 40) derived from phytozome v7.0 (chr-ID Chr4; pos 11945566 to 11945925 reverse strand)
tctcagattgttgggagtccgaatcgttgttcgaggtatgaacttcaaattcgattacggtgaattttaatgtttgattttgatttctgattgaatttcaatttcgggttcttcgttaggtctagttcgcttcaggtctctggttttttcttcatgatatttacgttcctgagttgtttgtgacttgattgtgatcgattcatgtaatcttcctgatttactgttgaaattgctttgcagttagagaattgttatcttgctagagattgtgttgaattgcaaatttcagatttgtgtttgatgatagcgttttatgaattctgtttttgtttttgtatactttagtttttatcagggaag

SEQ ID NO: 3428 - DNA, 400 bp, Arabidopsis thaliana
  Intron number 1 from transcript AT4G23010.1 (locus AT4G230 10) derived from phytozome v7.0 (chr-ID Chr4; pos 12061999 to 12062398 reverse strand)
tcttttttggttatctcgttaacggtgtttgcgaggttcgtttctctcttttttgcaatttgattcgagaattttgatacataatcaatcaacgttaatgtttttgtttgttctttgtcataattccacatacccagctcctgaatctcgtaaatttataatttttttgcattttcaatctcttgcatgctaagtgtttgatgttttgtttctgagagaaaaaaaaacagaggaagaagaaaaaattgcatgacgaactaaactctctccaaacttgtgagagatcacaaaaaatctgtgatctttgtaaagaaaacagattttagagaatgtgattggatctacaagtactcatatatgatcattgacttgatttatttttctttggttttgcaggaat

SEQ ID NO: 3429 - DNA, 408 bp, Arabidopsis thaliana
  Intron number 1 from transcript AT4G23100.1 (locus AT4G231 00) derived from phytozome v7.0 (chr-ID Chr4; pos 12106752 to 12107159 reverse strand)
gtctctcaatctccgtcaagcttgacgaatttcaggtgtgatttgcttctcttcttcttcgctttctggacttgtggattttggtttttgattgatttgttctgcttttttttttttggttgaatcttcgctttttctcatgatttttttttggctgttgcatgattttggttttgttagagtcgaatttttgcagatttttgctttgatttgatttttgttgttgttgttgtttctggtttggtgatacacgaattttgatttgttcttccagatgatagttcaattctgtggtagctgctgattctaattatgtgatatatgttattagaattgagaaaaatgcagttatttgtgatttctcatagcttatgatgaattgttataattgcaggagctatatatacc

SEQ ID NO: 3430 - DNA, 485 bp, Arabidopsis thaliana
  Intron number 1 from transcript AT4G23120.1 (locus AT4G231 20) derived from phytozome v7.0 (chr-ID Chr4; pos 12113486 to 12113970)
gactggtgagttttgttttgcttttcagattatgctgatttgaagattttgacatttgactgattacaacatttatctagtatttgagtgtttactatgctggctaaattgtatgtgatcttttcatttgatatattgcattttttggatgtaaatctgaaacttttttgtttcatatcatcttatgaaaatcttaaaccagtactagttttgtcactataaatgcgatctatcacttaatgaaagtttataacaacaatttttaaatcaagtttagatcaacttttaaagagttatgccaagcataacaactttttcaaaaacaattgtgtaataagactcaaacgatatttatagtgaaacctatttttgtctccacttctttcattgtatctattgtattaccatttctaatagatttttacttcttcttgtttttttttttaaatcttcataggaggactcagtgctattggttccagagg

SEQ ID NO: 3431 - DNA, 680 bp, Arabidopsis thaliana
  Intron number 1 from transcript AT4G23450.1 (locus AT4G234 50) derived from phytozome v7.0 (chr-ID Chr4; pos 12241872 to 12242551 reverse strand)
aaggactatatcaagcttctgtttctgttttttaggtaactaatgatttttttcttctccgttacaaaagtcactttatatttttgttttgtaggatcactaactctgtttgtgaggttcttcttttctgttttcgtttgttctgtttggttgttctgagattttttttttttttttttttacttctgtttcagcccacttttttagtttccaggttttactgttttttatttttttaaccactctgttttcagttcttcgtctattagggtttggtaactaatagtatctctgttatggtaaaccaagttttttttttcatttgaaagctcaagatgttcttaggatcatatgattttccatgagtattcaacatgaaatttactttcttcataatgaacctcataagtacacgagagtctttaatcttatatttgtcatcacaatggatacacatatttgtattgctttaatctctgtgactattattctctcattgttagtgtatagttagctatgttacattgaagtacttgtggtgtttgagtttggttttccagttacttagtatgatcacagagctagattttgcctcccattagagtttcaattaggagtcttatgaattttttctggatactacaggtcttttggtaacctaaagagctgctatacactga

SEQ ID NO: 3432 - DNA, 491 bp, Arabidopsis thaliana
  Intron number 1 from transcript AT4G23460.1 (locus AT4G234 60) derived from phytozome v7.0 (chr-ID Chr4; pos 12248356 to 12248846 reverse strand)
ctgagctcaaggaagagctgaattcacagtacaaggttcttcttctccgtctaatttcatatatggatctgtgatccgccattttcacgattctaatctcatctctttctcgttcgttgaattatgcataatcattttctggtagatctgtatgattatggattcgaattgatcggttaattttgttgatattttagtttgaaagattgatgatggtgtacgttataatgttatgtgttcaatggttcatttgaaactatgtagaaatggaatgaaattcagaataatggttaatgcggggatgtgtttagattgggggatcataagttttgaatatggatcaatgcagtggttgggcgatagaaacagttcttctttgagtagatggtccaatggttgtatatggtactgattgaagatgatggaatgcgtttttgcttcagtttcctaaattctctttttttctttatgttcctaggataagaggaaag

SEQ ID NO: 3433 - DNA, 630 bp, Arabidopsis thaliana
  Intron number 1 from transcript AT4G23500.1 (locus AT4G235 00) derived from phytozome v7.0 (chr-ID Chr4; pos 12265031 to 12265660)
ctgttatcctcgcctctcaagtaagttttttttctccattataatttatctttcatttacaagaactcaaaaaaggaaaattagtaacacccgtgacacaaaactccacaaacgtctttgatgaattttttttttctgttgcaaatcataacatacataacgtgacatttgttggccaacttctgatgatatattggttgggccattcaatttatgtttatattcggtaaataatttgtttataatataaagtagcccaacttaaaattgcgagatttaaaaaatataacaattttgggttctacttaaaagctagatattttattagcatgcgttactctagaattgaaggaggtggttacgcaaagacaaaaaatagggaaagttagtggggaacttgggatcgaattcgatattggccggttacacgagtgtgcgacccatacttgttaggaagatctcacccgtccatttctcttccaaatctgagccacatgttacttttgggcacatctgtttttaccttgccccacagtttaaccaaaatatgagaccctttctccaagtttcccttgtaagctaattatgaaaattcttggtcctaacgttattgataggaagagagtgact

SEQ ID NO: 3434 - DNA, 774 bp, Arabidopsis thaliana
  Intron number 2 from transcript AT4G23620.2 (locus AT4G236 20) derived from phytozome v7.0 (chr-ID Chr4; pos 12315220 to 12315993 reverse strand)
tttctcctggattgaagaaaggtaataaaccctttgctagttttttataattgggatctttagtgaggaatcaaaaagaaaataaaggaagcattttgataagcatttgagaatagaggagtatatacatgagtttgttaaggtgcttacataggaatcactgttcttagtatgagtttctggatagcattttcttttctcgaatcataggcaatgaacaaaatagatgagaaatgtggttaaagatttggaagagagatagtgatcaaacatgtggtttttgacttctgattgctgtgaacgaatagtcctgtacgcttgagtagatatgctaaatgcaggattaatacaacggtttctaactcctgaagtagttaaggccacacatatattcttgacgtcattggagctcattgagcttctaatctgtagagaagtgatactgctcgggtttcagttaccctttcttggatcagactgagctaagcttagtcgatagcaagtaatcatcacttcaagtgacgttatggttgatgttttacaaaattttaactcgatttaaaagaaatctatgtttgcattatacatcttataatggcttgtatcttcctctggctacccatttttgggattttgaagtttcatttctctggctactctctacccaattttgtagatcgcagcatctagtttcctgttagattttgatattgatcactatttcttaatcttttggcaggagcatctctgaatacgattaaaagaacagtaaag

SEQ ID NO: 3435 - DNA, 499 bp, Arabidopsis thaliana
  Intron number 1 from transcript AT4G23640.1 (locus AT4G236 40) derived from phytozome v7.0 (chr-ID Chr4; pos 12323822 to 12324320 reverse strand)
acgccgcatcttactcgccggcggcttgaatcgtatgtcgctcccttctctcgaccgatacgtcggaaatcttaaacccctagattccttattgctactcctgcggaattacaattgttgtactgtgatgatgtgaatagaaatggtgagagaattctgaaaatgaatgatgccaatattcattgaatttagcttctgattctaaatttttcaatcaggatattcaaatccaactcaatatcactcttgaaagtaaaattactgttagcgattcgttttaatgcatctctgagcttatgttttgatttgtaagctctcgaagtttaagcttcttgtgatagcttatgagccattcattgataatctatccaaacgttaaaatgttcggcaatatctgtttatatatgtgtgtagttttgaccagcgtggtgttataagtttgttgttgtcttctattgaatcaggctgataggagaaacaggtgtaaccagatcctcct

SEQ ID NO: 3436 - DNA, 606 bp, Arabidopsis thaliana
  Intron number 2 from transcript AT4G23700.1 (locus AT4G237 00) derived from phytozome v7.0 (chr-ID Chr4; pos 12344854 to 12345459 reverse strand)
ctctccggcagccacgtgtcatcgccgagattgtcgtacgtttctttacttctttatgatttatctttttttttttgggtcaaagtttattattaaaaatcttatttatccatttttggggtctaattaaaagtcaaagatagtactagtttcatcaataattagataaggtgacgaattttttggaaatttacattacaagttaaaactagtagccccaatcatacatacacttgatgaattagtcttcgggcttatatatgacgtatatatcgtaggaactttcgtgggaatattctttttccttccacaaaattcgctgacacgttaagctttgagatatcttataatatccgtttatgcttccacgttcctatgaatcttgtgggaattgataaatttcaacattttgaacagataagatagtcagtcacggatcatgaattcataattactttccttgttaaatgtttagtcaaataatacactttaaaacacatatcattgattattacaattttttttttggaattataatgtcttaagtttgagttttatattgtggttttagggtggaatattacttggaccatcagcacttgggaa

SEQ ID NO: 3437 - DNA, 364 bp, Arabidopsis thaliana
  Intron number 2 from transcript AT4G23710.1 (locus AT4G237 10) derived from phytozome v7.0 (chr-ID Chr4; pos 12350641 to 12351004)
ccgctaggaccggtatttacaagttctatgcttattctctgataccttgaatctgagactctagaattgcttaaaagtttttcatttgattggtttactcatcgttcagtgttcttataactctttcggtttctacgcgtatgtcttgatttaatgccagagttcttcatgtactgtggatgcgtttatctgatgatatagtcttaggatcatgataagagtgatgacataaagcctttggttgaatatagcatttgattgtaactttgtactcatcatggaaatttaacagttgggcactaaatgagttgcagaattacaacttgtgattgagaatctgtatgtgttttgattttcagcaaaa

SEQ ID NO: 3438 - DNA, 524 bp, Arabidopsis thaliana
  Intron number 3 from transcript AT4G23840.1 (locus AT4G238 40) derived from phytozome v7.0 (chr-ID Chr4; pos 12401283 to 12401806)
tacctgtaactgatcagaacttgatttctctccaggtattacctgtgctctttctttattgtagtcattagggttgttttaattgcatgatgtatgttattgaactgtgtagttcaatagttatcatctatctatctagttaaatttgttagagagctctgctaaaattgtaaagttctaggtactactactatgttgagtatagagtataatgtgcacagaaactatttagtcttcaggattctaaaattcaaatatcatttcctggttattaaacccattaatccctacaaatgaagttcaagtgtatgttcaatatagtttcttgcgtgaagatgtttgtatgcccgaattcacttattaaaaacatgcctatttttattttatttttgtcactgaaaaacatgcctatttgtaataacatttaatatgtagacgatcaatctttttttagtttttctgaccgccattttctttattgctgctcaggcactgacaaagctagagtaccttgacatctgggg

SEQ ID NO: 3439 - DNA, 722 bp, Arabidopsis thaliana
  Intron number 1 from transcript AT4G24000.1 (locus AT4G240 00) derived from phytozome v7.0 (chr-ID Chr4; pos 12462701 to 12463422)
aagctgaaaatcttaaggtatgtatgtattagtttctttgttcctaactaatccaaattttagaaaaaacattgtttcaaaaagatacatttttaaagttttctatgcgttctaaattagttatggatgataaattatagatttcaacaaaaataatcaaatattcttggtttagatttatagaaagttgaatcacaaaaaactaagcattggttatcaaaattttaaatgttttttttaatatgtgggaaaaagtttaaaattagactagttatgatttaggaacatagggagtatttatcaactagtcacttttttctttctatttctaagtaaatatcatataaagaaaatggtttggatttatatgttgattaccatcaactaatcacgtataattaggtttaatacataggtcaacagaaatttacacataacagattaatagtcactgttgtcctttaaagccttacgacgttcttgtcgacaatcttaatggcgtttttgtcctttacgaccccaaaagtttgtgggagactgtgacatatacccatgatatttcctattcatttattgcagtacaatcatgacactttaatgatttcttctcctaaacgataggagtatgtattagttttcttaatgacagcagagaagtctttatttgttagaaagtttgaaacacccatgagaaaaagatatttaattgtgtggtggaacag

SEQ ID NO: 3440 - DNA, 475 bp, Arabidopsis thaliana
  Intron number 1 from transcript AT4G24060.1 (locus AT4G240 60) derived from phytozome v7.0 (chr-ID Chr4; pos 12503973 to 12504447)
gatacggctcagtggccacaggtactatacacaaacatttacatatttatatattcgtacaattcaatatgtatgtgttgatgtagtttagatcatctgatttatctatctactagatcttgacttagaattttaatgttttcggatcttcttctttttgatgttactcttctcttcaacagtttttagatcttctcctttaattttaaatatatggttttttttttcactttaccctttattaatttgctttttcttttatgtttttagttaaagcttctctcaaatatctcaattatcattttgatcttgatgaaaatccattaatttgttgatagacagtacatatatatgtcaattatgtcttctatacttgtatataggcaaaggtttttgtgctaacgtttggaagagatgtatttttttattttgatgatcaggagattgtagtgaagcccttggaagaaatagtaac

SEQ ID NO: 3441 - DNA, 740 bp, Arabidopsis thaliana
  Intron number 3 from transcript AT4G24440.2 (locus AT4G244 40) derived from phytozome v7.0 (chr-ID Chr4; pos 12633704 to 12634443)
tggagagccaagtgaagaccaaggtgtccatcaaggtgattttcagttcttttaatctcttagtcagcgtaattgggtagaagaaaatatccagttcgtgaattgggtggaagacgattaagagtttctaaactatcttgctctattcggttatcgttaagagtttctgtgagtaatgggttgaagctggatatcaaataatttagtgttaaaaagttcaacttgatagtaagatgtggattcagttatctgcctgataaggttattagatttgctagcacaggaaatactaacactgtcatggattcaatcaagttcatagtttctttggatgtcatatatgaataataggttgcagattcccattcctagagttaagtgtcaaccttagattaagctgtatggatttcagttatctggctaggagcttatatctgttttacctcaagaaatacttgcaattttatgaatactctcgagtgttgtagactcgtagtttatttgtctggacgttgtatgttcttttggaagctgactgatcaattgtttttggtgttcatcactaatctggatagtcaaaaattgagcttattctttgctccgaagacacttttttttaaaaaaatcatatctggatctcaaaataagagaaaactttggcagatgaaacaatcagattcttactatcgtttcttatttattatttcagggacacctgcacacttacaggttctgtgaca

SEQ ID NO: 3442 - DNA, 392 bp, Arabidopsis thaliana
  Intron number 1 from transcript AT4G24510.1 (locus AT4G245 10) derived from phytozome v7.0 (chr-ID Chr4; pos 12661341 to 12661732)
ctgatcttaccttctcgccactcgttttcctccaggtaaacacacatacacaaattttagtataatataatggattatttaagttcacatgcaacgaaaacggctgattctcccacgaacttagtttctttcttagttactaactatcaaacattcgtttcaaattctttccaatcattagcttaattaataattatgaaatgaatatttaatataaccgtggaacttgaagagaaaatattttttacatgtgaaattgattcttcactatatatgatcaggttagattctgtgtgtgtgtgtgtgtgtgttttttttttgtccaaatcaggctagctagagtaaactaaattttttactttgaaattcgtttttcagataactcagtttaa

SEQ ID NO: 3443 - DNA, 750 bp, Arabidopsis thaliana
  Intron number 2 from transcript AT4G24540.1 (locus AT4G245 40) derived from phytozome v7.0 (chr-ID Chr4; pos 12672749 to 12673498 reverse strand)
gccaccggaaagctcttcgagttctccagctcaaggtatattctatctttttgttagtagttgtcttatttttttcaatccatgtttgtgtttttgagaatatggttggataaatatattaagatatgtatttaaatgagatttttattttctcgtttactctctaaagttaattatcagtaggctcggagatctcatgtacggcataatttgatgacctaaattattatactttaaagtataggattgatgttttattacttttatgtataacacatcatgtatttaattccgtttaacataatatgggtttttaacgtgtaatttttcaatcattttcatttagactcatggttaagatttctgtactgggaaataagagagcagaatattatagtgtgatttttgttaattaggaaagcatatgtatatatggatacatagtacttaccacaattagaatgaatttcttttcccttttttcatttgactttgtgtattacaaaagtctttgacactgtcacttggtatgattggggattaattcttaaccactcgtttagtttatcttgggaagcattaccataattgggaaacgagtcatctgtctgtatcgtgatggctacttctgattacttttcttttattataaccaaaaaggcttctaatgtacttaattaattttacaaatgtaatatggacgaaggaaatgtttataagaaagatggattgtttgttgaaacgtgtaga

SEQ ID NO: 3444 - DNA, 468 bp, Arabidopsis thaliana
  Intron number 1 from transcript AT4G24560.1 (locus AT4G245 60) derived from phytozome v7.0 (chr-ID Chr4; pos 12683815 to 12684282 reverse strand)
actcgttgctctcgctgcaaagccgttcgatattggtatgcaaaaattctctcactttctccatgtccaaattacgttgtatgatcttagagttatgattgcatctgctgcactctctgctgagacgtgatgaattggagtgattagtaggcaaagaatataagttagttctgtaactttagcgatactggatcagagatttaagaaaattgacttctttttctatgttaacaaaattatgggtaattagttagcttgggaggaagtttagtatttgattcatggcttatctgtgagtaactaactatgtgctgctgaggaatttatttcaattagatagcttaagaaatgtactataatgtctatcaaattttcaaccttttccccttagcgcatgtgaaatttcgttacctacatatcttagtgatagttgtttcgtttttgttattttttttccagttccgggaa

SEQ ID NO: 3445 - DNA, 590 bp, Arabidopsis thaliana
  Intron number 2 from transcript AT4G24580.1 (locus AT4G245 80) derived from phytozome v7.0 (chr-ID Chr4; pos 12693412 to 12694001 reverse strand)
gaaacacagactcgcgttcccgtggtggcaacacggtaatttcttaatgagatatttatttgctttttgatcgaattgcctctgtaatggaacgcgaagcaggagaaattacttgttcacaatcccacttctgatctcgtttttggctacaattacctgcattttctgtcttctccattggtcattgttgcgcgatgatgagcattcatgtaatcattaggcatgtcctggttttctttcgagcaaatctcattccgatcgattaatggaaatatggaattgaattattgcatcattgacttaagacttgagagttttaccttttcaggttaaaccattatgcttgcttctaagttctaatgaaacacacaaaattctagtcactgttctcctacaaaaagtgttttttaaaagaagctaagatcttattgtatgaaaatgaaatgtccaatcatgtaaatgcaaatacaaataaacagtgaatgtgcttctgctgttgatttcatgatacaactctcatggaatttgtttttgtcgactctaattactctgtaggttttcaagagtggaccgctatctatatcttcaaa

SEQ ID NO: 3446 - DNA, 569 bp, Arabidopsis thaliana
  Intron number 1 from transcript AT4G24940.1 (locus AT4G249 40) derived from phytozome v7.0 (chr-ID Chr4; pos 12823724 to 12824292)
ctcagagaaggttactttctcatccccttgttcttttcaacactcaatcttgttttcacttttctaaatttaagtgcttttaagctgcatcatctcaattatgatttgagtcggctttgagtactaaactcttactatttggccattttaggagaatgcttaatggtcccttcttaaatgcggatttagatcattaaaattgtatttttttttgcttctcctccattcgattactttctcttggcttcagttttggtttttatttgtttgtctttgtcttaagagaattttagttaatacctattattggtttagcgtttggattctgcttctagactagtgcattcctaattatgagctcccttaggttgttctgagatgagagttttgttttttaactattaagattgatgtattcattcatattttgctttttgctgaagcttattttattgatacactacactaccatgtaattactctgtaagcttggcacgatttgatatagtgtgaggttggtgttttgccttgcagattgaccaaagctcatatcttggtatctggaatta

SEQ ID NO: 3447 - DNA, 795 bp, Arabidopsis thaliana
  Intron number 3 from transcript AT4G24972.1 (locus AT4G249 72) derived from phytozome v7.0 (chr-ID Chr4; pos 12838513 to 12839307)
ctgcttctctctcctggtactggtaaggggattttgatttttttagactccagttttacattttaccaaatcggtgattgattctctattgtgttgattttgttaaatttgtcttggttcctccattttcgttaagaacctcgtgaaatggtgaattgttgttttgtttgtttgtttgcatcagaacttctctctctgtggtctctctgtgaatgcacaacttcctgatgcgtttcgtcctttttgttttcacagcgtcgtcagtcttttgcacgtctgtgttttcttgcccctgcttttgtttctttgttcgttatacttttgtggacccacttaagagcctcatgacttatcttaagagtaaaaacaaataacatcatcttaagattgtgtgttttcaaacgtcgaattttaccttctgttgaatctctttcttcttattatgtgtatgaattagtaatatataaataattaaaattaggaagatttagttttgatgacttgttgactatttactggagaatgcatacatctgtatagcaatgcttaaacagctccctacttcatccagctgtcaaattaatactagtattctctttttttcattttatactccaatatttttttggttattccattaaatttttactagaaaatgtagttagagagaacgagtctttagcatatcctcttagcaatgtagctactaatatactgaaattcctctgttttgattgtgtgtgtgattgtttatataaaggaaaaacagaaaggagtgtagagccggagagaatt

SEQ ID NO: 3448 - DNA, 738 bp, Arabidopsis thaliana
  Intron number 3 from transcript AT4G24990.1 (locus AT4G249 90) derived from phytozome v7.0 (chr-ID Chr4; pos 12849994 to 12850731 reverse strand)
tgttgtacagccttctctagctaaatccaaaacaggtagttgtttgtctatgtgtaatgttcttcatgtcttttatatcagagaattcccgtttcatggagatatatgtgtccttagaggttcctcaatctttcattagtcttgtggtatttatcttgtcaactgtatggattatggtattcatttatctggctcaactttacgtcttataatatctagctctagtcatacttatattaattgaggctggtaagatttcgtaagagtgttcatgcacatcagaaagttagtcggtgactaagatcagtacattctttttctttctaacagcctatggtactgactcaatcaacctatcaggtgattagtggttttgtctaaatttggtttgtttgtcttgagagagagtaaaggataccctagaattcattcctaggtttctggtgtgttctttgtgtgaaataaagcaaaaatcagctctaagcttagcaaagcatgccatgaggaaaggaatacctgaattcattattggtcgtcatctccttgtaaaccccactgaaaacttttgccagtctttgagatttgtctgcataatttgttttttcacaaacttgagaaagtcgtggaaagtgagtttgtgattactaagacgtttgttgatgaaagctaactaacagttgaatactggtttttgattaaacagagaagaaggttgataaagcaccaaaggcagtaatc

SEQ ID NO: 3449 - DNA, 600 bp, Arabidopsis thaliana
  Intron number 1 from transcript AT4G25030.1 (locus AT4G250 30) derived from phytozome v7.0 (chr-ID Chr4; pos 12864736 to 12865335)
tatcgttcctcacacacgcctctcatctcttatccgtaagttttgtttctcttttctctattgatgtacccttttgcccatatttgtgcttgtgaactcgcatttgatcgtttatgctagatctggtttgggtttagtcgtttagatgctcgtcaagctccctttgaatcactagtgctcttagactcttatatttactgatttggaattttgtaattcaaaagtccgagtcttttgatgaacccccgtgccgaccacacgattgctttcaatttgggcttcttcttaattttggtgaactattgaggatttttgcaagtttctgtgtgaatcctagagtagaatgactcaaaaatgatttcttttgattcaattatatgcgattgttaatgtctttgaggttctatgatctggaattagattttggtattatcttagtatatcaaagcttagatgatgtttctttagcatgtaactactattgtccatataaattgcataactcatttaactttcgagcattctctgcgtctcgattacttatatggttcctttgtttgtttttgttcagattcttgtccttttttcagctcaacaaga

SEQ ID NO: 3450 - DNA, 584 bp, Arabidopsis thaliana
  Intron number 1 from transcript AT4G25160.1 (locus AT4G251 60) derived from phytozome v7.0 (chr-ID Chr4; pos 12906668 to 12907251 reverse strand)
tgggtttgactaaagtcgcatcctttatttaccaggtaggttcaatttctggttttcttgtttaactctatgccctgaagatggtccctttgattgacttgatcaatgtttcataacctttcgaattctctgcaattgcattgtgctcaaagttgacatttttattggaaagtttgagtttttttttttatctttataagaagctagctatttgttagcttcgatggtcgttgagtgttgttgctttacgatccttttggtcgtccaaattagactctgagacatttgactttcaacgctattaagagtatctcatgatcggtatacctccgttagattctgtcaatacttattattatttgccttttcggtttgatgagttgatattcaacattcagctatgtgagttcaaatataattactgtctgttgattcccactgactggagagttttagctttccctttctttcatgttatctctactttaggaacaaaacactctttttagaacattgttttgcagtgtctgaaatggttgtagtgtgcagggtcaatagaaacaagaacacaaaagattaacaat

SEQ ID NO: 3451 - DNA, 800 bp, Arabidopsis thaliana
  Intron number 3 from transcript AT4G25370.1 (locus AT4G253 70) derived from phytozome v7.0 (chr-ID Chr4; pos 12973291 to 12974090)
ggtattttagtcgaaggtttgtgattctgagacctatatttgcttcagctttgtgttttgccgcgtcttctagtttagattttgatttctaaggatcactatgttgctttggatatttatgctttgtcattgtgaaagcttgtattttagttttgagggattctgtacaataatgctggtgagattgtttcggctaagtgtgtgcttcagctcatctgagctttaactgaatccaagcattgcataagcaagagcttttatgattagttgtcctgtttcttaatcattaagttgatgctgtataagtcggttgtggaatgccttatgttggttgatagaggagaattgggtaacttaaccgtagaaagtataaactggaaactgaaaagtcttacattgagttgagagatctgtataagataatgctggtgaagatttctctgtcttgctttgtgctttagtccaccctcttaactgattccgagcataccttataagtacaggctgtgtttgttcctataaaacaaaatacatgtgaaataaggtaaccataaaaaactgtaactttattatattcagttgttgaatgcttatgcggtttgatcgagaggagagaactgggtggaatcatcagaaagaaagttttatctttgtgttttatacccttcttctttctgttattcaaaaggcatttatggtaaatcgttttggattatgtggtttactgacgtatattaagcttgtcatagttggttttgattttaggcactagcacagttgctaagttcctgagggggaat

SEQ ID NO: 3452 - DNA, 235 bp, Arabidopsis thaliana
  Intron number 1 from transcript AT4G25420.1 (locus AT4G254 20) derived from phytozome v7.0 (chr-ID Chr4; pos 12991640 to 12991874 reverse strand)
ggtttcagccatttgggtaaaagttaaaacagagcaaataatctaaaaaagaaagagatagagaaatcaaacatttaacatgtcttttgtcttttcctctgttttttttatatagaaaacgtcttaaaccaataaccggtttcttctataccgaccactgtaccgtaactgtagaagacttatgttaatgttggtttgtggttgcaggaaggtgtatcaagagtattgtgaagca

SEQ ID NO: 3453 - DNA, 349 bp, Arabidopsis thaliana
  Intron number 1 from transcript AT4G25610.1 (locus AT4G256 10) derived from phytozome v7.0 (chr-ID Chr4; pos 13063452 to 13063800)
ctccgcccgatctgttactgtttttttttttactggtacgtgatcggactaaccattctcttctcatgaacacacactaaatcgatttgaattcattccttcgtctatacatcactggtatttgattagatttcaaaccgcgaatactatgatttcaattccgatttttctctgttaggtggcttagtcatggaggaaattaggcatctgtctgtgttagtgattttgacgctatttgaatcgaatactgttgatttatatagttgcttaggggaagaatcggttcagtatataggtgctttgtttataggaatttgtgttttgtgaatgtatgttgcagtcgaattca

SEQ ID NO: 3454 - DNA, 389 bp, Arabidopsis thaliana
  Intron number 1 from transcript AT4G25670.2 (locus AT4G256 70) derived from phytozome v7.0 (chr-ID Chr4; pos 13085998 to 13086386 reverse strand)
tagaacaattgtgtctgcttggttggtggtctatctacaactgttagcttttacaagtttgaatgctattgttttggctttcagattttgatgttatggatttctgtgttactactcctctgcaacttgaaactaatcaagtaattgtcaatgcagaaaatgggcgagtctaaggggtgcgggaatgttggacgaatgatttcgaagaataagtctgcgaattcttataacctctctcttcagttgtctcctgttgtttctttctgggattgtattgtccgcaccatgaggtattcctatataccagagtgggtgtagttcttgagttcctctacaacatcatcgagtttagtgcagttttttagttagaaatttatagtcaagcaata

SEQ ID NO: 3455 - DNA, 906 bp, Arabidopsis thaliana
  Intron number 1 from transcript AT4G25670.1 (locus AT4G256 70) derived from phytozome v7.0 (chr-ID Chr4; pos 13085998 to 13086903 reverse strand)
ccatattgccgaggtttggatctaaatttcatcatcatctttgtttctccgtttatcttcaatttccctttatcttttcaatataattgacttatttcgttaaaagtctttttgattagcttcctcggatcttatgcttattcatggatcttagacctacataatggattaaatccgattgtttctcttattgttcttgttgaattgaggttaattttgatctgaaaattagtttctgcggcagatctggtgtctgtatttgtgtaatttgtatccattagtcttaattgagttattagctgaggattaagagagatcctgaaatttgccgtggaattaactctttctgtggatggatggataccctttgtattcttcaactttgctcctactctgggaaattagggtttgagtaatcattaggttttactctttggctgttgttgactatcttcaatctaattggtggctgattttgtttgacttctttaggacttttggtgtctttcgaggtcattagaacaattgtgtctgcttggttggtggtctatctacaactgttagcttttacaagtttgaatgctattgttttggctttcagattttgatgttatggatttctgtgttactactcctctgcaacttgaaactaatcaagtaattgtcaatgcagaaaatgggcgagtctaaggggtgcgggaatgttggacgaatgatttcgaagaataagtctgcgaattcttataacctctctcttcagttgtctcctgttgtttctttctgggattgtattgtccgcaccatgaggtattcctatataccagagtgggtgtagttcttgagttcctctacaacatcatcgagtttagtgcagttttttagttagaaatttatagtcaagcaata

SEQ ID NO: 3456 - DNA, 719 bp, Arabidopsis thaliana
  Intron number 1 from transcript AT4G25690.2 (locus AT4G256 90) derived from phytozome v7.0 (chr-ID Chr4; pos 13090997 to 13091715 reverse strand)
ccattttctagaggtttggatccaatttcatcatcttgttgatccgtttatcttcaatttccatagattttttctaattgaattgacttctttcgagaaaagtttttcgagcagtttcatttgttcatcagatttaatgcttaattatgggtttctgaggcagatctggtcactctcgattgattgcttctagtttgcatccattgaaatgatcaggcattagcttgtttgttgtatcttctatcttgtgttattgttgactgttgaaatcgttagttgatttatgtttgaccactttctttggacttggtgtctttttatgttccttgaataaagtggaatgttttgcaactacaattgttagcttctacaagtttgaatgctattgttttgactgttgctttaagattgatgttatgcacaaggcttatctgtttctcctttgcaactactataagctaatcaagtaatcgtcaatgcagaaaatgggagagtctacggggtgtgggaaaggaggactaatgattccaaatcataagtctgctaattcttataacctctcccttgagttgtctcttgttgactctgtttgggattgtaatgttcggaccatgaggtattcctatatacctgagtggttgtagtctttgaaatcctcttagacaacgagtttagtgcattttactttagttggaatcaaagagttatagcaagcaata

SEQ ID NO: 3457 - DNA, 921 bp, Arabidopsis thaliana
  Intron number 2 from transcript AT4G25850.1 (locus AT4G258 50) derived from phytozome v7.0 (chr-ID Chr4; pos 13144352 to 13145272)
ccgtacgcccaggatctgatctcaccaattttcaggtgacttttgttgaaataaatctactgttgtgttagaacgactatttgcgtgttttgtttttcctaaccaaacatattgatttgagtttttttttttaaaagacagaaaaaacaaacattaatttcttttgttattttattttatttgtgaagaacaaaagatgaagttcgtcttaggatttatgatatcaagtgttcttaatattttttagtatgtaaaattatcagtgaattgtgaatattttgcatgaaatagaaactgatacgatacatataattaagaagaatcttactatatatgatttattagtaaaaattccaacagtttataaagttatgctagcatgttgcataggtttcaaaattcatgttaactacccataagatatcagttacatgtattatagtattgatgttttgtattaatgctaaaaatatttggctcttgtgtttgttagtagcttagtattaattagtagtgttatctccgtaggtaggtacactatactatgcatgaaagtgaactgtgaaccctccaactattacttctctagatagagtattaaataactcgaaaaaaccttttttcattttatacaaacacccatttatttatatttttgaaatctatgagaggtattaactacgtactgtttaagtagtaaaattaatcataccatgtgcaactaagttttttgggtaaattatacaccacttgtaacttatacagatggtataatcaaactctataaaacagttgaacatttatatttcgtacaaatcaagtcattttccaattaatttatttagattatgatgtttagcttaattatttttcttcgatcgtaaagctgccacctcagctgaacctaccaagatcacaact

SEQ ID NO: 3458 - DNA, 906 bp, Arabidopsis thaliana
  Intron number 3 from transcript AT4G25960.1 (locus AT4G259 60) derived from phytozome v7.0 (chr-ID Chr4; pos 13178352 to 13179257)
ctctctccgagaaggtacatctcttaacccaaacaaaccggtatactgatttctttttcttttttttggttaagattttgtggtagctcaattactagatttgttacgaaaccagatactttttgtggtacccattcgtaaataaatgcattaggctttttttttttttaactatctatatatatacacaaataattatttgtttttgtgcaaatacctactaaaatctgttaattaatgcatggcctcggttgatcaaatctatagacatttttttttcaaccctataaatgatatttaggtcgttacatttaaaaatctcttacatgggtcgttttttatgcacatggcttgattaacccgttcagttttaatgtgaataacactaatggcttaatccaataatgttaaagatgattttctttttcttttcaacatttttttttttttgcattatcatttttcaaatttaataaagagatttttggcatgcatcgatctcttctcattactttcttttctaactatattctagatctctagttatattcgtcatttttctgagacactaataaagtgtagacaagtgtagatgcctttattttctttttatcttcggtccttgatgcaaaaataataaatgcattgtctttaattcggttatagctgcattgcattttgcatttataaggcggtcgagtttgatacgatttaattcatattttaatttttgacctatatttggttctttaatttacagatagctagccacaaaacagttaatcgcctaaattcaaaatttaaaatgtgatcacgcaaatccggttggtttatgataatttgtctggattactggtaaattttgtcgcaggtagggaatttcttgcactacataagccggttcat

SEQ ID NO: 3459 - DNA, 437 bp, Arabidopsis thaliana
  Intron number 1 from transcript AT4G26020.1 (locus AT4G260 20) derived from phytozome v7.0 (chr-ID Chr4; pos 13203564 to 13204000 reverse strand)
atttgcttctctccagtttcgatcaaatctacgaggtgattctctcttcctatctcttcttcttcttcttcgcttgctgcttccactattctggtttcgtttttcgataggagaaacctaaatctaattcgattacgattatctcgtcatctgaaatcaaatcgattcgctctccttctctaatcgaaccgaatgaattgagaaatctggaaattttgatcagctcatgttgtatttctctcaccggtagtttcagagatgatctggtattcagaaatttctaggctactggtactgcaaatccgtacagatttcgaattgattactcataagtttttgaaggattagtactgcttaattgaaggattagatcgctagaataatcggaacattcatagttcatttttgtttctctcaggattttaaaatcgggttga

SEQ ID NO: 3460 - DNA, 379 bp, Arabidopsis thaliana
  Intron number 2 from transcript AT4G26150.1 (locus AT4G261 50) derived from phytozome v7.0 (chr-ID Chr4; pos 13253917 to 13254295)
ctcctctttggagaagtggtccgagaggtcccaaggtattaatcacacgtctgttaattacacatatatgcgtaagcttttttttggttttaatgttaaaagtagatgcctaagtaatgtcatatatactcatattgattattagaagctcacgaagaatatgtctttttatagtactaattaatagcaaatgaaaagtaaatctacaaatctctaactggtaaaaacaatttcatgtagcattataagttggtttaaacagattaatctttgagatcttctaaaattcatgttacaagataattaactaaattatcatgttttttcttgttttgttattacagtctctttgtaacgcttgtggaataaggcaaaggaa

SEQ ID NO: 3461 - DNA, 674 bp, Arabidopsis thaliana
  Intron number 1 from transcript AT4G26390.1 (locus AT4G263 90) derived from phytozome v7.0 (chr-ID Chr4; pos 13342414 to 13343087)
ctcgacaccaaggtcaatcttataaaacttgtcatatgtgcatttttatgtctgtataacaatgccatcgaggcgttttcttttgatttgggctctgttcacgcatgattctgatcgtttctctatcattttacaagtgattcatgtcttatctgattggttattcccctgctgatctgaggacactcgttttggctatgtttaagtcctgtgaactttggtataatttgtggcatggtacgttgtttccagttcgagcatgaattagacaatatctgtggtacatgtttgctggttacagaaaccaaatggagaactgatgttgtttgttagaccagaatattaatacaaagttgatgcatcatggatgattagactcttacctttgtcgtcttgaaaatgaagattacaatctcattaaagtatttgcttcaaattctcactctctggtctgttacttggctttctggtaatgaaagttaataaaaatgtggaatgtataatgtggcttaaagttagctgagacactcttcttagtggtcttattgctaataatctcatgaacgtgatagatttatatgttttgggggacccttttggtttctgaataattatgggaatgatttttgtatttgtctggcagggaccagagattcgaaccgggttcttaaagg

SEQ ID NO: 3462 - DNA, 399 bp, Arabidopsis thaliana
  Intron number 1 from transcript AT4G26420.2 (locus AT4G264 20) derived from phytozome v7.0 (chr-ID Chr4; pos 13351616 to 13352014 reverse strand)
gctctctcaggtataaatgtatcatccattaattaattcaatatcttttgaatgaagtttactttataaacttgaaggtgatgaacatttgactatataatttaatttgtatcggccaaaaaatgatttgaagattactagactagtaaaactaaacaaaaagttaaattatcgtttcttctaatgttaatgaacaatatgtcaaaaaatttataaagttctattatgatattcttcaaaaacatttttgttccatgaccgaaccaacttaatttatataactgattattgttttaatgtatatatatcttatgggtacagaaatgtttcaatttacgttttttgttttttaaatgtttcatttctttgtattggatatgataggtacctgaaaaagtg

SEQ ID NO: 3463 - DNA, 373 bp, Arabidopsis thaliana
  Intron number 1 from transcript AT4G26510.1 (locus AT4G265 10) derived from phytozome v7.0 (chr-ID Chr4; pos 13384130 to 13384502)
acgacttatctcttttgaacgatctgttttttcatgtaagtacgatttcacctcgagatgatcgatcattgctcttctggttcttccatgtttgattaaatgttataacttgagggttttgtttcttttggattgttctcgcatttgttgatctatggttatcaaaagagtttggatttacagtttttggttgcagctgaaatttttcactcttttcttctctgttttgctggataaagttggatttgattcacattgttgtttagaatctagatgaagttgtaagattccttgtattgtgtttgcttatgcatgattgtgataaagatttaagttattttaccaatgtacaatgtccagaattgtcgtcggg

SEQ ID NO: 3464 - DNA, 431 bp, Arabidopsis thaliana
  Intron number 1 from transcript AT4G26510.2 (locus AT4G265 10) derived from phytozome v7.0 (chr-ID Chr4; pos 13384072 to 13384502)
tttccttagatccttgagagcaaaactgaatctgggtaattttaaaaatctcatttttacgacttatctcttttgaacgatctgttttttcatgtaagtacgatttcacctcgagatgatcgatcattgctcttctggttcttccatgtttgattaaatgttataacttgagggttttgtttcttttggattgttctcgcatttgttgatctatggttatcaaaagagtttggatttacagtttttggttgcagctgaaatttttcactcttttcttctctgttttgctggataaagttggatttgattcacattgttgtttagaatctagatgaagttgtaagattccttgtattgtgtttgcttatgcatgattgtgataaagatttaagttattttaccaatgtacaatgtccagaattgtcgtcggg

SEQ ID NO: 3465 - DNA, 844 bp, Arabidopsis thaliana
  Intron number 1 from transcript AT4G26570.2 (locus AT4G265 70) derived from phytozome v7.0 (chr-ID Chr4; pos 13410134 to 13410977 reverse strand)
agccgccgcaaggaaggctcatcatccgccgtggcgtaaggctttttcttcttctctttctcccttttctacgatttcgcggtcggtcgcttcctcgtaatctcgtgtgtttattccgggaaaatcgcgatgggaaacaagttaaaatttgagattgagaatcaagcaactaatttcttcgcaagctgatagatccatgagctgattaccaagtttatataacgagattcatcgttgttgtatctctgaatccgaacgatttggaatctaaaactcattggatcgctttttctcatatccgtcatttctccttagcttaatcacttctctgattcatatcgcgattagattcaggtgtcgatcctcagaggattatattttctgacgattaatccgtctggatagttttattatgttcttcatgatgcattttttttccccgcaaaattcatgatgcatttctgacgtgaaattgggtgtttttgattcctcattttatcctagttcatgtattttttggggctgtttcttagatttgggtttcgtgttttagcttaaagatagttcctaatccatgaatacattggttaatctggaaatgaatctggagttaagattaatgcataaagtttacgaccgtttataatatgcgtctcctctgtttgtgtttcatagtatctggtgctttagtctaattcagatctgatctgagaatgatgaatcttgtttgctcctgtcaattcttctttaactgttttgcaatttgatgagctaataactgactatatctcatttccttcccatcgcagaattttttgaggtgtacaaagcattgcctatttga

SEQ ID NO: 3466 - DNA, 440 bp, Arabidopsis thaliana
  Intron number 1 from transcript AT4G26670.1 (locus AT4G266 70) derived from phytozome v7.0 (chr-ID Chr4; pos 13452443 to 13452882)
ggctctatcttcggatgtgctcttcttctttctattttgtttcttctattgcttggttttatctgctattgctttactctctgatagtgaattgagaattactggcaaacaattgagtttgtactcttttcttcatttaagttgatttcaaaacatgtttcgtggataagggtttgagaaatcatagttgttttagcagactagccttttgagttattttcaggagtaatctagatttaggggattcaacattcctcaagtttggttatgttttgctcctggaagctatagaattgaattagcttagttttcattaaagagcgtcaatgtgataagattggctactgatttgattacgatgatggaattgtgaaatattatctcactatataagttgggattcaggttcaggattgttcaagaagaaaggcttcaaagga

SEQ ID NO: 3467 - DNA, 420 bp, Arabidopsis thaliana
  Intron number 1 from transcript AT4G26710.2 (locus AT4G267 10) derived from phytozome v7.0 (chr-ID Chr4; pos 13468768 to 13469187)
agaatctgcttcaacaaaggcccctccaccaatctgtatgtcaattttcattcctttttgcttcttctccctttgatttagtcatctttttgctgtctttgatccattgcttcgtcaaagttaataaagtgttcttcggtatcaattgagatcattatttatctctctgagcttagaaactattattggttgatgactttatatttgctcattgacttttgctaatttgtttttgaatttgttccttcctgtgatgggtttttttcaatgtaagcaactagtaccgtcacagttctaactcttgtgctggaaaaagtgttgatctttttccctttttttatcattgacttcttatgtacttgtttgtcttgtttctatgaaacaggttacatcttacattggtcatcaccgcaactgtct

SEQ ID NO: 3468 - DNA, 322 bp, Arabidopsis thaliana
  Intron number 1 from transcript AT4G26720.1 (locus AT4G267 20) derived from phytozome v7.0 (chr-ID Chr4; pos 13471703 to 13472024 reverse strand)
cccctgtcactgtaagttcttactttaccttacttctcgatctgggtttcggaattatgagcttattaatcaataaatctgaagaaaataggcgcggagattttgtgtctttataatttggattcgtaatgttgtatcaaatggtatatcattcctaggatccagtgaaagacttgtttttgtttcttgctattgttacaagtcaaaagatttcacgggcagtgaagttacagggttaagaagtgagagtagataccattgatgtttcttatgatttgcaagaattgctaatacttgtctttctttttccattgggatagtt

SEQ ID NO: 3469 - DNA, 303 bp, Arabidopsis thaliana
  Intron number 1 from transcript AT4G26780.1 (locus AT4G267 80) derived from phytozome v7.0 (chr-ID Chr4; pos 13486149 to 13486451 reverse strand)
ggtttcactccctagctcacgatttctcgcataaggttcgattttcactcaaattaatcactattcatgccgaaattgcaattcagggttttgttagggtttaaggctttccctcatttgagtttctagaaatgattgctatcttctgatactgtttccttgatctcttatgtttgaatcttcagatatatgaataaacaatagaagaatggtttagattctctataggtttttgctctgtatcatttcactgagtttaacccattttacttttttttttgggggcagcttgttccagctcag

SEQ ID NO: 3470 - DNA, 395 bp, Arabidopsis thaliana
  Intron number 1 from transcript AT4G27060.1 (locus AT4G270 60) derived from phytozome v7.0 (chr-ID Chr4; pos 13583988 to 13584382 reverse strand)
cttcccttttgccagttgtttcaagtctctctcaggtttgcccagaatccttataatctcctccttgtcatgctatagacagcaaatggaagaatatggtgaattttgaatatcagtgtcagtaagtagaacacaaagttttagtaaataacactgcttgaggttttagtcttaatccgacactttttctgttaggtgttgctgaagtttattgtttgatttgagcatacaagtctcagtgaaattttgaggggtttaatatctctctctctctttacttctggtagttcaatgctagtaggtttagtggttaaatctgtttatgaaaaagagaagtaaagagcaattactttgattcaggtgggagccattgcacctcagagcttggagtcatt

SEQ ID NO: 3471 - DNA, 743 bp, Arabidopsis thaliana
  Intron number 1 from transcript AT4G27130.1 (locus AT4G271 30) derived from phytozome v7.0 (chr-ID Chr4; pos 13605535 to 13606277 reverse strand)
ttatcagatccacgaaactctacttttcggatcaggtaaaatcttatcttcttctgattgcgtttgtcatcttcttaagcagatttcacaaattgcgttttgctatttctttgatttcggtaatttcgaggtgaagtttgttttcattgcccgatccatataattttggagtttgttgatttgttttcgttcgtcagattggtatatcgtctttcgtatgtccctgaagattgtacgctagcttttgtttaggatctgtcgaatttgctgctgactttagaaaattggatcttcctttgatctgctgtggattgatgtaatttgtttagatcatatcctgtaattgagctggacctgcttaactaggttcctgggactaggatacagaacatacaatttatttatgaagatggcatcttgctcatttcgaatcttatgttgcaaatgataattctggagttggtttcttagctgaggttttagtttccccatctggtttatatatcactaatctctagatgaacatggcttgtatttggattgtgtgttttatcttgctatgtgtattatgcgttccctgtgttctttaactgttttctaagaccttattaatacttattttgcttttctcgattgtggtgtagcacttgtttattatttgtttatgagtgtgccaaattcttatcctccgatggccttcatgttcaggtctcagcttctctatcgtttgcccctcagatcaa

SEQ ID NO: 3472 - DNA, 807 bp, Arabidopsis thaliana
  Intron number 2 from transcript AT4G27270.1 (locus AT4G272 70) derived from phytozome v7.0 (chr-ID Chr4; pos 13662018 to 13662824 reverse strand)
gtgttgaagccatactctggcaggtcagtgcttggtttactgctctttattgagctttcttactcattgtcaattttcatcagcacatctgattctaggatacaatgagagacagtttcaagtgactagatttctttgaaaatttaggtgttgaagttaaaaacttgttcttgtatctgaaagatagggaattacatttctagagttttctgttttactggaatatcttttagctgccaccattcttatgctattttagtgattcaacactactgacggatgatgactacttattataggctagaacttttggaaccaatgagagacatttatcttaacctgcattgtcttttcggcgtatcctattgtcttatctgcgttgaacaatgtgtgcttcactgagtttattttgctaagacgaatgtttgtttgactctctactccctgaaagaaagaagaaatacgctcttaattttgatttactatacattgtagctgccaacattcttgacagtattcgatgtctcgagctcctttattttgactagtcactacaagttatttcctttgtgttcagaaccaaaacaaaactatagtatcctattggcatattttaccataacctctacttttaatgtatatagtgttgctttcccttagtttatttacacaaaagggcatgttcctttattctgcatctattttctgccgtcagtgtttctgatcataagttacctgtaaagaatcattggaagaagtattgagctagcgtttgttcttgacaggtacccgaaacgctccaagaag

SEQ ID NO: 3473 - DNA, 876 bp, Arabidopsis thaliana
  Intron number 1 from transcript AT4G27350.1 (locus AT4G273 50) derived from phytozome v7.0 (chr-ID Chr4; pos 13691304 to 13692179 reverse strand)
ccgaagcgcctaggtttccttctccagccttccgggtgagttttcgtaacattgtaaactattcgattgttgtggtgattgtgatgatcttgatgtgaaggaattagatttaatggtagatttcagctcttgtttatgtgatttcaatgtaagtgtcttgttttgtttgagtgtcttctggtgctaaatatataggagaatattataggattccaagtgaagcttgtatctgattcttgcgccttgcctgcagattcaagagcatgttcttgtatctgactctgtgttaggaaaatgtgtcctatggtttgcagtgtcgcttgtccttgagtcttgtgaatgtttaatatagtaaatcaaagagttctctttaggtacagggctgtatccaggtcgctgatgctctttctctgtatcaaaatgatcattagacatttaggagtaatattgcttttagagggattttgtctctgctaaaaaagtggtcaatgtggttgctttctagatagttataggtatatatgacagggaatgtagttttatgaatgcagcaagcttctattgcattagaattagctacttttggtgaattgactaaacaacatctgtgataaatttttgttcgacgacatgttcttgttgattgtgtcataggattagctacctaactaaactttacttcaaccatgaattttctctgctcttgaactcaatgagttcttgactaaacagaacaatgtggctcactcttcttcattggctttgtcactctccacataagtggtgttttttgtcgaaattttcacatgtaatattaatcatttgtttctctctttaccaggcgactttccagagaccaacctcagagacactgca

SEQ ID NO: 3474 - DNA, 831 bp, Arabidopsis thaliana
  Intron number 2 from transcript AT4G27900.2 (locus AT4G279 00) derived from phytozome v7.0 (chr-ID Chr4; pos 13890964 to 13891794)
aagtttgtctttttgacttcacttcctctttttttgtcactgcatttgatttttttgattttgggtttcttgtctctgcttgacctttgatgaaattaagttgattgatgaagacaattggagtgtgaaggagatggaaaacactaattagtggatattagtggcaaagttttgtgctttaagtggttttcttgagaaaatttgtggtaactggaaatttgattcgatctatttgctgagctcacatctgttttggcttttaaaaattgggtctttctgggtagatgaaaagacggaatcttcttctgctgatgtttgatagaacaaaaaaaaaactcaactttatttttggttttgagaaaaagaagacctttttatatgtgttgtgattatgggatcatgggagtggcccttttctctttatagaagctgaacttagaacttaataagagtgtatcatacacgattgacaacaaacttttgtgtttatagactatcagattccgtgttctttgagaattgtgtttttcttttttcagttattcttttgctctgcttggggtttgtcgattcatagtgtcataatcttactttcattctccactatgactgtaagaaagaataaaaattccctttcgttttaccttttttgaacgaattcattttaaagagatctgtgtgtgtttgtgcataaaaccaaagaaactcattgtgtcttagtcaagttttgagttttgatcttgtggtttgtggttttggttgtctcttgttatgttttgctcatttttcttataattgtgatgcagaacaatcttgttgaggcaagtgagt

SEQ ID NO: 3475 - DNA, 537 bp, Arabidopsis thaliana
  Intron number 1 from transcript AT4G28100.1 (locus AT4G281 00) derived from phytozome v7.0 (chr-ID Chr4; pos 13965586 to 13966122 reverse strand)
cctcggtgctcttcaaaaggttcaatttttataacttaagttcaaatttttcgcattccgtcacattaaattttcattctttatgtccctagtccctacactaaggattcacagagcatttaatgaaatttttttcttatccttaaaagcataataaatgttttgatttcatttgcgtgaagtcttcttcagaatgttcaagtagctgtcactctctatccatgagtaacatgttcaccaaactcacaataacaaattttactgttaattttagggtttatgttgaaagagacacacacaagcacattgttggtttttctttggctatccttttaggttgcaaacaattggagatgtgctttttcagaaactttcttttttcgtatagacccaaagcactgcaacactctgaaacccttcactttcacacgcaatctttttgttttccattatattaatgaatcttgttttttgtttcaaattttgatgggtggatttacagctaaaggtaagaggaggaaacaagaagacaacaac

SEQ ID NO: 3476 - DNA, 473 bp, Arabidopsis thaliana
  Intron number 1 from transcript AT4G28600.1 (locus AT4G286 00) derived from phytozome v7.0 (chr-ID Chr4; pos 14129573 to 14130045)
ctctttttctcttcttctttctctgattctcaaaggtctcttctttatccctctctgtttcttgatcttccttattacttcaattgggtttgtgattcgatctgattttagggttttgaattgtttaatttgtcaatttcgattctgaaatttcgagcctttttggttactgtacttagttagaatccccaaagttctcgactttctcgcggattcactttttcttgagggggggtgagttcttaaagttgaaatgctgaaattattgtcactgttctttctcgaaatatgttcaatgatttttgagttctcggcgttagtttttaggaattggatacatcaagattttgatcatataatgttctgttatattttgcattatgtgaatatttcttatctgtttctgttatgtttgatccaaatcttaatatcattattgtctctgatgtcattttgaagatcattgagaagtt

SEQ ID NO: 3477 - DNA, 324 bp, Arabidopsis thaliana
  Intron number 3 from transcript AT4G28680.1 (locus AT4G286 80) derived from phytozome v7.0 (chr-ID Chr4; pos 14156040 to 14156363)
attgctacaactccccgaccattttctctccacaggttcgtcattattcattaatttgatctaattcttcttaaagattgaaagactttaccactattttaaatttacatatagatgacaatctacgttttcgtcactgtatcttagcgaccatacgtttttgtgaccacataaaattatatcaaattaatagagaatgcaattgggaccgtatatagtcaaaaaaaaaaggctgcataaaaaataaaaataaatagtaacaatatttgtacaagcgagcatttaattcaatgacttcataacaatgaatgataggaaaaggaa

SEQ ID NO: 3478 - DNA, 324 bp, Arabidopsis thaliana; identical to SEQ ID NO: 3477
  Intron number 4 from transcript AT4G28680.4 (locus AT4G286 80) derived from phytozome v7.0 (chr-ID Chr4; pos 14156040 to 14156363)

SEQ ID NO: 3479 - DNA, 358 bp, Arabidopsis thaliana
  Intron number 1 from transcript AT4G28840.1 (locus AT4G288 40) derived from phytozome v7.0 (chr-ID Chr4; pos 14241063 to 14241420)
atacctacccttcttatcatccctcaacttatcaggtacaaatttcactcacatatacatatctctatagatccatgtaaaaatagtctagtagtaattgttttttataaattttagaatttcatcaaaaaaactctggtttagaatctttctaccgtgacattaaggatgatttggatgcaattttctttttgatcgtgatagctaactgtatttttttttgtctgtgttttgagacgtaatgtctaaatcgaattgcagaatgatttagattcagcatgcgtttgtttcttcttgttgatcgaaatgagtaatatgaataagtttcgtgtatgtgaatgttgaataatgtaggagg

SEQ ID NO: 3480 - DNA, 366 bp, Arabidopsis thaliana
  Intron number 3 from transcript AT4G28850.1 (locus AT4G288 50) derived from phytozome v7.0 (chr-ID Chr4; pos 14245015 to 14245380)
aactataccatccattggaacccatccgaagttgtgtaagtaattaacttatggctatggcggtttcttaagtactttataaaaactccaaacaaatgctaagaaatggtactttctatcaatgaaataccacatcaaaaaaacttaagtaagattaaatgttacttagatagtttagtttgttactgtaaaacaacattaaagtacaaacacttcatgatgaatttttcttttagttccttaatgttttcgaaccttcaaaccaaaaaaactttaggaatctcaaacgattatatgtttttatttcctttctataaataaacgtgtcgcacaccatgttgtatatcttatataggtggttcgtcg

SEQ ID NO: 3481 - DNA, 500 bp, Arabidopsis thaliana
  Intron number 1 from transcript AT4G28910.2 (locus AT4G289 10) derived from phytozome v7.0 (chr-ID Chr4; pos 14266071 to 14266570 reverse strand)
tagggtttgttcgtcttcttcctcggtttcatcaggttttcatcttctcgattctgatttcggcttctgttttagctttattcggcttattgtgatttaatttgagctgatttggcattattgctgtgtagttaggggtcagggttttaatctgatcgcgtctaggttatgattcttttgatgatttcgatctttagaaagtcaattgatttgtttcttcgtatgtagctcgtttagctgacagatctgcatagtgtcttatcagttactagatctttgtgctatctctcactctgatttctggattttgattccttttttttttttgttagctgacatacaagtgtgagtgatgtgtgtctttgctttgtttccattttagtttagtttctcaaaatggaaatgatgaatattgggggttttcagaacctaagttgtagaaatggtctttttttgttatcacagaactcaaaaggtacttggtaggagcgagaagaaag

SEQ ID NO: 3482 - DNA, 813 bp, Arabidopsis thaliana
  Intron number 1 from transcript AT4G28910.1 (locus AT4G289 10) derived from phytozome v7.0 (chr-ID Chr4; pos 14265758 to 14266570 reverse strand)
tagggtttgttcgtcttcttcctcggtttcatcaggttttcatcttctcgattctgatttcggcttctgttttagctttattcggcttattgtgatttaatttgagctgatttggcattattgctgtgtagttaggggtcagggttttaatctgatcgcgtctaggttatgattcttttgatgatttcgatctttagaaagtcaattgatttgtttcttcgtatgtagctcgtttagctgacagatctgcatagtgtcttatcagttactagatctttgtgctatctctcactctgatttctggattttgattccttttttttttttgttagctgacatacaagtgtgagtgatgtgtgtctttgctttgtttccattttagtttagtttctcaaaatggaaatgatgaatattgggggttttcagaacctaagttgtagaaatggtctttttttgttatcacagaactcaaaaggtacttggtaggagcgagaagaaagtttctggagaattgctgaattgtttctttcaatggttttgtttctaaggtactatccgagtccaatgtttctgagagttctggtagcttgttaatttgttatactgaatactaggattgattttggcaaagcatgtgatgtttgttgcaagttcaagcagatgtgtttctttttataaatttagaagaagtttacttccgcagccatctatgattctcaaagttcttagctttgcgtttgattcttttttctagaaaccattggttagctttggataatgagtccttttctgcccatgatgtatttttctcag

SEQ ID NO: 3483 - DNA, 659 bp, Arabidopsis thaliana
  Intron number 1 from transcript AT4G29130.1 (locus AT4G291 30) derived from phytozome v7.0 (chr-ID Chr4; pos 14353967 to 14354625 reverse strand)
cttatcagctacgttgataatcttccttccgggtaatgttttctaattggattcaaattctgttgcttttcattgaaattttcaatctttgtcatattagaagatagaatatttctatctcctaatatgtcatccattcaatgttgttgattgtgtaatatggattacgttatgaaatgagtttcgtcctgatttggagatgtaattgcattgtctcttaatggtcaaaattgatcgattagataggattattgatctactgtttcagaatcagtgaatcttttggaatccagatcatgtcccactgaatcattgtctcattttcttataggttttgttgtatcacttcttgattttgtagatttgttttcatggatttgagagttattgcccttttgattaaggtttaatacatagttacattaaggcagacaatgacagtgatgtgaatatgatttgtctgaaaagtctgtccacagacatcacttttgtcttatggacttcgtgattagatggcatgatggcattgattatgttatattacgtagaacattttggtgcggtttcattttcgctttaatattgttagccaatgcggcaatgcgtctagtttcatgttgtaggtctgtcttacatttactaccattaatataacaggg

SEQ ID NO: 3484 - DNA, 819 bp, Arabidopsis thaliana
  Intron number 1 from transcript AT4G29200.1 (locus AT4G292 00) derived from phytozome v7.0 (chr-ID Chr4; pos 14399377 to 14400195 reverse strand)
atttgtgtaccaggtaagattcaacatctaaccattcaaacagctgcaagaatagtacaattcaattatcaaaataaactaacaatattagacgattaacaactgtatatattcatgcattgttttacatgtggatagttttataaaatgatttaacgattatttcaaaaaagatggcaaaaccatatcagattatttttcagtcaatcggccaattaataataatactaatcaaccaaaaatatttttaataatgatctagttaacacaaccttactaggcttttgtatggaccgaaaacttttctaattgggcccaatcacatcaacttttaaaaaaaaaaatctttctcgttcttttccatgatagtacacatctccagaaacccactaactaagtcgatttgtcaaatcatatttttaacgacaaaacttttaaaaggccttcaccgttaatttatgtcggaaggttttcaaaatatttcgtgtccaaagacgaaaacaatatcgtctaactttgctttactattagggagtcttcctaagtacgagtgaaaacaattatatcaatgattttgttttccatcaaatttttttcataatagcatatttacatcttcattcactaaaataaaagtgatgtgataatgaatttatgatggtattataccattggtaatttggtatatatatatatggataccattgtatatctaaaacgtcaattccaattcagagactctgtaccacaaaactaactaaagtaaaaactatttctctttcaggtccgattatcgaagctctctcatcgactactctt

SEQ ID NO: 3485 - DNA, 383 bp, Arabidopsis thaliana
  Intron number 1 from transcript AT4G29230.1 (locus AT4G292 30) derived from phytozome v7.0 (chr-ID Chr4; pos 14410429 to 14410811)
gtcctagctgcggccacaagctcgaaggcaaaccagtaagtaatattcctttttttttcttctatttgatttcagttcacttaaaaaataaattctttctaccttctttttctcatttttaggtcatttgtaaatgttttttaaagaaaaaaaaaagaaaaagaggaaaagaatcaatgaagaacatcaagaatgatgctctctgttttattctatcgcttgcagcaattcaaaatccaaattttaaagcgtctatatacgagtctttatttgtatagttgtatatacttatattctcttgttctttttctttatattaattaagtttttgttttcccctctttttagcaggattgggttggtttaccagcaggagtgaaatt

SEQ ID NO: 3486 - DNA, 480 bp, Arabidopsis thaliana
  Intron number 2 from transcript AT4G29230.1 (locus AT4G292 30) derived from phytozome v7.0 (chr-ID Chr4; pos 14410923 to 14411402)
cggcatttgctacactcatcccgagaaacttcctggtacatacacaccttcatgcagtccatatatcacattcttgatatatcttcattatatgattatttgataagactaatatacataatagagcattgtgtcacaccaaagtttgattttgttttagttgagtcacaccaaattttatatctcttatactttggtcacaactacactatatacatacctttttgtataacctatacatctatatatatacattcttcatgcatatcttatttataaattacacatgcatgtcttcattataatatatgattgcttgatatgactaccaacggagggtcaaaccaatgttttgatttttctttcttttcatttggtcataccaaagtttgaatctttttaatttgggttacacaagaaacatataaattaacaataaagagatttttcttttttcaacttttataggagtgactagag

SEQ ID NO: 3487 - DNA, 815 bp, Arabidopsis thaliana
  Intron number 1 from transcript AT4G29850.1 (locus AT4G298 50) derived from phytozome v7.0 (chr-ID Chr4; pos 14601905 to 14602719 reverse strand)
ggcttataatcgagttggcggtgatcgaggccacggtagcgatttcttcacctttcttacttattccacatttattgatccagtcttggagtagaaattgggaattcatgagagaatatgtgggacttatctttgctagtttgagagatttagaaaacagtaattgatttcagctagattgttttaggaatttttttagatttggtgaagttatgttataattttggtaattaagctgatagatatagattgcaagtgctctggttagctacggtggagtgtaatttcgtttcagcttggccttttgctctctgttttctggagatttggatgaatagacacaagttttccaaaggcatacgatttgatttcattgttagaatgattagtaaacttccgatagaaactagtatatgatgattctaagcttctcttatctgtgagataaaaaagggaaggatctccgttggattccattaactttttagatcactatcatcacatactgttattgatatatcccaattctgcttgtaacatagacatgagattcacttcaaattagctagtttgctcttcttcctctgggcttgtaattcattaatgcatttcatacatccccaatgcaatactgcaaagcgaaagcaagtatcagcattgtacttaaacttgatttcatttgatttgctgttttcttccgttttgccggaactacttctttctcatcattgcatcaatgacctatcattctctgtttgatatttttgatggtgaaaccagggattttcttcatcgtcctcgggtgtcttctgttc

SEQ ID NO: 3488 - DNA, 559 bp, Arabidopsis thaliana
  Intron number 1 from transcript AT4G30090.1 (locus AT4G300 90) derived from phytozome v7.0 (chr-ID Chr4; pos 14710926 to 14711484 reverse strand)
gcttaacgaactcaaatccaccgtctctgctcttcgtacggttcataacactcttacccttttcgatttgggcctagcttcccaggttttctttcaaaagtctgcaaatttagagcgttaatgtcaatgtaaaggtttagcctttttgaactttctctacgattagctgaattttgttttctgggtatttcttcagttttgtttatgaagaactgtagcgaatatgagaagaggtcttttgatatttgttgcatacctgcattgctttggaaaattctgtagaaatgagtgtaacggttcattgaattttgatatgaaatcgaatttttcttgtttttaacctttttgcaaaagagagacgtttcacattttcagctttcgttctgtttcgggaagattacttgtgtaacgtttgttacttttcaaagctgacgacgttttagtttttacaatagctgcatctttgatttggttgctaactattgagaggcttttttttttgtttctttgtgtgttgtttaaagaatcaatcatcaaggagaaaaaccaagaattgctt

SEQ ID NO: 3489 - DNA, 703 bp, Arabidopsis thaliana
  Intron number 1 from transcript AT4G30140.1 (locus AT4G301 40) derived from phytozome v7.0 (chr-ID Chr4; pos 14739631 to 14740333 reverse strand)
gtttagcaacggtcggaatattccagacgttatcggtaagttttcaatccggttttcttgatttaattagctgaatccattttttcttacgttattcgattgtcatatagccgaccatgatcgggttcttacagaaaaaaattataaagacagttgtccataatgtttaaactgtatatgcatgaatttatttttttcaaaaaaagaagtgaaggttaactttagaaaatacagcattttaaattttcttttctaacatcacttggatatggatgaacttctttttttttttttcaaaaaagtattcaaggttagaaaatacagcattttatattttctttctaaaatcaccaccaaaatcttaaaattctaaacatttccaaaactttgagaagaattcctaaaatttcagtcaaacttaattacattaatcatatattttagtatacttgaatccgatccaaaacaaacatatactttggtattaaaagagtataattatatttggaatgaaaattcattgttgtggagttcaacaatactaataaaaatatattttaaaagaaaattcaaagttatcagattaatattaattcaagcgtcttgtctcattattatttatttaatagttcatatatttaacaaagttgaactatttttacttttagctgaactagcgggtttcaataacccaattccacca

SEQ ID NO: 3490 - DNA, 562 bp, Arabidopsis thaliana
  Intron number 3 from transcript AT4G30990.2 (locus AT4G309 90) derived from phytozome v7.0 (chr-ID Chr4; pos 15084813 to 15085374)
gagggtatgtttgattttgttgccttggacctcttttttaaagtttcaatattttcttctggtcttggactgttgtaacctaagattaagaatcttcagtaaatcattgtagtctttagtaaaccgtgcttggttttagttttgcgttattaccggctagaagttgcggtggttgaaacatgagaaggaatggcaatgtttagtgatcgtgtgaacttgaaacccaaccttatggcttgtattgttcacatgatattgtaaagagattgccaattcgctagttcacctctgcactgaaaagaatgttggtactctctcttctcgttagtttgttctatagggaccagagaagcattctctctgaatatattgttgttgtctgatgcagcggctgcattgcatatgatatactagcagggctgttcctactttttctttgtatatatctaagtcttcctggtgctcgatcacgcttacacagacgtagtgagataataaatttggttcatttgattggttgagtgcaggaactgaataccgcagaagatttcattttgtttta

SEQ ID NO: 3491 - DNA, 505 bp, Arabidopsis thaliana
  Intron number 1 from transcript AT4G31240.1 (locus AT4G312 40) derived from phytozome v7.0 (chr-ID Chr4; pos 15178000 to 15178504 reverse strand)
tatcaaaggttataccaccatctctctggtatcaggtatgttaagttttgtttattacttttctcaacaggccatctgagacagttcatcgtctgtaaaccctgttataattggtctctgtttcagttttttaaagttgtatgttccttcaagttttgttctgggtttctgatgttttgtaactggtcttgatatgtatttctgtatgtttgatcatttcatgtgttcatgaagggatggaccttagtttttttttgatccagaataagaactcaggttttactgtagaactgtatagaacatctcagtcttcacaagtagtacttaactacaacacatatgctcatttctttagaagtctttcgagctggaattagcttgagccgttttggatatgtaatagcatgtactcgtacaataaggctaaggtacatgttcttgatgaagcatgttttctcatgttggtttaggtttctgatcagaagcagcttaaagagcatagtgg

SEQ ID NO: 3492 - DNA, 513 bp, Arabidopsis thaliana
  Intron number 1 from transcript AT4G31240.2 (locus AT4G312 40) derived from phytozome v7.0 (chr-ID Chr4; pos 15177988 to 15178500 reverse strand)
aaaggttataccaccatctctctggtatcaggtatgttaagttttgtttattacttttctcaacaggccatctgagacagttcatcgtctgtaaaccctgttataattggtctctgtttcagttttttaaagttgtatgttccttcaagttttgttctgggtttctgatgttttgtaactggtcttgatatgtatttctgtatgtttgatcatttcatgtgttcatgaagggatggaccttagtttttttttgatccagaataagaactcaggttttactgtagaactgtatagaacatctcagtcttcacaagtagtacttaactacaacacatatgctcatttctttagaagtctttcgagctggaattagcttgagccgttttggatatgtaatagcatgtactcgtacaataaggctaaggtacatgttcttgatgaagcatgttttctcatgttggtttaggtttctgatcagaagcagcttaaagagcatagtggtgttgcagttta

SEQ ID NO: 3493 - DNA, 487 bp, Arabidopsis thaliana
  Intron number 1 from transcript AT4G31250.1 (locus AT4G312 50) derived from phytozome v7.0 (chr-ID Chr4; pos 15180614 to 15181100 reverse strand)
aacatcactttcttctcaggtatgaatcatcatcatcatcaaatctgtttatttttctttgattaattatcatctgaacatctttcatattataatctgatgtatatatatatatatatatatatatatatatatatatactggcaacacacaacatttgtgaaaattttcctaaggactagactttatgtaattatcactattcatgggaaaatttgaacatattggtcttggagcctttggtgagtagtagtgagcacgttattaggcattaaattttgcatgtaataaaaaaaaatgtttgcatgtaaaagttacaatatgaaattttatttcttcttttgacaaaatatttgtggaaaatactctctttgaaatgattattagtgggcctattgataaatgggccatgtatgatgttaattaaataattcgtttgggccttaaaacaggtaacaaggggctgtgtggagcgccattgcttccg

SEQ ID NO: 3494 - DNA, 631 bp, Arabidopsis thaliana
  Intron number 1 from transcript AT4G31290.1 (locus AT4G312 90) derived from phytozome v7.0 (chr-ID Chr4; pos 15186220 to 15186850)
attgatttttctcttcacgaagatcgtgttccagggtaaagttttgatttttattcatcttactcattttggttaaagtagcttctgttctcagcgattttctctgtctcgtgtttatgtttattgtagttcaggaaatgttcttactgttctgtttgattatatgattattgcaccaaatctggctagaaaaagtcaatacctttttcccttctttctagaatttgggaacactgtttactagatttttgtctttgttccaaaagtttgttcattcatgtcatttacgggttataactgcaccaccattgctatggaacgcataacctacctagaaaatcttccttgcttttcaaaataaagaaagggagaagatttgattcttttatgaactctgagctgtcctgaagagaacccaatatttgagcttatctgtttacatttaaagaggaagtgacaatagaaacgctggtccatcgtgatttgtcttacttgtttagctcttgtcttgtctttactacatggtgcctttttctggcatttaccatccacaaaatcatgatttgtgtctaaatcttagattttgtctttttttttgtgtgtgtgtatgtacagcaattaactgcagaaa

SEQ ID NO: 3495 - DNA, 855 bp, Arabidopsis thaliana
  Intron number 1 from transcript AT4G31490.1 (locus AT4G314 90) derived from phytozome v7.0 (chr-ID Chr4; pos 15268605 to 15269459)
aaagctttgttactccgtggatctcctaccttgaggttcgtctctatctgttaaacttgcgactcagatttcgtagagatcgatcccacttttgcttttcctttgtgaaaatctacaatgttcaatattctctggcgttctttgcttgatctcgttgaatattgatccgatcccggtaggcaaacgattttcatgtttgtgcagctgagtgagactgcgaactatgtagattccattgtttgttcatcaaatctggggagatatattgcatttgtgatatgaactttggttgatccgaagcttttttattattcgattttatgttaatgttttggtcgtagttgtagtaaaagtgatgtgtattgctggatctgaggatttgaatttgtcaatgtcttgcatctttgggtcgttgattagacattaccgaatattcttcagcgattatgatgctttctcatataccgtggatttgagaacatagatgctttcttcattgtactgaaatatatgtagagaggtgtagattattattgctgagtagtattatggggatactctgaaacttcttgtttagaacttactcgagcagtgatgaagatactagtaaggtgcttatactaacttagtaattaaaagaaaattcttaaaattttggatatattgattgttacctgtgatctatactacttcattttatctttaaatcgattttcagtattttaggttcctattctctattcgctttgaatttcttatgttaacataggtacacttgttcttgcatgatttttccttttcatatgagctcacaattttattttatttttcactctttgtgcagcacctgaaaag

SEQ ID NO: 3496 - DNA, 299 bp, Arabidopsis thaliana
  Intron number 2 from transcript AT4G31760.1 (locus AT4G317 60) derived from phytozome v7.0 (chr-ID Chr4; pos 15368979 to 15369277 reverse strand)
tagttgcacttgctgctagagacgccgtcgaagctgtaacatttacttcactcccacttcacttcaatctatattgctctaatccggtttaaccaatcccaactgaaccgaaagcatacacatgaaatcgaaaaaaagaaacaaaccaattctgtatcattttcgcatagactacacaatgaaccaaatataaccggagttgtagatacattaaaccggttatccttattaaggtttgaatgtttttcttctttggcgggacaggcaggaggaccggtggttgagattccgacagggag

SEQ ID NO: 3497 - DNA, 974 bp, Arabidopsis thaliana
  Intron number 1 from transcript AT4G31820.1 (locus AT4G318 20) derived from phytozome v7.0 (chr-ID Chr4; pos 15392605 to 15393578 reverse strand)
gcaaattcgtcaagtaagcataattttattttgtttttatcttattttttaatttgatgggtcaaatgaatcttctactatttctgttctctgtgtttttgttctgttctctcttctcttttctattcatttatctccacatgtattgcctctgtttagttcttgtatgatttctagaaacatatgtcccatcttctcttggttcctatcttttttaacacaagctattaaaaacagatttcagtgacttccctgctaaattttcatttgctctatatgaacagagatagctaaacttggtcaagatttgcttaaacactgttacttgccagttaaaatactctggttttgatcttagagatagaaaaccaggataagtttgtcatcatcatcaccattattgtgattggtttctctcatcatattttttttgcgggaaatactagaaaagttacaagaaatggggtatatgagtttcaggagtggtccatccattagatgatctgtctttgtttatgtgttgttgttttgtggtcctgatttgtaagagcaaagagtggaaagcaaaagggaatgatgatgatgatgagttttcttctaatttagaaagtgaagaatctctctttacttttgttgcttatgctttgtttctctaaatatctaagacatctcttccaagttttgacctctggatattctaaactaggctaagaatctttgtttcctttgtcttgttttgtaagtgaattttaggcaacaattggacttttcttaggttgtgagttaaacttgataaacatgcatgtgcttatatggttttgaatgtaaacataacatctgaaatgtttaagaaaagagaaatgtctaattaatatgtaagagttctcgttgagctgattatgttcttagtttcaatgtttaatctggccattgatttctaccttgcaggtacgccgtttcagatcttgacagcg

SEQ ID NO: 3498 - DNA, 526 bp, Arabidopsis thaliana
  Intron number 1 from transcript AT4G31920.1 (locus AT4G319 20) derived from phytozome v7.0 (chr-ID Chr4; pos 15446149 to 15446674 reverse strand)
tctccagactttgcttcagcgctgccaatatcacggtttggttccttctctctctctctctttgtttttttttaataccaaatttcttgatgttttctagattttggatttggttaagctacaaaatttaacatcagattcgtttcttgtcataacaccataaatcgattcctctctagatttttatatttttgaagacgagcttgaagaatcaattaagactatattagctagattcactctctgcatatttttttacttttaaaaatccatgcttcagattttgttgcttcacttgtgtttcaaaggtcattggttcttgttcgttcgatttgaaacagtctcttgttctgtaaaaattgagactttggggaattattacatatttgattgctccccatgtgtcacagagccattggttcttgctttactacttttgaatgagtcaaaactgaaactttgtgggtgattattattattgtaatgtgcagttacaacaacgaatcaggcacagaccgcattggag

SEQ ID NO: 3499 - DNA, 280 bp, Arabidopsis thaliana
  Intron number 1 from transcript AT4G32000.2 (locus AT4G320 00) derived from phytozome v7.0 (chr-ID Chr4; pos 15476250 to 15476529 reverse strand)
gcttccttttctccaggtatctctctcttcctctatccatgcttatgtttttttttgtggattgatctgtgttttagtaaaccaatgaaaatctgacttttaattatatacgtaattgctatttttgagctgctgaatgagtgaattgctatcttctacgtatctctttatcagttattctgaaaattccttctcatctagatccctttgggataattcagaaattagatacagtgagaagattagctcaagcgtttgatttctgatttcagggatccac

SEQ ID NO: 3500 - DNA, 423 bp, Arabidopsis thaliana
  Intron number 1 from transcript AT4G32040.1 (locus AT4G320 40) derived from phytozome v7.0 (chr-ID Chr4; pos 15494638 to 15495060)
tggttgttgacaacaaggaacttgatcatttcgtaagtttcactttctaattttgcaaaattttaatgttttgaactgtgaacgattcagccatttatttctctttgattatctgagtatagcaaattcacatttttgtgtggctcattgttcccgcttctcgagtcttgcaatcgatatgatctttgcttctacttttttggttagcttgtaattcgaattatgaactttgtctgactcaaataagttatatttgttgcataaagcttcttctttgatgactaatagtttgtctgattcttgctgaaaaggactttgcatgtccaagagaaagaaagcataatctattttttgtaacgttctgtttgtatgtcttatggattggaatcttacctttgattattatgttgatgcagtcacatt

SEQ ID NO: 3501 - DNA, 519 bp, Arabidopsis thaliana
  Intron number 1 from transcript AT4G32210.1 (locus AT4G322 10) derived from phytozome v7.0 (chr-ID Chr4; pos 15557483 to 15558001 reverse strand)
acgtcgtctccgcgcctctttccgtttacaaatccgtatgtttttcactctcgttgattgcgtctttttggtggtattattgatagatcgagaaattttttgtgattcgtttagtttcgtctttcgacttcatgatttacccatctgagctctgcttcgcttcgccggaaattttcaggaaatgatatatatatatatccatttgcggattttggtgtgttatgtgtttaatcgtttcatttaaacaaaaatttgagatgagattgttgtgtaagtagacacatatctgtcgaaattaaccttaagaatttgtttccttttgattgattgagaaagcttgtagttgagtatagtgctaaaaggttgggatgaagaagagagtttagcttcatatcactgttgtagtttgagtgcctaacaatcattagaggttatggtcgttttgtttattgcatatgcgtagagaaattgttggttttgactgctcttgaaacgttcttgttttgcagcttgctggta

SEQ ID NO: 3502 - DNA, 550 bp, Arabidopsis thaliana
  Intron number 1 from transcript AT4G32410.1 (locus AT4G324 10) derived from phytozome v7.0 (chr-ID Chr4; pos 15645763 to 15646312 reverse strand)
gcggggtctgttcatcttccctttttcccatttttttgttattgtttttcgttcttacaatttttgatgtgtagatctcatctagatttctctgtttctaaatctcgtctcttttggatccataattggatcattgaaactcagatttcgcttcctttgactgtgtagttagttagtgtcagttgatcaagtaagtgtctgaaaatggaaacttttctgctccaattcttcaaattgttgtgatctatatcaattaatgccgcatctgttttcttaaaatctcttatggaaagtgtcggtggatttcagttcgttaacttttttaagctaaaatctttgactcttaaagtttagctttacttattgagatttagctcaactagatctcgttagttcccgccatgggatacagactgtgactcgccttaattcagatctgcattgattgttttgatttagatccttgctcatctctttctgtagtttctaatactcaatgactaacaatgatgcaatgttggtcaaagtgcagaccaaacctttgaagaat

SEQ ID NO: 3503 - DNA, 629 bp, Arabidopsis thaliana
  Intron number 1 from transcript AT4G32420.1 (locus AT4G324 20) derived from phytozome v7.0 (chr-ID Chr4; pos 15652122 to 15652750 reverse strand)
gtttttattctgtggctctgcgtgcgtattctcaggtaaaactctagcgattttccgacctgaatcttctttgtttctcttcagatgattgcactctcttgctggattttgatgttgaagcatcattttccactaatatgtacacttcactgatatgatcgttttagtgtatttgatggcctaagaattttcgtgaatttatttaccgtgaaacgtctaggtctatgctagtgctgagaagttgtgggcatgagattctatagaaattgtaagtttggatggatttgcttgacgattaatctccgtacacattgtttatttgatctttgtacattgttgagctcataaaaatctcatttttgcaacgacattgtcattaattgatgggtctagaagttttatagtttggaaggtcattattagacactgactgttgggtggtttaccagtttgcagctactgtgaagtatcctgtagtgtgggttttagttcttcagtgctctaataatttatgtctccgaagcgctattcttcaggactatttagatttctgagtctcctttgtgttttctgtgcattctctggatttttcaggtcataatttctggagatccacaggtcataatttc

SEQ ID NO: 3504 - DNA, 377 bp, Arabidopsis thaliana
  Intron number 2 from transcript AT4G32420.3 (locus AT4G324 20) derived from phytozome v7.0 (chr-ID Chr4; pos 15652122 to 15652498 reverse strand)
agattctatagaaattgtaagtttggatggatttgcttgacgattaatctccgtacacattgtttatttgatctttgtacattgttgagctcataaaaatctcatttttgcaacgacattgtcattaattgatgggtctagaagttttatagtttggaaggtcattattagacactgactgttgggtggtttaccagtttgcagctactgtgaagtatcctgtagtgtgggttttagttcttcagtgctctaataatttatgtctccgaagcgctattcttcaggactatttagatttctgagtctcctttgtgttttctgtgcattctctggatttttcaggtcataatttctggagatccacaggtcataatttc

SEQ ID NO: 3505 - DNA, 679 bp, Arabidopsis thaliana
  Intron number 1 from transcript AT4G32460.1 (locus AT4G324 60) derived from phytozome v7.0 (chr-ID Chr4; pos 15664137 to 15664815 reverse strand)
ctcgttcttctacgttgccttttgcttcagtaaatccctcgttctttatcttttccgtagaaatctcgcattttcgtatcttgtctatatactagccaaaccaacaaaagaaactcgtagtgagttccaacaatattctagtatttaagaaattcgtgttataaaaatttgtacagcttcttataacttgtgtgtccaaaattttgtttgtcgtcaaaataattcatttatattgcaccacaaatcatgaagaatgacctattagcttgacgaacatgttgaacactacgccgagacagatctgtaaatgcacatggtgtttagtcaatcgttttcaataaatgtgtcactaaattaccctcaccttcccatctgtaactaacctttttaatcatttaaatatttcatacttccaactttttattcaattattatacactgatcacttgtttattcatatacagatctaaaatagcaagattgagaatttgtttacctagaatcactgtcaattttaggtgactagatgcagttgaagttcaaatattattgtcagcaaatcactatcgtttaaatcaaatttcacaacaaatccctaactagttttgtttttgtaacttgattacattaacaaaacaaaacaggactactaccaaacggtgacttcgaactcggtcca

SEQ ID NO: 3506 - DNA, 539 bp, Arabidopsis thaliana
  Intron number 2 from transcript AT4G32540.1 (locus AT4G325 40) derived from phytozome v7.0 (chr-ID Chr4; pos 15701889 to 15702427)
attcaggtgagtgtaagtcttgaactatatctctttctatttatttattttattttctaatttagtgacaattttgcgtagccaagagcgggcaccttttagtaatttatttataaattataaatctgtatagcatacggaatcatattgtattactattagccaactttctaaaagaaccggtttatgttgaaactggtaactacaaaagaacttgtttttaaatgttactttgatgatttttatttctctttcttgccaatgtttttctagtcttaaagaatgttttcttgttcatggtgacagaaaaagttaatttttgtttgtagcattttctatttatgcttccgtaaaccaattttcttttcgtcgtcgtcatgattcccataacccatgtttccgacttactcgtttcttactttcttccttaacaaatactctatctaaatacatgacttgccaaacacttacacacatatagtcatatacatacctaatattagtgtgttgtcttttcttattgttaaaaaatgaagata

SEQ ID NO: 3507 - DNA, 779 bp, Arabidopsis thaliana
  Intron number 1 from transcript AT4G32551.1 (locus AT4G325 51) derived from phytozome v7.0 (chr-ID Chr4; pos 15707866 to 15708644)
tctcagaccaactgggaagctgataaaatgtgagttcttcttttttatgggttttgattcttgtaattgttctccttcctactaaaggtgttaacttttttgttgggttttagattctgagtgtttttaagtgatttctagggttcggattttataaacgcattgtttttctcgttccccggctacagtttgattttagggtttgtgttcagagttaagtttcaatattttgttgcttctacttgatctggattctgctgattttgtgggtttgcttattactaacttatcgcattttttatatttagttttctcctttattggcattcttgctttgttttgccgttagaggggggttgtgttactttgcgggtttctctagtttctattctcagaaagcatttctttgctagatttctgtggttggggggaactttttagttaggtaaattttgcatgttttggccaaagtttagttctttgtgttgtcagtcactgtcaaggagcttgtaattatttttttggatatttggtttatcgcattctggttgactcttgtggcatcatgtttcttttgttactgtcccaatttcactcttcctttttgtatgcaagtatgtgactttaagctccttcaagaaagtttcctgattttggtgtttttgctcataactggatggtttgtttatgggacattgttaagtaggaagttaagcccctgtttggcgagtgccctttgttggggttttaaagacaaatttttgaatgtaacaggttgg

SEQ ID NO: 3508 - DNA, 794 bp, Arabidopsis thaliana
  Intron number 1 from transcript AT4G32680.1 (locus AT4G326 80) derived from phytozome v7.0 (chr-ID Chr4; pos 15764070 to 15764863 reverse strand)
ccctcgcgatcagattcttaaagctcaagaaatcggtactctttcgctctctctttctctagggaatattgtcatccttggattgtttgtgtgtgtaagaatttgagcgacacaatcgaattttacttactctattgggtgaaaggataatcaaattggcttctttgatcagattttatgtgtgtttggctcgtttcagagtggaattcatgtgtgttaagaacccggcttgaaccattggatgtttgaaatagggcaaatttgtagagaagaataggacaacgcattatctacatttttatcttttagtttattttgtcctctgagtatagtagttaatgggcagtgaagctgttaaatccagatttcaacttggaacctacttgtcttaagctgaaattagatattatgaacctgatttcactgttctctacttttgcttaagtcacctcgccccttgaaattttctttgccattctgtgaaattctttataggtgtggttcaaccacagtcaagtgtttggaaagcttattatgttgtgtgtttttgaaatttgcttgccttgtattgtgtcacaaagtttggaaggaaaagattgctacgctgcttgattggagccaataaatcttaaggcgttgtatatattcacaatcagtgggttcttagtggtggtggaaaaacccattgattgtgaatgttctttttggcgtttcttgaagctaacctttgctgattttgatgatccttggttgtgaaattgcagctttcacaagtcaccaggacaacatctctg

SEQ ID NO: 3509 - DNA, 601 bp, Arabidopsis thaliana
  Intron number 1 from transcript AT4G32840.1 (locus AT4G328 40) derived from phytozome v7.0 (chr-ID Chr4; pos 15847635 to 15848235 reverse strand)
ttcctcatttgagcgattacattctcgatctccccgtactacttcctctctctatctctatacgattccatcgattattctttgaaatcgacattttcatggatcggtggttatacgatttacgaatttgatattgttgccgatttggtggttcgtgtatagcaaatgcaaaagttgtgtttgtataattggtttcgcctatttttagcctatatgttgattcggactgttgatgagatcctggtctctatcagggagagaattacataaatatttatattcgtattagtgcatacaaatgtgaaatgttaaatcaatgtcaacgtggaaattgattggtgcacatatgcttactcgtcaccgaatgtttgattagatctattaatcacttactattttctaaatttgatgctaatgtaatgaggttcttatacatgtagagtaatggaagaattggattgtaaattagtcttgccatggagaaaaaaaaaagctttttggttcatatttcaaatcatgctatagcttcgtttcattttatactttattcacttttgctgataccttctctaacagacttatccaaacccgttgcaatcaa

SEQ ID NO: 3510 - DNA, 987 bp, Arabidopsis thaliana
  Intron number 1 from transcript AT4G33120.1 (locus AT4G331 20) derived from phytozome v7.0 (chr-ID Chr4; pos 15976913 to 15977899 reverse strand)
caactctccgatctcctccgttttgttgactgtaagtgacactgaaacatatatagttgctccttttcaacatctagattttatttatttatttgagattatagtttacaaagctattatagagaactagcagattttattaattttgctttggtgttattgagtgattattatgacgatttttaaacatctggtgtgtgtgttgcaagttgttacacttacacatacatagtttgtgtagggttttgactgtatacacttaacatgacgtttttaccatctccaatgtctatttctctattttttcttactttagagtcgattatattttaaaggtattttactttaagatcatctctaatagttgtttctattttcttctaaatatattaaaaaataaggatctttattttagaaataaaaatatagataagttgaactgaaataaatacaaaaatatagtataaagataaaaatagagttgaaaatactctaatatatgttttaaaatagagtttactctaaaatagaggagaaagataatgtatatctctataaagtaatctaatgtctctcctctattttaaaagaaattatatattagaaatttacattaaagcaaaaaatatctaaaatatagttaattctaaaatagaaaaacatatagagatgaacattagagatgctcttagcgccgcacaactgtgaaacaaaaagtagtttagagatattgttgtcgagtgatccacgaaaacaaaatttcttcttcttttaatatatttgtataatttttaaaaaattagatgtcagtttttttgggttaattggatctccggtctctaagcctctaagactaattcaaatgaaaaatatatacatttggataattagaacattttatagtttgtcacataatataatttgcaaaatgtaaagaaatgttttataaatgtcttgtgaatgatgtatacttcagctctaaagaag

SEQ ID NO: 3511 - DNA, 394 bp, Arabidopsis thaliana
  Intron number 1 from transcript AT4G33260.1 (locus AT4G332 60) derived from phytozome v7.0 (chr-ID Chr4; pos 16042753 to 16043146 reverse strand)
aacactttcttcccagaaaaaattccaaggaaaatgtaagtatccttcttcaatcattcagatttgacctgtttccgtactctgttgagaatcaggattcgaattgtgtgggtgctctttaatttttcagattcaataccatgtttatgatacagaattagtgttttgattaacaacttgttcatctgaatccaaaattgtttgacccatatcattgatgaatctttattcagatactgtatgaacgaattgttggttttgttataagaaaaatcatgtctttccaattgattgattgtttcttgcataaattggatttgtgatatcgaatgaattgtactgatttgcttttatcttctaccagctggacaggttcataccgaatagatcagcg

SEQ ID NO: 3512 - DNA, 450 bp, Arabidopsis thaliana
  Intron number 1 from transcript AT4G33270.1 (locus AT4G332 70) derived from phytozome v7.0 (chr-ID Chr4; pos 16046077 to 16046526 reverse strand)
aacactttcttcccaggaaaccttctaaggaaaacgtaagtctaattctgtcattaagaattagggtttcgatttgccggtgctctttattagttttcatcagaatcgattatcattataggattcagttcttctatttaaaaattagggttttcattagctggttaattcgtcaggatcgttaaaagtgattcctttctgacaaattagggatttcgatttgtgggttgttcttctttttgcattaacatttgtctgtcccataaacttccccttgatttggatactagattaaacaattgttgattctgttggttaagaaaaatcatgtcttttcaattgattggttgtttcttgcatagatttgatttgtgatattgaatacgttgtactgattgccttgcttttctcttccaccagctggacaggttcataccgaacagatcagcg

SEQ ID NO: 3513 - DNA, 795 bp, Arabidopsis thaliana
  Intron number 1 from transcript AT4G33770.1 (locus AT4G337 70) derived from phytozome v7.0 (chr-ID Chr4; pos 16195169 to 16195963 reverse strand)
agtttcttgcagcccaagcttgaacttcttgctaggtaaccaataacaaacccaaaatgcttctttggagttataaagttttgatttttcattgcaaagtttccaaatttgttgaacaatcttttttggttctgctttttctttcctgagagacgactgttcctttgttggcgtttaaacataaccgacaaactcttttctactttcaaaaagatctttaggactttgacattttcttccagatttggttcttgtttccttactcttgttttggtacctattattggtttgcctgattctatgaggaccattgccacttgccatgtcttgtcacctgccatgtttttgtccttaatcggctcttttgcttagggttaggcttacactagtatactctacttgtggtatcaggatgtttctatgggaatattccttgtgtaatccttttggattagtctctattgaggtttgactctggcttttaaaaaataaaatacttagatgttttgccttttctgtggcttggaaatcttcttcaaccacatgggtgtttttgttaaagcaatcactggttctacttaatatgtcatcttctagaatgtctctaataggtcagagagaacatttcttattggtttagtttgacgtctggtctctgttttgcttctttctaatcaacccatagctttcattctttttcttctttcagcagtgttttcaagaaaatgctagtaatactttttgtgtctgtcaatttcaggagaaaaggcattttctttgtcgccatcgatttga

SEQ ID NO: 3514 - DNA, 350 bp, Arabidopsis thaliana
  Intron number 1 from transcript AT4G33950.1 (locus AT4G339 50) derived from phytozome v7.0 (chr-ID Chr4; pos 16272500 to 16272849)
ttgttgctgttaaatatatcgagagaggtgagaaggtcagtttattttcttcttgttttttctccttagtccaattttattttatgtttcaattcactaggttcttgaattcaaaagaaatcatttttgtgtgttcatcatccaatgagagatgtgtgtttggttactttatggttatgaatggtttaaccctatagatttacaaaattgattgatttttatggaagaccaaatttgctctgctttgctttatgacttatgttgtatagtgttgttttaaaggctctaggtgtttcttttgttatggaacgtggtattaatggtgggactttttgtatttgtacagatag

SEQ ID NO: 3515 - DNA, 307 bp, Arabidopsis thaliana
  Intron number 1 from transcript AT4G33950.2 (locus AT4G339 50) derived from phytozome v7.0 (chr-ID Chr4; pos 16272497 to 16272803)
agcttgttgctgttaaatatatcgagagaggtgagaaggtcagtttattttcttcttgttttttctccttagtccaattttattttatgtttcaattcactaggttcttgaattcaaaagaaatcatttttgtgtgttcatcatccaatgagagatgtgtgtttggttactttatggttatgaatggtttaaccctatagatttacaaaattgattgatttttatggaagaccaaatttgctctgctttgctttatgacttatgttgtatagtgttgttttaaaggctctaggtgtttcttttgtta

SEQ ID NO: 3516 - DNA, 560 bp, Arabidopsis thaliana
  Intron number 1 from transcript AT4G34000.3 (locus AT4G340 00) derived from phytozome v7.0 (chr-ID Chr4; pos 16295435 to 16295994)
ttttccatttccaaagaaaaaaaataaattcgaaggtcaggaaaattaacaaaaaacttcctttttttttttgttagtttgtgtgactgagctgcttcattttttttctttctttttttttttggtttgatgaatcgatttttgttgtctattactgattggttttcttgttcagattcactgattcgaagagaatcatgatttttttttcccgctgaataataagcatatgattgggtgttttggagatttgtttactgattaaaaggagattcctttccattttcaccatttgctctgtttgacttcattgtgcttatatttcatttagatcttttgtttgggtttagctttggaactgataaaaatctgattttgtctcacggctttggatttggttcttaaattttggtactttaaaactggataaagatcagtgcttttttagattcttcgtttgttgatgaatttatggatgtatgtataattaaaccataatctctctgcttgtttgttttcttataggtaaatatccagaagcttgatcctcctagttgtac

SEQ ID NO: 3517 - DNA, 307 bp, Arabidopsis thaliana
  Intron number 1 from transcript AT4G34200.1 (locus AT4G342 00) derived from phytozome v7.0 (chr-ID Chr4; pos 16375714 to 16376020 reverse strand)
cgtctgttaaggctggttagttcctttttgattcattgcctcaatttcatactttccatatgttgcgaaatatttattgattatgttctttctatacctgtgattgatggcttgttgtgtttattaatttgtatcatgagctttccttttcctgtactgttgttgacgatggtgaaatttaggatcgttacatttgctgattcttttgaaattgagttttgatcattcttgtctgttatctagctgacttgtggatcttggttttaataataccattgtaatgcaggagagtggaagaggaacaagt

SEQ ID NO: 3518 - DNA, 510 bp, Arabidopsis thaliana
  Intron number 1 from transcript AT4G34280.1 (locus AT4G342 80) derived from phytozome v7.0 (chr-ID Chr4; pos 16407087 to 16407596)
gctacgctcactgaaatagcaacccttgaggagaagtgagttttttcttttcaccttctatttctatgtgtatatcttatctactcttttgaaattaagacagaaaagttagagatgtgttcgtaggattgggtttttgtctgaaagactgaaactttgtaaataccttttcttaaaattgatgagtttggaggaacggtttcagtaaattaggttgtgtttcgattctgttgtttttgtcggtgttcttcgtgagaatttgtctgaatttctgcatcttcctttgattgaggattgttttttgattctgttctatagcttttgctcttaaggaatcaaagaaggcaagtttttttgtcaagtcatggctttttttctgtttcggggtgcttattaatttgtttaattctgggttatttagttataatgtgtgctaagtgattcctctactagtattcaagttaatggatttgattcatctttggttttaggtatatcgaattgtgcaag

SEQ ID NO: 3519 - DNA, 483 bp, Arabidopsis thaliana
  Intron number 1 from transcript AT4G34430.1 (locus AT4G344 30) derived from phytozome v7.0 (chr-ID Chr4; pos 16461505 to 16461987)
tggtgcctaatcattgcggttcgttcgttcttcttcttcttcctgtttttggttgagactaaatgcaaaatattgatttcgttttacatttgttactgttttgctttgcaaattttgaaactttatgtggagagactttccaaagtaggcaaagtaaagaactttaggtagtctaggatttatgtatcacttcgtctggaaacaaggagagatttggaattgggtttggttctagaaatcatcatatggcggatcaaagtagaatgtgcatgctcattttatctagtagaatctcattggaaaaaacttaggctatgaactgatgctcctagtccttttcttgtggtaatatgatatctaagttagattttgagttgttggtattgttgatttttcacaacttctcaccctcgcatttatgataaaaaggagttgtttttaatttgggttcctgtacttcaaattctttgaaggttggttttc

SEQ ID NO: 3520 - DNA, 553 bp, Arabidopsis thaliana
  Intron number 1 from transcript AT4G34860.1 (locus AT4G348 60) derived from phytozome v7.0 (chr-ID Chr4; pos 16612034 to 16612586 reverse strand)
tcttctttctcttcatccgacgctggattcataaggttcgtgatctatctacgtcttcctctggttatgaacgttacggttgatgaagttatttttcctgctttgctttcaccggatctctccgcgtgctttagcttgacgagagttttgtttccgatcgtttctgtgcgtgatatcgttaaaaccgagtcgaaatctctccggtttgttttcttgttctttgtgattacatggaatccgacgtttcgatgttcaatttctgttgttcgtgaagtttctctgttgtttgtgttctgatttgatccggtttacattaatcttgtatagaacagtcttgaaggaaggtttgattacatttttcaactgaggatgcccaatccagtttgtctataacctgtttacacgtttgatcatgacattgttttggtgttgttttccttcaatttcttagtgaattatagaagacctctgttctgtattgcgagctaaatggatctgattgatttgtggaaatgcagggcattgataattggacttgttggttaagatttga

SEQ ID NO: 3521 - DNA, 385 bp, Arabidopsis thaliana
  Intron number 1 from transcript AT4G34860.2 (locus AT4G348 60) derived from phytozome v7.0 (chr-ID Chr4; pos 16612034 to 16612418 reverse strand)
cgtgatatcgttaaaaccgagtcgaaatctctccggtttgttttcttgttctttgtgattacatggaatccgacgtttcgatgttcaatttctgttgttcgtgaagtttctctgttgtttgtgttctgatttgatccggtttacattaatcttgtatagaacagtcttgaaggaaggtttgattacatttttcaactgaggatgcccaatccagtttgtctataacctgtttacacgtttgatcatgacattgttttggtgttgttttccttcaatttcttagtgaattatagaagacctctgttctgtattgcgagctaaatggatctgattgatttgtggaaatgcagggcattgataattggacttgttggttaagatttga

SEQ ID NO: 3522 - DNA, 601 bp, Arabidopsis thaliana
  Intron number 1 from transcript AT4G35080.2 (locus AT4G350 80) derived from phytozome v7.0 (chr-ID Chr4; pos 16698655 to 16699255)
cacggatcgcgacgtcggcttctgagcagcgaaaggtattcaatttcacgttttgttcagtggtaattagaaatctctggatgcttacgtcgatgcttactaaatgtttcaatttccacattttcgtatagttttggggacgagcttggcttacattagatttggggtttatgggttttaatggggtttgattttattcaggaaacatatgaaaagtttgtatatagtttgctcgagaagaagattccaagaattacaaaaagttccaattttgtagggttacatatgttactatccatcagtctctagaatcatggaatcatgttctctctgttttaggattcgggagctaattcgatattgttgacattgaacttgctttttcatgttagatattgatagtccctaatttcaagctccacacttgttggaacaatagaactcaaatcaatctagtttcttttttgtttgattagtctgtgtgttggaattgtgcttgttcgctgtcctcttatgtagtctcatggatgtttaccagatcaatatatatctgtgtttctttgcagacgttatctactggaaccgttatactaatctctgc

SEQ ID NO: 3523 - DNA, 551 bp, Arabidopsis thaliana
  Intron number 2 from transcript AT4G35150.1 (locus AT4G351 50) derived from phytozome v7.0 (chr-ID Chr4; pos 16727237 to 16727787 reverse strand)
attctattccggcaagcgacgctgttatcatcaaggttaaatctatttccataatcttatcttcttttgatttaactattaaaattaagaagaaattgttttagcgtatttcttttttacaactttcatttagtgttcaaaaacaaactgatacgagactctactcgataaaattactctttaaaataattatgatatttcacacacataaaaaacatgaataaagtatcgtacgaaaaatgatttggatgtataacaaaacattgaaaatgttggatgttcaaatctcagttctcttttatttcctaccagcttgcaagaaaaaaaaacatgaataatttagatacgacaccaaagtagcgaatcaattgatagaaattaatgtgtacaaccactatcaagtacccaagaaataaagcaaccactactaaaaacatggagaaatgctcataaagtcatttcaggacttgacgtaagtggtctaatacgtaaaatgtgatacttgaatgggtgcagtgggtgttacacgattggggagacaaagattgcat

SEQ ID NO: 3524 - DNA, 741 bp, Arabidopsis thaliana
  Intron number 1 from transcript AT4G35160.1 (locus AT4G351 60) derived from phytozome v7.0 (chr-ID Chr4; pos 16731278 to 16732018 reverse strand)
attctattccggcttgcgacgccattttcatcaaggttaaattcatttccatactcttattttcttttgattaataataatattcactatgattactttttttcttcttcttacaacttccatttagtgttcaaaacaaattttacataaatgaaaagattaaaaaaatatcactaaaaatctagttttattctttcttacaactttaattcgtgttcaaaatcaaatttcacataaaagacaagaaaaaaatgaattaatgttataaactaacttttttttcttaattctaattaagttgatttgttgccgtaaaaacatttttgtttttgtcaataattgtcgagcttaattactgtttctaaaatccgactttttaaaaattttgtacagacaaaaggaattgaaaatatttggatgttgacttcagtatttattttctaccctcttccattaaaacattaaacatgaatagtttagatatgacatattaaagtagcgagcgaatcaactgagagcaagttaacaatcactatcaagtatcaaataaataaagcaaccactactaatttccccagatattattaaccaatacagtacacataagagagatctttaatatattaaaaacaaggaaaattgaacagaatctcactttaaggatttgttttgctaatacaaaaaatgtaaaaaatgaatggcgcagtgggtgttacacgattggggagacaaagattgcat

SEQ ID NO: 3525 - DNA, 491 bp, Arabidopsis thaliana
  Intron number 1 from transcript AT4G35500.1 (locus AT4G355 00) derived from phytozome v7.0 (chr-ID Chr4; pos 16857623 to 16858113)
ccaccgtttggcttgcctacgatacgctcacctctgtacgcatctctcttcttttcccatttcttcgattgttttgttgctttgatcgtaattcttcattttgacatcaaccattcattggtttcatttttcatctggcctctgatctctgacatatcgagattgaatcacatttcaatggcactgttgcaagctaaagactcgtcctttatatacaatacgcatctgttactcttagaagtccaatagattttagtgcaagatcattgcttcatgtgatgatgattctgattttgatattgttggattatagccctagatttggcactgtactagtagtctcctctagtttaccagatttgttagctcaaaatggattgcgtattaaatggttatagaatctttaatcataggaaggtaactgtcaccctataaagtatatcctaagaatgttttgctttgtatgtttttatgtctcttgttgtagactt

SEQ ID NO: 3526 - DNA, 508 bp, Arabidopsis thaliana
  Intron number 1 from transcript AT4G35510.1 (locus AT4G355 10) derived from phytozome v7.0 (chr-ID Chr4; pos 16861714 to 16862221 reverse strand)
ctacgacaattcaacactctaaaggacacgccaaggtaaaaccgaatttgcttgttctgttgttcatcgtgttatactctctttttttaaaatttgttttatacatgtgatttatgattcttcttctttcaatgctgtgtgattcctattattcatcgatcaccttatgatcgagtaattcagctcttcttgtcaaaaatttctgcttttaaattatgtaatttttgggatgcttatttgatttatgggtttgaaggatcgattcatgttattgcttaaaatatcgatctttattgaaaacggaattggttttttggactcttgtaatctgaaatgattcagctgctgactcctcgtgatgtattttactctgatttgttgttccatagtgttatcatcgagctgatctcatccataattcgaattccgatccattttaatccgatattaagacacaacaacttcgtgttcttgtttctcagatttaggtttttagcttgattcaaaa

SEQ ID NO: 3527 - DNA, 660 bp, Arabidopsis thaliana
  Intron number 2 from transcript AT4G35600.1 (locus AT4G356 00) derived from phytozome v7.0 (chr-ID Chr4; pos 16896939 to 16897598)
attctgagagtgttcaaggatttgcagagtggcgtgtaagattctttatctcttaattccaaaactacttttttgcgattttgacttcttcttttgttggaaaacaaaaaaaactagcccaattatttacgtaattcgatcaagatgaaagaagagttgactatttcaatcaagaaacgacttctacagaataatttaagaattataaagataatttgttttaataaacagatgatgttttctcctatgataacaatttttacatcaaattataactttttgaaattgaagacctcgtttttttccatttgaagatacttttccattgtctgctattgaattcggtgtagctaggaactttccgttgttaccggacttttgagttggggacacgttggtacatgttattagctcataacattgtagtcaaagtataattcattataatgtaatataattaatttaaaattagtaaaaggttattagaaagtcaacattatttctctgttgcctcgtattggatgcaaatctggattctttcattgagtttattgtatgtcttaattagcagaatagattaatccttcaagttatataggctaaatttgagttttatggctttgtttgttttttggacagtcagaagttaacttcttggga

SEQ ID NO: 3528 - DNA, 339 bp, Arabidopsis thaliana
  Intron number 1 from transcript AT4G35730.1 (locus AT4G357 30) derived from phytozome v7.0 (chr-ID Chr4; pos 16931171 to 16931509)
tctctcttccgtcgtggctttaactcctctaagtactcaattttatttgatttgatgcttcttagattcctaaattcactcaatctgctacactgcgaagaaaaatcttgtattgaatgttttttccgtgtttgattttgggaagttggaaaaagttaggtttttttagtgtgttgatgcttcttagttctgggtattctcagtttcttaattttgtagaaaaaaacaaaaactttgatctgtgtttgagaaatttccgatctgggcttttctaagatgtaagtatctgattaaagtctgtttttttttcaatcggcaaaaagcaaaacggcggcgaag

SEQ ID NO: 3529 - DNA, 476 bp, Arabidopsis thaliana
  Intron number 1 from transcript AT4G35860.2 (locus AT4G358 60) derived from phytozome v7.0 (chr-ID Chr4; pos 16988096 to 16988571 reverse strand)
gacgccccatcaaactccaaatttgggacaccgtacgcttcctctctcttctcttggtcgtaattaggtcatcagggaactaatcacgttttatcgattaggattgttttttttttctccctaaggcaggatgtgattaagaagattaattgtcataatcaattcaatttcttcgtttttatataaacaatgcctcattagaattgccaataccaaaaattatgtttgaaaatcatgtccagagactcaaagtggggtaaaatttcaaaaaagttaatcattgcacggttcttgattaagtttcataggcttattgtaatagaagctgagttcaccagtgcattccttgttgtgatttcttctggtcaatagttcttccattagatgatgtatgtgttggagttgtgctttctgattaaagtttcgtatgatattttttaggctggacaagaatcttttagatccatcaccagatc

SEQ ID NO: 3530 - DNA, 376 bp, Arabidopsis thaliana
  Intron number 1 from transcript AT4G36260.1 (locus AT4G362 60) derived from phytozome v7.0 (chr-ID Chr4; pos 17156101 to 17156476 reverse strand)
atcctcctcttctcgcttgccatcccactcagcaggttttttttttttatgtctttataaacaatttgatatccagacaacttcatatattcgaaccatatgtttttgttagaagaaacacgaatttttcaacacaaaaatatatgtgagtttaattttcctttcactacttgcacaaattttgtttactttaaaaatacaacattctatatttatttttaatcaaatttcagtgtgaaaaaatgtttgataaaaaacatttaaatgttgtgttctgttttgaagtgaaacataacattaaaacataaacgtaatcttgtgtttatggacgttgattaatgtgtataattgtgtatatatgtttttagggttagaa

SEQ ID NO: 3531 - DNA, 709 bp, Arabidopsis thaliana
  Intron number 1 from transcript AT4G36570.1 (locus AT4G365 70) derived from phytozome v7.0 (chr-ID Chr4; pos 17254895 to 17255603)
aacaaccactgaaagcattaaaggaactccaaaaggtaaacagaatatcacaacaattatccataagaaagcattcataaataatagacatgcactctccagtttcttatgcgtgtcttcttgtttcaccaggccagagaaaaaaaaaatctagctttatgatatagtaaacaccaccgtttcccatatctatgaactgtcccaacttctaactgtggggccaaaagcaatctagtaacagagaattcaaaagttagttttgtcaagttcttgaaattgatcattagcccattagctctatatatatatataaaaagtcatagacgcaaaaagccatttcctggtgaaaagatgaaaagcttccatccatctttttatatgtcttttagcaaacaaaaatcaaagtcccacatagtgataggctgatagcatgttccatgtttcttgtctttaccattgcaaaaactactccacttacatagatagtattttgcccccaaaaaacaaaaacataaatagtataacgtaacccccttctctactaacttttggttagcctatagttaaagttcagaattattaaaattgctaaatttgtgtaacaagattatctagctgatttcttcattttgatatctacatctttttagtcttttgaagtagttaactcatctggattttatgtcttgcaggctctactgaagtggac

SEQ ID NO: 3532 - DNA, 596 bp, Arabidopsis thaliana
  Intron number 1 from transcript AT4G36650.2 (locus AT4G366 50) derived from phytozome v7.0 (chr-ID Chr4; pos 17284385 to 17284980 reverse strand)
ctattagggaggctcaagaacctagaactcttcaggtaattagagaacctatttcattacaagttttaatggcagatttagctacttagtctcaattacttgaagttacattgctagatgaattgtttatgttagaaaactagttcgttctcatcgttttgagttgaaagaagttgtgactatatggttgattctggataaattatcattgtagtttcttgaacagctaccatcgttttcgaattgaagaactatgaccagtctatgctaggtttctaaagcttgtgtgtttgcttgaaggaattaagcttccatgttggtgtactttatcttaatcaataactgttcttatcatttgtctcagttgtttgatgatatttttgacatgttttgttcgtaaattagcttttagatggatatcgtatcgtagaatacagaattatcttttctagaggcagattttgttacaaccaaatgtggaccatcacttatgaacttatacaggagcagcacttctttcagtttattattgagacttgatttgtgtctaatgtatttgtcttactttgcacaataggaaatctccattgcagcca

SEQ ID NO: 3533 - DNA, 480 bp, Arabidopsis thaliana
  Intron number 2 from transcript AT4G36720.1 (locus AT4G367 20) derived from phytozome v7.0 (chr-ID Chr4; pos 17308144 to 17308623)
ccacttagttccaatatcgtacttcgtacagcgtgagttttttttattgtaaggtgaagaaagccatatagttgctagaatcaatggtacaggtagacgaatgaattggaggaatgatttgattggtgagattgtgatctgattgagtgattctcattacatgtgaagcaatggggtagggagggagtttttttttttttttttttttttgttgacatagttattaacttagccgagtggacaagggttctattctacttgttgtgatactttagggtatcttttggacaagggtcaatctattgttggggaatctggattctttttgttttatccgagtttttggttattttctctattagaaggtgttatagctgtagttgactaaaggattcggttataaaggacacgtttgtgtggtatgtctgaaacttgtttcctgcagctgctccattggcatcggtttgcctgtgtactcta

SEQ ID NO: 3534 - DNA, 650 bp, Arabidopsis thaliana
  Intron number 1 from transcript AT4G37280.1 (locus AT4G372 80) derived from phytozome v7.0 (chr-ID Chr4; pos 17548595 to 17549244 reverse strand)
gtcctcgcgtctacggagccaaggcaaataaaaaacctctctctctctctctctttctctgtgcatcgtcagatgttcgcataatttgaattctagagattatcttgttcgtgttaatttagcaattcttgtatttcacgtgggttttggttgtatccgactacggaattaactggtttcattgaattgagatctctctgctagatttggcttaggggtttcttggtagatttcggtttcaagttacgacgatccgaaagatgaacccattgagattggattcgagttttctttttttggtaatggattcatgtagcattagagctttttagattggaatgatcataaatgcttagtcgtaatagatgcaaaagaataattcacttgccgttggagcaaggaattcaataaattactcggaaaatagggcaagctaatctacttgcatgtttattttttcaatcatatattatataggtcactggattgagtctcattcatatcaaatgtgtgtcgttgttatgctaaatcttcatagttttgaaaaaaatctgttattgcatagtgttttcagtgtgtgggcagacctgatagattattgacattccattacaggttcaaaaggtcgagcttcggaaaaaggagtggaa

SEQ ID NO: 3535 - DNA, 602 bp, Arabidopsis thaliana
  Intron number 1 from transcript AT4G37400.1 (locus AT4G374 00) derived from phytozome v7.0 (chr-ID Chr4; pos 17584963 to 17585564)
ctggtaagatatacgagtttatgcaaattagtgttggtagtacatataagggatctagggctgttcaattagttaggttcattcagttttttttttggttttcagatcttctgtttttttggtcaacttcagatcttgtggttcacaaatatagaaaccggttgggttttaaaagttttataatttggatttgaagtttttcgcaaaatatatctttaattattttttatattaggtagttagctaggtacagctatgaaatgtaaaaccgaataggtctatttacttttattccatttaggggcatctattgatttgatttaagattagttttacagaattggtggtatctatagaccacaccataccggaattggtcttgaaaagttatttcttaggatttgggacccatgcggctgtctatagtacggacaataatttattcttaaaaagtagaaacaattctgactattcctagtttcctaattcctactatgtagaaactattctgacccattttttcaaaatcgatatatcaatatggtttcacatttatacggttctagtttaacaagatttgttaattatgcgtaaaacagggc

SEQ ID NO: 3536 - DNA, 691 bp, Arabidopsis thaliana
  Intron number 1 from transcript AT4G37409.1 (locus AT4G374 09) derived from phytozome v7.0 (chr-ID Chr4; pos 17591660 to 17592350 reverse strand)
tgtagccggagtgtctcggatactacgttttggaggtaaggaaggtttgctatgtctgattcttcgatcaaacggtcttgtccgattatctcgtcgatctctaattttactttgtccaaaacttttgggtggttcaacaaactcgccatcgcccactctattgtcaaagcggaggtctctgatgaggcaaccattataccctgtttcatgtatcataagtgagaaaacagaggattttaaaacgtgattcatgctagtctcacatacacgtacaaatttcattaaatatcatagatttgtttaactgctccaaaacgaatacccttaaaactatactaaaacattgtatctgaaatttgaaataatagtggaaataacttatcttttcaacccaaataaaccagacctaaaatcgagtgcataaaaaaaaaaagcaagaaaccaattagaagctcaacttttataaaaatctttgtataactagtaaatataattttatatttttaaaaatccttagagacataactacctttgtagcctaaggttttgtatagtaatgatgttgctgttcattctattgaaggtacgttgttttaaaaatacatatgaatgtttttgattcgttaccagcattaagcctttgataatgatgtcagtgtagtactcagggtcgtcctgttgcaaagagagc

SEQ ID NO: 3537 - DNA, 983 bp, Arabidopsis thaliana
  Intron number 2 from transcript AT4G37970.1 (locus AT4G379 70) derived from phytozome v7.0 (chr-ID Chr4; pos 17849951 to 17850933)
gcattcctctatttaccctttggttcctgggtacgcaaattctttttctttcaataacattaactttcataaattttcagttatgttcaaaataattatatgatcattgtgtcgcttacattatagtactcccagtaatttttgtttctatttgatgtttaagattatatctacaagtttgaccactctagaattcacatggcaattataaacaatgtagattttgatcccgaaaaactcgagtcaagaaaatcgaacttttgcttatggttatttaaatacccaaggattaggtatatattggtgaaatgaagttaacatatgtttcatgaaatattaaaaacaaggagttgtttggtaaaatgcttaattattagagatcaaaatataactgagtggaagtaaatgtggcaaattcttgtttgtccactgtttatagtggagcacttacttagttcttttctttcggctaaattaaatatacagttgaataaaaacacatttaggcagatttattactctcaaataagttctgcaaaaaaatgagagcactcaccgttcattattaccatcattacttaaagttgactattgttagtttccactctctttttttttttttttttttttttttttttttttctgttttgacaaatgatttctcatatagtgacttgtcttttttggttaaaataatataactttattatattataggtaaatccacgaacacacagatcaatataagtgcaacacaaactaaatacatggggcactctttttatattgtttcaagttcaaatgtataaaagttttaaaatattttttaatataaataagataagataaacattaattattacttttattttgttattaatgctagttacattgccagattaatgttagaaatactatattaacgtatggttacgttgtttagtacagtcacgagattattggagaagtgagtgaaataggga

SEQ ID NO: 3538 - DNA, 452 bp, Arabidopsis thaliana
  Intron number 1 from transcript AT4G38030.1 (locus AT4G380 30) derived from phytozome v7.0 (chr-ID Chr4; pos 17866228 to 17866679 reverse strand)
cttcttcttccactctccttttccaagccgacaaggtcagttttttttttctttttttcttcacaagttgcgatgaaacacatatccacatatacgttgtatgtgcacaaaattcacatgtttctcgattctcatacatatttcattggtgtttttagctagcaattgtgatgactctcgtatgagtttgaagtaattctagattttgacataaaatttttgattatcaacaagggaaaaaaaacttcttgatgcatataaaattaagaagtttgtttttaggatcataacgtgtgtattaattaacttgtaacaatcgatcttgttttttagaaacaaacttcaactccctctctttgccttacaattaatttaattataagtgtgcgttttcagtattcaatgcattggctttatttatgcgtaattattaaaattgtacaggaacttag

SEQ ID NO: 3539 - DNA, 442 bp, Arabidopsis thaliana
  Intron number 1 from transcript AT4G38340.1 (locus AT4G383 40) derived from phytozome v7.0 (chr-ID Chr4; pos 17954861 to 17955302)
acattacatattctctctgtcttttacatttttttgtgtgtatatattgttcttgttatctttgatatataatatttgtaactggccgatatatgtaatggattagatagattcagatgaggtcggctccaaatccatccatcaaacatttataaaaaaaacaagctatggggtttgaccttgtgggcaattgggtttttattttagctgctgacttatcccattttggcagctcttctgtttgacataatataataaaaagggagggagtcgttggcgtttgatattgaacaaccaaggaaggagagcctatcaaaccacatgcttgcatcatctcttttagccaactctgcctcataattactttctataggaggccaagctttccttcttctttctctatttgtctgatcagtttggttcatcaaatcccttttctccc

SEQ ID NO: 3540 - DNA, 443 bp, Arabidopsis thaliana
  Intron number 1 from transcript AT4G38660.2 (locus AT4G386 60) derived from phytozome v7.0 (chr-ID Chr4; pos 18066705 to 18067147 reverse strand)
gattatacggtgacgttttgcccttcttcccctaggtaaatacttactgattataatattatccattttttaagttccacaattgctgcgttgctttggctttgaaaaattgaaacttttagtatgtgttaatgggtttcgtaataattaatcttaagattttgggtttgtgttttttgtcgttggaaaagccaaagtttgtgtttatcttcttttcataaaccatcattttatagagtcaaaagattctctttgttttgtcaataacgagtaatttaatcgagaaagtttgtagcaattttgtttcaagaatgacaaaaaataccaaactagtttgaaaacgcaagttgaaagatttgacattgcagtcattttgattagtgtttgaatcattttgtgtatatacagtcaaaaatcgactagctactcccctccagtgacag

SEQ ID NO: 3541 - DNA, 490 bp, Arabidopsis thaliana
  Intron number 2 from transcript AT4G38670.2 (locus AT4G386 70) derived from phytozome v7.0 (chr-ID Chr4; pos 18069921 to 18070410 reverse strand)
tacttcatcatcttctgtccgccaccgtatacaaggtgagatattgaccgttttgcccctctgttcgctttggaatatgctagggatgtttcttgttatttagtatatgagcaggaatctaatctgagccacactgttgattattatggactttagctaacgtagttactcgttatgatttgtagtcttttagatcatatgatcatcttctataagcatttgattaagattgtagtgtctactagaagcatttggtatgattataaatgattgtaaaggtctactataagcatttggtatgagaaagtagtgttgattaaaagggttttgttttaatggttggaaaagcgggtagcaacagttggattgagttcgacaaatatagattgaagtgctccattgttataaatgtacttaggtgtaatgagcttagtaagttgttgactatgagttttgttttgcagcgagaagcttttaggatcgaggaaag

SEQ ID NO: 3542 - DNA, 576 bp, Arabidopsis thaliana
  Intron number 3 from transcript AT4G38760.1 (locus AT4G387 60) derived from phytozome v7.0 (chr-ID Chr4; pos 18094883 to 18095458 reverse strand)
tagctcaagaactaactcaagaattcattgacgttagtagcttacgtgtctcagcttctttttggaattttcagtcttcattcttgcatataaatcaatgttttgttgtatgggtagaatcttgtgaaggtgatgatctatgagttagaattcacaagtttttttaaatatatttgtttcctgttttttggttagaagatttcttttgaatattccgattgttgttcatgatataaattcttagaaagaactcaagaaatactctttcagtatgctatcattctttttctgtaatttgttacttatgtattatggagcttttcgctatcatggccatatcaataacataaaaggaccagctttatctacttttgattctctatagtaagttctatagctcattatagtgtaagctctgtagctcctgtcctacgtatatatttgccaatgactttattatgtaagcagttttcaacccttttctcttcagctttcttgctaacacttttgctgtccttctattctaatgttattcttgaagatactgcttcagtattacatacagcgccagtgcct

SEQ ID NO: 3543 - DNA, 407 bp, Arabidopsis thaliana
  Intron number 1 from transcript AT4G39000.1 (locus AT4G390 00) derived from phytozome v7.0 (chr-ID Chr4; pos 18173015 to 18173421 reverse strand)
ccgtttcacaactccctaatcgcattttcgtccacgtacgtcttaactcttaacccatcgtcgttttagtgtaatcgtgcatttggttttcaccatctatggacacaatagttatagtataatatatatatatatatatatatattttgtatattcactaatacataccggtatcaagaatttgtttcaccaattttgtcataataggacaggaatcaaattggatatcttccctgacaagataacaatatgtgttgattagtttcttcttctgtaattattctttttacgagaccacgatttttaatggaaaatattaagaatatctttttattatgtacacaccaacaacacaagattaatattgtataggtcggtgaagtacaaccggaccacgattgttggga

SEQ ID NO: 3544 - DNA, 690 bp, Arabidopsis thaliana
  Intron number 1 from transcript AT4G39070.1 (locus AT4G390 70) derived from phytozome v7.0 (chr-ID Chr4; pos 18205569 to 18206258 reverse strand)
ctcctctttgtgatatttgcggggtacgtaacaacaaaatttaacacttctctctttttttttgcctttcttgatagaattataatcttcacttggaaaatttgtgagcttttagatatgttatagtattgatggaaatctggtttcatgaacggatgtttcgggtgacctgagtcactttttttttcttctttctttccgagatttgtttgttggttggtgagaaaatgattatttggcaacaagtttacttcctttcctagcaaatttgaggtttcacacaatttttgacgaggaattttatggccacgaccaaatattacttttctcaaaaagagaacagagattgagcttaccaaacaccttggtgatttatttggttacacactaatcaaacttaagatattaaccaattaaatcgagttattagttattacgatattaaaatactttcttctttgggaaggtaagccgtggagaaaaggatatttctttttgctgttcattaaataaaataaaacaataaaatggaatgttttttgtttgaaaaggtcaaatctagcagataagtatgttttaaaatagatggatacaaaacaagagtcttcttgattatctattattaaatggtactaaacctttatacatatgacaggagaggcgtgcattattattttgccaagaagacag

SEQ ID NO: 3545 - DNA, 635 bp, Arabidopsis thaliana
  Intron number 3 from transcript AT4G39100.1 (locus AT4G391 00) derived from phytozome v7.0 (chr-ID Chr4; pos 18218719 to 18219353 reverse strand)
cgaggagtgttctgagtggtaagtgttcacttatttgaaactctgttttaatcttcttgagtcacaatctggaattgctcgtatgtttttcgtgtatccatgaggtcctagttgatatgctattgaggttgcttgagatgaatgcttttgtcatgctttacttcggtgatgctcttccttactcatgttcatgttttgtcttatctgatattgtggaaactgcagatgaataggaacataagctgatactctagtctgaacgtttgtaatatctgtgattaacattctaatgtatatgttgcggattttcaaattttcttacacgttactgattgagtcgctgttaaggtttgggtttttctgcagcttcttagtttgtgccttgggtctttcacccatgttagcttgctatatgacacaagtaacgtaaatgaagtcatactgaaacaaatagtgatcgtttgatcttggaagttggaactgttaagtgttaagcttaatctttttacttttttttttgtaaagagaggattaaggttttttgtttcgaatgtctttgtcagttgcctttgatgttacagcaaactaacattggctcaggtttcatccttcttgtataggaacaacaatagagg

SEQ ID NO: 3546 - DNA, 655 bp, Arabidopsis thaliana
  Intron number 3 from transcript AT4G39100.2 (locus AT4G391 00) derived from phytozome v7.0 (chr-ID Chr4; pos 18218699 to 18219353 reverse strand)
cgaggagtgttctgagtggtaagtgttcacttatttgaaactctgttttaatcttcttgagtcacaatctggaattgctcgtatgtttttcgtgtatccatgaggtcctagttgatatgctattgaggttgcttgagatgaatgcttttgtcatgctttacttcggtgatgctcttccttactcatgttcatgttttgtcttatctgatattgtggaaactgcagatgaataggaacataagctgatactctagtctgaacgtttgtaatatctgtgattaacattctaatgtatatgttgcggattttcaaattttcttacacgttactgattgagtcgctgttaaggtttgggtttttctgcagcttcttagtttgtgccttgggtctttcacccatgttagcttgctatatgacacaagtaacgtaaatgaagtcatactgaaacaaatagtgatcgtttgatcttggaagttggaactgttaagtgttaagcttaatctttttacttttttttttgtaaagagaggattaaggttttttgtttcgaatgtctttgtcagttgcctttgatgttacagcaaactaacattggctcaggtttcatccttcttgtataggaacaacaatagaggaagctaaaaagccagataac

SEQ ID NO: 3547 - DNA, 609 bp, Arabidopsis thaliana
  Intron number 1 from transcript AT4G39140.2 (locus AT4G391 40) derived from phytozome v7.0 (chr-ID Chr4; pos 18231340 to 18231948 reverse strand)
cttctccggcgacgttttggaagttctgggagcaggttcgatgttcgtgactctcttagcatctagtattttgctttttgttttgttatccttttgtctctttcggaattttattcttcgggtattgatttgattttaggggttttgtatctattttgggtcatctcaacatgttttgcagattctccggccttaatctcggatctgtttgatgctaattgttacttcaattactacttctttgatttcctgatttttttttcttaattacggattctcttagtgaagagagtcatggcagttccagtgagcagcagtatatagatcgatatgattccttttctatatttccttatttgatccatgattagtagtaacatgggggctctactaatttttgcttgcaagtgttgcaacctgagtctttgattggggatctcctgactctatgatgatttgattgtcttattgaatttctggtttctcagctattgatgatgctgattgaattcctgtatcttcatttcttaaattgattttgtgttttttttttgcttgttaattttgtagctagaaagggattgttgtgcctgtgttctactgaagtgt

SEQ ID NO: 3548 - DNA, 666 bp, Arabidopsis thaliana
  Intron number 1 from transcript AT4G39140.4 (locus AT4G391 40) derived from phytozome v7.0 (chr-ID Chr4; pos 18231283 to 18231948 reverse strand)
cttctccggcgacgttttggaagttctgggagcaggttcgatgttcgtgactctcttagcatctagtattttgctttttgttttgttatccttttgtctctttcggaattttattcttcgggtattgatttgattttaggggttttgtatctattttgggtcatctcaacatgttttgcagattctccggccttaatctcggatctgtttgatgctaattgttacttcaattactacttctttgatttcctgatttttttttcttaattacggattctcttagtgaagagagtcatggcagttccagtgagcagcagtatatagatcgatatgattccttttctatatttccttatttgatccatgattagtagtaacatgggggctctactaatttttgcttgcaagtgttgcaacctgagtctttgattggggatctcctgactctatgatgatttgattgtcttattgaatttctggtttctcagctattgatgatgctgattgaattcctgtatcttcatttcttaaattgattttgtgttttttttttgcttgttaattttgtagctagaaagggattgttgtgcctgtgttctactgaagtgtctctcgtcaaataatttataagcactgtctttgcatagtgcttagtaggtgctagtt

SEQ ID NO: 3549 - DNA, 666 bp, Arabidopsis thaliana; identical to SEQ ID NO: 3548
  Intron number 1 from transcript AT4G39140.5 (locus AT4G391 40) derived from phytozome v7.0 (chr-ID Chr4; pos 18231283 to 18231948 reverse strand)

SEQ ID NO: 3550 - DNA, 598 bp, Arabidopsis thaliana
  Intron number 1 from transcript AT4G39140.1 (locus AT4G391 40) derived from phytozome v7.0 (chr-ID Chr4; pos 18231344 to 18231941 reverse strand)
ggcgacgttttggaagttctgggagcaggttcgatgttcgtgactctcttagcatctagtattttgctttttgttttgttatccttttgtctctttcggaattttattcttcgggtattgatttgattttaggggttttgtatctattttgggtcatctcaacatgttttgcagattctccggccttaatctcggatctgtttgatgctaattgttacttcaattactacttctttgatttcctgatttttttttcttaattacggattctcttagtgaagagagtcatggcagttccagtgagcagcagtatatagatcgatatgattccttttctatatttccttatttgatccatgattagtagtaacatgggggctctactaatttttgcttgcaagtgttgcaacctgagtctttgattggggatctcctgactctatgatgatttgattgtcttattgaatttctggtttctcagctattgatgatgctgattgaattcctgtatcttcatttcttaaattgattttgtgttttttttttgcttgttaattttgtagctagaaagggattgttgtgcctgtgttctactgaa

SEQ ID NO: 3551 - DNA, 605 bp, Arabidopsis thaliana
  Intron number 1 from transcript AT4G39140.3 (locus AT4G391 40) derived from phytozome v7.0 (chr-ID Chr4; pos 18231344 to 18231948 reverse strand)
cttctccggcgacgttttggaagttctgggagcaggttcgatgttcgtgactctcttagcatctagtattttgctttttgttttgttatccttttgtctctttcggaattttattcttcgggtattgatttgattttaggggttttgtatctattttgggtcatctcaacatgttttgcagattctccggccttaatctcggatctgtttgatgctaattgttacttcaattactacttctttgatttcctgatttttttttcttaattacggattctcttagtgaagagagtcatggcagttccagtgagcagcagtatatagatcgatatgattccttttctatatttccttatttgatccatgattagtagtaacatgggggctctactaatttttgcttgcaagtgttgcaacctgagtctttgattggggatctcctgactctatgatgatttgattgtcttattgaatttctggtttctcagctattgatgatgctgattgaattcctgtatcttcatttcttaaattgattttgtgttttttttttgcttgttaattttgtagctagaaagggattgttgtgcctgtgttctactgaa

SEQ ID NO: 3552 - DNA, 317 bp, Arabidopsis thaliana
  Intron number 1 from transcript AT4G39180.2 (locus AT4G391 80) derived from phytozome v7.0 (chr-ID Chr4; pos 18246674 to 18246990 reverse strand)
cttagtgttcatttttttaatccacaggtaaagaataaaagtctcttcttctatctcacctaaaccctttgaatctcacgcttattgaatctcgagtctttagggtttcagtctctagtcacaaaaagttttggtttatgttaattctcataagctttaaaggattgtttctcgtaatttgtttggggttggaatgtaacgtcttcgatgaaatgtttcttttgtgttttgtttaatattattgtttgattgtcagacaaggaacaagaacagagttttcatttgttgctttgtgtgattaaataggactttaaatc

SEQ ID NO: 3553 - DNA, 785 bp, Arabidopsis thaliana
  Intron number 2 from transcript AT4G39410.1 (locus AT4G394 10) derived from phytozome v7.0 (chr-ID Chr4; pos 18333112 to 18333896 reverse strand)
ggccagaaagttgtcaaaaacacccaacatcccaggtaatttaatttaattttatgatttgaaattggttccgagtctttcaattctcagccgttctttaattaagatgactacatatcagttcttccacttttttgcctctcatgattccttgaaggttaatgatgacttctcataagaattttacggtcttgatcaatcatcagtttttttttttccaagtttttaacgtaaactaatatgatgaaaatttgtagtgaattatgagccatgtaatgattaatcattcatttacgatttttctaagggcaatgaaaattattagtagaatctttctggtacgtttctctgtatatatgtaattaagtatcagttctgttataacaaaaacttttgtccctctggggattagtagctatagaaaaataggaaaagaatataaccgttaagaaaggaaaaaagtaatttcatgtagaaatatttgagtgttatgtgagaatgtgagacataatggggttgggtttctgtaagattctttctcacatgttgacatttgacatttacaaataataatgatttgtttaggtaacttgtatactcattttgtaaagttttatcatgagctttgtgataaagttccattagttgccttaatatctgtttgatattatatcactctatattcaactataactagtctaaccaaaaataagacttgtttcccataaaatttgatataagattaactaatatatataatatgtgaatggcaggagctattacag

SEQ ID NO: 3554 - DNA, 283 bp, Arabidopsis thaliana
  Intron number 2 from transcript AT4G39870.2 (locus AT4G398 70) derived from phytozome v7.0 (chr-ID Chr4; pos 18502319 to 18502601)
aaccctcctccgctcatcctcctcctcctcttccggtacccaaagttctcatctttttgtgtgttttgtgttgacccaatcccacaattattcttaaaaagggttcttctggattaaagtctttatctctgttcttgactctgggaatttctggtttttcttggcttttgtgtttatgcttagttgtttcaggattttgagtgtttctaggtgggagtttcaatttgtgtgatcatttaatgagagctcttgttaattttcaattgtttttttcttaattagg

SEQ ID NO: 3555 - DNA, 517 bp, Arabidopsis thaliana
  Intron number 1 from transcript AT5G01280.1 (locus AT5G012 80) derived from phytozome v7.0 (chr-ID Chr5; pos 115657 t o 116173 reverse strand)
gcgagaagtccgattacgagtaatcatttcccccttttaattaatttgatcatgctctctaaaagtctgatcatgatttaaaaatcttgccttgaaacatttcccccctttttattatgttttgttacatttttgcattaaaaatatttgtgttcgtatagaacgtagcacacattccaccgaacaaaaagagagtaaatttgatcaattttctcggttattcttcttgctagacagtagtttgatgtctgatcttgttcatcagaatttgagttggtaaagcattctaaaaaacaattcactagctatggatttttatttgtttttgttaactagttatggttgtacttttcaatcacttttattgatgttacatatctcaaatatatatttttcaaaattggaccttttgccaatgtttcaacataatcgatttatatatttgttgccatcgatctttattgattgttcttattgttcaggctggtcacgccaccaggctcaccgagtagaaacg

SEQ ID NO: 3556 - DNA, 753 bp, Arabidopsis thaliana
  Intron number 1 from transcript AT5G01380.1 (locus AT5G013 80) derived from phytozome v7.0 (chr-ID Chr5; pos 156398 t o 157150 reverse strand)
agagcaagtggaagaacctcgtcactagatacaaggttacccttcaactctttagaatcctattgatgattctctctatatatagtcccgatatatacacctataaatgtttagtatgatcatgattacaagtatatacaaactataattatgtgtatcatgtatttcatcactagtttgtgtggttagactgatattatgcatattgaaatggaaacctagtttatggtgtatgtataggtgaactacattatatatacatcaattaatgagcttaacctaatcgcctaggttttttagatattgtcctgtcattaatggtaacgagctatagaatagaattttacgcgtttattggtgagctttcatcatgatattgtctatgttcacattttgatccgttataccataatatctctctttttgttcgttgatcacatggtaagtaagtaacacaatatgccataaaaatataattaccgttatataacgggtgcataagatttaataagaaccgttactgatgaacacatgaagatagttgaaaaagtctatacacacatttatttaaggtaaaagaaacgtgatatagatgatgaacatgtgtttttgttttcctatgatatatgatttcgagttaagatacttggttagctaaaatattttgcgtcggtactattacgtgtttacatataattgtttatataacataatgaatattcatgggacaggcgtgtgagaccactgagccag

SEQ ID NO: 3557 - DNA, 649 bp, Arabidopsis thaliana
  Intron number 1 from transcript AT5G01520.1 (locus AT5G015 20) derived from phytozome v7.0 (chr-ID Chr5; pos 206827 t o 207475)
gctcttgaagctgatatccagttcgccaacactctgtaaatctctctctctctctatttcttctctctgtttttctctgttttgatgtttcgatgtgttggtagaatctgatcgtgttcttagtcgagagtggttgatttgcctcataaatttgtttgatgctgtggttaaatccatatttagttggtacttcggttttccctttgcttgagttgctgatttttgtctcttccgattcgataggtcagattgtttttttacttctactgaagtttccagaggataatcagtttttgatacttgtgaatctgtatctctgttgtctgctgggtcttatgtgtgctgatgtcatattgaatttaagactttgcgtttacgcgagctcataaattccaatttattccttagcaagtctcagacgccaccaccaccttttggtcagatcacacaaaatctatctatagtggtcaattctttttcctttcgtcgtatatagtctctgatgctatcctaagttgacttggtatacttggattaagctgtgaagcaacatgttcatgttgcgtactaatctcaccaatcattgaatcaaaatgattaaaaaaaaatgaactatgtgtgtgtagggcgtcagagtacccagaggagt

SEQ ID NO: 3558 - DNA, 863 bp, Arabidopsis thaliana
  Intron number 1 from transcript AT5G01700.1 (locus AT5G017 00) derived from phytozome v7.0 (chr-ID Chr5; pos 262450 t o 263312 reverse strand)
ccttgagtcaggtatgtttgtctcttgtcatttaatcttcattaataactgtttctcaggtgcattttatgctagaattatttctcctttcctttaatatgatcgggcagatcggccaatctgttttgtctacttgatatgagaacttaacaaagaaacagccagtggtttattttagttttggtactatggttttttcctgtttcgttagttttggttatcgaaagcgaggctatgatttgttgaaggagaagctggttttttgtgctgtggattgtaataaagagttaaaggaggaaaatcgataaagccagatcgttttttatcgggtatctttagtatccaattatggatgatccccatcaagatttcaatctattgttagacagagagaaaataataaacatatcttttctccatccctgatctttctctctctctctctctcttcagttttttgttcatctgaaaaaaaccttttgacttttccattataatttttcaatttaagcttcaacaagagaaaaatggcatttggtgttattgtaatctgttgtcaatcattcttcttaaaaggtttctttcatgcttgtctgttctagtttcccttctttatcctcatttcctcttcctttgacttcgttccccgataaaggccttacaaggtgatcccatggaaagtttttatctggttgtttcatctctgccctgctctcctctcttcaattacttcttccaaaggacttagccacacgtcgtgtttccagatatttcctgtttgtttttgtttcttgttgcgtaccagtctcttgcagtctaaatgggggtctgttgtagcaagggcacagggataattgtggagc

SEQ ID NO: 3559 - DNA, 380 bp, Arabidopsis thaliana
  Intron number 1 from transcript AT5G02460.1 (locus AT5G024 60) derived from phytozome v7.0 (chr-ID Chr5; pos 540657 t o 541036 reverse strand)
cttatcctgatcattcatcaaactggcaacaacaagtaagttcatgatccgattatctcttcttttactctaaatggcttttgttggctttctttggttttataatttatgagtactcaagaaccaatttaaagaagaagaaaaaaaaacataaagagagattaaacaaacaagaaaaaaggataataatattcttgttccttttgtcacttttaatctttgtatatctgtggttgaatttgaatatactcataaaattaattctttctttccttctttatcaaaattttcacatattctaaaaactttttgtgttgtttttgaatcatttcttcctctctttagcatcaaccaatcacaaccaccgttggattcacggg

SEQ ID NO: 3560 - DNA, 796 bp, Arabidopsis thaliana
  Intron number 2 from transcript AT5G02990.1 (locus AT5G029 90) derived from phytozome v7.0 (chr-ID Chr5; pos 700927 t o 701722)
atccaacggaagattgtgtgtggaggttggttcgagggcttgaagaactttgtgatcattatccatatttttttaataatcataattcgcttgcaaactccggcggagaaagaagcgtgacattgtggtggaagtcggtggtgattcaacctccaaattaccattgcactaaggagtgtaaaacagagatttggtgtgcagggctttcgtttgagagacgtggtctaaaagagctttggggatttgttgaatggtctaagaatatgtttacctttgaagaatgtgactctcgtttcgatttccttttgcattaattcacacattaattgatatgtccaaggatttttaggatcattgatagactaagaggatttaaggttttcttttattttattttatttttaatgattttctaatagagattttatatttactatatattttgtcacagatatcaaaaactgattgtaaaaatttatttattgttttggataaatctaaattaattattttcttgaagtttataattcaccatcaatagtcagtaactaataaaaatgcattaaaacaacaagtctattaattctaggttttcttcgtaaattagtttgaaggtataaaaccctaattcgaaaacctccccaaatcaggaaataatgacgacgaaaaagaggaagaaataatcaaagtctcctccgacgacgtttctttctttaccagacgatatatatcgctttcaattgtttggctcgtatctcgagattccattatccaactctatcactcgtctccaagg

SEQ ID NO: 3561 - DNA, 443 bp, Arabidopsis thaliana
  Intron number 1 from transcript AT5G03080.1 (locus AT5G030 80) derived from phytozome v7.0 (chr-ID Chr5; pos 722636 t o 723078)
gattctgctaaatctgattaatttggctaatttgatttggtaagtcgaaattttcttcactgtttcattgattttgatctgattaggtcttagaataagcatttttgggaatcagctttagcttttgatacttgtaggtcaagaatgtttgttttgctatatgagtaggtagtcacatttgtgtataatgtaccactgtagcattagaaaatacaggaagaacaatgtttgtgtaaaagcagtttaagtcattcttcttggagtccattagttgttctgctcatccctcatgacattgaatctgttttctcattgcttaatgccgacaacaaatcagttctgtttgagttttttcttgtcttcttctttgttccgcaagcacatctcatttgcttcatccatctgcaggtcgagaactcgggtattagcggtcttgttatcct

SEQ ID NO: 3562 - DNA, 346 bp, Arabidopsis thaliana
  Intron number 2 from transcript AT5G03120.1 (locus AT5G031 20) derived from phytozome v7.0 (chr-ID Chr5; pos 734368 t o 734713)
taggaggaaagagtaagttgccatctccacctttactaatatttatttatggcatttacgtaaatatgagtctttggttttttaaggggaaaaaggtaaataacagtcattaaatgatatatttattattatcaaatattcaaattgtatattttattcttattcttcgaaattattatgatccaatcaaatgaagtaaatttccctttcttgcatataatggtgaccaaaacatgcaggattaattaattaactctgaatttgtttccaaattccatgtattttgatatgttctcttctccatatatcagactagagagagagcgagaccttttccaaggagaag

SEQ ID NO: 3563 - DNA, 523 bp, Arabidopsis thaliana
  Intron number 1 from transcript AT5G03330.1 (locus AT5G033 30) derived from phytozome v7.0 (chr-ID Chr5; pos 807205 t o 807727)
cgtcttcaagttgcagagattttagtaagtgaaaggtgagtttcttcaacttttgatctaacttcttcttcttcatttcaaccatttattttctcagatctaggtccattttattctcgattcatagccccccaaaaaaaaaactcctgctttgagttcattactaaatctccaagttggtctctttgttttcaaaaagcttttagctttgattttgataatgacttttagttactgtatctatctaatttaggaaaaatgaatttggacaattttggagtaacaacattttgtgttaattctttagaaatcacacattttgtcctctttgttgaaaagtctctgttgtttaattttcccgtcaatgtccagagaggtctcccaagatttacgcaactaaattaattgatatttttggagtgttaattaagtcattatggagtatttgattttgatttgttatggataagatttttgatttcctggtaacgtttctcttggcagttttttttgttgtttgaag

SEQ ID NO: 3564 - DNA, 777 bp, Arabidopsis thaliana
  Intron number 1 from transcript AT5G03370.1 (locus AT5G033 70) derived from phytozome v7.0 (chr-ID Chr5; pos 826030 t o 826806 reverse strand)
ctgggtcttcccagcaatccgattcttccaaaacggtattatattcgttgaagttgtggctaaagttgagattttttttctggtatctttgggtattgagagtcgtcaatccgtttctgtttgaaattatatttttcattggttttctactcaacggggtatttttcatttcaatgtcgattgatgatagtttttctttgtttgaattcagtgaatcttattccatagcctttaggtttgcttctttgagtatataggattgggttgttgtttctcattgatttatcattcaaaacgtgttactaagatttatactttgaatgaaactatgattgcttgttcagattataaactctttttattggtctcaaatgttggagttttttaaagtttcataaggttgagagtttggtaccatcaaaaggtagagtgagaaatgcaattctataaccgaatctatctgcattattgttttgcatcttatgcctgcctcatggaacttcttctgtttttggtatagttatcttgatgctggttctgttcttctttattcccattttaacaactctttgagcgaaatgtttctttggatcatcatgccgatttgatcatactgattggatagatatctactaaatattcaaaagtttaactcaccatttgataatcagattattatcagtcttcttggtaccatagttgtctgagaatatggactgaagatgttgccatgttggtgcaggtgagagtggtgataaagggaagagtacagggagt

SEQ ID NO: 3565 - DNA, 778 bp, Arabidopsis thaliana
  Intron number 1 from transcript AT5G03400.1 (locus AT5G034 00) derived from phytozome v7.0 (chr-ID Chr5; pos 838280 t o 839057 reverse strand)
aggtaggtaaggtgtgaggtattgaagagaagattgattactggaaggagcagcatgtttactttgtcacagagtctaagtattgggagatcatgtacggatacttaggcgacaacgaccatcgacagttatcaaaaatttgttcgtttgtctgccgttggatgcaacgacgaatcacagcaactatcaatcgcaatttaaagtgttttatttatgaaatttatgtgttccacctttatctgataagtgttttaattatggagtttgattaatgttttaattatggtcacgctaataacctaaaaatttgactaatttacatctttcgctgaaaatattatttgaaaaaaaaaactaaattttttgttcaagtcattgatgagtttaggttttacctttatctatatttttacacttttatttttccgtctattttctactttcactacattactctaaaaaattaccaactgaacaaatagaaattcaaaaaaaaaagaatataaatattagttgagaagaattgtacagaaattctacatgaagcatggtagcagaaatagagaattcattaaattatttgataatgtaagaatattctaattgtgtttggttgtaacttgtatggagaatagagaattaattgtacatagatataaattaagatacaaaaactttttttcatttatgagagttttgtttttgttatgtaacatttcatgtaaattttaacaacttcatgtcactaagttaataatgtattccaatttcatgtaga

SEQ ID NO: 3566 - DNA, 655 bp, Arabidopsis thaliana
  Intron number 3 from transcript AT5G03540.2 (locus AT5G035 40) derived from phytozome v7.0 (chr-ID Chr5; pos 890886 t o 891540)
gctggtcaccaacaacagttgctacaaatttataggtgaactattgattcttggtcattcatcctgtatgtcgtacagttcattttcaaatcaggctcttagcttaaattttcaactaataattgtagcatgagtcaaagtactgagtcaaggtatagtttctttgaacgattgcgggtatacaattaacttacatataattctcaccagtcaccgctcatttacaaagtagtttttccatggtttctgcaagttgtgagtttatatttgactatccttctgctgtttcactagtaaagctaaagagaaatgtttttgaaatatgaatttctattgacactcatcaaatagtttggctgtgatgtgcacatcgtgtactccgctgtttgtgcttacctgatctgaaaacattattgctagatgcaattctgtttgtctcatatgtgtaatgcattggagaagctttgtcttttttcttctatatgaactactagtattgtcagatataagcagcgaattgcataatctactggcattttcccaatgcatatttaagatgcatttgtgtttttgaatttgttattaatctccttctgttcaacctgttgtgttttgttcagggacacacgttcctttgtcttggaagaaagcttaa

SEQ ID NO: 3567 - DNA, 450 bp, Arabidopsis thaliana
  Intron number 1 from transcript AT5G03590.1 (locus AT5G035 90) derived from phytozome v7.0 (chr-ID Chr5; pos 908642 t o 909091)
gccttaccgccaccgattttctaggttctactctcactctcattcttaaaacgtcaattgttcttaatgtttctctacatgataaatataatcaaacataccaataagaaagttctatatataaattttcctttctactattctcacacattagaaatttatatcataacgtctatatcgtttgaacattaatatacttctaaagaaaattagcatgaatttactaaagttaaaatcttttatgttcttcctcaaattcattaatatagtataattatttattgaatttgacgtcaacaaaaaaaaaacttacttcgtgcagcaaaacagttgggagcaaaattaccgtacctctggagaactcacggaaaaaagaaagttaaactaaacagaggaatgaattttgcgttcggagggtccgaagtgtttgactctccggttgatcgatcg

SEQ ID NO: 3568 - DNA, 266 bp, Arabidopsis thaliana
  Intron number 2 from transcript AT5G03600.1 (locus AT5G036 00) derived from phytozome v7.0 (chr-ID Chr5; pos 913392 t o 913657)
atatttattacatcgaccaaaatcgtcctgccgctgtaagaaaaaaaacattaatcttagatgtcaaggctaattaattcagaaacattattacaccaagttctctgcctttacatgtgaaagaacacttttgtttgtttgttattagaaaaaaatcataacgccaaatgtatatatacttttattttgggtgattatttgattcttatcttcattaaaatttgcatgcagggcttaaaagcactagtagagaaagtcgtggataa

SEQ ID NO: 3569 - DNA, 602 bp, Arabidopsis thaliana
  Intron number 1 from transcript AT5G03720.1 (locus AT5G037 20) derived from phytozome v7.0 (chr-ID Chr5; pos 972775 t o 973376 reverse strand)
atttctccagcttcgtcagacagcttaacacttatgtaatcatctctcttgctctgtttctgttttctagatagactcattcttcttcttcttcttcttctttcagttttgttttgtttttatgtttctgtaatctttttgatgaccaaaaccattttgtatagattcttgaaactcgttttttgataacttgtaaaaaattacctgtaattttcttttctttttgggatttgtttaatctctctatcatgtaacactgagttttgtatctatgaaattttggcctcgattggatcttataataacttctcatctgaaataagcttgtaatcttgtatacttatggtttcgtttgaatggagaattttggtttatgaagttttgttattttctcacaatgttaacttcagtctggtttaagacatcattactcacatgttcttcacacttcagaggtagaatctttctaatatcttgagatatttggtcttgtcttgatgtaaatgtgtttacttactttatcttgagcttgtttgagttgtttttttggggttggaatgtttccagggatttcgaaagattgatactgacaagtgggaatt

SEQ ID NO: 3570 - DNA, 536 bp, Arabidopsis thaliana
  Intron number 1 from transcript AT5G03795.1 (locus AT5G037 95) derived from phytozome v7.0 (chr-ID Chr5; pos 1009573 to 1010108 reverse strand)
catcatctttatcgactaaagtggaatctattcaggttagagaaattacttaggaatacctaaattattcctttcttcattcttcatctttgcatgtcttttttcttttccggctattttatttatttcttttctgttcttatttgttactaacaaatacttatgttaatgttttaccaacagatatcataacatttatgttttaaattccgtggtcaaactacagtcaactgtaaaaaatattttgtcaactagtcaaatgtgaattttaattcgtttttattaaggacgagagaagcagtcgcatcaaaaccgcaaaataagaaagcaaagattacagtttttttatatatgtagggtcgggtgatataaatttgaactaattaatcaactaactaatgttcatatagttttgatttcttttaaagtgatttatttactgatatggaaccattctttaatttcatttatgtacaatagtctagagaataacaatgattgaacagggtgattataatcgcacaattcaactgaat

SEQ ID NO: 3571 - DNA, 704 bp, Arabidopsis thaliana
  Intron number 1 from transcript AT5G04110.1 (locus AT5G041 10) derived from phytozome v7.0 (chr-ID Chr5; pos 1114113 to 1114816 reverse strand)
gttcttaaaaaagtaaggttagattttttcttttcttttctaaaattctctctctctaacgattttgagattttctcgcgtatactccggattcgattaaggagcttatgatgataccgatagggtctctcgtaatttttctcttagttttgtctaaataacgaatttgtcgttctgctctttgttagaaatcgattttgatccattttcagaattcaattttgaattggttctgtttgtctatacatttttggttgtgattttgattttgttttccccagaaaatcaacatgactggtttcaatttcattctttctatcaccgagtttttgatgatctggagttttattttacctgattttcgccaaatgattgattatcagatgctttttatacatatttagtaacctaaagacgttactagtaactgtgttctaacctaaagacattactagtaaccgggttcttgttgctggttttactcattaattgcttcatctggatgttgttgtttctgcatcatctttggtgtcagggttgtcttgcattgcatttcttgtctgattgatgtaatggagtataattgttttgtggttctgttcttgttcgtgttacatacttttttttatgtttttgtgtctcaaccttattctactgcttcttcttcctgccaggaacaaacatctgtttcgtaagtttcagca

SEQ ID NO: 3572 - DNA, 298 bp, Arabidopsis thaliana
  Intron number 1 from transcript AT5G04220.1 (locus AT5G042 20) derived from phytozome v7.0 (chr-ID Chr5; pos 1158247 to 1158544 reverse strand)
tcgtcttgatttattctcagccttcacaccaagaggtaacatcaatcaaacacacttgtctcatctttcgttttgattttgttcatcgttcatgtctgaggcctgttctgtttgtttgaagatggtgaatctgagagcctagttttgaattaaagcttgttacttttcatcaaagtttgagactttcgtttactgttcatataattactgattacatctacttagtttatgaatctgagggttaatgatttaacacattgcagtatccacctgcgaggccactagttgagactagtat

SEQ ID NO: 3573 - DNA, 759 bp, Arabidopsis thaliana
  Intron number 1 from transcript AT5G04230.1 (locus AT5G042 30) derived from phytozome v7.0 (chr-ID Chr5; pos 1161155 to 1161913)
gaccaaggtgctgctcttcaaaaagagcttattaggtaattcatattcatagttgaatcagacgaaaaataaatagaatcatagaaaactaggtttagaaacccgtacataaactagtttttttaaaaaggaatgcatatttatatccagcgcctatagataaagaacaagacattttataatctgtctcgacgtttttacaccaacaaatgagaataattagtcgtactataaaagttcaaatttctttaaatatgattaaacgaagactaaaacgctctaagttttactacatttttaaataaatacgactttttgccgaaagaaaacatagtacttaagataagagcattttgtgttctaatgaaaattaaacgtttctgcattctctattcttttgactgtcttatacttttattgaaataagctttttttaacttttgtaaatcagctttaacgaaaaaagaatgtagtgactagtggagcacggaggcaaagttgctagctttgtacaccttttttttatttttgtcttttgggttgtaacttagataagaagaggtctcagtccgtaaaaagtttaaacggtatcgattaaaattgtttaagctaaaagaggtagtagtcgaagttattaaatgcattatattatatagttgacaaaagtaattaaaaaataaatgtaatggtttaaaactgacggatcccaaattatatcaaccaggtatttgaacgccgggatattcgctaccggcaacg

SEQ ID NO: 3574 - DNA, 274 bp, Arabidopsis thaliana
  Intron number 1 from transcript AT5G04310.1 (locus AT5G043 10) derived from phytozome v7.0 (chr-ID Chr5; pos 1206901 to 1207174 reverse strand)
ttcaaaggtataacttttctcttacattttatttgatttcatttaagggtttgattcattttcatgctttatcttgtgggtctttctcattctcaagtaatccaactaaaatttcaaaaaagtttgaatctttaaaacctctgttattcttataatgataatgacaatatcagaaacagagcaatcttctctgtttctttcccaactaacattttaacatgctctgtttcttaatgtagaaaactcaacgattctctctcaagaagacaacttc

SEQ ID NO: 3575 - DNA, 216 bp, Arabidopsis thaliana
  Intron number 4 from transcript AT5G04360.1 (locus AT5G043 60) derived from phytozome v7.0 (chr-ID Chr5; pos 1222339 to 1222554)
tgtcaaaagccagttagctgttgtttgttttggtaagagttgtcttttaccatttcatttgattgattcgtcttctatgtttttcatatttgtttcccttccttgtttaggattactcattgccaacactaagaaacttacggagactgaattatttagtgtttatttaatttttctgtagcggaaggacggctgattcaaggaactgggttgcag

SEQ ID NO: 3576 - DNA, 495 bp, Arabidopsis thaliana
  Intron number 4 from transcript AT5G04430.1 (locus AT5G044 30) derived from phytozome v7.0 (chr-ID Chr5; pos 1252224 to 1252718 reverse strand)
ggaggtataatcggaaaaggaggggccaccatcaagtaagtttccgttctgtatttgttgcagcagtttctttgaggttttcagaccttctataatccatagcctgtttcctttgacaccatttcctacagcacgcttaaccaccaaatatcatctataatgtatctggttatgttcttgcattgtttctatgttcaaatcttctctggttcatatctttaagagagcaattattttctctgaatgcatgcataaacaagtcaagaccctatatataacaggtgaacaaagtttctgagtattagatatgactcagattgcagtagtttatgcgtatggaatatctagttccttttaagttctagaatatggcattgcttttatgtttttttccaaggaatactgatttcagttgtactgctgtcactaaccctcaagacatttctttctttgcaaaaaggtcattcattgaggaatctaaagctggtattaaga

SEQ ID NO: 3577 - DNA, 949 bp, Arabidopsis thaliana
  Intron number 1 from transcript AT5G04480.1 (locus AT5G044 80) derived from phytozome v7.0 (chr-ID Chr5; pos 1276370 to 1277318 reverse strand)
tcaggatcggtgttcgtccgcccaggctagctctcgtgagttccttcattgcctttttcaatatatgcatgaaagagaccttttttaagtgctaggattgttagatccacttgagtttgtaaactagtccgatttaggttatgactgatggtggtttgagcgctagtgttgtccactgtgagacagaaaatattgacgcctttcttctagtacagctagtgatatatatattagatgtttctatctttagcacttgggttcggaggatttgattgaggaaacggaacattattcattaagtttggaagaggagtttccgagtagtcctgggtcattggcaatggactttataaaaggtttttacttttggaagacatcttggccaagattccatgagaaagagatctctttttaaaaagatttgatgtggaccctggtttatgttcttttcttatcatagctaaagtagataacctccagcaaggttgaacaagtcagtaggatttgatgggatcaaagatctaaaactttgtgttgggtctgagccaatggagaaacaaatagtagttagatcaactaaacgccctgactagacatagacaggcttatgggcaaatgccatgtgtttcagttaaatgctgcaccttagggtatgcctgtagtgtggaataagctaaattaactttgtaaaaggcgtcaaagagtcttctggcacatcatgctggaacttgccagtggagttttcacggttacttagcagttacttgcattgtcaatcagtcgtttcagtctacatgtccacattagctttggaaaattaccgttgttatgtacatcaacactgttttattttctctgatcgatctcatataatcctttttgtctccgtctccatgcacttcctattcactcatctgttttatattatgaatgacaggtactagggaat

SEQ ID NO: 3578 - DNA, 714 bp, Arabidopsis thaliana
  Intron number 1 from transcript AT5G04970.1 (locus AT5G049 70) derived from phytozome v7.0 (chr-ID Chr5; pos 1465507 to 1466220 reverse strand)
aacccgttcgtgaacctctcgagactttgattaaggtaatttcgttactttatttcttgttttgtcttcgtaggtttctaaatattttactacccaattactaatttcagctagacataaactaacgaaaaaggcctagccagtagatcatgtcggaatgtttagaaatattaaagaaattcctacgttcatatagagtaggggaacgaaaagaaattcgaagaatataaatttagcggaccactatatgttatataaataaatttcaagtatatcttatgaaccaaaacataaataaattttcgatttatttagtgtaaatctgcacatgcaggttacaaagttaggagtttacgtattaagaaacactcaaattttccacatggccagatggcctagtcacatattagaagtcaacgaaactgtgaatatatcgaaaatgtattctgacttttaactttcaatttataaacattaatatatgaaacttttaacaaaactaaataacgaataaaatcacatgggtccatatgctttcttccgtaccaatcaacactctcacatggattcccaagttaatgtacatcacttttggaagtatgatttatgaacatgatagttagtgtgtacgaaaatgtgcatagtttactattcttataagcatttaaaactaatggtagagtaactaactaatttgtaggttttacgcaaaac

SEQ ID NO: 3579 - DNA, 705 bp, Arabidopsis thaliana
  Intron number 1 from transcript AT5G05210.2 (locus AT5G052 10) derived from phytozome v7.0 (chr-ID Chr5; pos 1547479 to 1548183)
ctctcaacgccgttgattcgccatcgtcgctaccggtgagattttccttcgattgtctttcttttattccatcaattcgctctctttccatctgggtttgtgcttgtagcttaaaaaaattgattatagagtcagaattgtttatcacttaagataatgagttctgagttataatgattcctgaactgatatgtagaaacttcaacttttatttgtttctacgattcatccttgtttgctttagggttcttctattctttgtaggataagatttgtttctttggcttgtttatgtttgcttcttatcctctttattcatcctgagcttgttatactggggaaacttgttgtattatactaaggtttctgtttctcttctggataatgaataaggatatttgctcaattacacaacttggaattttgtttttatggattaatggtgtctacaaagtcatcttctttagttctgtatctatctagcaaacgagtaaacttggtgtcacttgatgtgattcagtgacttgctcgattctgacaagatgcaggaaattctgaatgtatttgtaccagcttagttatagctatgtataatgtatatcgaaatacatgtcttatgatatctgtagtctttcacagttactaatatatccttgttttattgctgcagattgtcttgaggtttacgacttttggactaatctc

SEQ ID NO: 3580 - DNA, 423 bp, Arabidopsis thaliana
  Intron number 2 from transcript AT5G05670.2 (locus AT5G056 70) derived from phytozome v7.0 (chr-ID Chr5; pos 1697005 to 1697427 reverse strand)
tttgttgtttacaaccatcttgctcttcctatccagtatgtattagacaccactttgttgtttcttaatcctttcctagtagaattgctttatttatgtaagatctccccctggtagtatcttgtttgccattgataaggacatatagcctgttcttcttctaaatgtcttcaattacttttcttctgcctgctattgtttacaactgcagaggttatagttctcatggtaccattttagacttgtgattaagccagagtattttgtgtattggaattagaactattattgcaatttctgaggtttattcatgatttttctttgattatacataaacaaacttttgatcttttgttgctaaacttgttgttcttgctggggtatgcagttcgcctggtcagacgtaccaaatccaacactgta

SEQ ID NO: 3581 - DNA, 419 bp, Arabidopsis thaliana
  Intron number 1 from transcript AT5G05970.1 (locus AT5G059 70) derived from phytozome v7.0 (chr-ID Chr5; pos 1795592 to 1796010)
ttgtgctgtcaactccgtcaagtggaatcatacgagtatgtattctccgattagtctcatttcctggtttcctttggttggtgagagtttaggaaagttgctgaagtagtgattccacttttgatcttaggtttatgtaatgattcagctgagttttagtatttaacaaatctggattttctgtgatctgctgttcaaaattgaggttctgtttaactttaggaatcgtatttgggaatgcaattagtcaatttctgctggaagcaaacaagtttcttggtgaaaatcgttgtgttttggatgctctttaattcaatctggtgaaaatcgttatttgttctcttttcttttccatttgttgaagttatgttatttggtatgcagatttagtggtggccagtacgggagaagataagaag

SEQ ID NO: 3582 - DNA, 580 bp, Arabidopsis thaliana
  Intron number 4 from transcript AT5G05980.1 (locus AT5G059 80) derived from phytozome v7.0 (chr-ID Chr5; pos 1803228 to 1803807 reverse strand)
tcgctggtaccaaaggcaaggtaacaacaacaactttactttttctggtaaagctcaataaatgatactaaatcatctattgtcaatattaggagttggttttgttactttagttagttagttagatatcttctgaattcgtgtcagcttctacactagttgtgaccgttacgtccttatgactgctttgtcagaagaagcctaaggtttttgctctgtggggattagagatacgtttctggactgagtcatcttgagcttttttccaatttgagtgagtgcgagaagaacattggttttgagatccttgcatgcttggagatgcgtatggtttcatctgatggagtgtcagttttgcaaaagttgctactttaatcttgactcatatcacttatgtgatagtagatttgggatagcacaaaggaaattgttatgaaactagtacttgcttactttttgattcaaaccttcagtgaacttgtttgatgaaagtggttcattgttagcatggctgattactatctgatccagcacctaacagtattcctttttgtttcttatgtggcatgaagggatccac

SEQ ID NO: 3583 - DNA, 495 bp, Arabidopsis thaliana
  Intron number 2 from transcript AT5G06130.1 (locus AT5G061 30) derived from phytozome v7.0 (chr-ID Chr5; pos 1854466 to 1854960 reverse strand)
gaattatcttctttggtggtctcattgcacctaatgtaagtacaagagtagtagactccacgtttctttctttatgttcgcctatagcaatatcaaagctctagattttgtttgagttaatatgcttttcacacagtcatctcagtttactgcagctcttagaaccctactaatcttacaacaatgcacgagagctctttaaaatatatgcatttactttcctggctatattttgcaggatccatcaagttattagtgatgcaacaacaatggcacattaatctaaatatacttgctttttgttgatagcaacagattgtggagattactatttttccttctttgtgatgtatacagttttttggttttttattgagttactgtaactttaccagaagaacaatagctattcttgttttttctaatccttgaatgataaattgatgattttacatggcagctggaactgaaggtaggacttggaggaacctctta

SEQ ID NO: 3584 - DNA, 457 bp, Arabidopsis thaliana
  Intron number 1 from transcript AT5G06160.1 (locus AT5G061 60) derived from phytozome v7.0 (chr-ID Chr5; pos 1865686 to 1866142 reverse strand)
ctcaccactgagaaacttgtacgctttctctcttcttctcgtcaatttttaatcttcttttctatttcccgcatatgtttttatgtctcttctcttttgaatacgttagatcagagcagagaaacttgggttgctgatttttttttaaataacaggttcgtgttgagtgttgcctctttttctgttaattgctttagctttttaggttatcattgtggggtttaagttagctttgaatcactctggcttgggtgttaaattgagaagaaacttcagagattggtgttgaatataggttatagttggggtcttaagtgtgtatgtagggattctaagttttgagctaagcatgcttcagtgttatttcacaaatttgagttaatttttgttgttgataattaactcaaacttggattaatgctaaccttgattcttgtttgttgtaaggttgaaacct

SEQ ID NO: 3585 - DNA, 477 bp, Arabidopsis thaliana
  Intron number 1 from transcript AT5G06210.1 (locus AT5G062 10) derived from phytozome v7.0 (chr-ID Chr5; pos 1878580 to 1879056)
acgccgtggtgttgcttccaagctctttattggtggtaactctctattcatttttcctttttgaatctgtgattaatacaatccatttctaggctgtagaattttaaggttttagcggatgcaaatttgttgaatatgattcattttaattgaaaattggtaaatctcttctgtaatgatgttgtaagtcttgaaagttattttcttctgcgagctattctattcactgttgtccagtaaccatttcttctcatggctttgattttttactttgtgtttctcttcaaagccatgtttctgtgaaactttggtctttttgtgctcacatgttgttcggtttgtagtaaattgattatgaacctgatgttctctactttctgaacattttgaatttacaatctccaataatgcttaattcccaataattcgattctgtttacaggattatcgttttgcactacagagcaaggattgtct

SEQ ID NO: 3586 - DNA, 530 bp, Arabidopsis thaliana
  Intron number 1 from transcript AT5G06710.1 (locus AT5G067 10) derived from phytozome v7.0 (chr-ID Chr5; pos 2069474 to 2070003 reverse strand)
tcacttccctaattggctccctgagaacagtaaaggttcttattttattttttatattttaaaataaaaaatgggcatagggctataatttctcttacttaaatggtgtgattatatacgtacacactagacacaaaagaaacaaaagaaagtcgatgttattcataacattcgatttcttatattagaatccctaatttggcttacatgttttttttcttacgactataagaatattaatatcttttctggatatatatatagagagagtccgatttggcttaaatgtgtcgatgggatgttgaaatcattttccaaaaatgttttgactgatttgtgacaagaaagaagaaccatcttttaattaaagtattatttaaatccaaagaaaaaaaatatctattgtggatgtatttgattaacaagaatacctaacttttcacatatcagtttgaatattcgctcaggattacaatagaaacaatatactaatttaataaaccaaatttacaggtcgacaaggaggaaga

SEQ ID NO: 3587 - DNA, 360 bp, Arabidopsis thaliana
  Intron number 1 from transcript AT5G07520.1 (locus AT5G075 20) derived from phytozome v7.0 (chr-ID Chr5; pos 2380643 to 2381002 reverse strand)
gccgttgctctcatcaggtggttcattaagtgaaattttgtaaaactatagtcatttttgttttatgaaaaacttgttcaattctctttttttttctctattctatctttgattcttttcacatattctaattcatttattttaaagaattagtgtaccctgtgtacacttaatggtcttattaattctttaatgttttgtcttctaacttcgttgtctattccatcacaacccatgtttaccttttcttgaaacatcattagaaaaactgtcaacgtgattaataagaagtggtacaattttgtttttaatacataagtaacctttgtacgcacttgtgagtatatatgtagacgtagg

SEQ ID NO: 3588 - DNA, 408 bp, Arabidopsis thaliana
  Intron number 2 from transcript AT5G07770.2 (locus AT5G077 70) derived from phytozome v7.0 (chr-ID Chr5; pos 2475316 to 2475723)
aagcttttgaggcaaaccccgataaacttcaactggtaatgtgaaatttatattcttcttttaacatttggttattactattgtcatatagctataaaaacaagcgactgaaaagcatgttatgaaatgccagaaatctgagtaattttaataagaatgtctctataagcatgttattaatttgaaattgccaacactctgtcttgtagtctgttcaaagtcttctgcaactgtgctttcacaagtctatgcgattgatcattctcctatattttctgggattgttttgctctgaactagtgttatttgatctaaatcggtgaagaaaactgtttgttgttaaatctctctattaaatcgtctgtttgcttcctgatccaatgtcgcttgtcgagatctctggcgctg

SEQ ID NO: 3589 - DNA, 454 bp, Arabidopsis thaliana
  Intron number 1 from transcript AT5G07890.1 (locus AT5G078 90) derived from phytozome v7.0 (chr-ID Chr5; pos 2519494 to 2519947 reverse strand)
tcggaattatctcagagagggattgagctgcgaaggtaaacgtttcctgggcttgtattcgtgtgtacgctcatcaattttattctcgtgttcgctttttcttttgtggttgcaatttttatccttcgttgttgaaattggctatctagtggtgtgtgtagtactgttttccccaattacttcaaaggaatcgagtagaagcatcaaggctttcatctaattttatgaataattggacctgtgaagttgacgtcttctctagttcttcatttagttgttgtaagtgtttttatagcctaatttgatttccgtggaaagataaactgaaagaaaaatctgatttgatttagggaatgaaaacttggattcgtttgaagttagttgtagaaagtgtttctataggttattggtgctaatgattcattgcctttgcagtggtgatttttgtctctaa

SEQ ID NO: 3590 - DNA, 687 bp, Arabidopsis thaliana
  Intron number 1 from transcript AT5G07940.2 (locus AT5G079 40) derived from phytozome v7.0 (chr-ID Chr5; pos 2533852 to 2534538)
tccatttgttgtaaagctaaacgtgacacaagtgtgtaagttcacatctctgtttccctctgtggaaaccctaattcttgctatatatcctaaaaagaaatgatttttttttttacccaattattgtaccgtgtcgataggtagtgttattgtttgaggttgaattctcggttactgtaatgttcatgttattattaaccatagcttcgatttgcagtgagattgtgtttgcggcaattttgatctcaagtgtgttctcgagttttccaatcaaattctgtatttttttcgaaattagcttaattttcagctgccataagagtgtttatagctgtgaaatcggaaattttcagctggtttttgtttaatgaagttgatgctgtttactgaaatgagctctccaagtttacttgattaggtgttaagagtttctgatgttgactggaacttaggcgtcagtgtaccctaagttccaatctaaggaaacaatgcttattctgtttccttgtaccatgtgggctctgcatcaattctctagtgtctcactttgctgccctgtggtttttgtttcctctttgcagaaacaacacttgtattggctttcttctgtctagtgtttttgtttcacttgttgtgttcaactctaaattttgcagtatctgttttgtttgtttagcaggagaacct

SEQ ID NO: 3591 - DNA, 687 bp, Arabidopsis thaliana; identical to SEQ ID NO: 3590
  Intron number 1 from transcript AT5G07940.3 (locus AT5G079 40) derived from phytozome v7.0 (chr-ID Chr5; pos 2533852 to 2534538)

SEQ ID NO: 3592 - DNA, 491 bp, Arabidopsis thaliana
  Intron number 2 from transcript AT5G08120.1 (locus AT5G081 20) derived from phytozome v7.0 (chr-ID Chr5; pos 2601669 to 2602159 reverse strand)
ccttcaaaagaatccttgtcccgaagggtaagatgtcaatcttcttgtcttcttcatctctttatggcaattttaacattattcatacactgtagcttggttgcataggtatcaataagtttcgacttggttaacactggtagtttgctaacttgcttagataatggcttgagtttgtgatcttttccttttggggtatgagctgatatcagcttggcgttatggcttaatcaaaaattgtatatttagaagggattatagatgtttttcaattattatatgcagtaaatgttgttgttgtaatgatggaatctgtttctggagtactggtgtcttcataacttggtttaaaaacttcagtgggtggttcgggggatttgatttccctcgccaaatgtttgcatcatttctcaaatgaatctgtttctctaatgctcggctgtataactttattcacttgtatttgcatgtatttgatccaaagggaagaa

SEQ ID NO: 3593 - DNA, 541 bp, Arabidopsis thaliana
  Intron number 1 from transcript AT5G08170.1 (locus AT5G081 70) derived from phytozome v7.0 (chr-ID Chr5; pos 2630440 to 2630980 reverse strand)
ctcaaacttggatcggttggcctgtaattctctatctctcttcctcttttctttttttttcatgttttattcattaacctgagataaagtaaaaattgacggcgattctggagaactcaatctcgctgttcaaaaatcaaacttcgatttcgattttgtcctttttttttttttatatggatcctgctcgtagtttatcattgttcgaattgctgttttctgtttatttgatgatttctctgcttcctggttcgtttttgtagagtttccgataaattttgtatagcttctgtatgtcaagttagcatctagatgtgacatgagatgagatcttttacattgcaatctatcatggttacagattctgcaaccaaatcagaatttaaagcattttcagttaggttgtttgtttcgatttgtttcatcactgaatacatgaatcaaacctcaaaccacttttgtgattttgaaatctggattataattctgtcataatatggctgcaggaacggcaagataactggcggcacaacgctttacc

SEQ ID NO: 3594 - DNA, 553 bp, Arabidopsis thaliana
  Intron number 2 from transcript AT5G08460.1 (locus AT5G084 60) derived from phytozome v7.0 (chr-ID Chr5; pos 2733798 to 2734350)
ccggaggaatcttagaggaaaccggtcgccatctggtacttcttcttttttttctttctaaatgtctatttttattgttcaaaacattttttggttatataggatatgtttctttttttttaccatgttagttcatatcaaaaactttgtttaacgaaattggtctaatcgattgcttatgttcatataaagaatccaagttcgaaatatccaaaactgaaaccgaaaattgaattgtactatgcttttttgttaataagcatacggttttcgatattgaaaattgaaagttatctttcgctaagtaaaaaaaataaaaaaataaaaaagtgaatttggggtgcataaagtccgccggaacagtcgtcctttaaccaatagaagtagccacatttgaatcacgggaggttatttaatgtcgagtgactttgatagggtgcatgaaaaacttttgcctacgagacatgagtatttaataaccccaaaaaaaagactataataaatggggttgcattcttgcatgcatgcatggatgaagggagagagatttagc

SEQ ID NO: 3595 - DNA, 485 bp, Arabidopsis thaliana
  Intron number 1 from transcript AT5G08530.1 (locus AT5G085 30) derived from phytozome v7.0 (chr-ID Chr5; pos 2761271 to 2761755 reverse strand)
tgaaagactacttctcggaaattttcgtctccgtaagcaatctcttttcgcgcactcactttgatgatctccgttttcatttctaggttatacgattttcttctcgatcgcatttgttagggttttcaaaattaagactttgagtgtatttatcttgaattcagctgaacaatttcaaaatgcggcatcttcttatacatagatctagcgggttatgattgatctggtcgagcttatcgatttagagcgattgggtttattcacctgcttttgttggttttgtttggtttcctaatgttgaaacagcgattttatacgcgacacttaactcctgtatcatcaattttactgatttcgtgcttcaattttttgtatgcttttaaagtagatcatgtgttactttgagttaatttgccatttaccgtctttgttatatggatttgatgataggcacccgtgagggggattcttggcttgcaaagggc

SEQ ID NO: 3596 - DNA, 590 bp, Arabidopsis thaliana
  Intron number 1 from transcript AT5G08560.2 (locus AT5G085 60) derived from phytozome v7.0 (chr-ID Chr5; pos 2773849 to 2774438 reverse strand)
tcgccaaaccttatctgggttttgcttcttatttggtaagattggatttttctcccttttgattttgtccttcttagatcgtgttaattgatcttcatccccaagtgatccttcttctatttaagtttgatgatgattttgacgatttgttttttttgttactgctaatcttatttggggatccttcttgtaggtgcactgtgtcaattttgtgtgtttattgagtagttttgctactgactaatttgattgaaatgattgtgcgtatctcgattcactgttttgtttttttgcttcgtcggtgtaacaattcagaggtgattgtttcgattgcatttaacttgtcgttttgatcaattgggtttgattcacttgtctaattgtttttgatgtttgaatgctaatctccttactatagtcactatctcctgctactagatctacatgggaatttgttaatccattctttatttcaaggctaaagttcatgtttttggcattcaaatgaagtgaattttgaatttttcagttttttgtatggatctaatgtgcagtcacttaatgctttttctcgtttacagaagatttat

SEQ ID NO: 3597 - DNA, 590 bp, Arabidopsis thaliana; identical to SEQ ID NO: 3596
  Intron number 1 from transcript AT5G08560.1 (locus AT5G085 60) derived from phytozome v7.0 (chr-ID Chr5; pos 2773849 to 2774438 reverse strand)

SEQ ID NO: 3598 - DNA, 466 bp, Arabidopsis thaliana
  Intron number 4 from transcript AT5G08620.1 (locus AT5G086 20) derived from phytozome v7.0 (chr-ID Chr5; pos 2795449 to 2795914)
cggagcaaaggcgcttgcaaaagagtccttgccaggtaaattttcatttgtattaatatgtaaacttatttctgagcaaatcatgcatttccattgagctggacttctcagatgaaacttgttatctgaccaatagagttgcatatatttcttttcaaactgagttggttatccttcgctagaacaatatggactcatgatttgaatttctaagaatatgaattaagatagattgttttttaaaaagaaatggatttccctgtccaagttaggattgtttttcagtcacaggatatgttctttgatctaagcctcattatgcatttagatttttttgcattatttgtcttccctgcagtcaaagtggctgcagagatggtgatctttgtctctgtatatttttgaataataacatattttcacactctcagattctcgtggctacacccggaaggctcaaagacca

SEQ ID NO: 3599 - DNA, 883 bp, Arabidopsis thaliana
  Intron number 1 from transcript AT5G08630.1 (locus AT5G086 30) derived from phytozome v7.0 (chr-ID Chr5; pos 2802139 to 2803021 reverse strand)
tcgacgacgcgcattcccaatttcatacattctccgtaagatttttgattgagtctctctaatttcgttgtttataattctctccaatcgttttctttgttgtggcgggaacatcgatcctcttttcttctgcgattttgctttcttcgttgtgatttcgttgcattagcttcgaattttcgttccgttttgtttgttattgatgattgtgttcgtctcttctttgttacatgtgttgttatgcttttttgactgctttttgtgtgttttacttgtccgtttcgccttctggattctccgaaagtggcgcatgatagtgctttctttttctcgatctctcttgggtatgtgttttgattcctcggtttcgttttggttcctttgctctcaagtgtcaattttgtcccatggtttcagatcttttctaatttcgattgggattgcgatttttctagggtttagtgctatctcggtttcttctgcattgcttttcttaacatttttcattggcttttcttttttgcacatgatctcacaagtaccacttgcttttccataggctctgtcgaattcagtagaaattagaatcagctctaggcttgcatgcaatcatttgcattctgtgccacaaatttgtacgtttgctaagttttacttgaccgttgtgtcaccttaaacgccttatgggttgattttctgttctccatggtttacattttccgctttggaacaactgtgacgtcttgcttttgtatacaattcccttcttgcttggatgacctggttctacatttactaggatttcacattagtgaatatgagaatcacttatatagaccattcatttttgtctacactgcaggttggttttgccatttgaagg

SEQ ID NO: 3600 - DNA, 775 bp, Arabidopsis thaliana
  Intron number 1 from transcript AT5G08695.1 (locus AT5G086 95) derived from phytozome v7.0 (chr-ID Chr5; pos 2829348 to 2830122)
tgttgattatagacagcttttaacttgcctagtttttaaatatggcttgcatggaatctctatgtttgtgaaaatggatattcagagtatatctgtatatgtctaagttttgattaatgtttgtgtttgtcagttgtggtataatttcataatgttatggtgatcggtgacaacatcaaataataagacctccaaaaagatttcttgatcgagtaatcggcatagacacaagagattcgaatttcaacacatgctaagaatcaactcaagattatgcaagctatagttagcgtatttaataattcaagattatgctatagtttggtttagtcttatgtattactatcatgatattgataagtgtttggctagttcctgctaaaaatgttaatcataagtggtttaattacaagaagaaaagtagaatttcaattttgacaacaacaaaaaaaaaacgtataaaccgggattaaaatttaaaatgtatttagtataatgtgatatttctagtgtagaaatagacagcactaaaagattattaatcccattttatcttttgaaacgaaacgaaaccctaaatttggaatccctctacagttcctagaacgagctctgcttgcaaatccaaagaatgtaagtagtgggttttttttctccctttaaatagctgagatttcgcagaaacacaataaatgtaagaaacttatcttctgttttcttccttcttcttttctttccggcctggtaaattacaggtcaaggataatcgttaaga

SEQ ID NO: 3601 - DNA, 959 bp, Arabidopsis thaliana
  Intron number 2 from transcript AT5G08695.1 (locus AT5G086 95) derived from phytozome v7.0 (chr-ID Chr5; pos 2830176 to 2831134)
ggagaaatcacagacgtgaaattgaagcgtttaaggtaatactagcattcttcccctactacgtacgtacaagttaagaatcaaaattatgtttaaaaagttaacaatgttaaaaggcatgaatattacagtacaaattttctgaaaaaatagtattgtatcgttttccgagtatttaactttgcttaaacccttgctgattcaacttcttatctggcaatgcttgctattgttcatttgggcttctctcccttctacttcttcgcttgaatttctcattttacaagatcggcaaaaaaacttacgtgaacaaatatttgtttttgtattgtttcagtaaaagaaaatagaaaattaatgagtagaatagtatatggttggagtcttggaggctgttccatgggcttgaatttaaccatagattatcttatatgcagaaagaagtagaaccatatatatttactggcacaccttcacagaaactatataaacctaaatcaaatacgatataggaggaagatgaagttaataacttgaattagaacaaaaagatggtggtgtttgtcttgtcgtgaaacaacgatgagttagtttatgagtacgtaaaatcttaaatagagacataatgcagatggtgagaaattttattttatataggattcatatctactctagttgagataatgaagatgctatttataggagatgacaagttttaatcgaaaaagaaaatcgtagagaaagtggttagtttcatagggttgatatgatcgtgggaaggtggggagataaactggtaaatattttctgaattaaattttgttaaaatcatttaattcttttttgaattataaaacaaaatcttgtcgagtgtttattcgcagtcgcagctaattgttgtgttgtatatatgctggaaccaatcactatacacacatatcgtttttgcttttgcagtg

SEQ ID NO: 3602 - DNA, 529 bp, Arabidopsis thaliana
  Intron number 1 from transcript AT5G09220.1 (locus AT5G092 20) derived from phytozome v7.0 (chr-ID Chr5; pos 2866338 to 2866866)
tagtcttatttctctttaaggctcaataagaggaggtactattactacacttctctctacttttacttgtattttagcattaaaatcctaaaatccgttttaaattcaaaaataaacttagagatgtttaatctcgattcggtttttcggctttaggagaataattatatgaaattagtatggatatctttactagtttccattcaaatgattctgatttcaatctaatactctcactctttaattaaactatatgtagtgtaatttcacactgttaaatttctaccatgtcatgtatattagagttgcatagaaaattgtaaaacatccatttgaattcgaatgaaacaaaatgttttaaaataaaattttggtttttaaaagaaaaatctaaaactgaattatatcgtttaaccaagttgtaaaagtcataaaacgtagtatcttgtaaatcgctcttccacggtccaaatagacttctagtaataaacaagtaaaactaattttggtttcttactaattttcacag

SEQ ID NO: 3603 - DNA, 693 bp, Arabidopsis thaliana
  Intron number 1 from transcript AT5G09310.1 (locus AT5G093 10) derived from phytozome v7.0 (chr-ID Chr5; pos 2887564 to 2888256 reverse strand)
ccgtcactctcgggctttccctcaaatccgcaattgtaagttcctttttgattttgtttttccaccgatcttcgtatccggggaatttgggaatgttagattgggatcttttgatctggcattagatcctatgaaatcgtataattttgctggtatttactgtttcagtagtgtaatagtggctacgaatgttgtcttgacagtcttaaaccttatggcttgtggattgcaagtatcatactcgaactaatttgatgcggatacatgataagtccattggcctattcaggctcaaatctaatgaacttgtagcatttagtgtgtagatgcccattagattttataggaagcaattaatagaataagttaatggggagtgtctgatccagtggctactaatgaggttgttcagaagttatccattttctttggtgattattcattgtatgcttatttgatctgggggacagtactctaggtctattaaatctttctccctcgtcacgactggctttgatgtgttattgccttaagtatattcaggaatgaattgatgatcattcttgtttttgacttttgagttatgttgttacttctgatttaagaagatttaaacttttgtatctctttctgagatatgaaatatgtacattctatcctctctgacacctttgaaatcttgtgctgatgcag

SEQ ID NO: 3604 - DNA, 342 bp, Arabidopsis thaliana
  Intron number 1 from transcript AT5G09320.1 (locus AT5G093 20) derived from phytozome v7.0 (chr-ID Chr5; pos 2891627 to 2891968 reverse strand)
ccctccgccaaagatttcatcaaatcaatcaaaaggttatctctctctctctctctctctcgcttctcttcttcgctttttgtatactttaggtttatttactctctagttatgattacatgtgtgcaagataagatatcttgctgatttcacattgctctctagtagttatgaatagtttttttcgtttttgcgacaatgttatgatatcgatgatttgctataaacttaagcagatttttgttgtgatggaaacatcacatgccactggttttttgagttgtgaacgttttttgatgttttgcagtttcattgtttcgatcttgaacactgcaccagacc

SEQ ID NO: 3605 - DNA, 606 bp, Arabidopsis thaliana
  Intron number 1 from transcript AT5G09400.1 (locus AT5G094 00) derived from phytozome v7.0 (chr-ID Chr5; pos 2916660 to 2917265)
attacgaggtgattgatagtttcgtgtattagtgcatttcatatcaacatatatagtgatggactagcatgatgtgtgtcttcttaggttcttaaacagtacagtcactttttagctgtttttgccagagctcggatatcaactagaaagggccactgaatagggaagtaccataagagatcaagtcaaaattagtttagcaatatgtggaaattatggattaggaacaggaatcaggaatgctttgtgactagctagtgtgcgattcttccaagttgcagtgatggagatgggctcataaatctattttgtttgggatgttgttttgatctgttttccttaatgatggttgtgtcctgggatggaaacctgcaagggatgcacggtctgagagcagtggatatttgttttctgattctaaagcgtaactacggctactactttttgcaagttctgcagataaataatgatggatgatcttagatctaagatctatgacttgtatctgtgagccagtacttttctctgcatagttaaccaaacttttttttttgtgtttttactttgctaggacttgaccgttgggaggaaagtgttgcttgcatt

SEQ ID NO: 3606 - DNA, 443 bp, Arabidopsis thaliana
  Intron number 1 from transcript AT5G09410.2 (locus AT5G094 10) derived from phytozome v7.0 (chr-ID Chr5; pos 2921471 to 2921913)
atcttttggctctataactcctcctctccaattaggtctctttctcttccttctccactgtttatttccctccgttgtttggttcctttgctagcttgaaattacgtttattttgccatatttttgagtttttcttgctgcgacatttggtaggcgaatgaatctattcattagacaggaacttagctcacttcttttttttcttactggtgttgttccacatgtttgtccgaatttattttttgtctgcttgatctgaaattgcgacgaaataatgtatttatgctcttgaaatttctgctttaaggctgaattgctctgtttcattgggaatgttcatattttgttagtggtagcgtaatagtgttatcggaagattttgtacccagattcaaaaaagtgttaagtactgatacatgttttacttctatgagtttgcagat

SEQ ID NO: 3607 - DNA, 517 bp, Arabidopsis thaliana
  Intron number 1 from transcript AT5G09600.1 (locus AT5G096 00) derived from phytozome v7.0 (chr-ID Chr5; pos 2979260 to 2979776)
acgtcgtctccgcgcctctttccgtttacaaatccgtatgtttttcactctcgttgattgcgtctttttggtggtattattgatagatcgagaaaatttttgtgattcgtttagtttcgtctttcgacttcatgatttacccatctgagctctgcttcgcttcgccggaaattttcaggaaatgatatatatatatccatttgcggattttggtgtgttatgtgtttaatcgtttcatttaaacaaaaatttgagatgagattgttgtgtaagtagacacatatctgtcgaaattaaccttaagactttgtttccttttgattgattgagaaagcttgtagttgagtatagtgctaaaaggttgggatgaagaagagagtttagcttcatatcactgttgtagtttgagtgcctaacaatcattagaggttatggtcgttttgtttattgcatatgcgtagagaaattgttggttttgactgctcttgaaacgttcttgttttgcagcttgctggta

SEQ ID NO: 3608 - DNA, 905 bp, Arabidopsis thaliana
  Intron number 1 from transcript AT5G09672.1 (locus AT5G096 72) derived from phytozome v7.0 (chr-ID Chr5; pos 2997943 to 2998847 reverse strand)
attctatctgtgagcccgagtttcagatccaccaggtatttgaattctcttcttcatccttcattctcttactcaccttatacatctaaattttcttctggatttttatcattaattttgcttaatctgagttcatgacttactaataataatgcatgactgtttctatctttagactttgtttggtctatgaaatcattgttatgtagattatgctgagagtattataattacatgataaatcttgttttttagatcttcttcttctccaaagtgctttaggttcttttttgtttattggtttgtccataagttttctgatactaggatgagataaccttttgtggtgttttctgaccctgctttcaatagtcaatcttccaagtcaaacttctgaaaacaaatattttctcagattttaggatcttgtgaacttgtgtttggatcttcaatcattctaatgacaactgtatcacagaggaaaaaatcttgactttggaccttgtaaattttgattatatcatttgattaccattccccaattctgttctatcatgaattatatttgagtaaagatgtctcaagcagagtacttagctacttagcttccaatcttgtgctactacttcaaatgcctttgattgttctttgcttcggtcagccttatgctcctttcagttttttttttttttgattgtacaatgttctttgctcttcatgcttcttgttaactctcaagttgcatcctttctggatttattttcaggtcatgtggacagttctcaacagtagcatacttcaacaaagatcattgcttttcagcggaacctgataatctccaacaaacattcttcggtttacagtattaacaccagcaggatagtgctgttttcccattcttgaag

SEQ ID NO: 3609 - DNA, 729 bp, Arabidopsis thaliana
  Intron number 2 from transcript AT5G09710.1 (locus AT5G097 10) derived from phytozome v7.0 (chr-ID Chr5; pos 3009934 to 3010662 reverse strand)
tgaagcatattaaggtgatcatcactgccgacgaggtcagtttactttctactcgctgccttccatttttactagactactttgtagtaggtaggttcgactttgattatatattcgcatgatcaggttaaacttaggagaaatgaaatttcatcaactcgtataatgatgatactctactctataatcttctgtcgccctctttttgttcctctgttcttgctctgttttatcctttgtttctttttgcgatagacgaactcgttagtttgatcgatccactatcttgtgctcggttcttggcttaacgtgaattttgattcgtaacagttagggtacattttctaaatatagaaaacttttgtgttggaatttggttcctcctacttgaagggttttcttttctctagaagaagtttagacaattccgaaacttgctaaagtgggttgatttcacgatttgatctcaatactaatttgttaagacatatattactttaagtaccatcaaattttaatgtgagttctctaacattctgtagctggaacattttctctccattaaactgatggcttagaattcgaatgtttgtctatgtgttggctatttcagtctctctttgttttttaacacgacatgctacaggttttgcttcgggagccattaaatgaaaatgttattcccgttgcgaaggagtttgagagacgcttgggtgttgaaaacaggga

SEQ ID NO: 3610 - DNA, 654 bp, Arabidopsis thaliana
  Intron number 1 from transcript AT5G09830.1 (locus AT5G098 30) derived from phytozome v7.0 (chr-ID Chr5; pos 3058091 to 3058744 reverse strand)
cttcattgacttcgaaacttaagccaattcatctcgtgagtgttcttatactgctttcttctttcaatttcatctattgattagggtttgaaacttttgtgggaaactttgaaaccctaatcatcaaattgatctgggaaaattgccaaatttgagatttttgacctgctcactttgatcaaaatcatacactttgatagttggatcataagaggtactatgtattgtaataatctcagcatctagattatacatcactatgtgttgtctttcagctctgaaacagaatataaaaggtggttgtttgcgtagttaggtgtaatttgatgcagtgtgatactgagctcaggatttgatgacgtagtgttcctgatgtattagcaacttagtagtgagtgttcttgtcggaaaattttatttgtgtcatggttttttgtgaactagaactcaaaaagcagatccaaggatgtgtatagtttctttgctttataacatgtgaagattgaagttacttcaatgtcaatctatttcccttttcacttgattcatgtgttccaattgtttcaatctttagcttttagaattttttagtgacattgtttgtttttgtgtgtaccaggaagtcattgacatatctggagggtaagtaccgga

SEQ ID NO: 3611 - DNA, 649 bp, Arabidopsis thaliana
  Intron number 1 from transcript AT5G09960.1 (locus AT5G099 60) derived from phytozome v7.0 (chr-ID Chr5; pos 3106506 to 3107154)
gaagacgatcgaaaagaggtataaccatctgttttattatctcttgttagtttccccataaagtttctttaggaaactttgattttactaagaaatcgagatctgcttgtttggattttttcgagaattgaacattggttttgtagagctaatcaagctccaagcactactgatactgtttatattgaagattttgattaaaaatcagcactaatcttggtaatcggaaacaaaaaaaattgagttagtagtatattctaaagtttcatcctttttcacatctcgataagctgaaattttgttatcacgaggtatattttctactagtacttggtaagttcgaaactttattggattgataaagaaaagatcttactttaccctgattttatcgatcattgattaaaccaaagcttgtaaattgtcccataaagtcaagaacttgactttgtttcttagagagttcgtcctctttcttcttcacttgcttgctcatgatgcatcgttttgtaaatagctctgtttttttttcctttaagtatatgcttcattatgatttatgaaacctttttaagtttggtaatgtttgtttcgaaatgtctttgtttttgcagaagaacactccgtggctatcagtgccacagtttgg

SEQ ID NO: 3612 - DNA, 661 bp, Arabidopsis thaliana
  Intron number 1 from transcript AT5G09978.1 (locus AT5G099 78) derived from phytozome v7.0 (chr-ID Chr5; pos 3120825 to 3121485)
ttcgcggtctaactcctgataattctccggtgacggtgagtaatatgaatcaacaattcttataagttaatatgcacggattcatacaaaatagatttatgatcacttctatcaaaagcaattttctcgttttccttttaacgtgaaattcacaatcctatatcatatatattaaaacgatgattaatttgtttaatattcgtcagtgttatgaagtaaatatttctgataactgtttgtaatttcggagtttctttaatcgttattttttgtattttacaattttacatacttgtggaattttgaataactatttgccaaatgatcatgttcttaatcgtgattaaatttactcggatgggtacgatattaatatatggtagttggtacttgtataaagaaaatggtaaatggtttcttgagctcattcatataaaatcaatcatttaaaaaatcaaatacatgtttcgaatccgtgggctaatttatgaaacttgatttggaaactaagtctaaagtacgacatgaatgtttttttttttgtttctgaattattgtcacatctttcttttcaatatgaaatttctaatggaaaatgtgtatatgtaataatgttggtgacgaagatatcacaagaagtagaggaagagacagaggtagt

SEQ ID NO: 3613 - DNA, 747 bp, Arabidopsis thaliana
  Intron number 1 from transcript AT5G10030.1 (locus AT5G100 30) derived from phytozome v7.0 (chr-ID Chr5; pos 3139296 to 3140042 reverse strand)
tttgaagcccttttgacacaaaagaccagaacaaggttcgacttcggatctctcttctttctgaattttcatctcttggttgatatgaatatcattatctctgcttgactgcaaaaaaaggttcaaactttgtgtttctctgtttcattctcttattgaagctgtaacttttattctgatggttgcttctgatataccatttcatgatttgctatgtgataatttggttctatatcttataatcgaatcttgacttttataacaagaatgttatatcaaatcactgggtgagagtaatggattttttttccttattgggaggtgtttaagatggtccaccattagtggctaaaagaagaagatacagtaggaaccaataactgacaatgacattagagtttggtctgtttttggaaatgcaattagaggttttgagaacaaaattcagtgacttgtatctatttgacaacctttcaaaagacactagtaaaagaacagggcttttcgggtgtatatgatgactccgatgtttcgccatatcaatggagcttatagatgtagggaaggtagtagctagcgttgacgaattgggtgatggataatgacttaatgtcacaacctttgcttttggctgcaaatcacttacatatctctttaacttgtgatcttgtatcttttgcaattcttgactttgatgaatgaagttttgtatttttttttttttgttttgttgctagttgaagaaat

SEQ ID NO: 3614 - DNA, 385 bp, Arabidopsis thaliana
  Intron number 2 from transcript AT5G10050.1 (locus AT5G100 50) derived from phytozome v7.0 (chr-ID Chr5; pos 3144945 to 3145329)
ctcttaccgatactctgaggtttgcttttaccgttttcagatttggttccactgttttaacttatcaaacgccgctatttgtgtcgtttgaataatcttcctatgtcgcatgctgatatatattctgtttgttctgtcaatggagatttgatggtagtaaactaaaaattgttgaaatggtctaatctttttttaaggtgtgatcaaacttgagtatcattatttctgaggactaaagtctgatgttgggttaggttgatgattcttgatgttcatgacaagtgtagttgttcaaattatccagcaccggatggttttggtttgtcaattgttttgtaatgtttcctgcttaacgtcaggttggagcttcgtccgtttgggattg

SEQ ID NO: 3615 - DNA, 272 bp, Arabidopsis thaliana
  Intron number 1 from transcript AT5G10080.1 (locus AT5G100 80) derived from phytozome v7.0 (chr-ID Chr5; pos 3151129 to 3151400)
actttgggtacattgtttctttcattttcactctaaaattagaaagaaaaaaaattcctctttttttcttcaagtttctaaattttgtacctttagattcgattccgaagaaaagtcgtgttttgactaactcaatctgctacatagtcttttcctttgggtttacttcttttttggataattatgctaagttcttgaattttgtagattagtagtgatttgttgccttatatgagttttgtgtttgatgttttactcaggctacactatac

SEQ ID NO: 3616 - DNA, 447 bp, Arabidopsis thaliana
  Intron number 1 from transcript AT5G10190.1 (locus AT5G101 90) derived from phytozome v7.0 (chr-ID Chr5; pos 3199458 to 3199904)
ctttcctcgtcgccgtctccactactttcttccaggtttaaattcttttccctttttgctctgttctagaataaactcaaatcagatctgttcgagaatctgttgatttgggtagaaaaaagtctggagctttaggagttgatctagaaaactttcagtttaggcgattagacattgattttgaatggctggacttagtaatccttttgttttgttttgttttgttttgatgttgagatttttttgttcttatgtgaaggcattagaacttaagactgtgtcattgtgttcttcaggggattgcttcaatttcattgcaatgattatgaactcattgcaagtttcatttgtcacaaaggtgaatcgaatggattttacattgttcctatatatgtttgctggttgaaactaggtggcagtatcaagaggcttgaacgggatagggct

SEQ ID NO: 3617 - DNA, 435 bp, Arabidopsis thaliana
  Intron number 1 from transcript AT5G10230.1 (locus AT5G102 30) derived from phytozome v7.0 (chr-ID Chr5; pos 3210921 to 3211355 reverse strand)
agaagacgctgagcaactctacaaagcctttaaaggtttatgtccttctctataccccttcattaatcttttggttataactagtctagcattcgccttcttcgattgaatcctctatcagtttggttggtcatagcgtaatctatttcaactataccctcttatctgatcgatcatgtgtctgtatatattcgttgatctatatagtatatagatctagtttggtttatggtatggatttatttaatttggttaaaattactcctatcatcaaaaataatctattagtatttaatagacctttcaaaaattgatgaaacgagataaattttactagaattatatatctttttcaatctaatactgatgaatgatttcaaacatgattctgactctatttttctttaatgtaattgtgaatttgtctaatgcagg

SEQ ID NO: 3618 - DNA, 638 bp, Arabidopsis thaliana
  Intron number 1 from transcript AT5G10340.1 (locus AT5G103 40) derived from phytozome v7.0 (chr-ID Chr5; pos 3253244 to 3253881)
tccgtggggacatctcggtaatatcatgcgaacaagttatataccgccacccctaggccttgaagaacaccgaaaaggatggtagtactatttaatgttggaacgtcaaatgagattaaaataaatataaataattactagtggtattaattgcacttgcaattgttataaaataagaaaaaatagggaaaaaaaatacaaatatgaaaaacagaaatttaagcgtacgatgttagaagacataattgtaatagaattagatcggaacaaattcagatcgaatgaataatagattagatcgaagataagtttaaatcgaatgagtaattaaataagataggaacaagttcaaattaaatgaataatataattagatcaagataagtttgaatcgaatgtttagtagaattagatttatttttctttttccttttgaaaattttacttttatcatactgatttgatgaaatccgtttaaaattttaagatttctcaaattcataaaatcaaaaaaaaaaagaaaacagtttctagatttactgatctacccttttatttttctcggactctgactagggtgataggtttggtttataaataaagcatacggaggctcttgtcttcaatctataacattg

SEQ ID NO: 3619 - DNA, 603 bp, Arabidopsis thaliana
  Intron number 2 from transcript AT5G10580.2 (locus AT5G105 80) derived from phytozome v7.0 (chr-ID Chr5; pos 3348434 to 3349036)
ctgaactactcgagaaagctttcttgctcaatacggtaggtaataggctgttctacatgggcttgcctttgatgctatggatctttgggcctgtgcttgtgttcttgagctctgctttgataatccctgttctttataacctcgacttcgtgtttttgttgagcaataaggagaagggtaaagtcgattgcaatggaggttgtgatgacaacttctcgccttaattatctgttgatgttgaattcgaataatgataaagctgtttgttattactgatttactagtctaaaaagtctttcgatttactcttttcaaagcttaccaaaaaaaaaatgtactagatccgagtctttttttaatttttaattttttttcctggtgaagatattcatgatctgctatatataattagtaaaagttccatggatagtcaaaatggaaattaattaacaaaactatcttttttataaaattttttattactatgctgctaacaagtaacaatgatgcgaccatccttagtcccttacacttgattcgtctattattttttctaattcaaatgtcaattttttaatggcacagatactcgttttcaagtca

SEQ ID NO: 3620 - DNA, 560 bp, Arabidopsis thaliana
  Intron number 1 from transcript AT5G10770.1 (locus AT5G107 70) derived from phytozome v7.0 (chr-ID Chr5; pos 3404644 to 3405203 reverse strand)
ttcatcatcatcatcttgtgttctttctcccagaggtgatgatttcttagccaattcattttctgatatgattcattgtcttttagctttatagacaaggtagatgaatagagactctcaattaggaaacttaggttataaatcttgcttccaagtagttgatactattaccatcacagattcacaggactaagaaagcgatagtaaatatgtctttagtagtatatgtttaatgggggaaacgacaataattagtagttgtaatcaaaattttgttagctagttgagtgagttaacaaaaattgcaacaatttatactcttttgtgagttaattatataagtacaactctgtatgactccacataagttgaaaattttctttatcatttccttagatagtaatacatcaacgaccacaaaatataaggttttggtttttttttggtgataacttaaagaatctgtgggcagtgggcatattcgttttctttctaacgtgaactttttatctcattcctattcagcgtctactacaaagtcttcactgcacgtgacgcat

SEQ ID NO: 3621 - DNA, 892 bp, Arabidopsis thaliana
  Intron number 1 from transcript AT5G10946.1 (locus AT5G109 46) derived from phytozome v7.0 (chr-ID Chr5; pos 3456245 to 3457136 reverse strand)
aaagagagagtgagtgagtgattaaggaaaaaaaagtttgtttttcggcagcaattctgagtttatctccttaacctttgtttctttaaaaaaagaaaaattctaaaactgggaattagagaagaaaccctaacttgcagtgtccgtacttagattcatactttccttttatggatccatcgatcaagtctttgttagttgctgttttttcccagatttgatctcaagtaccttcgatctgtacttgtgtcatgttttatcttttattttttcatcggtttctggactaattggaatttcctatctacacatatacacatatccttgttttttctgtttcgtttttctaacatattatttagtgtcataactagataaatatatgttgatgggggaaaagaagttgacagaagagagtgagcacacaaaggggaagttgtataaaagttttgtatatggttgcttttgcgtgctcactctctttttgtcataacttctccttcatgaatcttccttattccattgttctagttatgattttgtgttcttatctgtctctgcataccaaattctctatgcatacatatgttgcatctatatatttttatataatttcagtttatgtagtttcaaaactttgtacattcatagtgatgaatcttagattttgtcttataatatctttacacatgtatgtgaaggtgtacacatagactattatgaataagatatttgttatatctctcatcgaatttattgtctatctccatttgggttatattttgttgacccatcgtggttagactagttagtaataggatgtttgtattataagtaaattatatattatgtaattgaaataaactcttttattttgcagactctagcacac

SEQ ID NO: 3622 - DNA, 498 bp, Arabidopsis thaliana
  Intron number 3 from transcript AT5G11170.1 (locus AT5G111 70) derived from phytozome v7.0 (chr-ID Chr5; pos 3553745 to 3554242)
tattgttgactctggatttgaacatccatctgaaggttattacaatgaaatacaccctacctttgacttttctgccttgcctttcaccattctattaccgaatgatattgtataatttacagaagtgacttctccataagatgttttagttgtccggaaacttttaattatatgtacttcgtctagttttgagaagatatgttggttaaagatattttatactttatcttggtcctttgcttatcatctaactaaattaaaaaaagtttgtgttgaggtcaaattcttttttatttcctgttataatggtttttgttttctttgtttattaacgtttcactgattactttttccaggtaataaacgatatttcaatctattggtttggagtgagcttaaacatgtgctaaagccaccaatttaaaagatatggaggttatcatctacttataaaggctttcttcggtacaattttctttggttctccaccagtgcaac

SEQ ID NO: 3623 - DNA, 1042 bp, Arabidopsis thaliana
  Intron number 1 from transcript AT5G11180.1 (locus AT5G111 80) derived from phytozome v7.0 (chr-ID Chr5; pos 3560295 to 3561336 reverse strand)
ttccaaacgaactgttgttggtgctgcagcttcaggtactcttcttatctttcgttatgaacattcatcagtcatgtatgaaatttgatcttacatatattaacgtactatcttacaaaaaacaaaacatggaaaatttaatttttctatacatataacatattattacaattcatttcagataatattcatttttgatttattttttataattttataatttttattaaaatttaatttttattattacaatttataatttttaaattagtagaagtattttaaataaaaactagctggcgatcgcagcaagttgagctcaaagtcccacatatagtgacttgaacaatctcaatgattaacgaaggactagttctttctataatcgtcaacgttgtctaagagcatcattattggttgtctcttagattaattcttaggataagaacatctccttttaactcttatataagagacaaaatgacaaaatgtctcttatataagagttaaaatgagatgttcttagtaatcaatgaccaaaaaaaatcctacgaactaatctaagaaacaaccaataatgatgctctaagtcttctgatagatctaaagatccttgtcttaggaagtgactgtgttgtctaaattggcaaatgatgagtcctattgattcgaaagtaaagatcgttccaaaatcagcaataatttaaaacatgagaaaatctatatatttttcatgaaattcaatgaaagagacatcaaaattaaaatagatctagtatataagaataaactggaattctagaattttatagttagaaaataatagtgtttgacatgatagatttgtatatcatgtattgaatttgaaggcaatttgaattggatcccacggatcaaatctcaagtcctctctacatcatattttatagaagctatgttttagtcatttctaagcacattttgagaaatgacttctcaaataggaaatattaacttaaactttgcagctttatacttgataaagaagagggaagtggtggcc

SEQ ID NO: 3624 - DNA, 345 bp, Arabidopsis thaliana
  Intron number 2 from transcript AT5G11240.1 (locus AT5G112 40) derived from phytozome v7.0 (chr-ID Chr5; pos 3583028 to 3583372)
gccgtatcaaggtatcttcacttttcttctattatggtctaaaggctaaaatttatataagtgtaatccacatacctaattacttttcttcttcagttttcgttgtaattttttagttttattggtaattatatactcggtggtggattgttgttattcatacaattatgcacgggcctctttgatcttacttgtgttgattggaatttggctcgtagtttatggccctgttcagtttgtatggattttttattcaaagagaagatcttttgctttttaattaatgtaattttcgttcgatgttgtatagatttgggatactgtcaagggtcaggtccaaacaga

SEQ ID NO: 3625 - DNA, 535 bp, Arabidopsis thaliana
  Intron number 2 from transcript AT5G11470.1 (locus AT5G114 70) derived from phytozome v7.0 (chr-ID Chr5; pos 3666179 to 3666713 reverse strand)
gtgaaggtcttggccttgctaataccaaccaattggtaactaattattcttctgcatactatgttgaattttcattctccatagtacttattgagcatgtcatggcattttcttattgatatgtatctcatattatgctgcgtactaaattatattgtccatccacttttgttttgttgaatattatattctttgcggtaggataacttgttctctgttcaccaacatatgtgctccaagtagcttttttgtcctcttttgtaaccatggcatagatctcatcccaaagctccccaaacagaaatacgttgatcaattacttttgttggtttctaacattgttacaagcgtctttctatggtgaatcaaacatgtccttgtgtcttgagagatttacctttgcttcactttttggttgaaatattcgtttgaactttgtgccattgtgcgaatagctggtgcaagtgattagttaaaattacacctgctttaatactgatatgacattatttcactaggaagcaatcggtggaaa

SEQ ID NO: 3626 - DNA, 839 bp, Arabidopsis thaliana
  Intron number 1 from transcript AT5G11470.1 (locus AT5G114 70) derived from phytozome v7.0 (chr-ID Chr5; pos 3667042 to 3667880 reverse strand)
gcttcggaaactgtaaactgatttcttcagtgaaggtaaaaaaaaagttgaattgttggtgaaagtacttcgtcttctttgtttcccagttaatcgctgtttcttacgaacgcaaaagcttatctcaacctacattgcgtaaatgatattatcacttttttgcaattgcgtagtttggtgatcttttgatttttctgaatcgcctttttgtttacttgaactcaattatctactattttatttagtgttctttgttctcacggagtttctttcgttgatcaactgatttgctgctttcggtattttttggtggacttgcgtgcttttttagagagccttgtcattactaaacgttagtctgagtactgaatacttaaaagtttcttatggattggttatggtgcattataagaatgtattggatggtttttggttatatgcacaatgctaatgatttcaattgaaagattaatgtgttgccttgtttaacagtggatctgatagagtttcgggagtgattttggtttgattgattgggagtatatggtggatcattgatttgatctatcttgtgatggttttttccttttatgtgtcttctggtcttagtattttaagtccttgaagtgttctgcaccttgtcaagggtactctcggttatccttggaaaacgagtttgatcttctgttggaattcttgtattcctttcgatttatcaatgcaaccatttaaatgaacgattgtggatatatgttcagtcgtctaatcagttcctcgtgcaattctgatctggatacactattctgctgtttgtctaggtagaaaattgcttttagaga

SEQ ID NO: 3627 - DNA, 908 bp, Arabidopsis thaliana
  Intron number 1 from transcript AT5G11480.1 (locus AT5G114 80) derived from phytozome v7.0 (chr-ID Chr5; pos 3670094 to 3671001 reverse strand)
gaggaaacgccttgccttgacttctaagaaacctggtaagctgagttttgctccatcgtgcttatcatttagctggtgtgtgatttctacattattttgagtgtcattatatttatggatcaaaagcttccattttggggacctgaagcactggttaagtagatgatagattaagagaacaacttggcttattcccgttgaaatgtcatgtgaaactgaagcaatcacatctttgagacagagtgatgtagtcagttttttaatgttcatgaggagattggagagtgttggtaaagcagtaaggagaagtcagtttttgttgttgttggaagcttaggtcaattgatttattgaaatgattcttctataactgggttttgctagagtccacactaatcatgggctaacgcctagcatttgaattctgtagtggccaagtgaggcattgagtgggaatcagtctctagtctcaatcaatagtcaatagtcaataggacaaaaccaatagactatccccacttggttagattgaacagatttgccttggagcatcggcatttgttggtttctagtacttttgaagatggggtattgttgtagagaatacgaaccaagatatggcatcagtggatataatctttgagtaatatgtgttgctgctagaccatgctataataatttcatgaaaatgggatttggatgtatatatgatgaaagtatctctatagtgtcgaccgaacatctcattcacaaatactccttcctagtgaaccacttagaaaggttgatagacgtgatattagaattggaaactgataggcatccatgccgtgcttgtgcttgtgcttatgctacatataggttgattataacttctggtagtttattcttcatgtaggaaagacgca

SEQ ID NO: 3628 - DNA, 362 bp, Arabidopsis thaliana
  Intron number 1 from transcript AT5G11510.1 (locus AT5G115 10) derived from phytozome v7.0 (chr-ID Chr5; pos 3680047 to 3680408)
aaccacttccatttctgaagctcgcataggtttgttttatgactccatggttctatatttgaatctaggttggtttgggtatgatttgattttgaatttattgtctgcttgatctaaatagtttgctctttttaaaaatgactgcgaacaaaagttcacaattagtagtcattgtaattattttcaagcttcgagtatgttttgtcctgattagcgaccgactttttttggagctgaatccttagtgttttttttctttacaatttatcttaggaagattgtgagatggtacaaaggagggaatagtagttttgaaatataatgttttggagttacaacattgcagagaagaaaggcaacgt

SEQ ID NO: 3629 - DNA, 360 bp, Arabidopsis thaliana
  Intron number 2 from transcript AT5G11570.1 (locus AT5G115 70) derived from phytozome v7.0 (chr-ID Chr5; pos 3717551 to 3717910 reverse strand)
ctctgatcgggtttggatcctccatcagccttacggtacatatttgatgtcataacctcacaaaatcagaacaagaaatgaaattggagaaagataagaaattatatatgaaaactggagaaccttgcgtcttaacacaattgttgcaaaagtcctagtccatattatcattgataaaaaaaaacaaataactatatattctaatgatgcatgtaattatactatacattaataataatcatttgtagaattttcaaaaaatatgtaatcatcctatattttccgtggctattattttatttatgtaacttttgctttattagttgtatttaatttaatattgcttgtgagtaacaggga

SEQ ID NO: 3630 - DNA, 398 bp, Arabidopsis thaliana
  Intron number 5 from transcript AT5G11640.1 (locus AT5G116 40) derived from phytozome v7.0 (chr-ID Chr5; pos 3742729 to 3743126)
gtaacacaacaaaatactggttggtatgtggctacttggctttattcttctacttgataatgttgttgatcttttcaagttagtgagcttgtgatagcagatgatacagttgataaaccaaggactagtttttttggtagctaaaatgatttgattatgtttagcagtgcttacactcagattctagtaaagcataaggtctatgaagctagatttatatagcctccccttactattttgacatcaaattttgtcccttttttttggttaggtgtcaaaccaattaagaaacagaactgatctgcaacatcttaattagtgaaagctcaaaagggtactgttgtaactattatttatgatgatgtgctttcacaccttttgcagatagaattctttgc

SEQ ID NO: 3631 - DNA, 635 bp, Arabidopsis thaliana
  Intron number 3 from transcript AT5G13120.2 (locus AT5G131 20) derived from phytozome v7.0 (chr-ID Chr5; pos 4163399 to 4164033 reverse strand)
attcagggaggagactttgagaagggcaatgtgagtttttctggctgaattccttggcagcaccagtttcttgttagctgacttgcggtccatattatgtttcttttgatttactttggttcatcttattttctgccaaatcacaaagtaaagtaagctgtctcatatcaggatggcaggatgtttattaatttcttggatgtggtacatagtataagtcaaatctttctcgataaggaaggatgcttaagttcttacttgtacggatttagagtcgctcttgaaagcacatgtttgggtacattaataggaaaaagcctgacctttggagagctttctacagacaatctttctgatagctggctctctgatttgtagatcagtggctttagaagaacaacccctgttaatcttagacttttgttcttttctatatagataatacctgggctgtagggaacttatatactggttcgtgggtatgcaactagctgtagctcggtagaaatatattgttattttctgtttctgcccatctcagttaccgaagattcttctagtaactgctaggagaattccataataatgatacagaagtctaattgttgagcagggaactggaggtaaaagtgtat

SEQ ID NO: 3632 - DNA, 437 bp, Arabidopsis thaliana
  Intron number 1 from transcript AT5G13780.1 (locus AT5G137 80) derived from phytozome v7.0 (chr-ID Chr5; pos 4447873 to 4448309 reverse strand)
gaacaggttactcctctaatcttcaaatttcgtatatctttgcattcaattaagcagattcattgaattgatatagagtttcgtgttgaataattggatgatatagaagaatttgtgtggtttgagtttatgttgaagattgatataatggtgtaagttaaaggattttattgaaagttagaaactttgtgtgtcaaagtgattgttgcaattgtcattggaatttgaagtaacttaagctctgtagattgtataaagagattaagttttgtctccggtcgtgttatgcttttgactgacggagacgagtagtttctgattgcctgtgaaactaataatagcagacctcaaaggttgatagttgttttcactctcgaacttggactttttaaattcattctcggtcggggttttgtggcaggtttacgaggctgagt

SEQ ID NO: 3633 - DNA, 208 bp, Arabidopsis thaliana
  Intron number 1 from transcript AT5G13790.1 (locus AT5G137 90) derived from phytozome v7.0 (chr-ID Chr5; pos 4450448 to 4450655 reverse strand)
aagtctggcaagctcttcgagtactccagtactgggtaacacttatttctttttgattcaattttgtttttgcatgtcttgtcttgttgtgattagaatcgatttcgggaactgtaattgatttttgtttttgcatgtttgttaagattaaaagttttctgattgagctgaagagagtcctaattttgaattctcatttgattttaga

SEQ ID NO: 3634 - DNA, 535 bp, Arabidopsis thaliana
  Intron number 1 from transcript AT5G13820.1 (locus AT5G138 20) derived from phytozome v7.0 (chr-ID Chr5; pos 4461144 to 4461678)
gccagattgtgatccaggaatcgttggcttgttaggtgagtttttttgttcatcacaattcatgttctcaattctgtttttctgatccacaaactcaattcatgttctgtttttggtgacaaaaaagtattgaatctgaagtcgaataaattatttggcggtttgtcagaagttggcaatcgagatctgattatgttttattgtttgtttctacgtaaattgtgagcatttaagttacatttgtttcattgatctaagtttttgcgtttcatctatacgttgcttgtttcgctgcatttttgcatgttttttaaaaaacaaacaaagtgatcaagggtttggtgttcattgttgatctgaatctgtatagggcttagttttatcttcctgattttttttttttttttgcatttgacctcggatctgttgatcattagtttaagaatgtgttcaaattatactgattagcttaattttgttggagatgatcatgacattaaaagtctttgatttttttgcaggttgttgttttgtt

SEQ ID NO: 3635 - DNA, 517 bp, Arabidopsis thaliana
  Intron number 1 from transcript AT5G13825.1 (locus AT5G138 25) derived from phytozome v7.0 (chr-ID Chr5; pos 4465197 to 4465713 reverse strand)
accgactctaccgggtaactattattttcttttgatggaaaattaacatgctatcaactaagtggtagtagtttagttgttcttgtcatgttgatttagatttttttactagactcaccttctattgtcaccgcaaaaaattcattagttttaagaattagtaatctatgttttgggatagaatctctctttctatgagaattgtattcatttttcaagataatatatgtttgatttggcaagtatgattaaagtatagtttcgagacccgagtcaagaaaaatgtatgcacatgcatatagtttcttctctaaatctcaagctcactcaaatgttagtttttatcctagtttttacttcttcttttttgtcaactcttagcttttactgcatatatgattcttcattctatatgtgtgtgtttatatatatcacacatttttatcatttaatttcaatgtacattataatataacagattttaatatttgtttagttttcaatgtgcagtattttt

SEQ ID NO: 3636 - DNA, 582 bp, Arabidopsis thaliana
  Intron number 2 from transcript AT5G14140.1 (locus AT5G141 40) derived from phytozome v7.0 (chr-ID Chr5; pos 4562203 to 4562784)
aaccatctgcataaatttgtggaaattgaaaccaggtatttctccttcttcacggatgagattttttttttgttgcggactgttttctgatagtaaatgaaaacaattcagtcaactatggcaatgattataatttttagattagattattgcttacaagagtttcatgtgttttacattggtttttgatgtgttattctcttgattggtatactgaagctaagaatctgtactgttatttttgtttttttgtcttggtgaatctggtttggtgtcaatgccatttatcctatttctgattgtttactgtgcagttcacatatgtgttggtagtgcgtgtaagaattctagctaatagtaaccaaatggctatgaatttgatcactgttatctatgtagttttctttcaatatccacatttttaagtggcaatcagtaatatggcattgtgtcactgatcaaatttatgtagactagtttcaattccaaatttggtccacaattatctacgaaatttgatggtcatgagtttgactattttgagcagaagaatctcgtgtcccattgttggctgtcctgaac

SEQ ID NO: 3637 - DNA, 558 bp, Arabidopsis thaliana
  Intron number 1 from transcript AT5G14480.1 (locus AT5G144 80) derived from phytozome v7.0 (chr-ID Chr5; pos 4668036 to 4668593)
tttgtggacaggttcgttctgtctctcgtttccacaaattttctctaatttcgtattgaatcggatttcgatttttgttcattgtttcgtttcgcattaatgaaatcgatattctgatacctttgaaattggatgagaattcgtagtaatgtggttttaaatttttccgatttctgattgtttggtaattttcatagggtttgtgttcttattcttatgttattgtcggaatttaaggattgagaggacgattggattctgtctcgattgtttttttttgtctgaatatttgaggcgaatgtctcccaaaatttcatgaacaattttaggttttgtttcatgataatctgggattttcgattgaatttggtgtaatttgttttagggttacactatacaaatacaatctctgtatagcgttacaaggattgtaatattcttttctcgatattggaatctaatttcagatttttggatttacaatggactatttttgattctctgatgttgtgtgaaatttttctgagtattttcctgggttggtttatgtttggcagg

SEQ ID NO: 3638 - DNA, 312 bp, Arabidopsis thaliana
  Intron number 2 from transcript AT5G14540.1 (locus AT5G145 40) derived from phytozome v7.0 (chr-ID Chr5; pos 4688363 to 4688674 reverse strand)
ttagaggtactctactcttttgggatacctaatggagattaatttgaaattagaaataatcacatgaatctgagatactagacaaacgttcttctctgccttttggttttggatgccatttcttgactggcctgggaattcttgatctgttaacgtcaaacaagtttctggtttcatatttttcatgtttcaatgcatctgagctttcatacttttcgctatatcatctatcaagatcctagattcctcagttccttctttgtatgattgcattcaggtgcaaaacggtgtacagttgttgaaggacaaaca

SEQ ID NO: 3639 - DNA, 505 bp, Arabidopsis thaliana
  Intron number 1 from transcript AT5G14680.1 (locus AT5G146 80) derived from phytozome v7.0 (chr-ID Chr5; pos 4732378 to 4732882 reverse strand)
tctcttgctccacgttcaagttcaagacgaagacggttacttctctctctcattcgatcgttgaattttgaatatcgtgatacttggatttgagtctgtatctgtctgcttaatgttgttgatcattagtttcaatgatgatgctcaacggatattttttagggtataagtagattaattcaggctaaattaggtgtttgtatatgttctcaagacttgatctctagtgttttagctgtttgtgagggtcgtagagttttcaatggaagtcaaagaaccgacaagaactgtttttggttagttagaagaatctagatccacttctgagaagaattgtgcttttgatttctaagaaatattatggaaaagactttcttcatgtttatgtgatgtttttcctcttcattgggagcaatgcaataatgtaccaagttttatttttgttaggtagcattaataaatgtgatcttacttgttctgattatgaattgggaaccaggttttg

SEQ ID NO: 3640 - DNA, 930 bp, Arabidopsis thaliana
  Intron number 1 from transcript AT5G14790.1 (locus AT5G147 90) derived from phytozome v7.0 (chr-ID Chr5; pos 4783128 to 4784057)
ggaggctgtgtttttgccaccgctttgattcgccggtaaatttctctagctccatttttgaatacgcatttgcaagtttgaactggtttcgataatcatttgatctctataatttgagaattagtcagccggtggaaagtatatgaatcggaaatggaatcgcgaggattttgttttggaaattaattgagatcttctcagagttcttgagtgagatcgtgtttttgttgttattgttaaatcgcttgaaattcgaattggaaatgtagatctatgctatgtctcgttttgtgctgttgaattggtcccgttttgatcttattcaacagtctgtgaagttgacaagtagagttttacttccctattgatggcattttactattgttcttgtttttgagattcttgtgtgtttatcccgaaattgagaaaatatttgagtgtacgaagagactaaagagctgatcttaaggctaaagtgtcttattatttgagttttggtttgtaattgtatacacatgaatctacaaagcttgaatcagccttctttatatttctgtttgtgggtggagtttcttagctgattcaagctttgtggaacttaaagatctgtttgcaatttctaaagatctattgctatgtgatgaccgatgagcttgaaacggatttaagtttctcattttagtcttactgtaacagtttcacgaaaactcagtatcctttgagcttttatggaagtaaattcgagaacgtgttagatatgtagagttggttatgattctggtctacattgttataagttagatttcttcctgcagtgtgcttgaccttgcactggttaattattatatccatggtattctctaccacggtctgtatttagttttgatgatgatttttttttctcctgtttttatgcaggtaagttcacgt

SEQ ID NO: 3641 - DNA, 530 bp, Arabidopsis thaliana
  Intron number 3 from transcript AT5G14890.1 (locus AT5G148 90) derived from phytozome v7.0 (chr-ID Chr5; pos 4818617 to 4819146)
cctctttctagatgtaagttcacttcatatctatcttgcatttgattgattataaagaaactcttaagatcgatttttccggacacgtatacaatttattttatgggatattcaatcaattcccattcctatatatgacccaccaaaaatgttaaatcatgtatgcacaattatgctttgcttcaagatggggattcgttttggtgcgctttttattttttagttcagttaaaaagtgagttcttcatttcagattccaaagtttctttctttgaaaaccaaagccttttatagattataacttttgcactttagtccacaacacgactcattagcttttatccatgctctgctttgttctctgtttttcaggtttattcattctgttctttcttgttcgtcaagttaacaaccttttgtcagactaaagcaccgaactattgcttatggatagattctaggatttaaattagacagattcagattcttagggatttgtgaattaatctgtgtttttgaatatgctgaag

SEQ ID NO: 3642 - DNA, 684 bp, Arabidopsis thaliana
  Intron number 3 from transcript AT5G15030.1 (locus AT5G150 30) derived from phytozome v7.0 (chr-ID Chr5; pos 4867690 to 4868373 reverse strand)
ttccgtaaggttttgttcgattttaaggcacaacggtaagatcttgactggttttataatttacttttggtttagctttaaggttttgatgagatttgcttatataatttcttgcatttacaggattgatcgttctatattgtatgcacgattgaagaagttgtttaagaagcacaaacatttgattatcggctttaacacctttttgtcacttggagataagatatttcttcatggtgacgcagaagcctctactagctccaccgcataagactattgaaatttcctatcatggtcatgacaccaatgataccatcaaaatctctaaactaatctctatgttcagtttttggtggtttattatcaaatatgtttctttgtaatccatgcatgagggaacgtttcactgcaataaagtatgacctcttatattttctttacgttcacataaatttggttacaaaaataaaaataaaaataaaaataaatggttacaaaaaagaaagaaataaaatcctaataaatactttaatgggccttacttcggctgataatgggatataggcccaaagaagttgcaaacggacggttttaataggcgcaatttgttctatttgtcatcgcaacactcttgttctgatttgcatagaatcgtcgctgatcgaagtgattctgctcgatttt

SEQ ID NO: 3643 - DNA, 852 bp, Arabidopsis thaliana
  Intron number 1 from transcript AT5G15160.1 (locus AT5G151 60) derived from phytozome v7.0 (chr-ID Chr5; pos 4921608 to 4922459 reverse strand)
ttccggagattcgccagaaccgtcgttccaacacggtaaatcttttcaaaagttactgtgtttcttctatgtaccaaggttttggcatagtcacataagttttactttgatgatatttatttagggttagctattatgtttaatagagaatcacgcatatacaagtatacaacatgttagaatagtgcattatagtcatagaagtacgtgtgggagactgcattttgaagtttctaaaattacttttgaccattaaccggactttgaggagaggggaacatattttccctaacttcagcattaagcttctagttaattttacttttattattgattaactacattgaatgtgagacgactatattgcttcacggaccatcaattcaatacatttatgtacagcaccgactaatttttatatttggttttcttagtttctatataacaagaaaagtacgaactctagaaaaataagaaaaagctggtttctataaatggaagcatcgttttcttatagtacacacaaccaatcagatttgttctcaatttcaaaacaatgtgttggttaagttatgagcatttttatttttttgataaagtatgggcattttatcttaagctttaggtttaacttttaacctatgcatagtgtagtatgtcaagcaactagcgtcaatatattttcttacattattaacacgcatcataacttcaagctaagacttgtttctgttgttgttaaagcaagctaagacttgtttgaatatttatattgaatccttactataaaatgtacaattgtgaaaattgtttgtaggtatcagcgtcgaaagtgttacaagagacttgcaa

SEQ ID NO: 3644 - DNA, 363 bp, Arabidopsis thaliana
  Intron number 2 from transcript AT5G15540.1 (locus AT5G155 40) derived from phytozome v7.0 (chr-ID Chr5; pos 5056183 to 5056545 reverse strand)
ttacccccggtaaatgaagccttctcatttttttttccttttttggctaatctgtggagtaacagatttcggggaaaatattgaacatctttttgaaaagaatcctaggtttttgaatatttggtccgcatttaagattcttttaatgcttgatcctagtagtatcttccttctttgtttatccagtcaggtggtagtgaacctctactcgacgttccattgtgctaagctttaatagttgtttggttgttccaggcaaacttgtaattgtgttagtgtatgctagattttaatatgtttgggtttgttatttattacaattttcaagtttatcaggtccgacctgcgatccactctttacca

SEQ ID NO: 3645 - DNA, 386 bp, Arabidopsis thaliana
  Intron number 2 from transcript AT5G15540.2 (locus AT5G155 40) derived from phytozome v7.0 (chr-ID Chr5; pos 5056183 to 5056568 reverse strand)
caatcctggagcatttgagtatgttacccccggtaaatgaagccttctcatttttttttccttttttggctaatctgtggagtaacagatttcggggaaaatattgaacatctttttgaaaagaatcctaggtttttgaatatttggtccgcatttaagattcttttaatgcttgatcctagtagtatcttccttctttgtttatccagtcaggtggtagtgaacctctactcgacgttccattgtgctaagctttaatagttgtttggttgttccaggcaaacttgtaattgtgttagtgtatgctagattttaatatgtttgggtttgttatttattacaattttcaagtttatcaggtccgacctgcgatccactctttacca

SEQ ID NO: 3646 - DNA, 476 bp, Arabidopsis thaliana
  Intron number 1 from transcript AT5G15700.1 (locus AT5G157 00) derived from phytozome v7.0 (chr-ID Chr5; pos 5120263 to 5120738 reverse strand)
ccattgaacaagaggttgggtagcttcatcttgatctggtttctactttgtttatataattatatcatatcatctgccggtaattttcttggtttgccggtatagtgggaaatttgatctcttaaactgtttccctcactagtgaacctaaaccattgaggattaaactctatgtataccatagctggatactggaactgttagcctgatcttaaagcaaaaccgattgctttaatatgtggaacatgatattgataaaatattcactatttgtgaatggaactccttcattttagcatgttacagttgtaattaatcatataaaaacaacctttatatggaggtgtgaagtaatattttctcttgtattattagcctttagggttccttgattgtcttgatcttctctatggtgttttggatggtttgtattctaatggtgttgtttttctctatgtgaattgatagataagaat

SEQ ID NO: 3647 - DNA, 871 bp, Arabidopsis thaliana
  Intron number 1 from transcript AT5G15800.2 (locus AT5G158 00) derived from phytozome v7.0 (chr-ID Chr5; pos 5152731 to 5153601 reverse strand)
agttttgcagctcctcaaagtaaacaactctctcactctttatcagtttcttgattgagtttttgctagatctgagcttagatctttgtctcaaggacttgttatatatagatcacacgatcttgatttctacgaagttgagttaattagatttcttgatttcattttctagggtttttttccaattcttgaaatttaagatctggtttttttgttgtcaatgatttagaactgtgaattttgtaatcgaatagattccaaatcctgatatgcaatctgaaaagttttatataattaatatatgtctgtgtgattggaaacttaaaagttgttcacagatttctatgaaaattacaagtatccaacgtagaatgataatatatggttacatgcattaaccatttgttagttcatcatactttatggtggttaaaacttcaaacgcgtgtatatctgtgaaggctttgattgtttgttttttcttaaaaacaatgtttaatagatttttaattatatgttaaaatagttttgcttacatgcattcaagaaaatatagcgattaattccttttttcaaatcacaatttgtgaatcaaacgaaaacgtaagatattgcttgcaaatgataggattgaactattgatatttgtaaatataaatacgaaactttacgtttgaaagttgaaacaatcaaatccaaatcaactcgtatataatcagataaataatggaaacaatcttcaattttgatggaagaatactttaaaacttgaagagctttttttttatggtgatttataggtttagatctccaaagtcaagtatgatctttttaataaactcttattctctctttttgagttattttcagc

SEQ ID NO: 3648 - DNA, 461 bp, Arabidopsis thaliana
  Intron number 5 from transcript AT5G15930.1 (locus AT5G159 30) derived from phytozome v7.0 (chr-ID Chr5; pos 5201202 to 5201662)
gagctgtccactccccaatagaaggattgtatcaggtgagactttcttcttactctagaagataccgatatgctattagttgctactttcctctttggttacgcgagtttgataatgatagagccgctttgattgtttgagggatagtaagaaaatgacataaagtcaaatagataaaaaaaaaaaaaatcctttccttcatcaactagttagtttatgactgctttttcagattctctgccaactatcctgtagagagactttctattcttttaagagtctccaagattagcttcagtctctatcaaacgtgcttcttgctgaagttatgatagtagctctttggaacattatgcttgaaaacagaatgtcaattccttaagacaattttaatgatttaatatgttctgatttgtgtaaatgtaggcagggcttcctcttgtacagcaatatctgttaca

SEQ ID NO: 3649 - DNA, 372 bp, Arabidopsis thaliana
  Intron number 2 from transcript AT5G16040.1 (locus AT5G160 40) derived from phytozome v7.0 (chr-ID Chr5; pos 5242678 to 5243049 reverse strand)
gcaaggttacttatccaatttcctttatgtgtccttgttgtgtcttctttggttggtttcgcttagaactaactaaagtacaatgctttgctttgattttgcgatttgattctaagccatgtctttaagattttcttagttcgctttacatagggtttttgagatctgtaggaccaattaaaaagggtttaaagctcgtattttttttcttgtcctgaagtccaactaaaatgcaaccaatatgtttgtctgaggttactctcgaatagatcatcagactctggttcttgtctccatggtgtagtttatgattgatgtgtcaccaacatatagaaataatatggtctcttaaatggtttctcagctgtttac

SEQ ID NO: 3650 - DNA, 213 bp, Arabidopsis thaliana
  Intron number 1 from transcript AT5G16120.2 (locus AT5G161 20) derived from phytozome v7.0 (chr-ID Chr5; pos 5265823 to 5266035)
attcgtaattatccatattcatttttttcaaacttgagatttatttttcagtggaaaaataaaaagttgttatctttaagaataacaataaaaaaagatttttttagaagataaaattttggtgttgcgtggatcaatttgattgatctgcaaaagggacaatctttgtttatcttagggtttgtagataaaggaagaagatcgttgtggcaa

SEQ ID NO: 3651 - DNA, 588 bp, Arabidopsis thaliana
  Intron number 1 from transcript AT5G16210.1 (locus AT5G162 10) derived from phytozome v7.0 (chr-ID Chr5; pos 5297028 to 5297615 reverse strand)
tcctgatcagatttctcggtataattcaattcgaggttcgccaattttccgcattctgcctcacattgttattttgtttgctaccgaaattgtcagctaaatcgtccctctcagtgtggttgagctgcgttacattttagtgatctttttggggatctgttgtatgatgtgaataaattagctatcttatttggtctttcttaattcagaaagcagttgaatagtgttcaggttggatcatggacatgttttaaaagttatgaaaagcacagtagttcataaaatgatggagaatcctgaaaatggtggagtcatgtttttgttcttcatgcatttgatgttcttctcatagtctaagtttgaaaagcaatcataattgaaggtttcttgaatggtgattgttcagcttgttaaatggggtatactattatgaccaagaacaaacccatgtcggatcttgtgtcgcattctgaggtttttgattctatagtgtcaggctttcttagacaacttggtttgtagcgtagctagtaattgttaccctacaatgcagttgcggatccacaaagtttgttggaggagaaagaa

SEQ ID NO: 3652 - DNA, 615 bp, Arabidopsis thaliana
  Intron number 1 from transcript AT5G16220.1 (locus AT5G162 20) derived from phytozome v7.0 (chr-ID Chr5; pos 5299182 to 5299796 reverse strand)
caagtcaaatttgcgccaatagaatcagtgacaaggtattcttctatgctcttaactgtttgatttcaccatttgattgctttatcgaatagttttaggtgtaagcgttctaaaacttatgtacacaatttgttgtctaggaaatgcaatgtgctatgagtttttgaattgtttagccagtgacacaaatgaatttggtagtgttgcagaacgagtttaaatgtggtaatatataagctatctcttgaagtaatgattggaaacagaaactgaattcttggaatgatcctgtagtcgaattaggttctcgtcttcatgtatatgatctgtgaatgagttcataggcttaggcaatcaggagtttgtctcgtttgccattgtgttatggtaattctcaattcggatcaatgtgctccgagtctcggggatatgttgttcctcatttggtattcagctacgaatgtaatcttcgaattatatgtattggtagagaaggtgccaatcctctaaaccttgtttagttggaaagcctttttgtaactgttaaccatttttccttttgttcttactctacgaacagcaacgacaattctgcagtcaccccaataccttccc

SEQ ID NO: 3653 - DNA, 526 bp, Arabidopsis thaliana
  Intron number 1 from transcript AT5G16530.1 (locus AT5G165 30) derived from phytozome v7.0 (chr-ID Chr5; pos 5401379 to 5401904)
ggcttttatttctaacaggtaaaaatgaatctttaattaaactttatattggtacctataagatgtttaacaaagtgttaattagtatgtgtgatcagggactcaggagactacattaattccaccccttactccgaggcaaccgttaaaattgcctaaaaatatctatagtttgacgtttaaaccatctaaattattacttttctgtgtagcgcctgatgatctatagttaaaattttgacagaaatataggtcacgattgtttctttgcatttgcgtttatatttccatgtgacaaatgactaggacatttttaacatggtaacataatttgcaaacgtgacatgtacatgcaaataaactaatcatgattttaatctgaatattagagtctttgaccaaatttctattttatttgttttagtgtgaattttgggtttagggttttgattagtgttttgtatactcttggctaacaaataaagacttaagtctaataattgatggaaattaattggaaatatag

SEQ ID NO: 3654 - DNA, 696 bp, Arabidopsis thaliana
  Intron number 2 from transcript AT5G16800.1 (locus AT5G168 00) derived from phytozome v7.0 (chr-ID Chr5; pos 5525238 to 5525933 reverse strand)
ttactgccaaaatcgtacttgccaaagaaagcgaagtgagttgctttgtgttttgttcaagtgtcttcctttttcatcgtcttgttcaagtgtagatttcaaatgtccgaaatgggtttctttccactggagaaaataaagcttcaatttgtaacgtttcaagttatttttgaagcttgttttgaatggtttttgggttttgtaaagaagatgcaatgtcttgtaaagtgaaaattttgaatgtttgaaacattttcttaaaaatttcttaaaaatataaactttctacaatttcaacagctttttctaagcttttaagttttggttggagcttcttcagtagtaaaacattgtcttctctttgttcttcgccttttgggttttggttctgaaatttcgaaataactttatacagcaagtaacaagtaattgtgaagtgtagattttgaatgttgttgaaccatttcacaatgtctaatggtttaagcgtgaattttaaagccatgtacattagatgggtttcttacgaaagttctagaaaatcaaaaagagccagccactttattaacatcttgattatgatccaaacttgttttgtacttgttcgtttaatgttaagagtcatcaatggctgtttcttgggtaatatgttgatagattttctatgtcttgtacagatatcagatctaataagat

SEQ ID NO: 3655 - DNA, 399 bp, Arabidopsis thaliana
  Intron number 1 from transcript AT5G16810.1 (locus AT5G168 10) derived from phytozome v7.0 (chr-ID Chr5; pos 5529260 to 5529658 reverse strand)
taactaggtactctcactggatttttgatttctctctttatctggagcttctgtgttgtttctacgtcttcgtgtaacgaaatctctaattttatatcgaaattgtttgtgtatgtgtgaatctgtagttgcaacaggtttatgcactcattgcaatgtatacgtgagcttgacaattattcgaagggtttaacaaaaaaatcacttttgttagtgtatttgaattgggatacattgacctttcttatgattattgtgcatctttagctagattatgctacgtttgttggtctagttttactcttttatctgccgctgtgttctacttcgtttacttagcttttcaccacttctatactcctagttatacagggctgcagtcaggatctgactttgaat

SEQ ID NO: 3656 - DNA, 421 bp, Arabidopsis thaliana
  Intron number 1 from transcript AT5G16830.1 (locus AT5G168 30) derived from phytozome v7.0 (chr-ID Chr5; pos 5534558 to 5534978 reverse strand)
acacctaaagatactcttgaattacgagataagctgtcagtagcaattcttaatcacactcttcttctctttgttaaatctctgttgattagggttttggttttacttattgattttggtcgatttcatttcaatttttaattgaaaaagttttctaattgttttgaagctaatcctgcattattttcccttaaccgaagaacaaatttgagtttgctgatcgatgtgagacaacattgcaaataatgcctgacaacattgcaaataatgagctttttgtgtgtgtgtgtgtgtgtgtgtgtattgagaaattgttttttttttagattggtttcatctatttgttctgtgaattgttttaaagtgttaggttcttttgttggcaggcaaaagacaaggttacagatatccgaattggtga

SEQ ID NO: 3657 - DNA, 406 bp, Arabidopsis thaliana
  Intron number 1 from transcript AT5G17000.1 (locus AT5G170 00) derived from phytozome v7.0 (chr-ID Chr5; pos 5586393 to 5586798 reverse strand)
ctgctgctcttgctcaagcttacgctcccggcaaggtactatatattattgacgagattcttctttagttatccggttatgcaaatctccagcgaaattcgaatctgatgataatgtttactttgttttgatttggcttgcatgctttgatcttgagctcgttttcacttgtgtcttgagattgtttatgtgattttttctatttttggatatagtgacaagaacgatatctttataatatacttgacaaatccacaaatagaaaaggaactggatgttacataaacgttctcatcagttagattggtgttcttgaagattctagagaagaaaatgtgtctatctctgtttctcgtgttgactgttgtttttccgttgtgtgttttggtgcagccaatctttgggt

SEQ ID NO: 3658 - DNA, 398 bp, Arabidopsis thaliana
  Intron number 2 from transcript AT5G17060.1 (locus AT5G170 60) derived from phytozome v7.0 (chr-ID Chr5; pos 5611453 to 5611850)
tattggagaagttttgtctactgttcccaccattggtaagctttctggttgttttttgagctgtgattattcttgatctcagaagctatgtagttggattcatttcttgttttggaacaagatttggatagatctttggtgaatgctgtcagaattgtagatactcggaacatctatcttctccttcagctgaatctcatgatattctgccaacttttgtgatgccttgtacttctgaagtcataagttgtgtctgtgaatttctcttgtgtcattcagttatgatacatggttcttgtgacattatacttttatctatgattattgttctgtcattttccttttggttgtttggattatgtctgctgacaatttaaacttatgttactcaggattca

SEQ ID NO: 3659 - DNA, 476 bp, Arabidopsis thaliana
  Intron number 1 from transcript AT5G17070.1 (locus AT5G170 70) derived from phytozome v7.0 (chr-ID Chr5; pos 5615502 to 5615977 reverse strand)
gatcacgccgtccttcccgaagttcttgagcatccgtatgtttgcttccttctcttctcgttactctgatatctttgattttcatcactcttgcttgcttttgcgcttaaattatttcaccaatctctgttaagttaatgctagtagttcatatattgttattcttgaggcctgtgtgcaaaacgattggtttcttggatatatttgagtttcgaatcgatgagccaccttacgcttctgatgttgtttttaggatctaggtgtgttcttccgtttgcagaacttttacttaacgattttagatctgatttaggaggataatgcaagaacgaacactcaggtttatttttggttttccatagactggttggttgcagatgaggtcacgaggtgttaagtgtctcatttcatagtagatggtttctgtgctttaagattgatctttcttttgcagtggagctgagcagatagcagat

SEQ ID NO: 3660 - DNA, 430 bp, Arabidopsis thaliana
  Intron number 3 from transcript AT5G17170.1 (locus AT5G171 70) derived from phytozome v7.0 (chr-ID Chr5; pos 5650019 to 5650448)
gcaaaacctgattctgtctactttgttgttagcaggtgagtttgagtgtggttgtgattgcctctcttgtttttattttggtattatcttgctagaaatgtgggttctgctttttgaaataaggattagattgaaatgatcaaatttgtcgcaaatatgtttcctttgaatcctgtgcacaagaaacctgtgaaaagctgtagtcttgattaagtattccatggtctgatgctatagttgataagtcttcttgaggtgcaatgtgtaggtttagttctcttcttatgctatgtcattagattttcgcaatgcttagcttaacaagctgcataagttagcacctcaggttattcattaagctttttgaggttctttattagtttctgatgcaatttatgatctttgatcaaacacagaggtgcagaagttg

SEQ ID NO: 3661 - DNA, 771 bp, Arabidopsis thaliana
  Intron number 3 from transcript AT5G17320.1 (locus AT5G173 20) derived from phytozome v7.0 (chr-ID Chr5; pos 5706143 to 5706913 reverse strand)
aggtataatttcgcaagtatttatataaaaaataaattatatttcgcgtaatcagtatttatttttactatctcatatgttgcaaaatgaaattctaatttctaaagttgatgaccttttttttatcctagtaatgttttgaaaatattcatgatttgcacgcctcagttttgtgattatgcgtttatatgaacaataatatgatttgttacttttctggttttacctattattcagttcatttttgcgtgcaatttatttttaaatactaaaatagtctgatttttcatgacttatatacttaaaaaaatacttataattattaattaagtatgaatgtaaaagtttgtatacatttaagtaaaaaaatattttggctgttcaaaattttaacgcaacattttttttgttgttttggtattccaaaacattaattaagtaatcaaattatttgtagtttttttacttaattattaatcaaatatttaaaacgaaactgttgataaggtgcatgagtattagtgtattacatctctatataactattagatttaggtgtacttagtattcatctaattcattcatttgacagaaataattaatatttcactgaattttgatgagttggcactctattggagagtgattttcttggcatcatatgtgatgtgactatatgagattttaattttttaaactagaaatcgtctctacattggaaaaaatataatcactcatatagtttttattgatcaaaatatgaatttcagt

SEQ ID NO: 3662 - DNA, 605 bp, Arabidopsis thaliana
  Intron number 2 from transcript AT5G17450.1 (locus AT5G174 50) derived from phytozome v7.0 (chr-ID Chr5; pos 5755878 to 5756482)
aaaggttctctttccccatctctctctctgactttgaatcaaaactttcttcaatctctctttttttccctttttgtttccattttctttattctccatgcttttctcttttaaagattcttattcctctcttaaaattgcaattttatagctggccagaatatatataattacaattactaatcatttgctcaatcctttgattggaaaaactgtaccaaacttttagtccgaaaatattatgggtcaaatggtcccgaatctacctttatttacatatgttaaaagagtcccatgaagcattatcagtaaatatgatccaatcacatttttccatggagttattagtttctttactttataataattttctaataaaataaattttgtagcctaaaaaatatagtaaaagatcataaatatggtagtaaaacaatttggtaagaaaaatacttttaatcttaaactccaacatagtatgatattatagcaaactagaaaacaattttactgatatagatatacattttaatattacaaaaacttgaatgttgaaaccgaccggtacaggggtgaaatcggtggaggtgaaccggaaacagagc

SEQ ID NO: 3663 - DNA, 740 bp, Arabidopsis thaliana
  Intron number 1 from transcript AT5G17510.1 (locus AT5G175 10) derived from phytozome v7.0 (chr-ID Chr5; pos 5771135 to 5771874 reverse strand)
cttgcgagaggtttgttgtatcaaatgcaaattatcaaactttatatacttttgatgaaattcatcaaagccgcagcaattagtatagttttctagtctcaatttaatgatatcaaacattgatctatctattaataattgaatttaatgatctatcacgtttttttgggttttgagttgttatctccttaggagtcgccctgaggctttctgttgtcctatttggtagtagaattagaatgatactatatgttagccttttggtcaactatagattgtgactatagattaaaaacgggatctttgtctactggaagcatgagtttcttgaataggtatctttctgaaaaaggtagatgctgcatctgttatattttccctgtctataagtataagagatcctgttcttctctctgagtttgatgtggcatctctgcatggtcctcatttctttgagatcaatttggaattacgtcctgtcttttctcgtaaaagctataaatacctccttttgagtgttgagaaacattactgagttccgtggatattactaattattcttgctatttttgttacctgtcttcttccatatctgtgtgaaaaggttctattgacgtaatattaggtttataattgctagatagatccattgccttgtttgaacattctgtttctggtttactgcggtcactactcacattgcgtgtattcttacaacctgtgcagattattaccttatc

SEQ ID NO: 3664 - DNA, 338 bp, Arabidopsis thaliana
  Intron number 2 from transcript AT5G17560.1 (locus AT5G175 60) derived from phytozome v7.0 (chr-ID Chr5; pos 5789197 to 5789534)
tctggtaagtactctgatttaactcatttttgtcttccaatgatgattctttattacacttgagtgaagttgcagatgtgtgttatcactgttatggatagtgtttagtgaagtttgttagatatatagataaattcatattttgagattccttttctttcattttaatcacaaaaaagtttcaggttcaacaagtagtagaatcatcaaagttgggatataagttagtacttattcttctgctcttgatggaatccagtcatagattcttactttaacttgtcatattagatggttctgttacttaataccagttttgcttaatatttgtagcatca

SEQ ID NO: 3665 - DNA, 340 bp, Arabidopsis thaliana
  Intron number 1 from transcript AT5G17900.1 (locus AT5G179 00) derived from phytozome v7.0 (chr-ID Chr5; pos 5924792 to 5925131)
tttctccgaattgcaatcccctcattctccacaatgtaagtttcgtttattttgtcttcaatttcttctggattttgtcaatttatgtttcctttgttctctctttcagaatcatcgagtctcttgttttaggttttatccgattctgatttgtatacctgtcaacttcatttgttaatctgtgtgctgatttagcttcctaactctgttgatcgatttggggaattagctctttttcttttcgtggtgaatactaatgatgcaaagctttgaatctgatccatgtatttttttatatgctgcagaaacagatagctaatataattgagtttggatactc

SEQ ID NO: 3666 - DNA, 371 bp, Arabidopsis thaliana
  Intron number 1 from transcript AT5G18110.1 (locus AT5G181 10) derived from phytozome v7.0 (chr-ID Chr5; pos 5990097 to 5990467 reverse strand)
gagaccatcctttacgggtttgtcctttatccttagtatcgattcatttgcaatttgaatctgatcttagctgaaaatttgattcccgttcgtcaaagatttctgaactttgtatatgacggtttatagctagagtagtggaagattcggattctaaatctttgtttgttggagtttttgttttcaaattaggttttgcgaatttgtttagatgtatgtgagctcaaatgttataggattttcgtattggtggtattgattgtagctagaacaaggcagattgatttagaggaactgatttcattgttaagagtaagtactggctcagtgactctaggatttttggtaatgatgcagtacaagttttcgat

SEQ ID NO: 3667 - DNA, 418 bp, Arabidopsis thaliana
  Intron number 3 from transcript AT5G18230.2 (locus AT5G182 30) derived from phytozome v7.0 (chr-ID Chr5; pos 6025991 to 6026408 reverse strand)
gattcagtctagtgagatcaaagataagaaagtaagtggtcttcttcttcacagcctttttttttgtttaattgactaatgatgcgacttggatcccttgcattctcttaaattgcacctgcaaaccataatctatggctgtgttttcaatattataaacaaagctttcctaacatcttaaagaaaaagtcttgacttttgttcagttgagtaaggcgctttgcaccattggttttccctgtcatacttttggctaccctctaggctccagctagtttaatttggtttcacatagtctgaaaggagtagcttcatctctgatacatgttctgtttcacgtaattctgtcttaatatccgtttgttttttgactgaactgatcagattgtctgtcaattgacttaggtcagtgcatctt

SEQ ID NO: 3668 - DNA, 435 bp, Arabidopsis thaliana
  Intron number 3 from transcript AT5G18250.1 (locus AT5G182 50) derived from phytozome v7.0 (chr-ID Chr5; pos 6034276 to 6034710)
aggtactgcaagtgcattcattggatttaaccgtatgcagagtttcgccaactttaatctctcattgattgttatctctgttgatatcttcttgtgattattgctttcatttattgagtttgttcttctcttgttgattgtgtctgtgcaatcaacttccaccttctaatatgcgctacttatgattcatgtatgcttggagaaacaaagagtgttggattgtgttagaatgtctcaaaagctatgagtaatcatagttttttagtctgttctgagtgcatttgattctcggttgtatcgcttatgttccactgctgtaacagacgacattctagctatgttttagttagattggtagcagtttgatttaaagcttgatcgaaagagactgaatctgttgtacttatttgaatgctcttgttgatggaaacagca

SEQ ID NO: 3669 - DNA, 532 bp, Arabidopsis thaliana
  Intron number 3 from transcript AT5G18460.1 (locus AT5G184 60) derived from phytozome v7.0 (chr-ID Chr5; pos 6124122 to 6124653)
aggtacactcgattctaaatctctcttcttacgcggttgactaatacgactactaacttaataatcaaactgattaattaattttactagcattgaaaacgttaattaatttaactggtttgtctcagcttatcttaattctaattttttacagcatatatatatataatttgttgatacgtagatatgatatatacacgatacctatgtatatgaatgtttaatgtgaattgtctatgtaatcatttaattatggacccatataacagtttccaatgtcagtttcacattaatcagattcataaaatacataaaaacataagcattcaatggattttaagatccggtctcgttatcataattcttgaaagatacaactatcataaaggattaatacagtactaatataaatgcacggcatttcattcgcatatattgggattataaatgtgatttagaagttaatctcgaagtatataataagacttgaatactgattcttttttaatgatttgtggtggggaatgatagc

SEQ ID NO: 3670 - DNA, 231 bp, Arabidopsis thaliana
  Intron number 3 from transcript AT5G18760.1 (locus AT5G187 60) derived from phytozome v7.0 (chr-ID Chr5; pos 6259603 to 6259833 reverse strand)
gcggtattatttctaactttcattgaagttttgagctctatttgtttttgccggctgcttttagaattcatggataatgatggaatagattgattcacgagaagctttatcacttcaaagaaaattgtttttttttatcaatgaaacggcaagttcacactcctatgttccttatttcttctgttttcattggcagatcaaatcactccagttcctgcagaagaaacagaa

SEQ ID NO: 3671 - DNA, 839 bp, Arabidopsis thaliana
  Intron number 2 from transcript AT5G18800.1 (locus AT5G188 00) derived from phytozome v7.0 (chr-ID Chr5; pos 6267457 to 6268295)
aaaggtcgtgacgtcactcgctgcgtgcttggcttgtacgtatctttagctcattatattttccttctactttgcaagtttagtagttttggctttggttttggttaggaagcctcgagtatcaaatggttgatttaggattctaatcatagagtgtaagcctgggattcagaaatgagacctgaatgaagaaacgattgggtctctggatttcaagaaattaggaactgtagggactttgatcacttcttttgtgctaaactaagtgagccaaagtatctgactatagctgtgacaatatcgtggaatcatcttagcaatgggcatgagaccataaaaaaagcacacttaagtagttatggaagtcataggttgagcttagatcagccatcaaatcgtttttcattgagctctggttttgtatatgctttagagttcagactgtatttcatggaggaactatctattacactcagacatattacaatctttgtagaaattgggttgtttcatatatccttgctctcagatgttggccaagtagaaacagtttcataccacaacttctcatggttttttcctcaacttataagccattaagaagccatttgcttccctaaaaatgttggtctaagacttagttggatgtgcagaagttgtttagtatgatgtaatcctctaataatatcaatataagaagactttcagcatcatcgagatcgtagattaataatgttgggtccacatgcagatattatgttatttcttcggtaaagcattaaatttgttgtatgaattatgcaggctgaaggatcttcaccagaagtgccaaaaggaga

SEQ ID NO: 3672 - DNA, 837 bp, Arabidopsis thaliana
  Intron number 3 from transcript AT5G18860.1 (locus AT5G188 60) derived from phytozome v7.0 (chr-ID Chr5; pos 6291644 to 6292480)
gatttcgtaaacagtttcttcctcaggtatttattaaattttgacttatgtatacgtaaaacagaaaattttgacttatcgtagtaacaactatatacttactataatcgcgtcggttatctaaagaagtataatagcttcattttatatcatatagatcgcatgatcccatcgcaccaactaagctacttttaattgcaaccaccatttagaatcctttatacattgtggagggttttgtgtagacagacatttgtgttggtatctcttcggctccacgtgtcgtgagaaattagaatcattgtaatggtgggattccaattgaagtagctgactttgtacatccaaacacttgtcggcaacttataagattccgatatatagtagtgagacatataattggagctttaggattggtcttgtcgtgatattccatatacaaaaaacataaaaataataattggattctctgaacatctttatctagcctttatccagtttttatttttgttttttaaatgttatcacaatttcttaaaacttttcaaataatttgaacgtctaagattaagaatctgtttttttttatataaaaataatataaatccgtgttagttcaaaattaaaaaaacaaataacaaaaaaaagagcaaaaatgcttaaaatatcggtatagtagcgaagaatcgatttagtttgtgatgtttttatatatttcacaagtgtaattttatatcgaattaaatatttaaaagacgggttttgacttcttgtggttggttatgtttttgtgggaaaacaggggaacagaagatacactcctctccaacaaccaac

SEQ ID NO: 3673 - DNA, 621 bp, Arabidopsis thaliana
  Intron number 2 from transcript AT5G18870.1 (locus AT5G188 70) derived from phytozome v7.0 (chr-ID Chr5; pos 6298801 to 6299421)
ctgacgtcggtgattatcttccgatcatcgaacaggttcttcttcattctctcagcttctgacatatacaattggttttgcttcaggtgaggattttgaacatgctcattttttgaaactacaataaatgatttgtggtgttcaccttggtaacagtatgtccaatatgaatgaaatatacaaaaagttataagaaaatatgaagagaaataaaacatagaagaagaattaagaacagagtaaaaaatcgattggtaataaatagagaatgttgaatagtttttttcactttttaaaagcttatatgcatacttattccttttctctctactcttatgatgatatctagggatgttaaagactaaagacaaaaaagggatcaaactaaagtgatcagaaaatacttaactgaaacagaattgtttataactacaacggtatcgtcatttttcgtagcaaacaaccgaaactaaatctaactaaaatagtgcatacaatcgaattgacccaaaacataaaccaatgctttaaaaaaaaaaaaaagttagatctaattatagtggaagaatttattacatatagttattttcacttttaaaattttgtttttgatttcagggg

SEQ ID NO: 3674 - DNA, 391 bp, Arabidopsis thaliana
  Intron number 2 from transcript AT5G18890.1 (locus AT5G188 90) derived from phytozome v7.0 (chr-ID Chr5; pos 6302096 to 6302486)
atcattttttggaagtaagttttaatgttctcatgaggacaatatgtctgccctagaaaaatatgacagatcaaatgtttcttttatgttaatagcatctccatcagtgagatttcttcttggtttctcaaaaaaattttttttagtattttaataaatattagttatataattaaattttaattaaaaaaaaatattttgatcaaataaacaagtgtctttacgagtttttttggagtttttcattgaaaaactctcttcgctctcttttttactttttgattatatttcatttttatattagatagtttctcaataaaaaatcattgacgaagatgatcttatataatgaacaggttttgaataggcctgaagaaacggggaggtttca

SEQ ID NO: 3675 - DNA, 851 bp, Arabidopsis thaliana
  Intron number 2 from transcript AT5G19030.3 (locus AT5G190 30) derived from phytozome v7.0 (chr-ID Chr5; pos 6357862 to 6358712 reverse strand)
gaaagtcttctccgagtttggacaagttaccagtgagtctctctatataggatgattcataatttcatatacaagaacattgaatatagtgaataggttgatttgaagctcattgtttagcttgtgactgttcaatcgtaaacgagaatgaagcttaggaggttcattagggtgagtagaagaaaagccagagaattttttatgctgatcaatgatttctctttaagctcttgactgtgataagcaatggtgtcagagcttccattgtctactctatgatatctaaagctcctaaatcttatttggagtagagcttgtggtactcaaatagtgaagttctttgtgaggtttttgttactatgagtcgtggtccgaatcaataccaagataagaggatgaaagatatgtgcttttgatatcacaaagtggtgttgagcagaagcagaaatggaagctctgaaacgaaaaaacaagtcctcatgagctaaagagaagctattgatttgctgaaaactttctctgcttttcttcgttataatcacgtctttagatagagaaagaaatgagagaattgtggattcttgtttgatactatttatggtggaatcattggctagatattatttgttgtttcttagtgtttttcttttcccttcatataactgtaaaacctacgctaggtcgattataagcaaaccttgtggttagtgagtcaatttttaacagcattaagagtatcaataggttagcttgattaaggaatttgcgatttagcatcagtcagaaacccgttcaatcttatttttcttactgtagagcactacttttctggcagtaaaaatcatcgcaaa

SEQ ID NO: 3676 - DNA, 870 bp, Arabidopsis thaliana
  Intron number 2 from transcript AT5G19030.1 (locus AT5G190 30) derived from phytozome v7.0 (chr-ID Chr5; pos 6357843 to 6358712 reverse strand)
gaaagtcttctccgagtttggacaagttaccagtgagtctctctatataggatgattcataatttcatatacaagaacattgaatatagtgaataggttgatttgaagctcattgtttagcttgtgactgttcaatcgtaaacgagaatgaagcttaggaggttcattagggtgagtagaagaaaagccagagaattttttatgctgatcaatgatttctctttaagctcttgactgtgataagcaatggtgtcagagcttccattgtctactctatgatatctaaagctcctaaatcttatttggagtagagcttgtggtactcaaatagtgaagttctttgtgaggtttttgttactatgagtcgtggtccgaatcaataccaagataagaggatgaaagatatgtgcttttgatatcacaaagtggtgttgagcagaagcagaaatggaagctctgaaacgaaaaaacaagtcctcatgagctaaagagaagctattgatttgctgaaaactttctctgcttttcttcgttataatcacgtctttagatagagaaagaaatgagagaattgtggattcttgtttgatactatttatggtggaatcattggctagatattatttgttgtttcttagtgtttttcttttcccttcatataactgtaaaacctacgctaggtcgattataagcaaaccttgtggttagtgagtcaatttttaacagcattaagagtatcaataggttagcttgattaaggaatttgcgatttagcatcagtcagaaacccgttcaatcttatttttcttactgtagagcactacttttctggcagtaaaaatcatcgcaaacgaaaggactcggcagtca

SEQ ID NO: 3677 - DNA, 329 bp, Arabidopsis thaliana
  Intron number 1 from transcript AT5G19270.1 (locus AT5G192 70) derived from phytozome v7.0 (chr-ID Chr5; pos 6486654 to 6486982 reverse strand)
attgctcatcacagaggacacataaatcgtaactgaaccttctctctttgatatatcaatttaaatctatatggttcttgtcaattttgtgtttaacactcttgtgagtttttaacttttgtatggctaatgagttttgtaatctttttaatttgatgtcgttgtccttttatcataaactatacaattagcctaatgtctaacgtttgtttttaaaaagacgatagctagaattttgcaatttttcttgtaacttgtatctaactaataattcagaaattttatctttaatttgtttaataaaaatgataaattgcttgcaggtagac

SEQ ID NO: 3678 - DNA, 246 bp, Arabidopsis thaliana
  Intron number 1 from transcript AT5G19370.1 (locus AT5G193 70) derived from phytozome v7.0 (chr-ID Chr5; pos 6526147 to 6526392 reverse strand)
agaggtacaacaaaacatgaactgtatcaaagacttgactgcgagagcatcttctcagatttctagtaggaacgaatttacctttactctgatctgatttttcttcaaaattcatgtgcgattaccgttgctctgtgaactgtgtatatctgaattattgattatttagtttctgattgggttgatttctgattatcttttgttttttcagcttcgtttagcagtgggagtagtggaagtagtgca

SEQ ID NO: 3679 - DNA, 898 bp, Arabidopsis thaliana
  Intron number 2 from transcript AT5G19473.1 (locus AT5G194 73) derived from phytozome v7.0 (chr-ID Chr5; pos 6569767 to 6570664)
accctgtcgtaattaaattatctctctctacttactcttccatggattctttggttcatattcaccttgtgatgatccttttccccttagtcaacgcgcatggatcatcacaaggtggtataacaattcaggaattgattttctctttgcgtcttttgtttgttttgtgtttttgcatgcgcctaaaaagaatatttcattccatttctttcttaactcagagacataattgaaccatgaatgttattcaacttaattatgagttaatacatgcatcatagtatcaggtctcatttatgaatatgtaatgatagtgtatctttaaatttgatgttatagtgtattggcttgcagtttgtttccatggttttgaaatgatgtgttttgttcgaacaatgaatttatagttcgtttccattttcccattttctactttctttttatttgttaggaaaactttgtttttttttttgcattttttccataacatttcaataagcaaccatattttaacattatattcccacctaagctaaatttcattacttctattgttagataaaaatataattaaaccaactaaaagtctgaatcatattataatctttgcattatgttttaactatatgttgggagttacataaatttgttttgcttggagcctccaaactttgaagaggcaaacatgaacgaaatgtacactgcttttctagagcgaatatgaaaactccatctctagtttgtataacagtcgaaatcaccttgttatacgaagcattatgcaatatgtgaaatgtattaagaggaagcatgttgtcaccgtcataagtctctctaacattactaatttaattaccatgcagaagaagaagaggatcttgacctacattaattgttg

SEQ ID NO: 3680 - DNA, 396 bp, Arabidopsis thaliana
  Intron number 1 from transcript AT5G19490.1 (locus AT5G194 90) derived from phytozome v7.0 (chr-ID Chr5; pos 6577875 to 6578270 reverse strand)
aagaagaagctccagacacgttttccagcggtatgaaacattacttttcactgttttatagtttgttatgttcttcttcttatggagataaccatgaactctgttttgtgagttgtgagagtagttaggttcaacttttgctatgatttcaggtttacttcttcagggttccatggtccttgtcttcattaggtttttaaatttatctttgtgaatgtatctttggacttggagggctcttttgttcatggctagatataaataaactgcagagatatcttgtttagggctaatcaaagatgttgatatctacataagaaatttcttagtgtctgagtctgattttgtatgtgttgatatgttcaaaatttgtttcagacaaggattaagaagatt

SEQ ID NO: 3681 - DNA, 940 bp, Arabidopsis thaliana
  Intron number 1 from transcript AT5G19600.1 (locus AT5G196 00) derived from phytozome v7.0 (chr-ID Chr5; pos 6615653 to 6616592 reverse strand)
taagctcgccagtatccctcccatcataggcctatgtgagatctcttcctcttgtttttcttgttctttaattatgcatcatccatcaacaatcatcacgaaatataatcttacaaaatgataaaatcatatttcttaaagtgatttcggagaaaggtgtaatttcgattttgcaatacaacaaaaaacttatttctgttttcatattaattaaatatgaatttacgttttccaaatatggttttactctgtatatgtatgtatagtctaccgtttagccatgcagctcatgctactatgttacctaccactttatctccatattaatgaaaacgtttctatattgtaaaattaatactgattctgaatatacagtatgaatccacttgagtttgatttttcaaaagtgtcttctttttaaagattaatatacaagatgattttcttattgtttttaacaaaattattacttcttacataaagtatttctgaaatttttcatatatatatatatatatatatatatatatatatatatatatttaaaaattgaaatctaaatgctccatatctagacaagttttccatgtttttcttgtgtaactaaaatagtagaggaacctaaaatagaaatgatattggcagagtgctttattgtctacacaaactgacagtaggtgttgcccaactgtactagtctcaatttatttctctttctattttgttcatataaaaaaataacaagtaaactcctctatataagtttaattatttgtatttttcaaatatataaggctgtaaaattattccaaatttaattttaatattgaacatattactaataattccattgatgttaaaaaaaacaaaactaataataccattttttgttaaaaactttatggaaattcagattcaagttttgtgccgccttttgtgt

SEQ ID NO: 3682 - DNA, 415 bp, Arabidopsis thaliana
  Intron number 2 from transcript AT5G19620.1 (locus AT5G196 20) derived from phytozome v7.0 (chr-ID Chr5; pos 6624212 to 6624626)
ggtttggtacgtatcctccaatttagcttgtttttttttcttctgtactgtactagacttatctgtcaattcattgatttacgttgggagtaaaatggattaatgatattggaacctgacaaatatttcgagtactaatgatgaagctaagaattttctaacacatggtgtaaaatgtgttagccttgaatgaagaagatagattagaggtaggtagtattctcaaaatgtatccatgctccaaaacagagcataatttgaagttgcatttagtttacacatattaatgtattgaggctagttaggtggattccttctgttcggtgtgtgtttgattggagagggtaatggttagtaaatgttggtgtcaagctgtgtagggaaagtgattaatattaagagactggaagaagct

SEQ ID NO: 3683 - DNA, 681 bp, Arabidopsis thaliana
  Intron number 1 from transcript AT5G19710.1 (locus AT5G197 10) derived from phytozome v7.0 (chr-ID Chr5; pos 6665388 to 6666068 reverse strand)
agacaatctttctttgacgaggttagtatatttcaaactaatgcacatataattaagcgtatagaggatgatttacacatatcaatccggttgatttatattttgaattacttgtttttataaaaacatgtaattttctaaggaatctcgtttaatctttcaaagtaaataatgacgcaggggtaccttgatcgtcagtatactcagcttgaggctctggcgaaagacacgaaccctaactttattgtagagataataactctttattttagggattcccctaatgtgattgcttctttggaacatgaattgtgagtttcctatctctcttcatatgaaattttgatccatggaaatatggaatgcatcaacattgaacttatataatgtaatgaaacatagttcgaatgaaaaaccaagatttagttgaaagtagatgcaaaaaaaaagaaaaaaaaagggcccaagttattgtaatttgttatgcattttactaaaggccgtataaatcttgtttgcataggggcatataaaatgttgggccgcacctataaatatgaatacaagaattatatttgaatataatgatttaatttaaacttggctaatgcctaatggttggtatctaaagttttaagttgatttaattttgacagggagcgagagccaatagaggtaccc

SEQ ID NO: 3684 - DNA, 271 bp, Arabidopsis thaliana
  Intron number 1 from transcript AT5G19750.1 (locus AT5G197 50) derived from phytozome v7.0 (chr-ID Chr5; pos 6677442 to 6677712)
gacggaaaaggaaagaagtggtcacttctctcgtaatttttcttacttgctcctgtcactactcctgttcttgtgtaaagatgtttctttgaaaagcaattcattgaagcagatgttggaaatttttcttggatgtgttaataatttactcacggaacactttttttctagtatgattctttgcttttgacttgagcataaacacactttgtgtgcctttttctatggtgcttcaggtaccaggctcttctctcaaactctcctgttttga

SEQ ID NO: 3685 - DNA, 572 bp, Arabidopsis thaliana
  Intron number 1 from transcript AT5G19880.1 (locus AT5G198 80) derived from phytozome v7.0 (chr-ID Chr5; pos 6721644 to 6722215 reverse strand)
actgtttcgtgaacgtaagatatatttctactcaataccatatgtttgtgattggttttggtttagtaatgaaaccaatcgtttaatgtgcatcagtccatgtgatcttatgattcatcttgaatccaaaccagcatatatttatgaatgaatataactaaacatgactttactttaggtttaatggggattaataatagttcatactcgttgtttgaccaaaaagtggatttcaaacaaaagcaacattaaaattagagtttgcattagtggaatcatttttcaaggacaaatttgacgttaatttctttttgatgtttgattatatatatgtttgactatagattctgtcttaattaatggtttcatatggagaaagtaacggtctttcttaacccaaattaaaatatctccttttttttccttcgctaatcgttaactaagaaaagtatagagtcttcgtcaagaaaacataattaggtttattttgttagtggaattaggtttctttaatttgaaaagttagatatgcataaaatattgaagtcatagtttgtgaacacaggggtgcg

SEQ ID NO: 3686 - DNA, 632 bp, Arabidopsis thaliana
  Intron number 1 from transcript AT5G19920.1 (locus AT5G199 20) derived from phytozome v7.0 (chr-ID Chr5; pos 6736487 to 6737118 reverse strand)
gccttaaagaccaaatctcaagtttggataggaaggtctcttctttcttcttcatttttttcgttttctttgtttggctaattcggcgatgtgttcttcagattttggaatctgtatcgcttattgtgtacttcactgaaagtagcgtttctccggggtttttagttgctcttcttgtttcaatttgagttcaattttatgcaaattgcagcttttcatattcagtcacctctacagtattcaaatgtctaggtttaatttcagaagtttcctttgatcaatttgtttttgtagctgatttctgttgtgtttcatttaatctccatttgcagttttcagattcgatgcagcttattgtatagttttgttgatttgggcatttgcatttgttagttcacagcttttaggattttcccattttgattttctgttatcgtttcaattggagttcattgccatcttcttgctgataattttaaaggacacctaatagaaactcaaaagtttccagctttttgttttctcatgttctgcgtatatcttcccttggaatgtgcaagcgagagtcttactgtttggtcttcttcttaaaacttctgatgtatctgcagcttgctgaagagagaaaactg

SEQ ID NO: 3687 - DNA, 1009 bp, Arabidopsis thaliana
  Intron number 1 from transcript AT5G20240.1 (locus AT5G202 40) derived from phytozome v7.0 (chr-ID Chr5; pos 6829456 to 6830464)
aggtaattttgctctctttttaatctaaagtttctttgtctcaaaaatattccatggccaaaatcatgtaataagttttcaatttctttaccaaaaacatgtcaaaagacccttgaatctttaaccctagatgcagatctactatagtgttttgtctcaaaaacatatattctgagctagatatcatgaaattggttatttaattttcttttcctaaaatatgtcaaagagaaagaaaaatactctaaccctagatgcagatctacaaaggtttctttgtgtatgtagcctaacatgcgtctttattgattttcttgtactcaacaagacatggagccacaaaacatggaagttattcttttcttttgttcctgcttaatttgtataatctagagtatatctaaccaactgtgttttgaaaccatcaagaccaaatcttatgcgaatcagatccgtagtttatggagttattaattgagagaaaaatctgggatgtgatatgtatctgggaatgagaatttctgattagtacactgattttacgtttctggctttcaaaactaattgaaaacttgaaaattgcttttgagttttgagtatcctttttaaattaaattttgatgcaaatattatatgtattattaattagctctgacaaatgtaggtttagttctcacaaatgagatatatctctatagggtaataagcatacagaggcttttataccatttaagtcactgcctagtagtatttgtgcatgtatatctgtgtatgcttttacatatactaatatcaatatatatacatatatgtgtgtcagtgtgtgtgtgtgtgttatatgctttgcatgaaacatgaacatagagagacttgtcatggattgcttctttgtatatctatatttatgtttagtttgtacagattactaagtattttttttgtttgatctaaattcttaaaacctttattgctcatctaatacatattttttgtctccagaaccttagca

SEQ ID NO: 3688 - DNA, 588 bp, Arabidopsis thaliana
  Intron number 2 from transcript AT5G20270.1 (locus AT5G202 70) derived from phytozome v7.0 (chr-ID Chr5; pos 6841645 to 6842232 reverse strand)
ccaatattattcatcacgacggattcttccccgtggtaagtgtcctttaatcaacacgtttatttttgtttttgtttaataatcgcaagtttagcccgaatttcaatttattccctcgagatccacatgcaaccactatattaacttcaaattagtcaagtgaatgtgtcaagtaattagatatatacctaattggttttgattaacttatcttaattttctaatgaattgttcgttgctatacctggattttgttatgatgattttgaataagatatcaaagatatatagacatgaatcgaaatgatgaataaaatctttgacaatattacattgactataatttgttttctgtagtatattctaaacaactcaataaaatgtaattcttttaaggattatatatcagctcaaatctattatttaatcacatatctaaacaactgaagaaaatgtatttcttaactagattagaaatcaactcaaatatgttatttgatcatatatctagtatatgtttttttagtatctcaaactagtcaataaaaatgtaaagctaatggtggtatcaatgttgatgattgtagg

SEQ ID NO: 3689 - DNA, 488 bp, Arabidopsis thaliana
  Intron number 2 from transcript AT5G20280.1 (locus AT5G202 80) derived from phytozome v7.0 (chr-ID Chr5; pos 6849181 to 6849668 reverse strand)
ggaggatctggaatcttgctcgtcaaaagaagcaggtccttttttctactttttgcaacatcttttgatgcgaatttaaaacacactgttctattcagttgtctattattcctctttttgctcttaactttaaaaagttggtttcagagaattcatcaagacggatgcttgactttttatataaattgttgactctcaagtcaaaaaatttaattgttttttggtcttctctaatttgaaccttttcaaagtttgcatttttttaaaagtacatacgtaagatgaacaattagaaaaagtgggagaaaatgttacttttggttgtagcttttcctgttctgcctttgggagctgacttttaatgcataatttgtgaccttggatcgttgaattatgaatttgatgaactttgtggttttgatacataaatatcttgaacgtattgagaattgatgttttgttttttttcattcttatgtttgtctagc

SEQ ID NO: 3690 - DNA, 516 bp, Arabidopsis thaliana
  Intron number 1 from transcript AT5G20450.1 (locus AT5G204 50) derived from phytozome v7.0 (chr-ID Chr5; pos 6912640 to 6913155 reverse strand)
gtttcttagcgggtggctctgatttgaaggtacatatggatttgaagttgattgctttttcttttcttttctttttcttttgttaaaatttgaagttggttgtttcttgcttcattgttgttctgtttcatcatttttagaataatgtatgtactatttcaacatgtttatgtgtactctctcaacatgttccagatcatttatgaacacggcagcgtctttcgtttgctcaacttatgaatcaattcgttttctcaatttctgttacatatgattatatgtatacaagaaatcatgtttgttcattgtttcttcaatttgggtatcgtctataaatgtcacaggacttggaaccttttactgaggctgttactaggattcttcaggtcattatcatagaaccctcttcattagtgtctgtcattcttgtacccaacttatacattaagagaccctgaatcgtttgcaaaagttgttgcttttgaatatgcaaaactacaggaggctttgcacgca

SEQ ID NO: 3691 - DNA, 436 bp, Arabidopsis thaliana
  Intron number 1 from transcript AT5G20460.1 (locus AT5G204 60) derived from phytozome v7.0 (chr-ID Chr5; pos 6914325 to 6914760)
ctctagacgaaggaggatctccttgtgttggacaggtttgtgatttctttccatggattaaaaaaatttgattgtttgtttatgatgaacgattctttggctacggaagagtgtcatggagttctggcgaattctttggctatgtttggtgatttcgtttttaatcaagttgggaaccaataggaaacaactaagcatacaacatagattagaagagatatcaagatggatctaatttaagtaagatttggcgactaattctagatgattagggttatttgtgatttattacaaggcatttgtgttctcattgatttggcgagtaattctgtataactagggttatttgtgttttcttaaaaagaatttgtgttcttgttgaaatcttgttcattggaattatttgtgtttggtaaatcttcattggtggctaagg

SEQ ID NO: 3692 - DNA, 603 bp, Arabidopsis thaliana
  Intron number 1 from transcript AT5G20810.1 (locus AT5G208 10) derived from phytozome v7.0 (chr-ID Chr5; pos 7044155 to 7044757)
agctaaagcaagcttcaattcgttttcctcttcaggtaatttatactctttgataatgtaatttacacgattgcgtattagtctgtttcagctacgtgttttggtttcatctgaactatttacagtttttgagaagaactttgatttagcggattgggatcaaatctggattcattttcgctgattttgctaaataaagttagcgaaattatattttaaaaaaaacttagggtttgatgttctttagattgatttggtttaccatagataagaattggaccctaataatatttaggaatctgagaaaacattcccttgataaagacgtctttgggatctgcttctctgtgtatttgggtgggtcctctgttttttttgatgatattcttttctttatttgggacctaacctatttatatagtaatgcttcaaattgatttagaggtcaataaacttggttaattgatttttaattctttctcgttacacagatttatagtaatgtgtattttcatttattttgatgcaactgagtcagaaagaaactaatcaaacagttttgtgacattgtaaatgcagctacaaagggaagaagaagatcat

SEQ ID NO: 3693 - DNA, 456 bp, Arabidopsis thaliana
  Intron number 1 from transcript AT5G20860.1 (locus AT5G208 60) derived from phytozome v7.0 (chr-ID Chr5; pos 7078329 to 7078784 reverse strand)
ttccacttatacgttgccttcaccttcggtctcaggtacacatcataattaacatctctagttataataaaatttttgttaggaatcatctattttgataatttttctcttccgtaacatttgtttatctctgtctttcattttagttgctaacaattttactcaaaaacattttagatatagtttatggtgtacgtagaaaaatatgtgtatgccagaaactattatctacttggttactaaactaaagaagaattcataaagtagttgaagtatttctcttttatgtaccaagttacctaataattttgacaaaacacacaagctaagtacaaattctcggaacataatattcacaactactaatttatttttaactcaaaccgttacgtgaaaaaaagaaactaataagctaattggcatcaataacgttatacagattcttgtgaacggctc

SEQ ID NO: 3694 - DNA, 838 bp, Arabidopsis thaliana
  Intron number 1 from transcript AT5G20960.1 (locus AT5G209 60) derived from phytozome v7.0 (chr-ID Chr5; pos 7116935 to 7117772)
tcctttcaagagcgtcaagcttggttgtggcgaaggtatgcataacaataatcaaagttgatcgctctctatcttcatgttcttgaagtttttttcctctctaagaaaaagccctagtttagtgtatatatgaactagagttttagattcaaaagagttttgattaaatatacactctatgtatgaaccctttagctcttatgttcttacctcggtttctatgttttgagagactgattcattttcgaagactgatccgattttttttttttttgggggtcaaagactgatccgatttcgactccgattttaaacgctaatttctgcgacgatgattcattgatttattgtgccatcaccatgttatagtccagattcaaatctgatagtgcgtgatttgtaaacaacaacaaaaacaaattgttttcagcttttccataaaatattgtaatttgtaatcgtaattgctactttttaagttgtgttaactttaaataaaatactaaagaggggttattggatcaataattccaagaaaactccacatgcttttataatatcgaagggtttaattttgatattattttatactaagattccctgaaaaaagtattgaagttttaatataagtgaataacactaccctttaaactctcttagcaaataactgaaaattgaataatagtaataatgtgaagtgtgtttagaattatggtctattagtagtctattcaattcatgagtgaataaacacccctaaagcttgggtcctaagttatattgtatcttctttgtgtgtgcaggtggttgtggcgcttgtgttgttcttctttcaaag

SEQ ID NO: 3695 - DNA, 901 bp, Arabidopsis thaliana
  Intron number 1 from transcript AT5G21010.1 (locus AT5G210 10) derived from phytozome v7.0 (chr-ID Chr5; pos 7136461 to 7137361)
tggtaagttttttcagctcactgctcataattttagtttttcttgatttcaattagttcgtttgtagggttagggttcgcattgggtttcattagctttctaaattgatgcatgtttgatcatttcctgtgaggaagaactacttttgattagggttttcagtactttctatatgcattagccttgagcttgatctgacacgtgatcgtggattccctcatctagcttttatggtagagatatctgtttactagctgtgaggtaaactgaagatgagaaactgtgaaaatgatcacatgaattagaagatacatcatggtaatcttattagggtactgtcagagagattttgttcagagttcagtttctctattgatgaatcctgggcttacttggaagtgacagccatagctgataggtgtatcgaacacttgtgaatttctaagagaaatgtaaatttgaactgtgtttgtactgcatgatttttcatattggtggtgtaaagcatgaaaattgaagaattcagctactcatagtcagtgtagtaacacattcctctgactaatgagtgatgtgggtggtttaatgttcatgacgccaaaaaaaattgaatgggaaaatctatattttctaaggtgtttagctaactgaattttctgagtgtatccagacagagccttagcttaagtcttaattgggaaaaaaaatcttgatttaagtggagaagctgtgtctttatttcttccaatttactttgatccttcttgaaagagatatatttgatcttctctttacatatatcttttgcttaagttctggttaatcaaggtcctcttatacccttttcttctttgtggtttgattaggggatacaagcgtttcttcagacgttccattcttg

SEQ ID NO: 3696 - DNA, 499 bp, Arabidopsis thaliana
  Intron number 4 from transcript AT5G21060.2 (locus AT5G210 60) derived from phytozome v7.0 (chr-ID Chr5; pos 7151386 to 7151884 reverse strand)
tcctggcaaataagaagcctgttacttcaacgctggtaacttcttgtcactagtgcatgttctgcttatgttattaatgtgaaagcatacgcatcggattgttccctgaagctgtttctcttcccttttggttttattgttgtgtatcattagcttgaacaggtatattcagggacatcatagaatcttgaacttttactttatgttgttttcaagaataagaagttgccttaggttctctttgaattaaaaataccctttctgcaaattgtttcaagaataagaagttaatctagttctccaaattctctatctgcaaatccatcttgtttttttaacaaccggacataccctagatagtaggcgagaactacaaaaaaagtttctcagtacatctgtgctaatctaatttttcaagtagttggaaattactcatattttctctcatcttgtcttctgcgcaggaacattacgacaaattggctttgcatccgcgatt

SEQ ID NO: 3697 - DNA, 569 bp, Arabidopsis thaliana
  Intron number 1 from transcript AT5G21100.1 (locus AT5G211 00) derived from phytozome v7.0 (chr-ID Chr5; pos 7168535 to 7169103)
aaggtgttgttatccattggcacggcatacgtcaggttattcaataaactctaaatttcttccttctatacaaaaatataagtatgtaatgtgacaagaagcatcaacaaacaaacaaaaaatgtgacaatgagcttattctatacaactatatgtttgattgttttacgaccgaattagaaccattactttttattcaacaaaaaaaaaatacaaatgctaaccgttgttctgctgattttcagttttattttttcaatttttttgtgtgtgatgttagagcatcattattggtggtatcattattggtggtatcattattggtggtatcttaaccaaatttttaagttaagatttgtgaagaaagagcttttatataagagtttttaggcttatatttaaattttttcttcataaatcttagctaagatttggctaagatactaccgataatggtggtcttagattgtttcagagccactactagtactatacagtctgtataattaattcacaaaaaaaattattatcaaaaactaatttgtgatcatggaacagaaagggactcc

SEQ ID NO: 3698 - DNA, 569 bp, Arabidopsis thaliana
  Intron number 1 from transcript AT5G21950.1 (locus AT5G219 50) derived from phytozome v7.0 (chr-ID Chr5; pos 7254694 to 7255262 reverse strand)
tcccagattttgtcttgaacgacttttgccaggtatcttttttttcttctcttttttaaggaaaatcacccactaatgaaatcttaaaaagtttttctccgaatttcaaaaaatgtttttaaatcctaaaacaaaaaaactcaagaaattcgaaaacctagctacaactataaaggttatattcagtctctttgtttcaagttttgtatggaaaatattgaacaaaaaatatttttgaaaaaacaaatatttaaacccacacttaattattgcaaatattataacacgaaaacgaaagaaaatggggagtataaagatgcactccactactttatctttataaagacagatggattaaagaaagacaaagaaagttgtgattttcgtttggttagaggacttatagacttgcatagaaaatgggcaatgggtggccttgtagctcccaaaggaggacacatatttctaattttaataaatacaattacatactagttattgaaagaagattgtgtagcttgcatgattgatgtatacatatttttataaaatgagaaatacgacagaaa

SEQ ID NO: 3699 - DNA, 540 bp, Arabidopsis thaliana
  Intron number 1 from transcript AT5G22220.3 (locus AT5G222 20) derived from phytozome v7.0 (chr-ID Chr5; pos 7360897 to 7361436)
aggttgtctctgacgcgattgtgatcaaatctactgtaagtcttttttcttctcaattttgcttgtgaattttgctttataattctcgtgttttcgattgtgtgtgaggtttggttttattgattatgattttgatgatgtcgttgctttagattttgatgagaattgtgtcgggatctgcttctgttggtgttaattgcgtttggtctcttttgattaaccttgtttgtagtattggaattagcattgcaagtacttattgagtagtttagttgctggacttagggtttgtggtgttactgttattgctatttagagcagattcatgcacttttgtgtttatgtttagttaaattagtttctgaattttgctatgttggaattggtaaaagttgtgtctatgcttttagatttcagcatagtgacagtatgatgctgataggatttgattctgttcaattcgttgatgtatttaactgttcaattttggtgactttattggcagctgaagcgtaagacagatttggtaaaccaaatagt

SEQ ID NO: 3700 - DNA, 321 bp, Arabidopsis thaliana
  Intron number 2 from transcript AT5G22340.1 (locus AT5G223 40) derived from phytozome v7.0 (chr-ID Chr5; pos 7394911 to 7395231)
atactcgggttaagtttctttcacttgttcattagtaactgtagctagttttttttcttcagttctaagtttgcttttgacgattaaaattgctaactttgtatcgaggaatagtttgatagttatatgatcctgttgcaattgttatgtgagtgactacatttttatgaaatccagtattggtttgtgaatttctgaaatctcacaaatttatagctttcatggcaacaatcttatacttggtactgttactttggttggtaacttggtatagctcctttattaatgtctttatgttgtatatgcaggaaagcttgatag

SEQ ID NO: 3701 - DNA, 447 bp, Arabidopsis thaliana
  Intron number 2 from transcript AT5G22460.1 (locus AT5G224 60) derived from phytozome v7.0 (chr-ID Chr5; pos 7444606 to 7445052 reverse strand)
acagctccaaagacactgaatttcccatccctaaggttcactcttattctcaatattaactctcgtacatgtcacatgcccattttcaccattttagatatacagttttgatactttactttgcatttattttgctatatgtaattgaggatattgttttaatttctttgggttttttttttggctaaatgagaattcagtgtctttggttcttaaaaaaaaagtatttgttaatggtaaacgctaaacgctatttgagtttatgttttttcaagaactgaaaacgttttattgaaaatatacactttttttgctatttatagaaaggcatatcacatctagacgcaaacgcaaaattgacttttgaagcaaccacaatcttaaatgcaatgaaaaattacttcttcttttttctttcttgacgtgtctttttaaattttttgcagg

SEQ ID NO: 3702 - DNA, 615 bp, Arabidopsis thaliana
  Intron number 1 from transcript AT5G22608.3 (locus AT5G226 08) derived from phytozome v7.0 (chr-ID Chr5; pos 7513313 to 7513927)
cctccaggtccgttccaattttgtgcttctaatgttaaggttgatttgatggaaactggataagaatatcgttaatggaactctatagattggtttaaacagaaactagtttggtttcaattttgaattggagcagctggtttcacatttgaattgttcgttaatgttagggtttagggagatagcaatccaattctgtttttgagctgatattgttttgtaatcgaaaagtgtgagaattaggtttcagttttgccttcttgtgaaatctattggtgagcttaactagctgtattgtggactagaaagcagttgtacaatttacgagagtaacagagtttgcgggaagcctttatcgagatgtgaagcgttgaatgggagaaatctgagtattattattgtggctggagttattggagctgtcatttgattgtgtgtgttggtttagtgatattctggtgtttctttattagagatggtagtaggaagaagaatggtcatgatcctcggaaatctaaggatgatagtgattggattggtttgttgacgtggttttttattggttttgtcttcttcatttctttggctataaatattgggttttagacctgaaag

SEQ ID NO: 3703 - DNA, 340 bp, Arabidopsis thaliana
  Intron number 1 from transcript AT5G22608.2 (locus AT5G226 08) derived from phytozome v7.0 (chr-ID Chr5; pos 7513313 to 7513652)
cctccaggtccgttccaattttgtgcttctaatgttaaggttgatttgatggaaactggataagaatatcgttaatggaactctatagattggtttaaacagaaactagtttggtttcaattttgaattggagcagctggtttcacatttgaattgttcgttaatgttagggtttagggagatagcaatccaattctgtttttgagctgatattgttttgtaatcgaaaagtgtgagaattaggtttcagttttgccttcttgtgaaatctattggtgagcttaactagctgtattgtggactagaaagcagttgtacaatttacgagagtaacagagtt

SEQ ID NO: 3704 - DNA, 433 bp, Arabidopsis thaliana
  Intron number 1 from transcript AT5G22794.2 (locus AT5G227 94) derived from phytozome v7.0 (chr-ID Chr5; pos 7608322 to 7608754)
ccgccgtgaggtgggttacggaggctgtgacggaggtttgtgggtttttcaatcgaatttattatgatttaagtccaccgtttcttgtgttcgtgtaactctacgaacccaataagtttgattttgaaatttcgcgatctgatccgatcaatttttgatctaatttgttgtgtctgtggttgataacgaagcttttagaaatcattttggttgtggaaaatcatattgttttctttgtcattgccactcgtaattttaaaggtttgttgtattgtgttctgttcataagattcgggctaggtctaaatcagataagtgaaagcatctttagtgttgacttactcatctattttgatctctgaaatcttatgctttcttttctcaaaactttggtgtaggaagcaattggcgactctatctcctttggaaggag

SEQ ID NO: 3705 - DNA, 443 bp, Arabidopsis thaliana
  Intron number 1 from transcript AT5G22960.1 (locus AT5G229 60) derived from phytozome v7.0 (chr-ID Chr5; pos 7684387 to 7684829 reverse strand)
gtagcagtaaccaaagatatatcagttaccttaaggtttattacaatcccttctttcttttcgtttccattgtggactcgcgaagctaaagcgggaatgtagtggccagcgtaagactcaccggtgatatagaagtcatcttttgctaagtttggatgctctttgaaaaaagcctacgaatatgaaggtagaactcaactcaatataattaattcaaagaaaaattcttttgaaatttttggaagaccaacaacaaatcaaataacctgtaagaagtcgtataggtcattgctgacacaaattttgggactaggttgggttttttttttgggactaggttggttcctttcttgttcctcaagaaacaaattaatccataatttaactattattttttttgtttaatagatatccaatctaatttacgtggaccaaccaatccg

SEQ ID NO: 3706 - DNA, 690 bp, Arabidopsis thaliana
  Intron number 1 from transcript AT5G23080.2 (locus AT5G230 80) derived from phytozome v7.0 (chr-ID Chr5; pos 7748100 to 7748789 reverse strand)
gcaatcttagaactctccctgcttggaagcaagaggtgagtttttctttgatcttctagttcgtctatttagttgcagatgattagataatttgagcttcgagagactcgctttggccatgaacatgggagttttttcgttgtgcttgttttcgtgattctaacgtattgtagagagcttaataggttttatgtcgagtaaggtaagggataactttgaggcattcccgtttcagcttaatcagcttgaaaatttgtgagtatcccggaatgaaattaaccttaagcaagaaaatcgaagtgaatgtctctactggagctgatttaatactcaaaatcatgctagacagttagattctgagtttttgttatttgctgtgtttgtttttgcttattaatgtatctatggatagttattagattgattatctgcatttaggtgtttgccttgtaggcattttgaaatatgtatttatgtatgtggcatcttccttggtctctaattgcaaactaattgaagcaatctgtgatgaaaatttgtgtccttactaatggatgcatgatattgcaagaattcgttgtccagctttccactatgagtttttactggaaataaagtctatctgtatatagttgtactattatgtggaaagttgctaacatctcgagttttaccatactcaggtgactg

SEQ ID NO: 3707 - DNA, 478 bp, Arabidopsis thaliana
  Intron number 1 from transcript AT5G23150.1 (locus AT5G231 50) derived from phytozome v7.0 (chr-ID Chr5; pos 7786249 to 7786726)
ccaaagtcaaaggcttccctgcttggcctgccaaggtgcgttatcattatgattcctctattgggttttaatttttcttacacagattcttgttttttttgcttcttctctaattgaattctcatatagtccttaagtccatagtcatcatctttaacttgttgggtcttctgtttttatcgttacgaattctagaatacacattaacttcgtcgaattgagctctagtgtgttctgtttctttttgttgagatactaggcttcatgattaagttggtttgaaagtcagttaactcatctatctagttactcggtcagattccatggttgaattatgaaacacacatgttattcatctcgataaataatgagcttccgaatctctctaatacaattctctttagttagtctctcttgtgaagtaatttggttttgagtttcagatcagccggcctgaagattgggatcgtgcgccaga

SEQ ID NO: 3708 - DNA, 792 bp, Arabidopsis thaliana
  Intron number 1 from transcript AT5G23260.1 (locus AT5G232 60) derived from phytozome v7.0 (chr-ID Chr5; pos 7836595 to 7837386)
ggaaagctttccgagttctgctccgaacagaacaggttaacttcttcttctttcttgaattagggtttcagagatctatacatacatgtgtatgtatccatctaattaatgaggaaatgagctagatatatgactcgtgcttgagaacagacagttttcatcattagtttctgaagtagcaggtgtcatgagtcgttttttggattttcatttggcccagaagttaagaatctttgatccaatatttttgttcttgcagtatttaatttgtattttcatgtatcttatcatatttaatacgtatgggtcaaattctatatttaatttgtatttgacatttcttgatccagctttttcgtaataagaccctaattttttttacttatttttgtcacaaaaaagaccctaatttatgtagtatattaatgtgtcatatttacaacataaacatacataccgatatatatgtataagtctcatgttaatgattcaatttagtacaattataagttttagttctaagtcatgaaccagataaataagaaaattattcacatatagccataataggagaagaagggtgtgctaatagtttaagcgttgattacacaaaaaatgggtaaaacaccttttaaatttgttttctcctaaccaatgtttaggccaaaatatggattctacccttcagaacattattagttattttgatttttgtgttcctccagtgattattgaagtcttgacgtgtagcattaaagatactaaactgatcacattttcatattgaatagg

SEQ ID NO: 3709 - DNA, 360 bp, Arabidopsis thaliana
  Intron number 1 from transcript AT5G23395.1 (locus AT5G233 95) derived from phytozome v7.0 (chr-ID Chr5; pos 7875618 to 7875977 reverse strand)
gattctcttcttgcaggttcgttttttttttttttttgttggtgttttctgtatcccgattgagagagttacactattcgttgcatagaaaagttttgggaaattgggattgttttgttctattaatgatcattgataaaaaatgatgaaatggtgaaatggaatttgcgtttctctatatagtatctattcaaaatcttgttcttgcttaaaaagaagattcttaaatctttgtctatgtagtttctataggaagataatcttctaatctagttttgtaaagaaagctaagaaacacttatgtattatgggatatttgacattgttgtactctcttcaatatcacagaagctgcagcat

SEQ ID NO: 3710 - DNA, 368 bp, Arabidopsis thaliana
  Intron number 2 from transcript AT5G23430.1 (locus AT5G234 30) derived from phytozome v7.0 (chr-ID Chr5; pos 7899492 to 7899859 reverse strand)
accaccaagcgagcctataagcttcgtatccttttcttacaccaattttgattcttttcgtatttttctctgagattctatttttagggtttgttctgtgtcacaagtgccgtgtttgatctactgcttttattttgatatgcacgagatctgtctgtgttcatcttttttcatgtttgcatttgttccccgtggagtaatttaatttaagacctttcgagaaacttgtctgtttaaatttaagactattatgaatgaagtcaagtttgagttttgactagagtctctatctggtacctattgcttagccttgactttctgtgtggtttaaagaggaatttgtggcacattctgctgctgtcaattgt

SEQ ID NO: 3711 - DNA, 414 bp, Arabidopsis thaliana
  Intron number 1 from transcript AT5G23750.1 (locus AT5G237 50) derived from phytozome v7.0 (chr-ID Chr5; pos 8010873 to 8011286 reverse strand)
agaagactctaaggctattgttcccgtcgtccctagtaatttgcttactatcttgtttttcaacagaaagattattactaactcaagtttggttcaatgattattaaaaacttctgccaaaatatgtttctattaatcaactgattagcgtcgtcaaatatacctgattttcttaaagattattactgattacatttccgattaaaaacagaattttataccttttctttaatatagaaaaataaacaagtttcaaaattctgtaattatgtaagttttaaggttaaaaaagaagaactcaaagatttttgttcttctctaatgtgttgttattaatttttctttattaatacttaataaaaaatttattttgtggcagaagaagtagaggaagagaagaaagaaggatcagtt

SEQ ID NO: 3712 - DNA, 417 bp, Arabidopsis thaliana
  Intron number 1 from transcript AT5G23750.2 (locus AT5G237 50) derived from phytozome v7.0 (chr-ID Chr5; pos 8010870 to 8011286 reverse strand)
agaagactctaaggctattgttcccgtcgtccctagtaatttgcttactatcttgtttttcaacagaaagattattactaactcaagtttggttcaatgattattaaaaacttctgccaaaatatgtttctattaatcaactgattagcgtcgtcaaatatacctgattttcttaaagattattactgattacatttccgattaaaaacagaattttataccttttctttaatatagaaaaataaacaagtttcaaaattctgtaattatgtaagttttaaggttaaaaaagaagaactcaaagatttttgttcttctctaatgtgttgttattaatttttctttattaatacttaataaaaaatttattttgtggcagaagaagtagaggaagagaagaaagaaggatcagttaat

SEQ ID NO: 3713 - DNA, 333 bp, Arabidopsis thaliana
  Intron number 1 from transcript AT5G23910.1 (locus AT5G239 10) derived from phytozome v7.0 (chr-ID Chr5; pos 8068566 to 8068898)
actgttacaatttcgttcggagctcaattcgctgggtaatttctcttcattcctttctgattctgttgttaatttggagatttcgaattttgagtgggtttatcggatttgtcatgggattcgttaatttgatcgaaatttatgttcttttatatataaactcttgtgttaatcttctgttttcagaaaggtttgacattatatttttgagttgaaatctttctccgtctgttgtggattagcgacgtttcaagggaaattaactagtatgtttgtttgttgttctgtgttgtggtagatcgaaagattcatatagattggactattgctacg

SEQ ID NO: 3714 - DNA, 505 bp, Arabidopsis thaliana
  Intron number 3 from transcript AT5G24070.1 (locus AT5G240 70) derived from phytozome v7.0 (chr-ID Chr5; pos 8134727 to 8135231 reverse strand)
actactcttctaggtatctcatcatcgtcaatttttttttctatttattttttcctttagaaacaagcatctttcaatccacaaccatacgtatttaaatcaaaataagtttgtaattataagagtatacaccaaatgaattgttgcgttgctttttggccgttgcgtttgaactctgcaaaagtattttataaaaatctgaaaatgttaaaatattaataaataaaaacaactgagattgtagttcaattgtctacctatgtttagttactgtaaacacatttaactactttaaggattacaaatatttgaattaattctcatcgtatgcaatactttaaataatataaaatttacaagatagtttcacatcctagaagaatatccaaaaaatagactagtaatccagaaaggaaaatataatctacaagcaaagtggagctaaatagtcttgggtgaatataacaacctctaataattgtgtaattgaacaggagcacactca

SEQ ID NO: 3715 - DNA, 597 bp, Arabidopsis thaliana
  Intron number 3 from transcript AT5G24170.1 (locus AT5G241 70) derived from phytozome v7.0 (chr-ID Chr5; pos 8190274 to 8190870 reverse strand)
ttctagctattggaaggtatgttgtcgcctgaagattgcggcgagaagaacttgttgttcgactaacatttcgagatttcattcatggcgattcagttatttacatccatagaattgaatggttctctttttatcttatctttcatggactctcagttagatttagtcattttgatttctgatgctaactggttcccataatggcacggtcgtttgcttctacttcttgatattggtgcatagaaacatgattacgccattatactactttcatcgtgctttcgtgtctagttaaccgaagtatttcatagcgtttcttcaagattcctgcccgtggatttttttttttactttgtatgacatttatggcttctggatttctgtatgaaagatcagaatatagagctatagatatgttcccattttaagcttgcttgctttgtgtaacttcaattagagtcgttttccattggcaagaatctgattatattgtcttgtatcttacaaagtctcttgccattttttaccttcgcaatgttattcttttttaaaccacaagagatcactgtctttttttttggcagcacagctttcctc

SEQ ID NO: 3716 - DNA, 469 bp, Arabidopsis thaliana
  Intron number 2 from transcript AT5G24200.1 (locus AT5G242 00) derived from phytozome v7.0 (chr-ID Chr5; pos 8203375 to 8203843)
ttttctggtccccctccaattccctcttttgactggtaaatatgcagtttcattttatatcttcccttccaaaataatattgattatggattcttttttgccctttttttttttttaaacaaagagtagatgattacattgatcacgaattattactcaaatatcgcaaattcgatttagataccattatttttttaacagaacaaaaatctgagagacaaaaataattaattgactgtacaaatatattgataccacttcatccgatggttttttattggttcttttttcttttgacttcgacatacttttgcatgtgtctttcaacattaaattcaagtaatatttcttaatgatgacacaaacaaaataatatacatatctactcgatgattctgtggtgtatatactgtaattggtttgtttttcaataggaacaatttgtaccaccgagcgtcattggtatcat

SEQ ID NO: 3717 - DNA, 436 bp, Arabidopsis thaliana
  Intron number 2 from transcript AT5G24210.1 (locus AT5G242 10) derived from phytozome v7.0 (chr-ID Chr5; pos 8217919 to 8218354)
cgttctggtccccctcaaattccaaatcctgactggtaaatttcgtttcatcaataccttctgcttaatattaataatattgattatgaaatattattaactaatgtaaaaaaacgcaactatataatacgtaactgttttcggaaacaaaagagtttacgtcatcaaacagaaaatctttacctcaatttttcttttggccccgatgttttttatactagccatttcctaggaacgacatttccactattgcgtactgttttgtttttcttttgacttcaacgtatatttgcatgtgccaatagaatttatatataaataacatttcatatgatacaaaaaaaaagaagataatatctactcgatcgtttctatggtctaaattggtttgtttataataggaacaatttgtatcaccgaaccacagtggcctcat

SEQ ID NO: 3718 - DNA, 787 bp, Arabidopsis thaliana
  Intron number 1 from transcript AT5G24240.1 (locus AT5G242 40) derived from phytozome v7.0 (chr-ID Chr5; pos 8233209 to 8233995 reverse strand)
attagattcttcgcttcacggatttttattccgaggtattaccatttcttaattttattttctaggtttgttttcgatttctctgaagaattgattaatttcttcttttcgattttcgattttcgattttctcgccggtgtctcttccgatcatggatgatgaattgtatcggtttcgatgatcgggaaatgtgtgtagaaattcgaaatcgggttttgattttggagatttatgtagcgattctctggagatatactcgtttgatgatccgagacttatatttagtgattaaggattgaattattggttttacttcttctttgaatttgtaaaagtgtgagaattagtgtttaaatcttaattttctcataaacctaaattaagattagtaatcagataaagtcttaaaaacttaggccagcctgtttggttttgtgatgattaaaatccgattaagacgttgacttaaaactaattttgtggtggctgttgtttggttatgctttttaagctaattttagctttgaagatttctaattatatatagattgagaacaaaagttttaaaggttatatagtttgctcatgttccaacaaaaaaaaaaaaggttatatagttcatcatctatacaaagaggttggtatttttttaaaaatctttttttttgtgtttgatcataatttttaataccctgaggttaattagaaaatagtgattgttgttgttgatgttccatgactgattcctgtgatcattgtttctctcattcaggttctttgggattg

SEQ ID NO: 3719 - DNA, 753 bp, Arabidopsis thaliana
  Intron number 1 from transcript AT5G24280.1 (locus AT5G242 80) derived from phytozome v7.0 (chr-ID Chr5; pos 8261402 to 8262154 reverse strand)
tgggagagaaatcagtcgacgaagctaaggtatatatactctctctctctctgattctctgtgttgttgttggtgggttttactttactgaaaatcgaagcttgatgtggaattgattagcaacttaaaccctaagtattcgtttgtcttaggttggaataaagtctctgttttgcaaatacccaatttttattcctgtcctgtcttcttccatatcattgcagtgtatctaaatgcgagttacttactatatcgtctgtatcttcttccatttcgagactctctttacttaaattgctgctttttttttaagaagcctatgcgtttgttattgataaagttgtagcttttcttcacgatttggcctgttacattttcatgttatatgcaaaattctgtgtacatgcgtgtatgtttagtagaagtgtagaacaagtactagattgatatgatattcatagcttaaatctgtgaatgccttacacagtccttttgattttcaatcgtttagaggcaaggaagaaacagtttgtacttttgatgcagcagtctttcttgtaattgttgtaggttcgttatagtaaatcatcaataatgatctaaaaccattcaatagctgtgagactaattcaattagagttcttaggaatcaataatttccatgtttagcttccactgtaatccttatcgtgcctaatttgtaattcaaaaaagttaatcagtttcatggttgtttctgtctttgcatttcag

SEQ ID NO: 3720 - DNA, 749 bp, Arabidopsis thaliana
  Intron number 3 from transcript AT5G24314.1 (locus AT5G243 14) derived from phytozome v7.0 (chr-ID Chr5; pos 8278030 to 8278778)
gacgccgtgtttggcggaggagaacattggtaagtactaaacttgatattttggtgattttccagtttcatgtttatgacataagtcgaatcaggaatcaaaataagggtttttctttgcttggagacgacatttctaaaaagttgcaatttttagtaggatcacagattagctttaactcactgatgaggcatgactattaactctagttagtctttacttagtcatagtaattgatatgatgcatagaaggagagatggagattgtcttctctgagtttttgcgatttctagtttacccttcttgattccaaattagcttacacacctgtttcaaaagtgtctttgttgaactatgctcatttcagacgctagctttagttcttatactgttgatgaacttaaagaaacatggctttttacctctagttagtgtttacttatatatattcaagtaaccatggtcttatctctatggcacatgcaagaaattggagattgtcttatctgagatactgggatttttaggtgggagttacacattacataaaatattagtgtgatctttttacttgtactatattctacaaactatcagtttctgttgtttgatcctatcaggttcatgaggttttgagatttcaataattaccaaagccagaacaatgcaaaatctttgtttatatttgtcccgcttttaatctctctatgtcgttctcctgttttgtctgtagacgaagaaggacgat

SEQ ID NO: 3721 - DNA, 731 bp, Arabidopsis thaliana
  Intron number 3 from transcript AT5G24314.2 (locus AT5G243 14) derived from phytozome v7.0 (chr-ID Chr5; pos 8278048 to 8278778)
ggagaacattggtaagtactaaacttgatattttggtgattttccagtttcatgtttatgacataagtcgaatcaggaatcaaaataagggtttttctttgcttggagacgacatttctaaaaagttgcaatttttagtaggatcacagattagctttaactcactgatgaggcatgactattaactctagttagtctttacttagtcatagtaattgatatgatgcatagaaggagagatggagattgtcttctctgagtttttgcgatttctagtttacccttcttgattccaaattagcttacacacctgtttcaaaagtgtctttgttgaactatgctcatttcagacgctagctttagttcttatactgttgatgaacttaaagaaacatggctttttacctctagttagtgtttacttatatatattcaagtaaccatggtcttatctctatggcacatgcaagaaattggagattgtcttatctgagatactgggatttttaggtgggagttacacattacataaaatattagtgtgatctttttacttgtactatattctacaaactatcagtttctgttgtttgatcctatcaggttcatgaggttttgagatttcaataattaccaaagccagaacaatgcaaaatctttgtttatatttgtcccgcttttaatctctctatgtcgttctcctgttttgtctgtagacgaagaaggacgat

SEQ ID NO: 3722 - DNA, 425 bp, Arabidopsis thaliana
  Intron number 4 from transcript AT5G24350.2 (locus AT5G243 50) derived from phytozome v7.0 (chr-ID Chr5; pos 8302045 to 8302469)
attacaggaaaccttgtggcaattttacatgtaagaaattctggcatatcttcccttgctttcacaaatgtttgcctgattatgtttttcggggtcattgccatagcacactcaataaacgaatttgtagaatattgcatttatcttgtcaaaaactatctacttgatttactctgataacaaacgcctataaaacttgcatttgcttctttttctctctaagtttagtatgtggaatcaccgttttgtgaaaccttagactgtaccagtcatttattctgttcattaaaaaaatatgctctcctcacaataccgttttccttctttctgtttcttaacttatggtcctttgatgtctatgctatggtcctctaacttctgtattctgcatcagccagcatatcaggttcatttacttctggagt

SEQ ID NO: 3723 - DNA, 474 bp, Arabidopsis thaliana
  Intron number 3 from transcript AT5G24580.1 (locus AT5G245 80) derived from phytozome v7.0 (chr-ID Chr5; pos 8410808 to 8411281 reverse strand)
agaggtacatgcatatatatatatatatatatatatttgtggatctagtcaaaaccaaaatactctttttcaatgtacataattttaaggatggttaaaagtttttggttgtattgaaaacggtattttgttttataatttgttgttctgcatgaatcgcaataatcgttaaataaaaataataatatatatttcccaccgtttttaattaaacatacgcatccatattaaaataatatatcatttggtatagatgtcacctaagaattcattatatatcatgtcaaaaagaagaagttactatatatctcgttatgcattacgtcacatgcatgtttaagctaaatttgttgatgacaattagattttgcgaagtttctatttttttttagtagtaattaatattgagcttaaaggactaactaatattgttggttaggggtccaaacaactgtgacagagcacaccacggga

SEQ ID NO: 3724 - DNA, 704 bp, Arabidopsis thaliana
  Intron number 1 from transcript AT5G24820.1 (locus AT5G248 20) derived from phytozome v7.0 (chr-ID Chr5; pos 8524168 to 8524871)
gttgctctcttcgggatcagtcttggccaacagaggtataaacatatcactcgtttgatgttttgattatatttttaatttactccattaaacctagctacgactatcccctttgcataatctctcatgagtgtcttaaaaactaaccatagttataattaaagacattttcctttttggatgtcaaaaatatcttctctaagacattaagacaatttagacacttaaaaaggaaaatgtctttaattttaatcttgattagtctatttttaccatggttgatcttggagacatcaatgagaggttatgcaatgtagatgctctaacattttgttggggttaatttgtttaaactttaaaccctagctaacatagctacgtaaacatttgatataatatacgttttaacaacaaatttcatagactcaaacatttgatatttggatttcgattaatagtttgcgttaaaaggtgtttttttttttccaaataaaacctacatattgaacaccattttattaattatttgaataatacttttaaacaagaaaaatattttgtattttaagaaaatggttttctaacgtttcacataaaagataaaaccacaaacgtgcaagttagtatttaaaacaatcaagctcttttttctctaaatgtaaatatccattatattgtttctcatgatctttttttttattaga

SEQ ID NO: 3725 - DNA, 619 bp, Arabidopsis thaliana
  Intron number 1 from transcript AT5G24870.1 (locus AT5G248 70) derived from phytozome v7.0 (chr-ID Chr5; pos 8546928 to 8547546 reverse strand)
gttatcatctccggaaatttcgctctttctttacggtaattacgagaaaaacaaaatccaaaaatcgtttttttctatttgatgattttgccttcgtattcaatattgtaaagttttgttttttccgttgtttaattacgtaaattcgataaaagtttcttcctttagattgaatttttctgtttctatggcttgagaactagtttcgtgtggttgtttcttctgattcttgaatttgattgagaaagtttatatctttggttaagagtttttttgtttgtgtacgttttaaaatccatggagaagcttgaatcacggagaagactagtcgtattaatggaaactccgtgtaaatcgaatgagcttcttcttttggatggttcttcttctctttagctttcctcttttctctctttttggtttctttaacaatctctgacttatagcttttgaagcctctgtttgtttatggttatatcctctctgttcttctcatttctaaagactgaattttgaatggtaaaagatcgtgtgtgtgtgtctgtatccttaggctttgatgcagttttctgaaaatttgaactttgtttatatgttgcagtgtttgagggtgtgtttt

SEQ ID NO: 3726 - DNA, 840 bp, Arabidopsis thaliana
  Intron number 1 from transcript AT5G24910.1 (locus AT5G249 10) derived from phytozome v7.0 (chr-ID Chr5; pos 8569152 to 8569991 reverse strand)
ctttccatatctcgaccactggcgaaaacaatacggtaagctttcaataatctgataatttcaacaatttttgagactcttaattttgggatctgtggcaaatgtttttttgtcaacaaagtagatacgcctctgaatttgaataatgatagcacacaaggcagattagtcctttgttggtcgttttgagttagacgaatccatttttcggaccgatgatgatgcagacaaaacaaacatatatcttcattaaatcttgtaaatagttaacgaaagtactatatcattacacacacatacaaaagacactagttaacatgcatacgtgaatttatatattcataatacatgcgtgaattttaattcatacatatgtgaatactgattgacagctaagtcgtatatataatatatgtgtgtaacgtatgcatggattgacatgacacctaatgacaactaacgccgcagaatttaaaatttatgaaaagccaataaggttttgtacgatcgggtctacttgatccaaaagttaggagctgatcaattatatgataactcctcaatgattcattttgattcccttttttttatagtaataaatcgtaagatatattttaaatttagttttaaaataccaaagtagttgtcgcttcgctagtggatcgtttaatagtttatgatcggtcatattgattgagaggaaatcttaagtttttgattttcaccgttttctaagttggttttgagcatttattgtatatttattttgtatgagtaatttattgaaaaaaattgatatgttcagggagagtgtacacgtattcgacgggggtgaagcaa

SEQ ID NO: 3727 - DNA, 478 bp, Arabidopsis thaliana
  Intron number 1 from transcript AT5G25170.1 (locus AT5G251 70) derived from phytozome v7.0 (chr-ID Chr5; pos 8693364 to 8693841)
gttaggacttgggatctatcactctggtgttgaaggtaactccttctctctttttcttggaaattatttgtgggttttggttaaagcttaaaacttttgaattgtagattgaaaatttctcatctttgagaggaagagatttgattctgttttagattgtttagttaaagtaagagactttttaagtttgatgtttgttggttttgttttgtttgtttgtagaaattgaaatagactggtttcatttttcaatagattccaaaactggaaactttttttgacccatttttggatcaactcttctgattttctattgagtaataataatcagaacttggttttatgtgactattaaagtgagttgtataatatcttattattagatatgtctgtccaaaaatgaaagtatgtttatatattgagatctaagttgttgtcttaatgtttgcttcctaatacaatgttatggttttagttc

SEQ ID NO: 3728 - DNA, 857 bp, Arabidopsis thaliana
  Intron number 1 from transcript AT5G25180.1 (locus AT5G251 80) derived from phytozome v7.0 (chr-ID Chr5; pos 8696222 to 8697078 reverse strand)
ccacagtgtaaactcttcctccacaaattttaaaggtaattttgtggatctctcgctctctagatatttctgatcatattctcttataaatatatttaattattagtaaatgttttctccagtcattcaattcaggaatgtattcttgtcttggcttacagagtgatggctcttctttgttttagatttgtcattttcttaattaattgattgaatgaatactctaaaatcttagtattatgtggaatgaatacactaatctttcaataatggaaggttcattgtttgttttagtgaaacttttacctctgagattattagatatttttttgaatattttttgttttgttttcaagacatgtttaaatagtaaacaatatttggattaaataagtagatacaaaatgtgataattaggaaaattcaaaaatttagaaatatagagtaagttgattttctcaattaagtttaccatcataaattgtcaacgaaaaacaataattaccgttcctaaaaaattgatcatcgtgaaatctaaatcctccatcaataaacatattgttttattaaaacactaaaagtctactaattttggtaaataaatcaaccaaattaacatataagagcatttccctcaaggttttttaggtgcgtttgtacaatataagtagacaattcaaaaatagtgaacaccataaacaagccaacaaacaaagtataaatttcggaagactatataagcagatagttcaaataagtctgaatgcttttaaaactatccccattactttgagccagtcaaagcctaattaactttatatactctcttctttttatttttaccataggaagacaaa

SEQ ID NO: 3729 - DNA, 314 bp, Arabidopsis thaliana
  Intron number 1 from transcript AT5G25220.1 (locus AT5G252 20) derived from phytozome v7.0 (chr-ID Chr5; pos 8736857 to 8737170)
tcgtcggcgacgataaagaacttgaccagttcgtatataaatttcagatttttttgttctataattttataattaacgatttcataattatacttagcacaaattttaataatacacaccgacttaggtttcttgatttttgaaatcttaaaatattaaaatcaagatttgtgtttttagggataaacaagactaaaatcccaaaaaaagagcttatgatataataatggtcatgatgatgaagaaaatacaaattttgttctttgtgtttattgtgtgtttgattaatgttttttttatggtgtagacacatt

SEQ ID NO: 3730 - DNA, 657 bp, Arabidopsis thaliana
  Intron number 1 from transcript AT5G25270.1 (locus AT5G252 70) derived from phytozome v7.0 (chr-ID Chr5; pos 8762003 to 8762659 reverse strand)
tcctcagctgatttcgactccgatcaattttctaggtttcgattcatctccgttactaatttcgtcttttataccgttttgttcgtttttctagggtttaagatcgattcttctgttttttttctgtcaccggaagagcttagaacttttctggtgatttgattgaatttgatgaatatggtttgctatttattaagagttttcgaagttgagattccgtagcgtgtttattgattatgatcacatctttacctgttttcttttccgtttcttgtggagttggagtagttaaagacatgattctcctcttgattttgatataaagtgtccatctttacgaattttcagagatttagtcaagaatttcgtcttaggcaaaagctatattgcggtttcattgtttctcctgaagtcgtagtcttaagatttctacatgatttgaacgagttttattggcgtggtgaaattttcttagtgccgtccatgaaagtttgcttctttagggttttgtatgaaatatttcttctatagactcgaaaaagtgttgagttttgtctcagtgcttgatgatcaaaggttgtttttgcatgcagctgatatagctaaatataagctgatacttttattggttccaggtgtttgaaggcatttgaaagg

SEQ ID NO: 3731 - DNA, 722 bp, Arabidopsis thaliana
  Intron number 3 from transcript AT5G25360.1 (locus AT5G253 60) derived from phytozome v7.0 (chr-ID Chr5; pos 8800818 to 8801539 reverse strand)
aagtacaagcaaccccacagaatttgtaaaccacggtgagttgtaatttccacacattgttgattgttgttgatcctttcttgcattttagttacttgacttgttttctaagaagtgaaagatcattccaagctaatgtggttttatttattcaactctgaaagtatctacttatgatgttagcttactcatttggatggtcaacccgcttttaatatatgtagacgggtgttggcttacattattgtttatatttatttcttctcaatcactggaagatctctaattcatgactgactatggataaaatacatttgggggcacatttctgtagaatctactatgtattttgtttgttcaacatgaaaatatttcgtctcatgacacgtagatgttggctattgatggatattccctatcaaacctcccttgaattaaacctgacctgtgcataggaagctttcacacctaaatggttttctctatgccgcaaagtttaattatgtttcctccactttcttgggtaatggtatgttttggcttgcatcttcagatattagttctttgactttcggggtgctaacgtcattactttatgattcttcgctctgtttattcgtattttggtccttcagtgcagtcattttctctaaagaaagtttgtgtctattatttcgtcctgtccaggattgaacctctggaaccaaactaggcaacagtgg

SEQ ID NO: 3732 - DNA, 542 bp, Arabidopsis thaliana
  Intron number 2 from transcript AT5G25360.1 (locus AT5G253 60) derived from phytozome v7.0 (chr-ID Chr5; pos 8801738 to 8802279 reverse strand)
gggtaagtgaggatctttctcttcaaattcattgtttttgaaattcaaagtttcaatctttatttgaaattccttgtctgtgactgtgttgtgtgttacctgtgtatgattgagagaaatgaagaagaaactggagtgtaaaaactttgactttagttttgataagttttgttacttaaattgtagattatgttttcgtacctattgcttgtggatatatatatatggttgttgcttgcattttaagcaaataatggaatcaaagcatctctcatgttttagttttgctctacatcttttatctcactcaatattgtaagcgttggaccgctaaattgctcgtaatatcagtaccttttggttgagatcatcgaagaaacttcacttcataatctttagaggctaaaagaactttcttgtgtccctttgtcgtcagagttcttgtgtccctttgaaattttgtcgtctgagttcttgcattttttctcactggtattttcttgttgttttgtggttttgcaacagtacagaggttgttttgg

SEQ ID NO: 3733 - DNA, 1022 bp, Arabidopsis thaliana
  Intron number 1 from transcript AT5G25415.1 (locus AT5G254 15) derived from phytozome v7.0 (chr-ID Chr5; pos 8834311 to 8835332)
tttcctcggtgttgtcgaacggggataacaataaggtatggtcaacatagatgttatacgaactcaaagttaagcgtaataaatattttatcaactgtagaatgacaaaactaccaaggcatagcccgaatgagtttggaaaaaaaaaattccatcagctataaaatataagaaaatatgattacataaaaagagttatatgtataatattagatcatgataaagtatatatgtatatgaaattcttcgtgtgaccaaatgggaaaggactcaaatacatgcaagtgtgcaaactatgcaagacctccctttacttgaaactggcttgcttttaaaacaaagtgataaaaaaatctcgtattaaagagatcgaagggatggatgcttacatgtgttctatggctgtcagctgataaatgattgaaatgcatcgcctcgaaacattatttttttatattttataggaacagttccatttgtacatcttatctggttcatatatgttttgttgttgtcaatttgattctctaattcatgtcttgaaactgatggtttcatcatttcaaagaacaaactgtattgtcaattattatttaattacacatcacattcaactcaacgaagaaggaaaggtattaacgtattctgaatggagttaaatttacaaatatagtaaaaaccagagataaattgactacacacattaacataaactaaccaaaagacaataataaaaacagtgtcatcttgattcttgactactgggtcagtagtcaacacattcactataatttgtttttgtttagttgatgataagttattcttgatatactttttttctttctggtcaaagtactattattcctcatcaagtatttattcacgttatgaagtcaaaatatacgaataagccgtaaagatcttacacttcttgctaatcagtaatcacattcataatatgagagcaccaaaaattttgtacattatagttgcagtcaaatatttgtatttcctttgctaga

SEQ ID NO: 3734 - DNA, 720 bp, Arabidopsis thaliana
  Intron number 1 from transcript AT5G25570.2 (locus AT5G255 70) derived from phytozome v7.0 (chr-ID Chr5; pos 8901891 to 8902610)
gcaagctgattcggatctgacgtctctcgtcttcggtttgttttttcctccttttcctctgatccttgttcatccaatttcgaatttcgactgacctagaaatcaggattaagcgtgagttcttcatgtttgtgaagtcaaatgctcttatgatttggtatttaacgagatttgtgcttacttaatggcttaatcgcttcatctaatcttgatttcgcttaaaaaactgtggaatcgagatgtgtattagaatccgccattgttcgttgcttctctcgcaaatagatctgtaggtgatacttagagtgaaagatgtgcattttcgttggttttatcaattttggtatctcagagttgctatattttgtcatccagattctgtatactctctatacactcttctttaaccttttggcttatgcaaattgaattagtaaaccttgttaaacgtttcatggattagatcaccagtgggtggattgagattacaagtcaatgttgtgtctatttcgcgaattctgtatgctctcgatacactatcctttaactctttggcttgttcaattgcatattagcaaacaccataactcgttttaaaggtttatcattatatgtttcatggattagaatcagttgatggattgagactacaagtcagtgttgtgtgtctacttctttagccatctcctgactgtgttgaaaacaaacgcaattgcagaa

SEQ ID NO: 3735 - DNA, 316 bp, Arabidopsis thaliana
  Intron number 3 from transcript AT5G25780.1 (locus AT5G257 80) derived from phytozome v7.0 (chr-ID Chr5; pos 8975696 to 8976011 reverse strand)
tccctggggtaagtttagttttcttcatattactctttcagcgacaccattatatgtttttgaataagttccactgcgcctgtgtacttcttgatattggttgttctctgaatgatttcagtgatttatgtgtttaccagctgaattagtgttaggatctgtttacgtatttgatgtatagtaaccaataaataataatttcatcagtcttgttaaatgtttattcttttttattcaatgcagccttttgaggtgcttggtcttgatacttatatggtgtttgtttttcaggaaaatttgcagaagtggcttactg

SEQ ID NO: 3736 - DNA, 345 bp, Arabidopsis thaliana
  Intron number 2 from transcript AT5G26010.1 (locus AT5G260 10) derived from phytozome v7.0 (chr-ID Chr5; pos 9086223 to 9086567 reverse strand)
tcagtggctccactggtgtggttgccataactcaggtacatttattttctctgtttccccgcaacttttaaaaagggtttgaatggtggtaacggaccattcaattctgtggccaacagacaagattagtgtttcttcttctgctgcaagttttgttttttcttggtatgcaccaatatagacctaaacttatgaatagtgaacaaaaagctaatgtctagccaaaaaataattattcactttttttttctgctgccaccattcaaagcctaaattttcactagttggagcttactggattttttattattttgttttggtaaaatgttaaattgcttcagggag

SEQ ID NO: 3737 - DNA, 525 bp, Arabidopsis thaliana
  Intron number 1 from transcript AT5G26330.1 (locus AT5G263 30) derived from phytozome v7.0 (chr-ID Chr5; pos 9241980 to 9242504 reverse strand)
ttctaccaaaactttccacattggtgatactgtctgtgagttcctgaattttcttacatcattgtacaatacaagctaaattaaaatgagaagatcttgactgtaatacttaattttgtcggaaagtggaccccctctagcattcataattcttaagtgcgtaagctttaggtgtaaagtaaagagtaccactcacgccctaatcattgagacttttaagtcacaaattaaatttataggattaatacgaaatcaagtgtcacatctgctaaagtgattatattaattagtttagagaggttcttaacttatgaatcatgattgataaattttgaaataaaaactatgattgagtttttgggccaaaatatgttatgatttttctttggtttatatatgctctctatttttttctcatggtatgcacatgtttaaaattgttgttacctttatgaaaacatgagtaaaacgtaaactaatttgattttgatagtgttcgaatacaacccacaattccacaacgta

SEQ ID NO: 3738 - DNA, 715 bp, Arabidopsis thaliana
  Intron number 2 from transcript AT5G26730.1 (locus AT5G267 30) derived from phytozome v7.0 (chr-ID Chr5; pos 9300797 to 9301511)
atcttgttcttcactaaacctccctcaactcctaattttcttttcttcttgactgtggatgtatatatgtgtgtatttatttcggttatacttataatggtgtaacgcagttttgtgtttgttgttctttgccatctctagtagagattctttatgtagtttaacacatatagttggtagaattgaggactagagtttaatttgtttttctatggccgctcctttattgaagcgtttgtgggagtttaaggttctaagttctaaacagatcctcaggagcttctcaagattaaaaagttactctatttgttttaatataggtatggacaaatcaaaatatcttatgagtcaaaatttagaatgaaatcataaaataacatttatatgaaacggatgaagtatgacacaaagagagagaaaatccacacgagtattctagatcacacttaaaagatgaaaaaagttgaagtcatgaatcaaccatggatcaactaattactacgaaactctcgccggtttagtattaactcgcaaaggtcatgttcttcttcttgtccaacatagtatataactttgttttcaaattctaaaattatatgcgtgatgattctaatatcagctagtatgaaaactttttccctagttatagctcctttgtttttcttttctcttacgattcttgcatccaccgagccaccacatctcatattgagac

SEQ ID NO: 3739 - DNA, 133 bp, Arabidopsis thaliana
  Intron number 3 from transcript AT5G26751.1 (locus AT5G267 51) derived from phytozome v7.0 (chr-ID Chr5; pos 9401449 to 9401581 reverse strand)
gccaaccaaaacaggtttttgattcttcttctttgcaaaaaactgttcttttaatcttcttaagttagttgattggttagtgtttcgtgtttttattaatttttctacaatgtcaatgcagacaattagctac

SEQ ID NO: 3740 - DNA, 741 bp, Arabidopsis thaliana
  Intron number 2 from transcript AT5G26800.1 (locus AT5G268 00) derived from phytozome v7.0 (chr-ID Chr5; pos 9425702 to 9426442)
ttagactcaagaagtttggtattccttgcaaacatgtaagtttccaagtctttattgttctgtgtaagttacatagatttcaatgtgcatttggttatattgttgttgcagaaaagtgggttagttaggttcacaggttttaatatgttactttaaaatgtgttccattgcgtattttagtgaggtatctatagaatttaaggtaaaagagaagaaaaagtcgagttcttttaactttttagacacaaagagattgattgaaatggtcttggaacgttagtttagcttgttggttatcattcaaatatgaaatataggcttgttcgcacttcctgtcactcaccaagacatgtttcttttcgtgttactgttaataggttttggtgaacaatactattgaatttgttccattacgtagtttagtgaagtaactatagaggatcaatgagagaagaagaaaaagtttgagttctataagtttttaggcacaaagagaatgattgaaatgtatgtacctatagttctattttgttgtcatggaaatgtaggtttgttcacacttcctgttactcacgacgatctatttctttcatgttgctgttaatagattttgtgaacaataccatgtttgggtttgttctctcaattcttcatatctctattttggtcaatcttcttttgaaaattctgaattctggttttgcagaggaaattgatactgaaatatagccacaaatacag

SEQ ID NO: 3741 - DNA, 612 bp, Arabidopsis thaliana
  Intron number 1 from transcript AT5G26810.1 (locus AT5G268 10) derived from phytozome v7.0 (chr-ID Chr5; pos 9431041 to 9431652)
cgtgaacacaatcgtcgtcgaccaagccggttcaggtaagttccgtactgttcaagctgccattgattcggttggtgaattgaattctctatggatcaaaatcaaagtaaaacgaggtgtttacgtgtaagtaaataccaactctctactgtttttctttttccaattttagaactcagcgttcttgaccacaattttctagcatttgatttgtttcgaatgtaaaatattactgtcgttggtgtagaaataatgacctagtagcacttgacttcatcttaggcctctccacaattctacatttatactcaaataatttttctagtttcttcgttgttttggagagaattaaagcatagttgatatcattaaatcttgaattcgtgatgttctggttcatagaattctagaaccgtaattaatctaatttacaacgatttcgatggatttgcaattgttaattttcttaatagtaagattaacattaatagtaacatattgttttgtatgataatgaatgtataaaacagagagaaggtgataataccatataataaaccgtgcataatagtagaaggagagggacaaagagtcaccaccatcacgtataat

SEQ ID NO: 3742 - DNA, 467 bp, Arabidopsis thaliana
  Intron number 1 from transcript AT5G26860.1 (locus AT5G268 60) derived from phytozome v7.0 (chr-ID Chr5; pos 9451445 to 9451911)
tgcccactaaccctaggcctgaagattgtttaacggtttgtgtaactatggctttttgttcctttctctgtggaagatttgttagtgcatttgtatatgcgttattggatcgttggcaatctaattgtataggaaaatttcaattcttgttggaattattacaaagttgtaaactttggtaataactgagtggatgatgcttatgaggtgctttacatctttgttgttctattagtggagaaagttgaagcttctgatattgtatgttgttctatggtgtttgcttagagcatttttgaatctgtatttagtggtttgttgttaacagtcaagcaaagactaattggattttgtgaacattttacatttgatcattttcattttagcggagttatgtttctcctgatggagttttccgttgtttaattgcaggttctagcattgccggtgccacataggccgctttt

SEQ ID NO: 3743 - DNA, 828 bp, Arabidopsis thaliana
  Intron number 1 from transcript AT5G26990.1 (locus AT5G269 90) derived from phytozome v7.0 (chr-ID Chr5; pos 9491407 to 9492234)
aagaagatatcagctcgatttcttgtctcgatctggtgagtttgataaaaattataacttggatttgttctttcttaatttgagatttgattggttttgtcttaaatttaatcttgattctattgcaaaaatatcaatgatatttagacctcaaatttgttttcttttgaattgatcaaggatcgagattgactgtaagagattgacatttttgttactgttctggttttccgaacaaaatgggacaagacattgattgtgtcttgttctgaatatttgaaatggtgattgttcaaatgtttgttttgctgatattgaatttaaggaaaatggaggaaataaattctgtcttttgaggcattttactaatgtgaggctttagggattgattaagcgtgtgtgttttgtttctaggttttggtatgaacttaatgtcaaaagctggaatcttgatgattcttgtttgacttacaagtaaatacaaaacttcttgttggtaaaaacgtttttaaaagctttagtttcatctcaaacttagacgtctttgccagggaaggttttatgatctactagtttccattcgtttatttagatatctttgatgtttcttctgaaacccatttgtattggaacttcgagaatggaacgcgtttttagtatttcccattttattttctaggcttttgttttgtagttgtcattttattttctaggcttttgttttgtagttgtcacattttcgaatgttctcttggccgtgtttgactagtttcttcatttttgaaaaacgcagacaatttcttggggtttgaggagatagaaggagaa

SEQ ID NO: 3744 - DNA, 758 bp, Arabidopsis thaliana
  Intron number 2 from transcript AT5G27360.1 (locus AT5G273 60) derived from phytozome v7.0 (chr-ID Chr5; pos 9657865 to 9658622)
aaggacttggatctttctatcgcgcaagtatgtcttcttctttttttttcttgtgcaaatcgcccaagtatgtctatcttttgttcttttccatcaacatttattaaattaatcaagtcacaagttgtttatattaagttattaaccgtaatgtaaataaaagaaaataatagtggtagtctggtagatggcgaaaagacacattgtgacattgatcagtgtcttaagggagatgatcagtgtacttaagggaggtgatcagagctgtccaaatagacatgaatttatgtatagtcctattagatcagtattaaaatttcacatctatttaaattccatattattctttgtcagattgtaataattaataatttcttatgaagagaaatatatgctgtcgttatcccaatgaagctgcacttggttggcttgtaggcttgtgggggtcacctccatttttactcctttttcgaacttcttatcataaatagtaaccttacgaaaaatgttatagttctatatttattaaagatacacaaaatgaaatacaccgaaaacagaattgtaaaataacattcaatcatatagttgtaaaataccattcaatagatagatgacaaactatatataagttttttttttttagaaattaatatcgcaataaaaaaaaaatattaaactcaacttctgcagtttgtctttgagttaatatttttttaacagttttcagcatttgcttcattatccactttgggagc

SEQ ID NO: 3745 - DNA, 208 bp, Arabidopsis thaliana
  Intron number 1 from transcript AT5G27560.1 (locus AT5G275 60) derived from phytozome v7.0 (chr-ID Chr5; pos 9732026 to 9732233)
agttcagtaattttgtccgtttgttttctttattattcgattatactttattttctgtgaattgggttttcattgtgaaggaagaaccattgaattcaattcaaagttgatcacttttcatcagtttctttgttatttttgtgtgactattggaacataaggctaaaaaagatgtttttatcgttactgtttttcagctgtttgccta

SEQ ID NO: 3746 - DNA, 538 bp, Arabidopsis thaliana
  Intron number 1 from transcript AT5G27610.1 (locus AT5G276 10) derived from phytozome v7.0 (chr-ID Chr5; pos 9764314 to 9764851)
gtttcttcgtcgattcttattgagctccgtgattggtgagtagatctgttgatttgatttagggttttttaaaggttttaaacagaagtaattgggattgtttttgaacttcactttatcggattcttctggggaaatttgggatttgtggattccggttcggcgatgcgatttttgatttcgaagttctttcaaaaaggaaaaattctttgaaatttgaattctaacttttgaatttatgtttgggtttcgttgaaacgagtattggtatttgaatctggggttttttttttttttttttgaattctcaaagttgatgattctcgattcgtgattctttgttttctttattgattgatgcttcgaatttttcagagatttgttagtaaagtttataaatttcttttctggtgaaaaattgaatctgagatttttgtgaaagagagcaatttaatgtcgtatcttggtcagatcagttttcatggtttccttaatttgatctttcgttggaatttttctaggcagagaaaacagttat

SEQ ID NO: 3747 - DNA, 464 bp, Arabidopsis thaliana
  Intron number 5 from transcript AT5G27720.1 (locus AT5G277 20) derived from phytozome v7.0 (chr-ID Chr5; pos 9816459 to 9816922)
aggtaatttttttttgtgtgtgtgtgtatatatctcttgcttgatctagttttttctttgttcccctctctctggaatgatgatgcttagccaaatcagatatgtgctccaagaggcatttttctgtggaaccttgttcagcagatggtgtgcctcttgttgtagtgcgtcttagacgatatcacagggaatggttattgctgaccagaatgttgacccacttttatggactttgctgtgttgtgtttctgatgcgatttttctctattgtttctactttatttcattccctctaaaatcaaattatattcacataccataaacgatatcttcatctagaaggacagtcatatgctgtttctatttatgttcttactgctgcaacctagattgagttaactgacttaaattgatttcttctctcttcaggtgattgataaagtacaggaggagaagacacgcac

SEQ ID NO: 3748 - DNA, 471 bp, Arabidopsis thaliana
  Intron number 4 from transcript AT5G27740.1 (locus AT5G277 40) derived from phytozome v7.0 (chr-ID Chr5; pos 9824696 to 9825166)
accaattgacacgaaaggaaagaagggatataagggtaagaattactgttccccttgttctatataatagtatcattagtgtagacaatttggattacaatggcttatagtagttatttgaagcatctatgaagagtgaggcttttataagggcatttgatgccatcttcaatccgtatactgctgtggtagactgggtctacattttatggttcgtaatatagttttcgtttactttttcatgttcaattagatggttgcctcgtatatctagttttaagagttcttgttcagctgagtgcttctttatacatttagatggttctctgtttttgattatcaacttatcactggtctctaacatccctttatgacctgccaaagtagttcaacttcttttcacatatggatgttggaagatgtctgatacatgcagattttttttttttgtttcggcagtgttggtattaa

SEQ ID NO: 3749 - DNA, 547 bp, Arabidopsis thaliana
  Intron number 1 from transcript AT5G28220.1 (locus AT5G282 20) derived from phytozome v7.0 (chr-ID Chr5; pos 10192314 to 10192860 reverse strand)
tgatcagaagaaacgatctgctcttggtccaggttagtcgaatttcgaatccctgattcatctctggtttaatattcattgatccgaccggtgaaattaaacatgtgttcttaaggaagttgtttaagtgatcaatgtctgaattaaattaggataatgactggtctaattggatctgtaaagcaattcagtaatgatcattttttgtgctatagtttgtattaatctttagtcaaaaaaatctttagaaaaaattgaatgattagtaaactttcttgtcgcggataaagttcgtaccggaccgcatcatatcacctatgtaaacaacattcctcatggatggctcttttgagcttaattaatatcggtaaacaaaaaaaaaaaagtaaactttcttgtctcaatgaaatgtttttgttttggttcattttagctatagatttttgtgtaaagtatgcaattataatcaagactaaattaagatatttttctgctcttatgtttatgaatgtatgtaaatggatcttgttactctttgttgtctaga

SEQ ID NO: 3750 - DNA, 538 bp, Arabidopsis thaliana
  Intron number 2 from transcript AT5G28550.1 (locus AT5G285 50) derived from phytozome v7.0 (chr-ID Chr5; pos 10558915 to 10559452 reverse strand)
tgattctaagactttattcagctggacggtccgtctgtgtatttgatcttaagtagagagaaaatggtaaagaaaccatggaaagtttaggacttcgagcttaacttggtgacgctgatatatggaaaagcttagtttctttatttggtatgattaacacatacggtggtgagaagaccactaaaagaaagaagaatactaaagtccaaactaaacccaaagccgcgattgaatacactctacctagccttgatggtctgagatttttgtgccaaccgcttgccagcttgataaattttgagaagaaaaagttgatgtaggaaagagaatttgcatgttatactagtcagctatgtgtattgcaggatatgtttctccaattttcctatggtttacgcttccttaaaaggtacatatgtttttctctactataggtctaagaaatatcgaatgaattctgtcctcaaatactttgcgtaacggttcagatgtattctgggttaaatgttttgcttacctttcatttcccttttgcgag

SEQ ID NO: 3751 - DNA, 959 bp, Arabidopsis thaliana
  Intron number 1 from transcript AT5G28590.1 (locus AT5G285 90) derived from phytozome v7.0 (chr-ID Chr5; pos 10580565 to 10581523 reverse strand)
aaatcgcctacgatccgattcagcgtcgcgctttcgtgaacattgctcaaatcataacactaaatttatttccaaatccttaaaataaatcgagaaacaaaaagagatcagaaaaaaaaaatgaatttcaatctttgatcttttgatgtaactttcatagtatttgagtttctatagacactctttgtgcttacaaatgtgtaatctattggagcagaaactttgttttgaacacattgaagaatgtttctagtattgcttcattttgctgatttatggtctttgttttgtttaaaacttgtggcagtagtaccaatagtttaatgaattcatgttctagattcaattaataaactatgtgaatcgtaaattgtttgagttctatgtgaattgtattaaagtttcaatctttgatctttctatgtaactttcatagtatttgagtttctagagacactcatatgtgtttataaatgtgtaatttgagtagaaagtttgttttaaacacattgaagaatgcgtagattcgtgtgtctagtgttgcttcattttgctgattgatttggtttgttaaaacttgtggcagctgagttcatgttaaagctcatttgatcaccattgtactctttcttgctgtttgagttctatgtgaattgtgttaagtttcaatctttggtctttctatgtaactttcatagtatttgagtttctatagacattatctgtgcttacaaatgcgtaatgtattggagtagaaactttgttttgaacacattgaagaatgcgtagattcttgtttctagtgctgattgatttgttttgtaaaacttgtggcagctgagttcatgttaaagattcaattaggttataagatcaactgatcaacattgtactcgtcttgctgttgtcattttgtgagcttcacataaacattttttttttccaaggaaaactgggca

SEQ ID NO: 3752 - DNA, 214 bp, Arabidopsis thaliana
  Intron number 4 from transcript AT5G28910.2 (locus AT5G289 10) derived from phytozome v7.0 (chr-ID Chr5; pos 10931482 to 10931695 reverse strand)
gttgcaaaggtacataaaggctttaatcctttgagtcttcactctaacatatagcagcaactatcacaaattacatcttcttggttaatcttcttatcaagatgttttagacgctgaaaagtgtatataagaaccaaactttggatttgatttggtgtttctcttttgttttgatgcaggttcttttcgtggaaactggtcttgctattttcta

SEQ ID NO: 3753 - DNA, 305 bp, Arabidopsis thaliana
  Intron number 1 from transcript AT5G33390.1 (locus AT5G333 90) derived from phytozome v7.0 (chr-ID Chr5; pos 12662067 to 12662371)
gacgttttctcagcttttacttcttcaacttcaaggtaagccgcggttttcttctttttgattttacagttcgagcttctttcttttttcccagataaatcttgcgtgtgcaattgtttgaagctatataatttttgaaccaagggagatttttaatatcgactttttgacgagtttgtgattttttatagaaaccctagatgtaaagaaaaaacagtaatttttttcatctgttttaccaaagattttttcatcagttaaaccctactaactattctagtcttttttgatgtatattgtgcaag

SEQ ID NO: 3754 - DNA, 566 bp, Arabidopsis thaliana
  Intron number 1 from transcript AT5G34940.3 (locus AT5G349 40) derived from phytozome v7.0 (chr-ID Chr5; pos 13237942 to 13238507 reverse strand)
cttcaattctcaatctggtttgttttttctttttttttttttttttttttgatcaaattttgtttcattttcatgtttttccgtcgaaaacaatgcaacttgcatttttgatagaaccaaaataaaaaaggttgtgtatttatttcgggttggttaggtagcaggaatccattgaaagatttcttaggtactactactcttcattaagcaaatagaatttactaattgtagaaaatgtagagataaaaaaaaaaaatcatttttaccatttatggaatgtgaaagtcaaaaatcaagattcggcaagtaaaagtattcctttgttttgtcatcatatgccattttaacaatagattacaaacaaaatttggtcatgttaatatgaagtaatttattcgaagagttgattagagaaatatgaaatctaatgaaaaatttggtcgatcatcttgcaggatttgaacaacgttattcttcaaaatgcaatcaaaggtaatcacatgattcttgatttatattggttaatgttaggatttgaccattgttgttccaatttccaaaaacac

SEQ ID NO: 3755 - DNA, 480 bp, Arabidopsis thaliana
  Intron number 1 from transcript AT5G34940.2 (locus AT5G349 40) derived from phytozome v7.0 (chr-ID Chr5; pos 13238028 to 13238507 reverse strand)
cttcaattctcaatctggtttgttttttctttttttttttttttttttttgatcaaattttgtttcattttcatgtttttccgtcgaaaacaatgcaacttgcatttttgatagaaccaaaataaaaaaggttgtgtatttatttcgggttggttaggtagcaggaatccattgaaagatttcttaggtactactactcttcattaagcaaatagaatttactaattgtagaaaatgtagagataaaaaaaaaaaatcatttttaccatttatggaatgtgaaagtcaaaaatcaagattcggcaagtaaaagtattcctttgttttgtcatcatatgccattttaacaatagattacaaacaaaatttggtcatgttaatatgaagtaatttattcgaagagttgattagagaaatatgaaatctaatgaaaaatttggtcgatcatcttgcaggatttgaacaacgttattcttcaaa

SEQ ID NO: 3756 - DNA, 437 bp, Arabidopsis thaliana
  Intron number 2 from transcript AT5G35170.1 (locus AT5G351 70) derived from phytozome v7.0 (chr-ID Chr5; pos 13419722 to 13420158)
tgagctcattgttcacaaggtaatattttccactcttctctatcggtttcttgttttgagctcattgttcacaaggtaatttttttatactctttcatgatctcttttctggttgtcttatgggttctgactcatggtagattctctcttgagtgcggtgaagaatggatatgcatttaaaattatctagtatactgaacaatgcatataaaacgtttgctgtgactcataaaatcttatttgccatccaaaggttgctgaattttccttgatctttggactgttcattaaattattgcaataatcacagtttctagtacgtttgatgtaaggaagactatctatgttgccattgtttgtatgtcttgatttatatcaagtttctctttcttggtcatgcagtttggtttggtgcacatatcaacaggggatctatt

SEQ ID NO: 3757 - DNA, 385 bp, Arabidopsis thaliana
  Intron number 1 from transcript AT5G35330.3 (locus AT5G353 30) derived from phytozome v7.0 (chr-ID Chr5; pos 13525271 to 13525655 reverse strand)
tctctgaaaccctggtttgctctcgtcctcttcgtgtaacgattcttcttcttgataaatttttaatctttgtttcggcttttcgatgaaattgttttttttttggatctcgtctctatcagctcatgttcttctttgattatatgataattgttgtttcctttgctctgttttatgattattgttgatttttgagattgaaatgttcgagggtttctactgttcactgttctttacacgtatcaatgttttcttgatcatgttctcttatgatgttaatagagagactagtgttattgtgatgaatgattcttgttaactaaatttgtcatttttgttttcacttgacattcatttctctaaccatttattataggtagtttct

SEQ ID NO: 3758 - DNA, 385 bp, Arabidopsis thaliana; identical to SEQ ID NO: 3757
  Intron number 1 from transcript AT5G35330.2 (locus AT5G353 30) derived from phytozome v7.0 (chr-ID Chr5; pos 13525271 to 13525655 reverse strand)

SEQ ID NO: 3759 - DNA, 406 bp, Arabidopsis thaliana
  Intron number 1 from transcript AT5G35330.1 (locus AT5G353 30) derived from phytozome v7.0 (chr-ID Chr5; pos 13525271 to 13525676 reverse strand)
agagccttcttcgctcaccgatctctgaaaccctggtttgctctcgtcctcttcgtgtaacgattcttcttcttgataaatttttaatctttgtttcggcttttcgatgaaattgttttttttttggatctcgtctctatcagctcatgttcttctttgattatatgataattgttgtttcctttgctctgttttatgattattgttgatttttgagattgaaatgttcgagggtttctactgttcactgttctttacacgtatcaatgttttcttgatcatgttctcttatgatgttaatagagagactagtgttattgtgatgaatgattcttgttaactaaatttgtcatttttgttttcacttgacattcatttctctaaccatttattataggtagtttct

SEQ ID NO: 3760 - DNA, 483 bp, Arabidopsis thaliana
  Intron number 1 from transcript AT5G35375.1 (locus AT5G353 75) derived from phytozome v7.0 (chr-ID Chr5; pos 13592411 to 13592893)
gttggccagctcttgtcgctttcatatcgatagtcggctttgccgtcagcgctcctttgcttcttttcatttttcttataaattagttttttttaatagaagttgcggttaaacctcatcggatctgtatattagtggtggcgtttgtggcgattctccactcaaaagggtcatacatatcctttaggtttacggtttatggaaaataattaggcaatttgcaatttagttgaagatccaaagcaatttcctcaacttattactactgcttttagctatttctttttattaaagcattgattggtttagttaacagaagtagattagtttgagatcttatctcatttccgttgctttgcgatgaatctaaaaaaaaaataatattgatgattaaagcaagtgattgagattaatggttccatattagatctttacttctgttttgcagttatcggtgaattacagaagaatctatactcgatt

SEQ ID NO: 3761 - DNA, 439 bp, Arabidopsis thaliana
  Intron number 5 from transcript AT5G35520.1 (locus AT5G355 20) derived from phytozome v7.0 (chr-ID Chr5; pos 13702209 to 13702647)
aaatattcaaaggtaattaagatgcaaacttcattttagtctttgatgtattgagatctctagattcagttcaatggaatgatttggttatgttttgtatattagttcttgatgaccctgaaaactcttctccacttatcctgtcagtcataaacgtgaccaagtcgacattttttcgttttctgctgctagctagtatcttgagtaatgtcctgttctcacttagaatatagatatgaaatctcccttccatcttctagagatatacttctgattagttttgatgtgatctcatttagagttttataatttgacatatattatcaggtagtggtcgtccatttttttccttcttctcagcaatacctttgtttgtttgattgttcatagcatgactagagatgatgacttgaatctctaatattggttttctgcagag

SEQ ID NO: 3762 - DNA, 448 bp, Arabidopsis thaliana
  Intron number 1 from transcript AT5G35570.1 (locus AT5G355 70) derived from phytozome v7.0 (chr-ID Chr5; pos 13752428 to 13752875 reverse strand)
gtgctgcttccgatcaggtctctttatttctgtttatactagtgtttagtgtgttagaacatttgtggcttcttcttgcttgagaaggcctttgttttctatggtactagaacctgcttgattaagataaaatcttcacatttctagttctagtagtgtttggagtgttgaacatttgtggcttctgtttctacaacttgataaattgagttttgatgttgctcatatgtggatgtgtatctaagtttccaccttgagttgtgtgtgtttggctgcttgattaagatcttcttcacattctgatgctactaatgttttcaagtgttaaacatttgtggcttagtttctatttggctaaagaagatgggagaaggagattaaatatctgacatggctttggtaatttcttctaggatttatctatcccccgagtaaatctacttgatca

SEQ ID NO: 3763 - DNA, 1008 bp, Arabidopsis thaliana
  Intron number 3 from transcript AT5G36100.1 (locus AT5G361 00) derived from phytozome v7.0 (chr-ID Chr5; pos 14191904 to 14192911 reverse strand)
gaaatatcttcaactacggttagtatatcttctttcatcctattgtttcattactgagtggttgcgaggcgtcgtcgttgcatgtcgaactgagtaaaaatcagattgtgctatggtattgtttaagtgattctcaggccttttgtgttgaacttgttctgttatgtggatccatttgcttcgagttaacatggtgcttaccgatgcccttatgtttgtgagtgttttggctagtaacaaatttgtgccttattgtatattgtaatgtctacggatctttaagtggatagtgtaagggtctttatgggtcaatcctctcttaagaagcttcttgtttcgtttgatggtgttattatctcaagtaaccaaatacgtggttgtttgattcgctctcttcatatggttttttgacggttgatttgaacttattatatgctgctcgagtccagtggttgtaagagtgtgtaacagtatatatatgtgggtaaaattcacagtcaaaggctaggttaatggtaggatcacgagtcctataaggtagatagacgaaatgaggtcttgaaaagagaacaacaaagggtacagttttaatggtagggacatatttttcattattcagtcacttatgctacttcttattaagtgagtagcacaattgtttttattaagattacttggcgtccgtgtaatagcttagcttcttgaactcatttatctgtttctagtgataaatccaaatgtttttgtactttgaattgtctctctaatttaaatgaatagctaaaaaaatttgttcaagcattaaccataagtaccgtgtgagcattagtgtaacatagtacatgagaacttattcaagaagcttgtgtaaatacatagtaccttatctttatcaactagatcatgcattgaattgtttgtttccaaatccttctcaaaggttgttttcttgtttggctacttaaattgaggtttgtgggtaaaggtgttgtatagcgaggagcagat

SEQ ID NO: 3764 - DNA, 865 bp, Arabidopsis thaliana
  Intron number 1 from transcript AT5G36260.1 (locus AT5G362 60) derived from phytozome v7.0 (chr-ID Chr5; pos 14287123 to 14287987 reverse strand)
cctctcggtggcgatagtcgcgccgactccatcgggtttgtctctttagatccctcttcatttgctatttctagattggatcgtgttgcttattttagtcgttgaaactaggagaatgcaatagttacattttgtaggattgaaaattttgaaaaaatcatgggataagaaaattttttataagcggaattaaaccggaaatgaattcgcggaggcgaggtatgatttttaaaatcgttgtaatttagcaattaaaagtcacttgtcaaaatttgtagaatcataaatttcaaaaaaaataggatcagaaattgcgagtaaaacggtgttataaaacattttgataagcggaattaaacacgaaatgaattcgcggaggcgagatatgatttctataatcactgtagttcagcaattaaaactcacttgtcaaaatttgtacaatcaaaaatttcgaaaaaataggattagaaattgcgagtaaaatggtgttatcaaacgttttgataagcggaattaaaccggaaaagaattcgcggaggcgagatatgatttctaaaatcactgtaattaaggcgattaaaagtcatttttcaaaatttgtagaatcaaatatttcgaaaaataggattagaaattgcgagtaaaacggcgttataaaacgctatgttaagcggaattaaacatgaaactaatttgcggaggcgagatatgatatctttttctaaaatcgctgtaatttagcgattaaatgccacttgtcaaaatttggttccaaaacatttaatgtatgtactaatgagactttcatttgattgatttgtttgcagtttatacttcaccaaaatcaagcttgggtcaccac

SEQ ID NO: 3765 - DNA, 774 bp, Arabidopsis thaliana
  Intron number 1 from transcript AT5G36330.1 (locus AT5G363 30) derived from phytozome v7.0 (chr-ID Chr5; pos 14329433 to 14330206 reverse strand)
acgaaaaggggttacattgcgtattattttagacttcatcggataattatgcattttttggaggtggagaataaagatgcaaaaatagatgagttagagggttttattttgcacaaaaccctaaaaataacaaaatttgatttgataagggtggatatttcactaataaatttgacacatgtcatgatcacgtgagttaacaattttgaaagcccaactttatgtagatatttggcacatatattggattatgttcattgttttcatgccagatccgaacttctcttcccaaccgtttaacccgctatccagaaactcttctcctctaagtttagtgttaacaagtcatggagaacctcattgtatagaagttttacaaaccaaacctttagattgattcaaataatttcacgaagaaaatattataaatcgatttatttgtttaaatttggagatataaaccgatgattgattaattatgtgaagccattttacttttattttctctttgtagtcaatatttcttaggtaatgttacgtgtttcacacatggagtttcaactatattaaatttctaaaacggctaatcaaatacctaattaacgtattcaaagatgttaacttaaaaaaaattaatatgacagtttcacatttcaatccatataaataagcaaggattttattgttattcatcaatcaaaaacaaacaaagcattaagcatattgttgctatactaagactttttactcaatttctcattaggtctatcaaaa

SEQ ID NO: 3766 - DNA, 502 bp, Arabidopsis thaliana
  Intron number 2 from transcript AT5G36950.1 (locus AT5G369 50) derived from phytozome v7.0 (chr-ID Chr5; pos 14595712 to 14596213)
tcaggaagctgtggctgtagttggctatcctcaaggtaattgaagtagctcttgcttacatattaggcaaataaagagacaagtaagtgtaaatgcatgaaagaagagcaattttgagttttagatggtctcgttgtatgtatgtatctttggctactagctccaacagtgtataatcgtaggccgagacctgatttctgtcatgttattggtctgcttctaaacatggaaatttattgtgatgaggcaactattatgttttagcttctgtatttattcaaaactttcaaggattagtatacgtgctatggcttcatattcatggaaagcaatatatttggaatgtgcattgtcatgtgaaaaactgaatagttatgatgtttggcttaagggttcccattatatggttacgacaatctgaaataagaaagtggctttgagttttaatcatatgagctctaatgcaggtggtgacaacatttctgttacaaaaggtgttgtg

SEQ ID NO: 3767 - DNA, 1025 bp, Arabidopsis thaliana
  Intron number 3 from transcript AT5G37360.1 (locus AT5G373 60) derived from phytozome v7.0 (chr-ID Chr5; pos 14806570 to 14807594 reverse strand)
aggttagttcctatttctccacatgaacagttataagattaaggttcgaggttatgattattttagtactgagttcaagaacagctattccatctgtgggatcttttatgtgatattcatgtatttgaactacatgtgtatgctcttccttcattgtagcctcaactccatggtaaacaaactatcatctgctatgcagttctatattccaacatttgtgccagcataaaatcttaggaaatgagtagaaaaagaacctttggtgatttgctgtgttataaagtagttatatgcttaatagcattctatgcttttgtgtgtattgccaaatataccaatgtgtagtccggtatttatcgtttatatgggtatagtatagtattctcattaacggtatagtttgcttaacagtatcgacatggctgtcatatattattatgtctaaatgatctcaaatttcaagtttctgaattagctaattttctaaactgtttggagttagctatttgtgattagtttcatccctattgtagcataagctgtttcttctttattattcatctttggtatcaatatgatttatggaaggaatgttgtcatgtgtgtggttaatggatttactagcaactaatgatagatatttgcagaagagaatatagctgctccattattttgatatctgagctaaatacatgattttgtattactttagcccttaggagcctaatcataagactgatcttcacttttaggcagttagatgtaacatgtgagtagtgaaacatacagctcatacaattattttaagtccgcagacagaaaccttcctgtaatcttgtttaacagttagtgatagggtcacattcattcaaacgttatggaatctttcaaatgatctaagcttcattgtgatatacaagctaacctcccttcctcactttcttaaactttgagggacttacaattgcgacctctcaaatctatttgtagtgtggtcaagagcttggggagaccttactgaatct

SEQ ID NO: 3768 - DNA, 870 bp, Arabidopsis thaliana
  Intron number 1 from transcript AT5G37475.1 (locus AT5G374 75) derived from phytozome v7.0 (chr-ID Chr5; pos 14867772 to 14868641 reverse strand)
gctgaaacctaccttcaggattcagcctttctcaggtactgtttcttccgtctccattcgcttcaatttcacttgactgttgaattcatcgaattgaatccgagctgggcatgccaatatttatcagtactgattttgtgtaaggttagatttaggatttgtggtgcttgatgggtttttattggtaattgggttgtaggttcctccttaaaagttgtgtaatttgtcactaattgggtttagattacactaatgatcaatcaaactctgttttgctatattcttttgtatgattgatgatgtttaaaagctgaatcctttcatgaatcaggtcgcaaactcggtgttcataacctaagttttggaacgaacaaacttgtgtttgctggcttgcttgagaattaacttgtaatcaggctctatgctcttattttagtagttctatttgcatgtgaagtactagtaggatcagaaagtctttctatagtagattgttttatgttcttaagctgtgaagccttgatcctaagagtaattgtatcattgtcttgggctgttatgaattcctggtatttgcaagtttactgtgagttgttacacacgtttttgttgcttggtcagaccagatgactaactacttaaaatcatgaatatcactatattgaaaatatcatattcgatttttcataggagttttgttgcattttacctccaggatatataactaactaatgtatgatttacatttaagcatcaccagtgagagcctttgttctgatctttgttctgatctttgttctttctgatgttatgtggctgcttgtgccttgtgcaggttttcagttggattcagatagcagcttgtacttc

SEQ ID NO: 3769 - DNA, 524 bp, Arabidopsis thaliana
  Intron number 2 from transcript AT5G37478.1 (locus AT5G374 78) derived from phytozome v7.0 (chr-ID Chr5; pos 14881871 to 14882394)
gtaaaggagtgaggatacgattccatttttaatttcttttcttacattatttttctcctattgaggcatttttcacattaatccaacgatcacattttcatcaaaaacttttttttttactgtagtctaagtttggctatataacgtcatttgccaaaattttatcctaatgtccatcacattaaaaaaaaactcaaactatgtaacgtcatttgccaattccagcattatatagttaccatttgatatatatcctaatgtcccaacaatttctacagttttcacaatgccagaagtgtaagtatgtgtttttataaaaacattgttgtgtaattcaagaaatggtaaatcaaagtactcgtgaacttctcagtaaaagtttgtaaataatgagtaagaaaaagtatggtgtttcgtagtttgtacataaatactacagtatgttagtatagttatcgtagcataattgaatccctacttaatctaattgtagaccaaagtggaaccactcaaagaaagagccc

SEQ ID NO: 3770 - DNA, 695 bp, Arabidopsis thaliana
  Intron number 1 from transcript AT5G37520.1 (locus AT5G375 20) derived from phytozome v7.0 (chr-ID Chr5; pos 14902768 to 14903462)
gactgtaagtttgtttcaacattttatgtttaattagagttgcggcctaaaagtataaaaatataaatcataataaattggttttattataaatacttagaaatatactacacttagttttaatattattaacataaatctattaaaatttcaggtaaatccggctttatatactgacatgcaaccacgaagttatgtttatacgaaagtaagtttattacttatatatcttcaaataccaagaaacttatttaacttttcttttttttgacagctccaagaaacttatttaactatataacatgctattgtaaaatgattataaaatttaatcatttgcctaaattacttcaaaatttaaaagataaattaaacacacattatatatctttacaaaagaaaacaaaattcctcacattatattttatttttataatttcattctaaatattgattttttttttatatttcaaacaattgaaacaaacaaaaatgatgttcaacgcaaccaaaaacaatgttttctaaatgaatattttgtagcgtaatttatcataaaaaaaaacaatactataaatcactccatcatattttgtaaaattattcgatgtattagatatttatacgctagacataacgatacatgtaaaatttgtataggcaggtcaaaatcagtgttataacagcttgtgtcc

SEQ ID NO: 3771 - DNA, 529 bp, Arabidopsis thaliana
  Intron number 1 from transcript AT5G37680.1 (locus AT5G376 80) derived from phytozome v7.0 (chr-ID Chr5; pos 14970567 to 14971095 reverse strand)
ggtctttgggattcacttcttaattggctccggaggtaaacaaatttctaactttcattttgttttgctgattaagttggtttattagttgtagtccttttgttcttccattgaagtagtttagagttatagttctgggtttagtaaaaacgttgccaaaaaccaatttttctcacaaagagtcaacaattattgtttcaaaatctcaaacttctcttgagtttcttgggctgtatcttttattgttacattatatgaattggttcgctgagaaatctaccgttatttctatgttcttgtgtattaattctcttgacttgattgtcattttaatccatttatagtagtgatgctttatgtgatgttatagaatggttaaaagagtaggttatagttggttagtaatgtattgttgtttttggttatacttatgtttttagtgtatagcagaatcacgttttggtaacacttagattttgattctgtgtttgcttatatttgttgtgtcagcttgtttttcaaacaagag

SEQ ID NO: 3772 - DNA, 809 bp, Arabidopsis thaliana
  Intron number 2 from transcript AT5G37780.2 (locus AT5G377 80) derived from phytozome v7.0 (chr-ID Chr5; pos 15005111 to 15005919 reverse strand)
gtgtttattagtcgctaatctctttagattcggaggtattgaccttgtcgtttgatctgtttttgatctttgaccgagtagtttcgctttttgatcttcgatggctttttgtatatgattgaatcgatttaatagcttgcttgttgtcctgtttcgttgatttgctagcttggatctgatttattttttcgtctcttacgttttgtttgatttttcatcttccatgattgttttggtcgtatgtgttttcgagtttgctcttagttgataaagaatctgctatctttttttcttcgaagttgttaattatctgagtttttttttgtgttctcaacaattctaccaaagaatgggaaaaaactatgtgcttaaatgtgatttcgaatcttttagaagctttgatggttcttcttgatctctctaggtaggtttcaaggtcatgttgctcagattttctcttgatttctgagttgtttgttatactagttgatgtagtgtttgttctctctgatctaggatttgatttcaaaagattatcaaattgtttggaaactactcctgaattgtctcatggttatatcctgcttatagtagctcaatttgtgtagatttgtttgttcactctttaagagataagcaaaagatgttcattcgcttttgcatctatcattgcttttacccatgacaaaactgctttatcattgcttccattgagcatttgagtataatatgtgatgggttctaaaatgtaatgctctcttaattgtggttacacaggttgcatcacaacaaaagagctgggaacagtt

SEQ ID NO: 3773 - DNA, 934 bp, Arabidopsis thaliana
  Intron number 1 from transcript AT5G37780.1 (locus AT5G377 80) derived from phytozome v7.0 (chr-ID Chr5; pos 15005111 to 15006044 reverse strand)
gcggttagattacctcttcttttacgcctttgatggttacattactggatctcggttttttttccattttcgtcttctatcgatgatttagaacggtgtatctcgtcctcccgagctttgaatatgtgtttattagtcgctaatctctttagattcggaggtattgaccttgtcgtttgatctgtttttgatctttgaccgagtagtttcgctttttgatcttcgatggctttttgtatatgattgaatcgatttaatagcttgcttgttgtcctgtttcgttgatttgctagcttggatctgatttattttttcgtctcttacgttttgtttgatttttcatcttccatgattgttttggtcgtatgtgttttcgagtttgctcttagttgataaagaatctgctatctttttttcttcgaagttgttaattatctgagtttttttttgtgttctcaacaattctaccaaagaatgggaaaaaactatgtgcttaaatgtgatttcgaatcttttagaagctttgatggttcttcttgatctctctaggtaggtttcaaggtcatgttgctcagattttctcttgatttctgagttgtttgttatactagttgatgtagtgtttgttctctctgatctaggatttgatttcaaaagattatcaaattgtttggaaactactcctgaattgtctcatggttatatcctgcttatagtagctcaatttgtgtagatttgtttgttcactctttaagagataagcaaaagatgttcattcgcttttgcatctatcattgcttttacccatgacaaaactgctttatcattgcttccattgagcatttgagtataatatgtgatgggttctaaaatgtaatgctctcttaattgtggttacacaggttgcatcacaacaaaagagctgggaacagtt

SEQ ID NO: 3774 - DNA, 655 bp, Arabidopsis thaliana
  Intron number 1 from transcript AT5G37780.3 (locus AT5G377 80) derived from phytozome v7.0 (chr-ID Chr5; pos 15005390 to 15006044 reverse strand)
gcggttagattacctcttcttttacgcctttgatggttacattactggatctcggttttttttccattttcgtcttctatcgatgatttagaacggtgtatctcgtcctcccgagctttgaatatgtgtttattagtcgctaatctctttagattcggaggtattgaccttgtcgtttgatctgtttttgatctttgaccgagtagtttcgctttttgatcttcgatggctttttgtatatgattgaatcgatttaatagcttgcttgttgtcctgtttcgttgatttgctagcttggatctgatttattttttcgtctcttacgttttgtttgatttttcatcttccatgattgttttggtcgtatgtgttttcgagtttgctcttagttgataaagaatctgctatctttttttcttcgaagttgttaattatctgagtttttttttgtgttctcaacaattctaccaaagaatgggaaaaaactatgtgcttaaatgtgatttcgaatcttttagaagctttgatggttcttcttgatctctctaggtaggtttcaaggtcatgttgctcagattttctcttgatttctgagttgtttgttatactagttgatgtagtgtttgttctctctgatctaggatttgatttcaaa

SEQ ID NO: 3775 - DNA, 530 bp, Arabidopsis thaliana
  Intron number 2 from transcript AT5G37810.1 (locus AT5G378 10) derived from phytozome v7.0 (chr-ID Chr5; pos 15045662 to 15046191)
ctttcgccattttccgacggtttccttggcatcaggtcatcatctattcttttagccttgatcgaataagatctagattgtttcaaacattacaagttcaacgtcaagaagaagattcctttttcaaaaaatacaaaatgaacaattttctcatcttatgcaatattaaagcagtcattttcatagctattccaaaaaataaatatcatgtagattagctcgtcatttgctaaaaatattgcaagggtaattagcaaattgtagatatgaggctgattagcgtggggctgtgaacattgtactttaatttaatgatcgcaccaaattgatagatgcatgacatcagtcgtaaaaactatgagttcttttataaaaaaacagaaaacaaaacatatgtaaaaaatgccccccaaaaaaaaacaattgaaaactaagttatagtgtatgaattcaaatattggattaatgaatacaattgtataatgttttgagcaggtaccattgtatataggtgcacaatttgcgggatc

SEQ ID NO: 3776 - DNA, 492 bp, Arabidopsis thaliana
  Intron number 1 from transcript AT5G37890.1 (locus AT5G378 90) derived from phytozome v7.0 (chr-ID Chr5; pos 15091174 to 15091665 reverse strand)
tttgctacgaagctttcacaattcccatcttccaggtttcgtaatttctcaaattgaatcatttcgtatttttcagaaagtttctgttttggttagaactctgaacatagttggaactgtggccatttacttgattctaagagtagccttagcttttgaggattctagtgaacttttgaaagttatgttaaagaaattgcagagagaagaagttggaattgtgcccatttactagttactagatttcaagagtgtccttaagctttagcttgtgatgattttatagaattctagtgaactttagtaagttatgttcatgtatgcagttgtatatagttattgaaaatatgtgtataacttgtctatatcatgaattatatgggagaatcatttggggagagaactattatccttggtcgattcgatgaatattatctcgacgttgttatagcttttgatcacaagttattggttttgaatttcagtgtgata

SEQ ID NO: 3777 - DNA, 615 bp, Arabidopsis thaliana
  Intron number 1 from transcript AT5G38220.1 (locus AT5G382 20) derived from phytozome v7.0 (chr-ID Chr5; pos 15269306 to 15269920)
gggtaagtaacttttttcttcttctctatctctgtttttgtataaagtttcgatttttgaggattgttgtgaatgatactgttaatttaggggtttccatgaaaaaaggaggaaactttccaaaattggttcgttatctcgttgatgtttttaaatttgaattgaagatttggttttggattggttattaatggcttatagtcctgaatatagtgacaaaatctatgtgaaagtcagagactttagccaaaattttctgggtcttgttgacccctcaagacatttattcatatagtttttgaaatttctatataaataatttgacttttgtgaaatgttgtgatgcaagcatttcattgcaactgttttcaatcatacttctcctctgtggtagaagaagaatttagattctgagaatgcgatttcgcatatcttcatgcgtacttgcttaggccttgtactcaattttaacgactgtgaagactgtaaattggtaattagtagcaaaagtttctccacttaagttgtgttattgcggtagttacggtctataatccaatgatgagtaggttataatagttctataatctcttctttggttttctttttccaggt

SEQ ID NO: 3778 - DNA, 843 bp, Arabidopsis thaliana
  Intron number 1 from transcript AT5G38317.1 (locus AT5G383 17) derived from phytozome v7.0 (chr-ID Chr5; pos 15314083 to 15314925)
attctttgctagcttccttattatatttgtctcaggtatattatatattttgtatatctttcaattgttatggttctttactttattcgatttctttaaacgtttcaagtattttaaatataattatacgttcacaataatcaaattttgatattgccagtttatggacagttgacaaaaccacttctgcttgacattttctagtacaacgtagatgaattatcatatgtcccatggcaatggatgaacagaacataaacaaaatagtatgatatagtaatgtgattatttcatataaaagtattggttcttataatgataacataaataagacttactatgtctaatcataaatgtacaaatgcaagaacaaattaaagtgaattagatatatgccaacaaatttaagaaaatagcaatggcgtgacttattttcatcaaaacattaaattttgacattgtcaataatttaacattacgggaaacatgatttttgtgtaacgttattttcattatgtgaacgtctaatttatcaaaatgaagcaaaattaaaccgtaaaacccaaaattttaaactctaacctctgtttaataaattagatgtttacataagaataacatattttgggagatacatatagttgcatattccataaaacttacagaagagtaagattttttgaaaagtcttctcattgttattattgcttgtaccttatttctctatagagtgtaaatactcttaagtttgctatattaagagtactttatttctatattaagtttaataaggtatacgtatatatacaatgctctaggtgttaatcagacaagagcagattc

SEQ ID NO: 3779 - DNA, 380 bp, Arabidopsis thaliana
  Intron number 1 from transcript AT5G38330.1 (locus AT5G383 30) derived from phytozome v7.0 (chr-ID Chr5; pos 15317790 to 15318169)
atcccttgttagcttgcttatcatatttgccacaggtattataattttttgtacacctttcaattttcatgttaaatatatttttttaaaaggttattttcttctattatgtgaacaaaaactaaacaaaaaatctcaaagtctaaccttagtttttataatttagacgtccacatagaagattaatgttatgagaattaagaaatacatattacagatatatatattttttttcttaagtcttcttgtagctattttcttgaattccttgtacttaatttctatagagtgaatatattcttatatatctgttaagtttaataaagtatatatacaatgctgtagttgttaatcagacaagagcaagtatctgtaacgac

SEQ ID NO: 3780 - DNA, 324 bp, Arabidopsis thaliana
  Intron number 1 from transcript AT5G38450.1 (locus AT5G384 50) derived from phytozome v7.0 (chr-ID Chr5; pos 15396665 to 15396988 reverse strand)
tctcccgcattacgttgcttggtccaaacaatacggtatggtcttgaattgtaacaagtttgtgttttcttggtcgtgaagtctatacatagatttcgttattaagttggtctgttaattgtaagtgacatctatcaatggagccagataaaatgacggaaataccctccatgtattttttgttttttctccgtaaaacatactgaagaatgtttggcctttgattaaaggagggttacatgtaataaaatgagtaatccttagataaatttacgttttgatgaaacagggaagaggtttattgtgtggaacgggacggatcct

SEQ ID NO: 3781 - DNA, 943 bp, Arabidopsis thaliana
  Intron number 1 from transcript AT5G38710.1 (locus AT5G387 10) derived from phytozome v7.0 (chr-ID Chr5; pos 15501809 to 15502751)
ccgtcgaagctgctaaaaccctaccttcgtctcacgtaagacattctcaaatctattttttttgtcttgtctcaaaatttcatcttttagactttttctatacatttctctattttttccaaagcaaactcttcataagttttcacggtaatttgttttctttctgttttggtttagaattactttaattattcgatataaccatcactttaatactgatcaaatatttttagaggggttacatatataatcactttgtgcaagtcggatctacaaacaaaccactatacatgtttataggtgtagtcgtgtagaggcaaatggagagaaatgaggtcaattgaccccaatagttctttgctatgtttatattaattttctgttggataatttgacacaaaactacctccaccagttcgattcttctatatgttttcagatatttttattttttgaaaaatgatgccactagattttttgttttcaatatctgccactccaaaaacgtggagtaaccgaccaattataacctttataagaaatacaaatatataataaattaaattacaaaagagactaccccgtttaataaaccttaaaaaacaaaaaagaacaccaacttgtctgatttttttttcgataacgatttcttctttgtttgttttaaacgacttgtctgaattttagttttttttttttttttttttttttgtctgtaaatatgaaataacaatcaaagtcacgtcggttcctcgtcagacttcaaagttaacacgttaatcacgcaatgaggacatatttgaatcagaattgtcaaccacacgctaggaatattcctcgtttactttaatatcggtttaaaccggttctactgctaataaactttttattgggttttgtctgaacagttaagctcagtggtggtcaagatcacagcgatttg

SEQ ID NO: 3782 - DNA, 635 bp, Arabidopsis thaliana
  Intron number 1 from transcript AT5G38900.1 (locus AT5G389 00) derived from phytozome v7.0 (chr-ID Chr5; pos 15574946 to 15575580 reverse strand)
ggtttcacgatcttcttcctccaatctttttccaggtaaacaaagaaacattaaatttttgatcatatcattacacttacacatatgcttagttttgtacaattaggacatattattgttcttctaatcagaaagttttcatccaaacaaactttttagcgttaaagctcatttcttggagaattttgaagtgttgaatttttcaatttcgtgtttgattaaagatttgacagaatcagaaaataagggttgatttagagagtttggtgttgcagattaatcaaattcataagtttttgtctatgagttcaaaaatcctgaagagtccaatcttaagatttttcagaggcaagttttgagatgatccttttgatctgaacaattatgtaattagtacactttgagccacctgatattgaagagcatgtttttgttcagtttttgagtgtaatgaatttttgaatctagaagttctagatgaactttttatgtgaataaagattatccatttgcctttgttgtcttaaacttgaaggtcaagtttctgtcttgttttggttgagtttttaaatggattcttgaattctttaatttgatatctgaactgtgactgaaattggttaggaaaagtcatt

SEQ ID NO: 3783 - DNA, 444 bp, Arabidopsis thaliana
  Intron number 1 from transcript AT5G39320.1 (locus AT5G393 20) derived from phytozome v7.0 (chr-ID Chr5; pos 15742810 to 15743253)
caagagaacaacttcttaaccacgaatcttcagaggtaaatctcgatctctcttcaccatttttgagctgcattgttgatttttctctagaatctgtagctgaatcttctctgatctctttctgaatcgttctaagagatccgttctctgtttttgaaatatagatttgagaattctcgaaatgtatgtagatcctgtgttagtcttagtttctgtgtatcgatttcttcgaaatcaagctagatttttgtttagatccgtgtgatccgtgtgatttgagtgatttttgtgttttatttgagatcagatcggatcatgagtagtctcttccttgcacaccaagtgttcgacgtttttctactatatatagtccagatctgagctcttaatgtagatctgtattgatctttatttgaattttgcagagagatttcaggaaacaaa

SEQ ID NO: 3784 - DNA, 456 bp, Arabidopsis thaliana
  Intron number 1 from transcript AT5G39470.1 (locus AT5G394 70) derived from phytozome v7.0 (chr-ID Chr5; pos 15792431 to 15792886 reverse strand)
tttaattgcttggttccaccatcttcaacctaaatgttctattttgttagacactattatttcattggcgtgctctatttttcgtttctctcctctgtatataactttttcttcatttctttttaattaaatattatatctcaaaaagaaatatcattccgttgaattagtttgttgtttcgttctttttttagtttgttaggtccatatttagaagttatattaagaatttaatttaaaaagtaacagcataattttatttatatgaaactgtgaccgtgctactagtactacatccaatttaaaagtgaaaacccgttcaacatccaatttgattttaaacactacaaaaactcccactatcataattttgaaatttcaaccaaacttgtgaaattccttttttgtatctcttattaagttgaaaacaacctaaacgagaatacctcaaagtct

SEQ ID NO: 3785 - DNA, 886 bp, Arabidopsis thaliana
  Intron number 2 from transcript AT5G39690.1 (locus AT5G396 90) derived from phytozome v7.0 (chr-ID Chr5; pos 15888479 to 15889364)
aagctttgcttaagcagcagatccgagtggagatgaggaataaaaagaaaaggggaaaaactggaaaatatatctatagccaccatcaccggagccgacatcaccatcaccattgaaaggaagaagaacgtcatcgtgttgttattgtttcataataattcaattaattaattaatttatttatttagtgatactcggttagattaggtttattctggtttagtgttttcattagttagttataaaaatagtaaaccgaacaaaatcaatggctgtgggtaaataggtgaaaactatgcttatgggatagatataggttttgaactatagattcatagagatatagattgagaagtatcttttcggggccatctggatcgtcttcataaatcgggctctatctggcatgatgtcatagttctcgtggagaaatagaccgttttcaacattttcttctaatcaacactatttctaatttaacatgaaaatggtataagtttttcaaaaatagatttgtttcacattttctgtaatcaacgtttatttctttgttaacttgtgtttggagtaatttacactctagcttacattattccacaattttaaagtttgttagctaaacatgaaacttttccttttccaaatctcaatttgataaatctaaatcaaatccgatattatctgaatcccatattatttcaatttcgataaattttataaaccgtcttattacattcttataaataagagacattcttatcagataacttgtctccgtccatatgtattgtttacttagttgaattctttagtttattaagggattaacatatatatctatatatatttttgaaacagaggaattcgagaagggtaacgataaaga

SEQ ID NO: 3786 - DNA, 400 bp, Arabidopsis thaliana
  Intron number 1 from transcript AT5G39860.1 (locus AT5G398 60) derived from phytozome v7.0 (chr-ID Chr5; pos 15957780 to 15958179)
tgccggagattggtcaacgacgtcgttctgataaggtatcacgcataatatatgcatatattcatttataacgaccatttaacattatccatcgtgtaaacctatccaaaaaaggaaagaacaaaagttttgtaaaaagaagagtggacactaaaatcaaacaagaaagaaaaaagaagtcggaacttttgactccggacattaaggaacatatataccaatattcacaacctttttcttccatatttacataagagattacatcaaaatcatcagcttgcatgcatctgcaaacgcataaaagcgcatgcattggttcaaaaaacatatattataatgattatgattttatttcgtttttgttgttgaaggcatcagcctcgaaagtattgcaagagac

SEQ ID NO: 3787 - DNA, 558 bp, Arabidopsis thaliana
  Intron number 2 from transcript AT5G39920.1 (locus AT5G399 20) derived from phytozome v7.0 (chr-ID Chr5; pos 15982277 to 15982834 reverse strand)
gttctaggcggtcacgccggctgtgttacggtgaggtttctttttgtctcggtaacttacaatggaaacatggtaaggctatcggtaataacctctttaattggttttgactcctttaatactctctcttacatttggtatgatgtcatacttctcgtgcaaaaatagaccgtttttatatagaattcttatacttgtatagtaataattttgtagtatttgagtttaagtcatgttctttgtgatgaccatcgaaaccaaacacacaatttgattaagttttaaagaacccaatcagtcaattgggaaataaaaaggtataaaatggagtatgctagcaaataaatgggcaacagtaaacaatatagaaagtgatcagtaaactctctgttttgctgatgatactcttctctcgtcctcctgatacgctaagaaaaggattattgccatatatatttgttgaaaacgattaagttacggatgaagagatcgttaaatttacggcaatatatatttgttttttttgcagcattgttgctggaattgtgtgtatcaaaa

SEQ ID NO: 3788 - DNA, 410 bp, Arabidopsis thaliana
  Intron number 3 from transcript AT5G40020.1 (locus AT5G400 20) derived from phytozome v7.0 (chr-ID Chr5; pos 16023116 to 16023525 reverse strand)
tcctgaagaactacaggtgacatattttctttttcaatcattagtttcaaagtccgatcaaaatgctcaaatttcaaaactgattacattctgaaagtagatggataggtagttcgactcactacatcaaaatgatgaatagctcaaaaccatatatatgacgtaaagagaattgcatcttcttcttctttttttcttttttcttttaatcaaatatcaatttgggaaactacgacttgctttattattggatccaaacaatgaaacatagttagagttattgagagttggggataaacagaaacccgttataagtgtatatttaatccttagatctacttatactcatttgaatacaattttctcttttaaaaggttttgaacgaagagggacgagttgtggcgtgcaa

SEQ ID NO: 3789 - DNA, 866 bp, Arabidopsis thaliana
  Intron number 2 from transcript AT5G40330.1 (locus AT5G403 30) derived from phytozome v7.0 (chr-ID Chr5; pos 16128206 to 16129071)
ctcatcatcagactccacaagctcctcggcaacaggttcttttttttctccatatattcaaagatatatatttgcttaattttcttttatacaattctaatagtattatatatgttagatcatgtgttttgttgttcggtgctgcattcacgtgaatctttaaattgtttatatgtgtacagcttgctagctatatatcacatatatctaatccataatttatatatttataatatatgttttgttgttcgatccttagttcacggtaatctctaaattgtttattattatttatttatttttggttgaaacatctctaaattgtttagttgtgatatagattacttatatttaactgatatattatattcatttattcataaaataagtgtattttattaagctactatttacaaacgtccacaaagcaaataatggttattcaaaaatagtagtaagaaacggatcgtaaatttgaatcaaaaatcttagatctgtcctttgttttttcggccattaatttgtatagctaggtttctattcaaaaaatatgctttctcgaacctaacaatgattcataattgtactcatttatggatcatctgtatatatatacacatgtctcatataaacatctacaacatacataatctggctacatgtattacgcacatgctctatataggtccatgcataagcattaactccgttttacaagatttcttgtttcaaaagtttgccacatatttatagcacattcgaaaatccatatagtgtataatacaatatttatttattataattgaagattaagagaccacaaataaaaatattaatctaacatcgtaaattcttttaatatttag

SEQ ID NO: 3790 - DNA, 868 bp, Arabidopsis thaliana
  Intron number 1 from transcript AT5G40350.1 (locus AT5G403 50) derived from phytozome v7.0 (chr-ID Chr5; pos 16139966 to 16140833 reverse strand)
tgaaggtgtttggaactctctcgccaaatctgcaggtcaaactcttatatatatatatcaaaaagttataattgatctccaatatttgttatgcttatatgtgtgtatgtgttgatgaactagggtttgttcttcacatgcgaagatattatattttaatcactatatgtttccagtttttttttttatatatattaatcttttatgggtttgatagaaactctctattttgagctttttgttacacaagcgatctaaatatgagttaggaattttaatttcatatgaaaaacaagaaaaacaatggaagcaagactatctccaaattcttacacatatataaggtaaaccgataagaatttattttttaatgcccggaccttaattgattgtttgattgattggaacatatagcttacaaaaggtcttgttcatcagaatacccacaagcaattagtaatatatactgacagcaatcgctagggttttaaaaagcttactctcgatctaacataaacaagtttatccggtgaactattcaatgtaaaacacttaatactctctggttagaattgttacggcaatccactaaaaactgattttaggtttttaattaatagctaaaaacacaataatagaaaatgaaaaaaaaaaattatttctttcaccaataaataatacatgcatgcacacataaatgtttttttctttattgttatcgacgtgtacacatttttttatttattttgttaatagacatgtacacaattgatattttgtttcttcattatcgattgtaattgtaattatatattattatatgtgtaatataggactaaaacgcaccgggaaaagttgccggctccgg

SEQ ID NO: 3791 - DNA, 330 bp, Arabidopsis thaliana
  Intron number 1 from transcript AT5G40380.1 (locus AT5G403 80) derived from phytozome v7.0 (chr-ID Chr5; pos 16152845 to 16153174)
gacatcataaatttcgtaagatttatcatcttattatttcatcatgttggttttgtgtcaattttggatatgtggattgaaaattttactttttatatttggaccattactcctatttttgttttggtttggactcggctatttttgtgtttctacatttttggttacttaagaatatagaaacagaagaaaaataataatcgaatctctaatttactcaaattataatccaaattcatgtttaggcttttttacgcattaaaccaaaataatgtagtgtttgttttgttggtagtgctttttaacaaaggagtcatcgttgctattgtc

SEQ ID NO: 3792 - DNA, 581 bp, Arabidopsis thaliana
  Intron number 1 from transcript AT5G40420.1 (locus AT5G404 20) derived from phytozome v7.0 (chr-ID Chr5; pos 16174028 to 16174608 reverse strand)
cctgaaagtggcccatctagtacccaagtaatgtctttgtctttatatttatacattctcttaatctttatacatacaaagttaagaaatgattctttacggatcaatggagtctatgttcatggaatcttgaaatatatgttcaaataaattatgaataattttgacactgttcgatttatatggttacatgcataaaacttcttcttgatcttctttttgttattgcgagttaaatatgaccttcaaaacatcacaaaaatggtcagattgatatggttttgtgattgtaccttttcttgatctcatgcttatgattgttaatcgaacataatttttgatctcctaggctttttttttttttgtgtccgatcaaaatatggttagtcttattctggttgttaattgaatagaaatgtttttttgcaatgtcggtctaaatgtcccaaccattacaattatatgtatacaccttttggttaaatttgcatgcatatatattgatttgaatctaacgattgttaacttgtatcatttaaaaaaaaggtattgtccctgttgattggagtccctgtcgtcgg

SEQ ID NO: 3793 - DNA, 402 bp, Arabidopsis thaliana
  Intron number 1 from transcript AT5G40440.1 (locus AT5G404 40) derived from phytozome v7.0 (chr-ID Chr5; pos 16181747 to 16182148)
tattaaaaaagcaacaaactttgagagtaacaaaggtaagtttttatctgtaattctaagagttatatcattttggttttgtatgatttttttgaatttgtgaatttgatccgttgatttaattctgaattttctacgattagttcactgttatgttttgtgaattataactgttttattgactaatcacgactttgaatccaattctattgaagggctataagaaaaactgaaattaatttatagaaacttgaaaattttggggacttttcatgttttgttaagtaagaaatcttcttttttagctaaattagtttcttctaaatagaaagttttcgaatttagaaaaaggttggggttttttcattgactcttgtctgtgttacagaaaaagtagttatc

SEQ ID NO: 3794 - DNA, 217 bp, Arabidopsis thaliana
  Intron number 1 from transcript AT5G40560.1 (locus AT5G405 60) derived from phytozome v7.0 (chr-ID Chr5; pos 16244751 to 16244967)
ttattggctatccaacaggtaatttgacaagtttattatgtttttgattggtagattatgttatatataataattcagttttccagtttgtgttttgagacgatttttacttcatttaagttggaaaactctctcggttttagagaaaattaatacattcttagcaaaatattcaatggcaggtggtgagaatatctccgttacaaaaggtgttgtg

SEQ ID NO: 3795 - DNA, 556 bp, Arabidopsis thaliana
  Intron number 1 from transcript AT5G40630.1 (locus AT5G406 30) derived from phytozome v7.0 (chr-ID Chr5; pos 16271585 to 16272140 reverse strand)
ccaactctactttcggtaattacgtatcctcttttaacatgaaaaccaaaacaaatttacgtctcttcttcatatatatattatatagttgacaaagattttgttgtataataggtgtataagaatatgattgttttgttgtttacaaaaataaaagtatacatatatataacttaaaaaaaaatttgtttgttgaaaacagctttcaaaaaatcgtatacttactcagtattgttttggtaaagctggctttaaaaattttgatatataaatcgtccttatagatactatcaccggtcaaagagtgccaatatataatactattgattaactcatcaagatttatgcatgcaagtatgcaactataaagggtgatctatatatactgtggcaattaaatataacgcgtttgatatttattcgagtaactggttggttaattacaggacaactaactatatttacatttaaaatatggttagagcatcttttgatacaaaatgatctcttattatataatttctcatttgatatatatttttcaggtgaattgaag

SEQ ID NO: 3796 - DNA, 1019 bp, Arabidopsis thaliana
  Intron number 1 from transcript AT5G40650.1 (locus AT5G406 50) derived from phytozome v7.0 (chr-ID Chr5; pos 16282126 to 16283144)
ccaacaggtaaacttaatcttgttttctcataatggattcactaatcaaagtagttttttgaagatattgtagggcttgttggtagtttacattagtacgttatatggggtcacttagattgcttaagtttctgtagttgtagtttagagctgaaggaaggttctgttttgagatttgcttgagaattttgttggtttgagcagtaagagttggtagacggattatgtatggcttgggttgttttacttgttttacattcattatgcattgtcaatagggttgtttttactcctttagtgttagtgtggtactgtgggtttagctctttgttcactgaggaaaggtgctaagggatctttgtgcttcttcacctgtctgtagaaaaccccaagttcaatggtctgattgtatccatgtcattatgtatggtcatttaggttgtcttgctcctttagttgtagtgtagtttagcctactttgttcaactgaaatggaggaggtatctctgaagaaaggtgcgaagtactctttgtgcttcttcatctgtctctgtagaaaatctcagattcaacggtctgattgtaactttgtcattatgtatgggcgtttaggttctcttactcctttactgtagtgtagtttagctttatactgaaatggaggaaaggcctctagagtaagctgctaaggactttttgtgcttcttcagatctctaaatagaaaaccgcaagttcaactatctgattatatctgtgtcatcatgtaaagatatatactatataggttgtttctgttcctttagctgttgtgtagtttagccgattttgtgcaattgaaatggaggagagacctctaaaggaaggtgctgaggactctttgtgcttcttcaaatgtttcttgaataaattgcaactatatgattgtatctgtgttattaggttaaagttttgatctctcaaggtattgattgtaacaagaggtttattcacatatgcaggtggataagtgatagccgag

SEQ ID NO: 3797 - DNA, 389 bp, Arabidopsis thaliana
  Intron number 1 from transcript AT5G40760.1 (locus AT5G407 60) derived from phytozome v7.0 (chr-ID Chr5; pos 16310895 to 16311283)
tctctctcgccaaagaatcgtacttcttctctcaggttgatttctctgtccttcttattcagatctccgtcttgttttttccatgatcgtaattctgaaagttaaaaaaaatgagacgaaagatttttctacgatccgtttgatttttttccttctctttgctctcgattcatgcttctaattattgttcgatttctcttctttatttttttttggatgatgagattcgatctctgtgatgaaaccgaggctgtgaattttatttttttgacgaatttctctgtggtgccatttaggttaagtattggtgtgttgttgttgttcctctttgactatgagactttgactctctctttttttgtgtgtgtggaaattaaggttttaaggag

SEQ ID NO: 3798 - DNA, 375 bp, Arabidopsis thaliana
  Intron number 1 from transcript AT5G40830.1 (locus AT5G408 30) derived from phytozome v7.0 (chr-ID Chr5; pos 16355856 to 16356230 reverse strand)
catcggctgaatcagagtaggtcactggatctctcgtaagtctctcttctttctttgtttttcgatgctattaatctcatattgctttttatattcatcgtgattcctcttttttgatttggtaagatctgttgatactcgttactaaatcccagaaattgagatcttctcttgattgtttcgatcatctgttattggactatttatgtatgtacaaaaatttcaaggatcctcaggatagttcttctcttttgtcattgtttcagaaacctatttgatgctctttcgtttcatgtttgaaatttgcagatccgatcataggttcaacaatatggaacaaatttggaattgatgcaatataagctacattgaagt

SEQ ID NO: 3799 - DNA, 377 bp, Arabidopsis thaliana
  Intron number 1 from transcript AT5G40830.2 (locus AT5G408 30) derived from phytozome v7.0 (chr-ID Chr5; pos 16355856 to 16356232 reverse strand)
ttcatcggctgaatcagagtaggtcactggatctctcgtaagtctctcttctttctttgtttttcgatgctattaatctcatattgctttttatattcatcgtgattcctcttttttgatttggtaagatctgttgatactcgttactaaatcccagaaattgagatcttctcttgattgtttcgatcatctgttattggactatttatgtatgtacaaaaatttcaaggatcctcaggatagttcttctcttttgtcattgtttcagaaacctatttgatgctctttcgtttcatgtttgaaatttgcagatccgatcataggttcaacaatatggaacaaatttggaattgatgcaatataagctacattgaagt

SEQ ID NO: 3800 - DNA, 643 bp, Arabidopsis thaliana
  Intron number 2 from transcript AT5G40860.1 (locus AT5G408 60) derived from phytozome v7.0 (chr-ID Chr5; pos 16370788 to 16371430)
tcggtggtcgttttcttcttctaagagaagctttggtacttgtttcataatctttttttttgttgttttcaatttccttttatggtaatctgattataaagaatatttttgttttctttgatggtgtgaaaatatcataattgagctctttgtactttgtagtaagataatatcctgaattcttagcgttaatttcattgattttgtttccattaatagattcgaagaacgaattttctttatattaaaatcataatcatatcatcgtcttaactggatttatctaatcattggcttttcttctcgtcaaaatagagagatttagctttttccaaaatagatttcttccactaatcaatggctgcttaattaatgattcaaaccctcaagaacagtgatattttttttgcttttttaattttattatttgggtttcattccggttttaatttatgagttctagaaaacttaaattttattgcccggtgaattggagagttcatagtgaagtaagatttgtgttttgaggttagagatttaaagagtggtttcttacacttgagttgtgtttatttcttttttatgattctatgaagtcctgaaatgtgtgaatattgttccaatgtgacaggaagtagtaaag

SEQ ID NO: 3801 - DNA, 505 bp, Arabidopsis thaliana
  Intron number 1 from transcript AT5G41060.1 (locus AT5G410 60) derived from phytozome v7.0 (chr-ID Chr5; pos 16435673 to 16436177)
gaaaggaagcaatgtgagttttaatgtgaaagctttaggttttggaattacttgcttctgtgtttatacttgagctagttttctgttatttttcctattattgtgtataaattaattattaatccgttcatgggctcagtttactctgtttccaatcttgtaaagcttaaaaattgggacttgggtttgtgttagaagtgtagctttctgggtagttgtctacatttaatcatgaaatctttacctttaatcaataccttaggacattatctgaatatgcttgctacatttataggaatgcttcttcatacaaaggttatatagttgatgctgtctgtatattgctttcaatgtcgaatttaaatctggtttagtagtaacctagtggaattaaacattttgaggtttgttccttaaatccttctacccaaagtgttaacatattttctaaatttgtcccatttctgcagatattttgtcttcaaggaaggtttatcttcgggcc

SEQ ID NO: 3802 - DNA, 164 bp, Arabidopsis thaliana
  Intron number 2 from transcript AT5G41310.1 (locus AT5G413 10) derived from phytozome v7.0 (chr-ID Chr5; pos 16521862 to 16522025 reverse strand)
cgagtactagattttgtgtaaacctattggtttttttcgttcttttattttctatgtctcaatcttctagagttctagttatgtgatttgtttttactttgatttactctatttggagtaatcatgtagggaggaagcttcgagcctggttgtgtaaatattga

SEQ ID NO: 3803 - DNA, 624 bp, Arabidopsis thaliana
  Intron number 1 from transcript AT5G41410.1 (locus AT5G414 10) derived from phytozome v7.0 (chr-ID Chr5; pos 16581273 to 16581896)
ctcgaagaggtatatatattttcaagaaattatttcattactactatcaaaacttacatgagtttcttagaaaatctaatccttttttatttggtttcaacttattcctaaaaatgtaaaatacccacaagtcttttacaaatctttttttttttcctttcatttggtttcaacttattcctaaatatgtaagatacccataaatcttgtattttttcgattcttgattaggtccatatatttcttaaagttacaaatttcttttagatattaagataaaaagattcttttttgtcttcattctttcatgtattctcgtcgaaaacaagttcgatcgtatcaactacgaaaagatcaacccttttaattcctttactcattatttctttttttctatagaaccaaaatataattttgttttctttgctttgagctaatttggagactctagtggtcctccatatttatagcaatcagtttcatcatcataagccataacgagttgtttctttttcgtgtatttactcattctaagaatctacatttacacgattgtgattgaaatctttgtgaatggtgtggggtaacgtttttttgcggttttttggcagcttaaaagaagat

SEQ ID NO: 3804 - DNA, 580 bp, Arabidopsis thaliana
  Intron number 1 from transcript AT5G41760.2 (locus AT5G417 60) derived from phytozome v7.0 (chr-ID Chr5; pos 16707003 to 16707582)
tcgcagtacttctcaccattcttaccagctctcaggttccaatttccaaccctaattctccaattcctttctgtacttctcttgctaattatgattgaatcgagattcgtttcctctatgtttcgacatttcctgaactcttagaatttcggcgactttatagatctagaaattgagttatcgttggtgttattgtcgccaaatctagttctggatcatgtatgtcggttagagtgtgataattgctattttccacggcttcgaacaatgtcatgttagatcggtagattcgattattccagttgattctgctgttaatttgcgagtgcttgattgatttgatttttcgatattatatgtagctgaagaagtttagtgagaatttgttttcaccaaaagctgttattagtctaacacaagtcatgatcatcattctttatgttcttctggctttaggttttagatagaaactgaacataattcactggatagattcgaaaatgagagaagtttttgtttccattctctcactgtgtaaactttatgcctcaggggattctaacaactctttctcaaagtg

SEQ ID NO: 3805 - DNA, 717 bp, Arabidopsis thaliana
  Intron number 1 from transcript AT5G42230.1 (locus AT5G422 30) derived from phytozome v7.0 (chr-ID Chr5; pos 16881032 to 16881748)
tctgaaggatatttggcctaatttcgaaactcaaggtatcttctttttctttttctaagtctcaattcagcaaaatgtaacatacacaaatatcactagtttacatattttattattattattattattttcactagtttacatatatatatatatatatatcagggtcgaagtaccaaatcaaagttcttgctgttgtttacgtatacgagagtgaattttgtttaatggatatctcaaatatttcgtgctttatttgtaaatcttcattgttctttctctacttgtttttttgggtttatataaccatttagctgatttttaaatgacttagaacttggatcttacagttagttttcagttgtgaaaccaagtttgtttatttcagctgtatctttgtttctctgtcagctttgtaaagtaactaagttaggtccactcgaattctcgtataatatttaatatcgcctttcgttttcaggattttgacttggcaaatagaaaattgttatagttttttgtttttctctaattaaaaaaaaaaagaaagttcttgtttcttttgttttggttaagagattagtgttgtctactgtttggattattctttctctgttactgttacgtgtttcattttaagatagagagtctctttatcattcatagagtgtacttttttccctgattgtttcaggtacttaggaaacgctgtagaag

SEQ ID NO: 3806 - DNA, 785 bp, Arabidopsis thaliana
  Intron number 1 from transcript AT5G42590.1 (locus AT5G425 90) derived from phytozome v7.0 (chr-ID Chr5; pos 17032495 to 17033279 reverse strand)
gcgaatactggaggaacgttaaggtttgtactttctttcgttatctgtggtgtctccaaagtcttcataagttgatctcagatttgctttcacgagctccttgattagtttatcagaaggaggagttattaattaaatatcaatatttgtttcactaattagattttataaattagtttaaaagggtacatttaatcaaattttctaagtttttgcccaaaaagtaataatcaaattttctaatccaaactgacatataattggaactaacagtatactaccacatttctagattttagttccaaaatataatcactagttttcttttcaataatacgaaaaactaaaatgagttcaaacctacagtaagactgctacaaactattactacattaatcatacgattttattatattaatagtagtttatcaaaaaatcaatagtttattaatttaaagagagggaaatccatatataatcttctaaaaattaactttttttttgaacctattagtgaaaaagatatactacatgaacttaaaattatgattattagtttcaaacattgcaatagaaaatctctcaaacataatgtcttaattttatttgaaatttatttaggataaacaggtatgttaacattagtgataaataatacatttcgatacaaaacctttaaaaattaagtgtggatatttaaagtttttttgtaactgaattatcagattctagttaatggctcttcaatttgttgtgtattgatttcttcttggtatgcagagtct

SEQ ID NO: 3807 - DNA, 1006 bp, Arabidopsis thaliana
  Intron number 4 from transcript AT5G42700.1 (locus AT5G427 00) derived from phytozome v7.0 (chr-ID Chr5; pos 17122870 to 17123875)
tttctggtggcttctggctggtaagcaactttcgtataccctaaatcgttagcttacattgcttgatttctgttctgtttggtaaagtccattgctagtctttacattgcttggtttaatcaattttcagtctttctaactcagtacctatgagaagtctagctagtagctatttatataacttacattgcttaatatttatgttctgttcgcttaaactccatcaccgttcttagtattgcttcgtgttactctaaaactatcgcttttgaattcgaaattgttgagataaaaatgtctaaccatgtaaactacacataaaagtttatgtgttaagtctagagaagaactattgtaactagcctaggggtgttgcagggaattgtagtttttccagctcaacaacaaatcttacattaaggttctaaggtcttggttttgtgcgtttctctggttaatcaagtctcttgtatggttttagaattgaatcttcttaaacttatctgatgtttttgtacatgtgaaatagcattagcagacagtacttctaacaatgataagctatttatataatttacttaatttctggtctgtttgcttagactctatcaccattctttgcattgcgtattacttggaaaagtatagcttttaatccgatgagtttgtgataataatgtcaagccatgtaaactacaaaatttttaattcaggacctctgaaatgttatgtctagagcagaactattgtaactagccttgggatggtgcagtgaattgtagcttttccagctcaagaacatcagctgaatcttataaggcccattctggattcgtttaaagtcttggtttgagtgtttctctggttaatgaagtctcttctatggtcttattaaactcatctgatgtttttgttcatgtgaatgttatcattatctaaccaagcaaagccattcttttggttgcaatcagggtcttccagtgcaattttgcaaatctcacctcgg

SEQ ID NO: 3808 - DNA, 686 bp, Arabidopsis thaliana
  Intron number 2 from transcript AT5G42820.2 (locus AT5G428 20) derived from phytozome v7.0 (chr-ID Chr5; pos 17169759 to 17170444 reverse strand)
gggtatcgtttgggctgattacttcataaaaatcggtaaaatcttgtaatggatattcatttggtgttctttttttgaacttgaaaaatgagtggcatgaactccttagatgatgtaaggtgtttactgtattttgtagaatttttgtttagaaactagttcgtgaggcaaatgatgggttcagtttttctaagttaatgtggtaatgatcccttggttattgttctttatgattgtcccttgcaatgtcttcttataaggtttaaacactttgtattgttcggggaaagagataaatgttgtacgatttttttgggtggattgaatgaagaaaccgaacccaacccaaatattaacccaaatattataaatacccgaatgggtgctatgagcctaaacccaaaaaacccgaagcgtatcggagcgtgtattcgaatgccaagccctagtcagttttattattgttagtgtccacttttcatgtttaatggattttgttctcgataactcaaaaagttattatttacaagtgtggtatcagagcatggttcatgatgctacgggaaaccattttcaatgttttattaagtaaatgtgtcgcaaaagatgttaggaattggttcaatcacttgctaaaacttaagtagatgggattatatgacttatcctttttgttgtgttgtagt

SEQ ID NO: 3809 - DNA, 863 bp, Arabidopsis thaliana
  Intron number 2 from transcript AT5G42930.1 (locus AT5G429 30) derived from phytozome v7.0 (chr-ID Chr5; pos 17212403 to 17213265 reverse strand)
actttgtcagctccgttcttcacaaccattggaaggttttattctttaatcttttccttgttgtttacaacttttacatgttgctagaaaacgatagtagttttgttttgctcatttaaattcacgttctatcattaaaatgcatttttggatcaaatttgttgaatatgactggtaataaaaatagattaagaaactgaatttcttcgacattttattataacttcaccaatcatatatataaaacacagtactctatatccgctggaagaaaaaaaagagaaattttcctttcccgtaacatattgaagaaaataacttctgttaaattgaatttctagtttttctccatacttttactatgctatacacactagtcacagtcaatataatttcgtttgcctagtaaatgaaaaatgattcttttttgtttgaaaaattattttactttttgttgtcaataatatacaatacacggatttgaatttggaatttaagaaattaataatatgtactagcaaaacttacatatcatcttctatatataatgtctatagatgataacaatcaattttgggattaaaaaataataattctagagtctttttcttttctaaataacattttttttattgttattttgttttcctttgtaaagtaaaaaaagagaagattttcctcgcttaaagttagttacatataaagacacgacaactaatgcatatataatctcatttagctgccatcgtccaattatttaacttatctaatagcatgatcatgcatgatttccattgattattaaatcatgaaataattgtgttggacttataatctctatgtttttattaaatgtggcacag

SEQ ID NO: 3810 - DNA, 563 bp, Arabidopsis thaliana
  Intron number 1 from transcript AT5G42950.1 (locus AT5G429 50) derived from phytozome v7.0 (chr-ID Chr5; pos 17224483 to 17225045)
cctctccgtcaatccaccgcaccagatcttcaaaggtattttaatcgcttcttttttcttcttcctcttctctcccgatgatttaggattgtgttttgagtctctctcattacagagactcgaacacaatcctaatttttcagtgtgattgtagctcatctctttcccggtgcttaatcggagattgaattagcgttaacagaatttatattataagtctctaattagggtttttggtgtctttagatcgttttcgataacattaccagttttcagctcttggggttttgattttggtactgaatttgttatttttaatatttggtattgttaaagcattgatttttaatggttccatgagctatgtgtgttatcaatttgtttgttgtttagtgttgttgtagatccattagatgtgtattgtttaaatctttgatgtgagacgtattggtacttcattgtatcccttgtagagacctaaagctgattcttttactgtgtatttgctaaaggattagagtgacattttggccttgtgtgtgcagatatccaaggttctgaca

SEQ ID NO: 3811 - DNA, 700 bp, Arabidopsis thaliana
  Intron number 1 from transcript AT5G43140.1 (locus AT5G431 40) derived from phytozome v7.0 (chr-ID Chr5; pos 17321879 to 17322578)
gctgcagatctcacttctcaggtttttttttgaatctttgtagtttttggaatttagggttctttctcatttcattactaattagagaattttgttaaagttttgaattttatctcttgatttaggaagaaaagactaatcttcatttgttattataccaagacaattccaaatttgatttgaaactagatcataatcttactagtggaagaagttataatactttagtaaagaataggtggagatagcactaaaagttggtgttttttaatgaattgttattctcatatttttggtttagtctgtgttctcaactgttgttctttgatgtgtgagactgtacttacagtgtttactgaatctgtatattgtactcttgtgaatttgaagtctttctgtactgaataatggatgaatttagtattggtttgattactcagaaaactcacactccaatccgaatagtctaatcttcttgttattatctcttgtgaatacttattgctaaggtgaaaaaagctttaggtgtgtgtgttggggttcttgtaaactctgtttttcttcttgtcattagtggatttctcttttgagtctttttatgatcatgttgtggtgctcttcccccagtaatatgttagagcgaaactagagaaccttttgttttgttttatttgtgttgactctctaaattcttcaacag

SEQ ID NO: 3812 - DNA, 404 bp, Arabidopsis thaliana
  Intron number 1 from transcript AT5G43630.1 (locus AT5G436 30) derived from phytozome v7.0 (chr-ID Chr5; pos 17526857 to 17527260)
gaggtaatttatggtttctaatttggttttaattctttgaaagtttgatttttttatgttatgagatttctgggtttttgattctcaagtttttatggattttagggttttcagtaattgcaaaactttattctgaagattgagtgattgcttgagatataggttatcaatttcctttatccctaatattccaaatctcgaaatttcaaattacttctctaagttgttctatgagtttatgatcttagaaaataaatctagtgttttgattactctgttttgcatatttttgatgggtttgtgttacttgttttgtaagctaagtgatattcatttttgtggttgaggtcaatagtgtatggattctggttctttatgtctcagggtgattggtttcaggaggt

SEQ ID NO: 3813 - DNA, 332 bp, Arabidopsis thaliana
  Intron number 2 from transcript AT5G43810.2 (locus AT5G438 10) derived from phytozome v7.0 (chr-ID Chr5; pos 17611548 to 17611879)
atcgagaaaaaaactacatctatctctgtaacactgtatgtatatacttcagactctgttttaatctctgtttttttttacctctctggtttctgaaactttgtaatagaagaaactagaacaacaacattttttacttcactgtttcaaagttttgatttttattattaaatttaacccaaaacaccatcatcatggttttgttttctggattttctccatttaatgcaatctgacattttcttataattattttttgtttgtacttatttttctttcatcctcatgattttgcaggtagaataaggccaaggaagggatcagttttaagt

SEQ ID NO: 3814 - DNA, 908 bp, Arabidopsis thaliana
  Intron number 1 from transcript AT5G43810.1 (locus AT5G438 10) derived from phytozome v7.0 (chr-ID Chr5; pos 17610972 to 17611879)
cttctctagcgtcactcttcttcttcattggtcggtgagtgttttattttttttactgtatttctttttaatatagcggacgggtcattttctctccgtagcaataaattcacttatataaaataaaattttcattcttcttggagatattgatatttccactgctcttttcgatgtttattccttcactttgttcacttgctcttagtttttatctttcactctctctctctcacaccaaagttcacagcaaaataaaattaaaataaaaaagcttcgatttttcgattaaaatctttgtaattatctgtttgggttttctccgggatctcattttccggtttcaaatagagacaaaagattaaagctttctccggttttgtcttctgggtattcccaatttcccccatttcacttaaagctttaatctctgttccttgtttttgtctgtgattcttcttaatgaaaacaaaaactgtaaaaataaaaaaaaaacttctggtgattggttccttttattcttggtctttacagtgttttcttctaatttcatggtttcttgtctctctcttttttatcgagaaaaaaactacatctatctctgtaacactgtatgtatatacttcagactctgttttaatctctgtttttttttacctctctggtttctgaaactttgtaatagaagaaactagaacaacaacattttttacttcactgtttcaaagttttgatttttattattaaatttaacccaaaacaccatcatcatggttttgttttctggattttctccatttaatgcaatctgacattttcttataattattttttgtttgtacttatttttctttcatcctcatgattttgcaggtagaataaggccaaggaagggatcagttttaagt

SEQ ID NO: 3815 - DNA, 429 bp, Arabidopsis thaliana
  Intron number 2 from transcript AT5G43920.1 (locus AT5G439 20) derived from phytozome v7.0 (chr-ID Chr5; pos 17674241 to 17674669)
gaaggtaaatatcttagaccatttggtttctcttatttttccctaaagtcattgagaaagagaccagatgaattagctctgatgtgtaagagaaccttatgaggtttcttcttgtataactcttcacgctgtgaggtggaaaaaaatattaaggaaataacatttggatgtcttgtcttgaagcttggtatataaggtagaaagccattttgtgacaacaaaaaaggacaagaacttttatgttgtaattcatagtgatttgtcgttttgagccatgtaatgtaactagttcttagtacttcagggttgataaaatttctgtgtatttttctatggtagttttgagaccgtttctttaaggattaaacatggtaatttctaattgataaaatttggtattggactaaaacttcttgtttcaggtactgg

SEQ ID NO: 3816 - DNA, 452 bp, Arabidopsis thaliana
  Intron number 1 from transcript AT5G44000.1 (locus AT5G440 00) derived from phytozome v7.0 (chr-ID Chr5; pos 17702729 to 17703180 reverse strand)
gcgtttacaggtaaattggaaaacatcattacaatgtttatagaatgttacaatggcgtttacaagtaagcgggatatcaaaaaagctataggaatggagtgaattgttccaaatttgatgcgggtttagctcatagcttgtgttcttaatgctgcaatgtgtgtttgatgctaaagttgatgactttgttgtgtggtaatttgcttgcgatattttttgaaaggtgtgggtttgcgcagagccaagaagtgtatgatggagctgtaaaatgaactctttagtattaaaagctatagaaagcaactgaattgttcacatttgatgcggtttttgcgtagcttgtgttcttgatgctgcaatgtgtgtttgttgctaaagttgatggctttgtttgttgtgtcatgtgtggtgatttttgaaaggtgcgggtttgcgcagagccaagaagcgt

SEQ ID NO: 3817 - DNA, 498 bp, Arabidopsis thaliana
  Intron number 1 from transcript AT5G44160.1 (locus AT5G441 60) derived from phytozome v7.0 (chr-ID Chr5; pos 17773195 to 17773692)
tgttaagaaaaagagaaatctccctggaaatcctggtaattatttatattaaatctcagctagcttgatcatcacctaaaaagaaaaccctagtatcttttctatttttttgccccctataaattaattttcttgggttgttttgttctggatcttgacctaaatcaaaagtagtatttggctgcatgagttatagatcactggctcatgcttaattaatgtgaaaatactaggccttttagtaaattaaaacttttatttgatctatagagttcttcttttttaaatcgcattatagtttccatgagaaaatatatttacataccctttattattattacctccaccaagaaaagcacacacattatttttactaaagtacatgatccgatccaaaaatagatgttgttttccgaattgacctaattaaagaaaccacaaatgttaatgatgatccacttagatccggaagctgaagtgatagctttatcccccacg

SEQ ID NO: 3818 - DNA, 664 bp, Arabidopsis thaliana
  Intron number 2 from transcript AT5G44160.1 (locus AT5G441 60) derived from phytozome v7.0 (chr-ID Chr5; pos 17774020 to 17774683)
gagtaccgttgcgattgtggcaccattttctcaaggtacacttttttttctttctctgtcaattaaattaaaaataagcttcatgtatatatgtgttgtcgtttgtattgatcatgttcgaaagctattctatagtagctttatagtatctacatcttcgtttttgtcaatatgtagtttgattaagttttataagtatgttttgtcatttcctatgtgtttgtttatctcttttgaagtagggtaaagtttcttgcttgggaaaatgtttttgttagtgtcatgattgaggcaaaaagtggtataaatttataataaccatgatgaacatataacataagctagatataataatatatacaaataatggagtacttcatgtgtgtatggttcaaaatggtaacattatttattacttaatatgcggaaaaagtgtcaacacaagattgacacatcaatagttatgttacggaaatatgtacttaggtttttctctacttttactgctgcacataaagaaaaggcagctaaatgttttcaagtattttcatcagttaaaactttgatataaatgcattgagataaatgttgattaagacgttaactaatggtggttttggttgaaacaggcgagacagctttatcactcatagagctttctgcg

SEQ ID NO: 3819 - DNA, 953 bp, Arabidopsis thaliana
  Intron number 1 from transcript AT5G44500.1 (locus AT5G445 00) derived from phytozome v7.0 (chr-ID Chr5; pos 17928235 to 17929187)
ctgctccgccaaatcaccataatcagcaacattgattaggtagctgtttatcaagttttggaacactacttgattatcctttattatctgctgatggttgcttgtaagtgtagcttggctatgatgtgagatttggttgaaattgaacttattttgatttagcttggacttgtgtagtgactgaagtttataaatcataagttagctgcagtctctactagtctgctgatagtttatttgtgaaacctttaacttacacaaaaactttcttgtaacttgaactgataacttacacagaaattctacttaattagcctttataatttatcagcaatttctagtctgcttggccatgtgtgatttgtgtggaattgaacttgtcttgattagcttgggcatgtgttgtgagtagtagtctgctcatgactgtcttagcttgcacagtttctaggttgttgatgagtgctttgttgtcagttgcttttcttcttatgtttccttaagagtatgatcactttaaaaggtttgttactataaagcattctagaatcatcacattgtgaatcctgtaacttacactcagaaactctcttgcctgttgttctaatgagtttgaaaaacccttattacacttttagaagcatgaataactcatgatgaacttctcagttcacttttaaacgtgtttaatatcttcccaactagtagaacctttatgatccttgtttaaggtttgttcgtgaattttgttttggaaagctgtagatgttgtagggttcattagctatattggaagaacttgtggatacatctttttgcccttgctctctgttggcatatgatattggatgattttttttttttaatatctctgttagaaagatctgctaagtacaattttctcgatctggattgtaggagtcacttcatctacaacgaaagcaacatccaca

SEQ ID NO: 3820 - DNA, 756 bp, Arabidopsis thaliana
  Intron number 1 from transcript AT5G44572.1 (locus AT5G445 72) derived from phytozome v7.0 (chr-ID Chr5; pos 17968266 to 17969021)
cagccttagccaatcggctccttcctcagttaccggttagtgtttcaacacactatgtcatataaatacatacgtttttttgttcaaacaatattgtataaatgaattaaaggatctgtttatcaaacagaacatacaaacgaaaactgatcgcctgaaagaattaattatcaactggccaaacgaaacggaagaattcactaaatatcaaaaagcatcaagagaactgaagaatgtatataattatagtatgcatgtaattcattaatatttgttgtttagatttacatttttatattataacagtatgttttcgttaaccacattttgtggatttttcatgtttgtgtttatagtaaaatatatttgataaaaacgaaattttgtatattccaaccaaatggaaaaaaatagtttgacgtataaatgcaaatacatattcaatagattgacttttgaaaaccaaaaatcatatgtacgtgctactttttttttacgttataacactatatacaatagacaaagttaatcaaactggtatgagcagaagttcactaaaatttataataaatcgcatatggattaaaccttaatgcaatttatatactttttgaaacaaattatagttataaagttaaaatcgttgcagcagatgaatatgttgctacgtaccttgtccattaattgtattcaatcacacatatatatcctcaattaaaaagcaataatatatatgacattgtaggcaggagattg

SEQ ID NO: 3821 - DNA, 569 bp, Arabidopsis thaliana
  Intron number 2 from transcript AT5G44820.1 (locus AT5G448 20) derived from phytozome v7.0 (chr-ID Chr5; pos 18096266 to 18096834 reverse strand)
ggttttaacttcatcttcacggtattgtcttaattctcttaaccctctaaaatttttcttcaaataatgcagaattaatgtctttcgaaatggtaggagaatatgattttgcagtctttttttttggccattgatgcgtgtcatttttagcattttcttttaaaatgtttttgccaaaatgctagatgttttttcttgcaaacatgtaaagtataaaaaaaaattacacatcaaaagtttttgtaaaccaccaaaacacatttattattattattatatagatatttcaactttttataattagaatttgcaccatatagcaaaagtttccgctatttcacctttgcattttacaattctgccattttattcgacattggttgtcacctttattttatcccacattttttctaattagaccataagtcatttttttggtttccgtttgattgatgaattcaacatttttgttgtatatgttccacgattttgcaatgttcttctcaatcgaagctaaagggattatatagacaattattgtgtgtgtttgaatataggacgcagatata

SEQ ID NO: 3822 - DNA, 718 bp, Arabidopsis thaliana
  Intron number 1 from transcript AT5G45210.1 (locus AT5G452 10) derived from phytozome v7.0 (chr-ID Chr5; pos 18295948 to 18296665)
aattaaatcttcaacaagagtaagtccaaatctgatcaatatacacttttcattaagtttggaatcgttaaagtaatgccagtggggaggagactagttagccattttttttataactttttacgttacatacaatttaatgtttagttaaagagaactagttaatgaaaaaattactgaaatataaatagtaacaaactagtatggattttgtttttgcgtagaaacttacaaattttgttagaaaacatgttatattgtgaaacaaataaaatggctaagatatcttataatatgaaacagagctactaatagatgataaagtgaacaaattttttaatttgactaattgagctaaaagcgttaggtataacggcttactttttttttaattgtatttttgtgactagctgtatttatagagttttatatgttatggtgaccttttttttttatgaaggtaaaatttattcatcaaaaaatctgtgtacattagtgcatccctattttcactgtaaatttaactttttaagaaaaatattgaaactaatttaacatccctagaaaacagaatcttttaaccttttatagccatcctttggtagaatcttttaagtaccttctagagaagaaaatattttttttattgtgaaaaagttgacctttgttttggaaaatttgtgcagagactccgaatttgtagaaaagattgttgctg

SEQ ID NO: 3823 - DNA, 1036 bp, Arabidopsis thaliana
  Intron number 1 from transcript AT5G45275.1 (locus AT5G452 75) derived from phytozome v7.0 (chr-ID Chr5; pos 18335931 to 18336966 reverse strand)
tcatcactaacgtcatctctttgccttatattctggtaaaaattatttttctcaacattttctttgtctctgtttctttgatcatgaatcaatttgtggaaaaccaaatcagaaatttcgaatttatttttaagatattattagtatggttaatcattatagatgaaaactaatgtagtttagttactttattgctctaatgaatatataatccattgaatagtttttgtctcttttctcaaaacggagttcttaattgaagttttacactaatgttgttcatgacttaattcatacatttctttttaatacatagaatgaagtatagttcaattcgagaaatgtttgaagttttattagtagtttagttctacatgttattaaaattcgtatttttttgatataaatattttcttggttactaatgggaagaaatcaagctttggaagttcagaagaagagtcggtgatggttgattgttttgattagtaggtaacatttcactggttggtctcacgtgttttctttggctttgttctgatttggcttggcttgatgactatctcgagaatctttattgtttccttgtgatcggatcttcgttttgtgtgtctgtgtataatactacctctttgtcgccaattcatttaaatagtgttctttcttgcagaaaatggcagttgggtttttcttctgaattattctttttgatgagtaggcatttgaggatctttttcatgtggtaaatataatattgaattttcagatagaagtgttatgtctatatgaaattatttgaattatcttccattgagactaggcaattaaaaaaaatgagtcttttttcctgggaggaatgattaacttacttggagagaagattgtgatcatatctgaaattttgttaggaattttttttatttataaaagtcttgaatcttttaaaactgctgttgctcactgaactggcgactaactatgaatttgtgatgttattgcaggtgtttctgtgttgtttgctagctgggctaagtat

SEQ ID NO: 3824 - DNA, 1002 bp, Arabidopsis thaliana
  Intron number 1 from transcript AT5G45660.1 (locus AT5G456 60) derived from phytozome v7.0 (chr-ID Chr5; pos 18525578 to 18526579)
tgcttcgtcgtcttcttagaatctttgctaaatcggtatggattatcataactcttaaaaggattgatttttagattcatttactctatggatcacagaatctgcttggagtagaagtaaagagtgatactttgctcattagtatacgaaatgaaggcatgggttgttgtcaagaattgtagttagaaaattggattttgattactgcaaatattgaatgtgaagtttctagtggtaatttgtaactgaaatgctctatttatgtgttgagtagctgagcttgagagttgtctcttatgttaggtctcaagcagaagtctgcttaagtagagaaaagaatgatactttagttaaagtttgatgaaagcatgggtgtcaagaattatagtgaaaaattgtattttctcgattactgccaattggaaggtgcagtttctagtgatactctgttactttttctgtaactggagttctctatatatgtgttgagtaggtgagcttgagagttgtctcttctgttaggtcccaagctctctttgtttttcgtaatggatagtacactaaacaaaatgcaatatctgcgcttgaagtagagaaaataatgatacgtcatacgttattcattgagttacgaaactaaagcactggtagtcaagaatttacagtaaaaggttagacctgattagtgattactgcatatttgtcatcggaactgttggagtattgttgcttcttagttgtttctaatgattgttctctacttgttctgttattggagttatatatctatgtgttgagtaggtacgcttgagagttgcatttttattattaagttgttccttgctttgctttgatcctaatggacctgtttgctattgaagttactctttgtctcgagcattcaatagagttttactgttattctctaggctgaaaacttacggacattgttgtgtgttttcgtgttataattgttagggtgcattgagggagttttgggag

SEQ ID NO: 3825 - DNA, 741 bp, Arabidopsis thaliana
  Intron number 1 from transcript AT5G45750.1 (locus AT5G457 50) derived from phytozome v7.0 (chr-ID Chr5; pos 18559504 to 18560244)
aaagctcagatttgggatactgctggtcaagaaaggtctcatctttttcaaccacattgttcatttctcgatctggtttcttatattagaacattttgattgaagttttggggtttatggttttgtttggttgccaaagacagtaaattttcagcttaggttagatctgtatcaattgatttagatccattggtattgatcacttttataagaagagatctggattagtatgtgattttgacaacttgggttttgtgtaagataggagaatcctatgattatgattataaagttatcagctttatcaaatttcttctgttgtttttgctattttaggtttatgtgagagagcttgattggtttcagtaacttcatttctacgattcttagctcttctttctcagatttcacctaagattcttcaatcattatcgatttcttctgttgtttttgcttagtttatttatgtaagagagcttgattggttttagttggattcttaaactttcatttgaagcttttacttggtcttaatttcaaaattgaaaagcttcttgctttgtatgatttgctattctccatttctctgatcagttttgtaaagcgtgcatagtctgaattcgaaactgtaaagcttcttgccttttttgtgttcctgatgtttcggttaacttaattctctgtttcgttgactttgtttcaataggtaccgagccatcactagtgcgtattaccgaggag

SEQ ID NO: 3826 - DNA, 1000 bp, Arabidopsis thaliana
  Intron number 3 from transcript AT5G45950.1 (locus AT5G459 50) derived from phytozome v7.0 (chr-ID Chr5; pos 18634967 to 18635966)
ctttacgacgccaaggtatgtttacgtctccactaaactcttgtatacgtatgcattaagtattacgataactatattatagataaatctatatatatatatatatatatctataatcatataagatatacatgtttttatcaaacaaaaaaaagatttacatgtttccaataattttgtgaagaaaaaccaattatatttctcactattgcatgaattaattgactgaaaaagaacgtgtctctgtgtgtgtgtgacattaatagtagctgctgaaataaatgcgttggtaactagtggcattgaaaaattctacaaatatcttgtggatgtgtatgtatgtgggtcgtgtaacaaaaaaaaggtcataaattacaacaaacatagaggaaaaaacagtacaaataaaatcatacgaattctatctggttgttgggagaatttaatatcgatacataatttctaccctacaatcatgaattttcgatttttcatgtcgggtatctgtaacttgtccatgaatcacaactcataaccacaagtatataaaattatttttattttagtttgaaaagtattttcagcatttactttcttgaactatataaggtcatgaactttatcccaattactgggaagcataaatataatcatgcagccggtagaagtgtccaatggtattttgtttcattacatgtataatgtttcattggaaaaactggtttgcgaccaaaacttaaattctgatttggtccaccttataaattttaaattgttaaatactactcctgtactttttttttgttgaattaaatttgttagtttagttttgggttaattttgtaaactgaaccaaaatagataaactatatagacacatgtataccggctaaaaaggctatgaattgcattttaaattataggaagaagattcgtagcatcttttgagcttctttttttcttggtaaaatcttttgagcttcttgttattattttacag

SEQ ID NO: 3827 - DNA, 632 bp, Arabidopsis thaliana
  Intron number 4 from transcript AT5G45970.1 (locus AT5G459 70) derived from phytozome v7.0 (chr-ID Chr5; pos 18644613 to 18645244)
tggcatccccattgtgctcgtcggaacaaaattaggtaacgaaaactttccccttatgagttcataaagaaacttaatttatcaacatttgtgtcaaattagatatggtcttgagtaataatccgcagatcatacgtttttcatttgcaaaagaaagaaaaaaattctacaagaagctactttttcgtcaaatagtaatacactctctttcactctgaataatattgagatatcactaaataatatgttatttagaaaataacacctatagtaaatgtattttgaaaaattacctaattaattcaggccagtaaattatattatttgttctgttatgctacagttttaatgaaaaacatgtgaaaaaagaataacattttcaaattcgatagttgtataaaaacagttagattttcatctaatagcagaaaaatgttcaaatgtaggaagatatagccacttggatcgttaatggcatcatgaatagtggcccaatttaacatttattcaacaacttatattgaaaaagctaatacatttctccatttgatttatggtatctcttgtgttattgataatatctttttattcaaaacaataatgttacacaaaaatgaatatagatttgaggg

SEQ ID NO: 3828 - DNA, 339 bp, Arabidopsis thaliana
  Intron number 1 from transcript AT5G46070.1 (locus AT5G460 70) derived from phytozome v7.0 (chr-ID Chr5; pos 18683700 to 18684038)
gggctcgtcaaggaaagagctttattttgaatcaggttagggtttcgcttcttcttcaagagttcgttgttgggtcttcgttggaaaaatggggtttgttttgaattgggtgctttgtacttcgttttgaggtctagggttttggcaaattagggttcttttttgtattacctcgagttgatttgttaggttttggaagctttttggattcaataatggggaattatgtttgtttgatttggttctgtgtacattgttttgaggtctagggtttatgtttctgtgtgtttcttaaattgttttgtggtgttgtgcgtttgtagcttcttggacgcagta

SEQ ID NO: 3829 - DNA, 650 bp, Arabidopsis thaliana
  Intron number 1 from transcript AT5G46540.1 (locus AT5G465 40) derived from phytozome v7.0 (chr-ID Chr5; pos 18881493 to 18882142 reverse strand)
atcacgtgtttaaagaagtctccaaggttaggacttcaaattagtttttactgttggtaaaatgttacgattcttgttagttgttaatcactgatatcattttaactgaaattagaggcttaaagcagctccatcgttaaaaacgatgagaatttttccaaaaaaacaaaaatattataatttcttcttaattgtattttaatagtttaatcaatggttacatgacatgtgtcattcaatggttaatttaagaaagggtctctttctcttcaattattactttttattaatagaatttggtgagatacattcctccatcccaccaatggaggtgtcctacacctaattactgttggtttgtgtagtatatgcgaaatcactaatatatttatatgttttagtttaaatgtaaatcatcaggttcaccaaaatttgtcttctatattattgttcttttaaatttgtaaaacgtaatagtaaaattttctttttgttaattcatctttaaattgttttccatttgtttgatttatatatttacttatactcattagtcagtgcatgcatgaaacaaatgttacggtttatatcgatttaattcttaattaatttcaggttgctgtgaagtttctttatcttgcagcctacgc

SEQ ID NO: 3830 - DNA, 882 bp, Arabidopsis thaliana
  Intron number 1 from transcript AT5G46620.1 (locus AT5G466 20) derived from phytozome v7.0 (chr-ID Chr5; pos 18918006 to 18918887 reverse strand)
ttcagccttgtgctgctttagacggtggtgttcaggtcagttttcctttttgactgatgatattggttagtgaaactctagggattgatcaaattcatgagaatatgtgaattacttgttgctagctagataaagagttatggttaagtcttacgaagatctgtaatgtggtatcacatagtgcagtttcatgctagttctgtagctggattgtgtattcatacctttggtttggatcacactaagttggataataaattggtttgtgagtttgcgaagattcagtcgtctctgtggcctacattcatttcatgttctgtgcgggtgccttgcttttttttcactttaatatggcctcaagattggcttcgatatgcttgtgtttcataaaaagtactttatatgcttcagtagatgactttacattcgtcatttctttatggtttttccaaattctctgaatgatcttatagattttgatgtctttgtaattgtagttcattgtcttttcttactctctgttcattcatctttgctcgtaaagttaatgtatagtccttaagatactgccatgtcagggatatgtggtttagcttgttgtaagattagttgcggcagaagaaagttcctcgaaacaagtattaatcataagccacccatgctaaaataaagaccttaaagaatcttaattagttatattggtagagaaagacgataataagcaagaagatttatattgccaagattattcagttatctttctgcgattatgtgtatctggttcattgagttcttcttgatggcattgactcaaattagagtctgagccgagaattttactagcgaacctcttatttggatcagggactacgttggtactcg

SEQ ID NO: 3831 - DNA, 303 bp, Arabidopsis thaliana
  Intron number 1 from transcript AT5G47060.1 (locus AT5G470 60) derived from phytozome v7.0 (chr-ID Chr5; pos 19117191 to 19117493)
tacaggtaacatctaagatctataacatcagatctgttttttttttgttttctatcaatttctctcatttttagtcgaaattattacgaaaggattgatttttttcgaatacccatttcttcaatcttctgattaatcaattaaacgattcatgggtctgatttcaaattcctctgtttttggtacaaattctagaacagaacatatttttaattttgttgtttcatgggtctgatttgaagtttttgattttgtgaattttttgcagaggagatacaccgttttgcagtgaagagtgtagac

SEQ ID NO: 3832 - DNA, 445 bp, Arabidopsis thaliana
  Intron number 2 from transcript AT5G47100.1 (locus AT5G471 00) derived from phytozome v7.0 (chr-ID Chr5; pos 19131239 to 19131683 reverse strand)
cgaaaaccctgtgaagcttgcttctgagactgcttgtaagtttacttgcactatacgtttcgttttctcttctttgctttattctcaaagagcatgagcataaagatctctcttttatcaattgttaactgatatgagaatctgttttcgccatttattgaatccgaaaaatggttctttcattcataatctatttgatctacaactttgttaaatgatgcttgttgttacttaagtcatcacataaacctatttcaatagtttcttggatcattagtgtagtttacttctactttcaaatggaatcttaatcagagaaagttttcaagaaccatcactttcgatttttgttttggtgatatacatgatgttgatgagaaatctcgcagtgtggctaattatttgtttgtttttctagttagtgttagtgaagttgaagcattgt

SEQ ID NO: 3833 - DNA, 665 bp, Arabidopsis thaliana
  Intron number 4 from transcript AT5G47190.1 (locus AT5G471 90) derived from phytozome v7.0 (chr-ID Chr5; pos 19164506 to 19165170 reverse strand)
attgcaggcattggtgttgaaatcgtctttcccatgtaagtttattcttccttaactatcctattatcacacacttactcgggtatattgataagtataaatgtaaatagtattagatagtcagagttaagggtctttgaccttgttaaggagtcttttggctttgagagagattttaggaactctaaaacaaaccggaattagcttcttttatcgtgaacagtcatagtcttcgcttcttgagaacttaagagatttacaattctatatctgatcatatgtattagctttcttcacgaaaaaaggaaataattgctactccaagtatgatactataggaactagtacataaatgctggaagtcttagcattataggtcaccaagctttgtgcttatttactacagaaacgcgcaccaacctttaatcttaatcactctagagtctagccgttatcataacatactagtccctatgaactttccagtactattggctgattctacaatgaagtaatatgtaactgatatgttttgatcttgaacagatactaatctacacaatcaagtaatatgttttgatcttggtttagaatatgtatctgatgtgatgtgtgttttgaatttaacagatactctcccaacataaaggagataaaagtggtaa

SEQ ID NO: 3834 - DNA, 681 bp, Arabidopsis thaliana
  Intron number 1 from transcript AT5G47430.2 (locus AT5G474 30) derived from phytozome v7.0 (chr-ID Chr5; pos 19240156 to 19240836 reverse strand)
cgtggagtttccttctgtgaagtcgaatcagcgaagtaaaaattgaatctttagggttttcttagtttgtatttacctttttgttttggaaatcaaatctctggcctcgttttttttttttaataatccggaggccttgattagggttttcaaaatctagtagctttgtgtcatgatctttataagataagtaatagatatatgtatttttttgctttttatatcagatacaaattttcaatggcaatttattacaagtttaagagtgcaagggattatgataccattgccatggatggtccttttatatccgtcggtattctcaaagacaaaattttcgaaactaagcatttgggcactggtaaagaccttgatattgtcgtctccaatgcccaaactaacgaaggtttgtcttctatgtcaaatgttgtgctgcgcttttcgtattattagactgtttgcttgcagctgtgatacaatgaactttattttatgttatgattgtttactagctgagctttgtcttattttttttttacttttgtgaactattaggaaatggtttgttggaatatgattcttgaatttctcaggaagctttagtgtactgtgtctcgtgccaatatgattgcaatctgtggcctttatatgttctctgttttgaattttcagagtatctgg

SEQ ID NO: 3835 - DNA, 290 bp, Arabidopsis thaliana
  Intron number 2 from transcript AT5G47430.1 (locus AT5G474 30) derived from phytozome v7.0 (chr-ID Chr5; pos 19240156 to 19240445 reverse strand)
cccaaactaacgaaggtttgtcttctatgtcaaatgttgtgctgcgcttttcgtattattagactgtttgcttgcagctgtgatacaatgaactttattttatgttatgattgtttactagctgagctttgtcttattttttttttacttttgtgaactattaggaaatggtttgttggaatatgattcttgaatttctcaggaagctttagtgtactgtgtctcgtgccaatatgattgcaatctgtggcctttatatgttctctgttttgaattttcagagtatctgg

SEQ ID NO: 3836 - DNA, 773 bp, Arabidopsis thaliana
  Intron number 2 from transcript AT5G47455.2 (locus AT5G474 55) derived from phytozome v7.0 (chr-ID Chr5; pos 19251162 to 19251934)
cacaacttccagaagcagccgagctctcactcagggtactctctgctgcacctctcccgacctctaattctcttttctgctttctttcttgtgagtcgctttattttgctttccttctttgagtctttataatttgcaattctatgttgcacaagtcttttatggtttgcactcgtttttgttagttagacttagaaaactgaaccatttcccaagtgttttgcatgtgaggacactatattgatgtaaggataaattattcgattgattatatgaagtcttgaaagctctatgtttgatttgtgactttgcttcttcctgctttatgttaatttcttgcttgccgaatcaggtttaatgtttgactcataacaagtaggatgattggccctagtgaaactaatataggctgaggaattagttttcagagttgtgaaagagttttgagcttcagtgccattgtgtctgtctaattatgagtacttggttcatgcaggcacataatttcaccgttaccatgtgggatccttgcatctttatcaagtacgaaccttttatgaattctagttatccaaatgaaataatgaaaacaaatttgtaggaaaaaaccctggaagttaaaccaaatgttagccttgtcagattgtcattgtgtttcttgtttttcttcttttttctttctatgtatggcagtctagcgaatttagttcatgatccgtgtataagagtagtaacaatactgtagtaatttgtaaaagtgctctttgtcccag

SEQ ID NO: 3837 - DNA, 329 bp, Arabidopsis thaliana
  Intron number 1 from transcript AT5G47650.1 (locus AT5G476 50) derived from phytozome v7.0 (chr-ID Chr5; pos 19312085 to 19312413 reverse strand)
cgttgtagaaagggaaccgcaaagtgaaaaaacaggttttgtatgctcaaatccttcaaacgagtgatcaatctatttagcaatttaaaaactttcagatttatatagaatttgttttgtctgttacttatttaggacaaatctttagtgtaaattgagttgagagttttgttttttcttctctcgtaatgatgacttgccgtttggccaaaagttatggtttaatcaaattgttgttgtgtaataagaataatggccgtcgtcttcgttttcctccggctgatgggttctctgcgtttcacagttgctccaccacgaggaacagatcc

SEQ ID NO: 3838 - DNA, 480 bp, Arabidopsis thaliana
  Intron number 1 from transcript AT5G47660.1 (locus AT5G476 60) derived from phytozome v7.0 (chr-ID Chr5; pos 19313438 to 19313917)
gtctctctctcaggtataaatctcaccattaaaaatgtgagctttttgttcaactttggatctgttactgtgaaaagttgttactttttttctgtattattaagagtctaattttttttcacgtttattagaagcttgtttggtagagacctcctaaacacattctcttcctcttgatatatttgagctttgcggtatcatttgattctagattggttgactggtgcatcactgaacactctcagcttaaagcattaaactttgcagatatcaatcagattggtgtgccgtcattacaagcttttacagtgttggtttataccacttctaagcagtgtttgtctatatattctgcggaacttttggattattagttcttagatagtgtaaccatgttggaagctttgagtttttgataagtactttccaatttttgattttgcagctcctctgttgatagcagcgatagtgactcatctc

SEQ ID NO: 3839 - DNA, 732 bp, Arabidopsis thaliana
  Intron number 1 from transcript AT5G47690.1 (locus AT5G476 90) derived from phytozome v7.0 (chr-ID Chr5; pos 19317957 to 19318688)
ctgtttctaaagattcattgctcaaactcttaaaggtgtgattccccatctctacttctcattgtctcttctacaatttctccaagtttcgatttttcgtttggagggaacttttttccatctttgtcccctgtttaaattctgccaaattggaaccgaataaagttttcagctttgtagatcctcttccgttctgggtaatgctcattaattgagccagtgttttcttctttcgagctgcgttagggttagtttgtaccatctttttcgtctacgctagattgttcttgcgaaattaggtcatgcataaaactcgggactgttcctaggagaaccaattcagtgtctataattgcttagatttgcgacttttatgatgtctgctgttagaatgtcgagtttttagggttggccctagtatttttctgtccctggtcatgatggaattgaactgcgctatcttcaccagcaatttgactgatgcagtagttaccccaatgttcagtttctacattgactaagatgtttctttatcaaccacctttgtggaaatgtgatttgcttttgattggtttcattggggtgaattggtcgggttagtttactaagatatctctctccttaaacacttttccgtgcaatactgtgactgatttatcaaaaagactttccttaacttgtgtgttgctacatgcaggaagctgctgtttgtctttctgagttggagcagtc

SEQ ID NO: 3840 - DNA, 807 bp, Arabidopsis thaliana
  Intron number 1 from transcript AT5G47830.1 (locus AT5G478 30) derived from phytozome v7.0 (chr-ID Chr5; pos 19373385 to 19374191 reverse strand)
tcgatcaaggagaaccatctcaagctctccaagcggtattttcgatttcttctaggtttcttttccatctccgaaattttccctatttttgcatttcaaacattcttcttccaattgttctatatctatacggttttgctttggtgctctttttgctatctttggactttagaattagggttcgttggaatttgtggcttaagtcacagaatcgaaattaaatactacttagaagttaaatttattttctcgcataaggatgaacaactagtttttggaggcttgtgtattgcttgatgaatcacaaagatagattttgtttcgtgattctatccctatgatcattagttaccattataacgacagattttatagctgtatcataagcttgatctgttacattcatttccttcgtctagttgccaacagatacagcagcatcaactacatcccttggtcaaatctgtctcttcattggggatgtgaataaagaagtagtttactggtttgaatcctatcacatcgccttcatccattgcctatatcatattaagcagatataacatcttagaagaatgatctctttctttatcataagattgcaattttattctttatcttcttttagacttttagaatgataaaagtatcttccttgttgaattgggattagtttttgagtgttcgtcgcatttgtggaaatgtatgatggcaagatcgttcactttatgtatatagactgcattgaacttttttctttataaaacccttctctgagtcagtctatcttgttctgaacaggtcgtg

SEQ ID NO: 3841 - DNA, 787 bp, Arabidopsis thaliana
  Intron number 1 from transcript AT5G47830.2 (locus AT5G478 30) derived from phytozome v7.0 (chr-ID Chr5; pos 19373385 to 19374171 reverse strand)
caagctctccaagcggtattttcgatttcttctaggtttcttttccatctccgaaattttccctatttttgcatttcaaacattcttcttccaattgttctatatctatacggttttgctttggtgctctttttgctatctttggactttagaattagggttcgttggaatttgtggcttaagtcacagaatcgaaattaaatactacttagaagttaaatttattttctcgcataaggatgaacaactagtttttggaggcttgtgtattgcttgatgaatcacaaagatagattttgtttcgtgattctatccctatgatcattagttaccattataacgacagattttatagctgtatcataagcttgatctgttacattcatttccttcgtctagttgccaacagatacagcagcatcaactacatcccttggtcaaatctgtctcttcattggggatgtgaataaagaagtagtttactggtttgaatcctatcacatcgccttcatccattgcctatatcatattaagcagatataacatcttagaagaatgatctctttctttatcataagattgcaattttattctttatcttcttttagacttttagaatgataaaagtatcttccttgttgaattgggattagtttttgagtgttcgtcgcatttgtggaaatgtatgatggcaagatcgttcactttatgtatatagactgcattgaacttttttctttataaaacccttctctgagtcagtctatcttgttctgaacaggtcgtg

SEQ ID NO: 3842 - DNA, 610 bp, Arabidopsis thaliana
  Intron number 2 from transcript AT5G47870.1 (locus AT5G478 70) derived from phytozome v7.0 (chr-ID Chr5; pos 19384655 to 19385264 reverse strand)
gtgaggtaaaagttcttcaacattcctcaatttctttctttctttctttccttgggtgtagttgtgtgtgattgagtaggtaagcaaagaaacttatgtctgatttgactaattttgtgaaaaattaaacctttgcattgcatacattgtgtctctcttattgtatctttgtagaggaaaaaactttgatggtagttttcaagagtttattaatgattaaggaaaagattctagttcatgtattgatgcttgtttgtcttgtttttgtgcaaaatcaaacctttctagaggttcattttgctaatggtatatttcacgagtataacaacgattataagcatatgctttggtagattgaaaccaaaggtaatgtgatcgtggaagtcctcgagccttatgactttggtcatctatggcaatgcctaaaccagcaaaatcccatttttatgactttgatatgatagaaggttgttttgtggagagcgagttggattggttgttgaagttgtagattagtgaaccaacatatgtaccattgatgacaggactaagttttgaagttttatgtaatgcaggcacatcgtgaatcaactgggacagtaacgacgac

SEQ ID NO: 3843 - DNA, 509 bp, Arabidopsis thaliana
  Intron number 3 from transcript AT5G47930.1 (locus AT5G479 30) derived from phytozome v7.0 (chr-ID Chr5; pos 19406509 to 19407017 reverse strand)
cttcaacatgtgagtttactaattttgtatagagtcttaacaatgttgtttggtattggatttgaataaagattgttttataaagaggaaagctttcactgttttagattagtagtgattttggttttgcttattttgaataaagttttattgaacctattgattggtatttggaagaaattgttcatcatttgaatttgtattgatgtgaagaggttacacttaaaaacatattgatttgaatgttgtattcttgaatatatagattggtacgaaactagtgttttagataccttattttgaatgttttcttattgaatcagttgtgaattgtcgattttgctcagcttaaatgctgttttatcaactagaagtttggtattggtagaatttttccagctcttaaataagtattgattgtgaatttgtaaagaggttacactttgtgatgaattgcttgttgttattttgcagaaccactgtgttcagccattctcaaactgttgtgg

SEQ ID NO: 3844 - DNA, 484 bp, Arabidopsis thaliana
  Intron number 1 from transcript AT5G48150.1 (locus AT5G481 50) derived from phytozome v7.0 (chr-ID Chr5; pos 19524054 to 19524537 reverse strand)
actactttaaggtttctcatctccgaaaaagtcaggtgggtactactaaatttggattttcgttcacttagaacagttctgtttgatctttgattcctcaagttataacttttgtttttcttttatatcttatgacatgataatattaggtcttaaatcatcctcttcttttgatcctgttggaaaattctttgatttggtggttatgttgcttagataacctaaaaaggtatgaatttgtagctttgttggattcttaatctctgtttttatcaatagatttgattaatatatgtctaattatgtggttatttgcattagaattgtgttatgtatagacgaatataacttgaggttatgttgatctaagttacaaaaataattcagggtaatttagagcttctctaggatggtttaagatgagtctttaagtctgatttttttatacttgcagttattgtgcagatcattgaagtgactagaa

SEQ ID NO: 3845 - DNA, 678 bp, Arabidopsis thaliana
  Intron number 1 from transcript AT5G48543.1 (locus AT5G485 43) derived from phytozome v7.0 (chr-ID Chr5; pos 19674418 to 19675095)
tactgtttttattattttcatcagtcttgtgctaggttagtctatacatttagaattatattaatatattacatatactcgttctacaacaaactgattttggatatcatactattattgtataacatcagttacactaagttatgtaaaattatagcaagagttttcactataaaattacacaatatcatatttagcattcttatgtctgtttcacaaaaaaaaaaaaaaaagcattataatgtctaattcattttagatttagacaattgagttgctagacctaaaaaccaatttcgaaatgtatatgaaaaataaaacaaatttccacctattttggttaattattttaattattaaaaattcgtcctgatatattgtaagagttattgtagtataaatttatacggcatatttcccttgttttatttcatcttcgattctttatgttcgtggtgcaaagatagatatgtattttgcctcataaatgttatgctccatagtttttgatataaattcatatgatatccttgaataaattttacgtaatctgtttttagttacaatatacaaagaactctctaaacatttttctagattagaaatatttttctctagtttttattaccaaactgacattttatattttaaatattatgaaaacaggagtggtgggga

SEQ ID NO: 3846 - DNA, 426 bp, Arabidopsis thaliana
  Intron number 1 from transcript AT5G48655.2 (locus AT5G486 55) derived from phytozome v7.0 (chr-ID Chr5; pos 19732487 to 19732912 reverse strand)
attatagcgatcatcgaatcaaattgattgaagaggttcttctctatcaaaacctaatctaattcatttctcttgttgtttgattaaaaacgatcattctcgattttaggatcggatttgttaatttgatcgtctcgttactgtcaattgagtttaatttcgtaaagtcgatgaatttctgggagattgattcttttccctttttgctgtgaaattgtgttcttttgaaaaattctgtctaaagtttggattttttttttctgtaagtatatgtgaaactatacattttgagattattcacggaaattatattatcttgcttgcaatgatttgagtttgtatataagactttgaggagtaaattagattgttttattgtttggttgaaacttacaggtacaaaggttagttactttgagctgaaag

SEQ ID NO: 3847 - DNA, 640 bp, Arabidopsis thaliana
  Intron number 2 from transcript AT5G48720.2 (locus AT5G487 20) derived from phytozome v7.0 (chr-ID Chr5; pos 19759236 to 19759875)
gattacggagacgacgatcggtagatttctcctttatcgctgcttatttcatctcgatttggtttatttttgattttgatgtgtttcttggtttttgttttctcgtttggatttgtgtgtttgattgattagtacattcttcgatttttgtgtgtttttgtgctttcttagtctgattcgtgtgttctcttgtatgggtttcactgtaatcgttgtggtttcgcttagatttggtggtggttactgggttttaggttttgattgatttctgtgtttttaatgcgaagatgaaatgttggatttgatgttaattgtgagttaagaaatgtttggtcatttaatgtttcatcaatcatttaggatttggattttagcttgtcaatgctctatcatttctactaaatcccgagtttcgtaagccctctcttgtcaaaatggtgctctatggtcagaatccaggttgggatgttgtgattgagcttgaaactatgcaatgtgcttactctatttgcttagttttgagtcgttgagactcttcagtcttcaaaaagctttaaagtagtaaacagtagtctctaatcatgtaaaatgtactatgggtttgatcatgtttggtgttaattttttgcagtagctcctc

SEQ ID NO: 3848 - DNA, 752 bp, Arabidopsis thaliana
  Intron number 1 from transcript AT5G48860.1 (locus AT5G488 60) derived from phytozome v7.0 (chr-ID Chr5; pos 19811877 to 19812628 reverse strand)
gatcctcctgagattcctaatccagttcaagtaagcaaattctcgtcatttttactcaattcgatctgggtttttgattactcaattcgaaatgattttttgttactgttttttgcttattgagagtgattttgacatgggtctctttcgatttctgttactattgtttgatatagtgttcattgtctgcattatgcatagtatgaactatgaagcttggtcctttgacaccgtgtattcatgaaactgcaaatatcaaaagcttagctcactaatatgagttacttaaacagaaaaaagaattggtagtaagcacaaaatggaattctacacatctaatgctctctagagcgattatttacaaagaaacattcaagcatcttgctgaagcaaatactattgtgttaaaatttggttttgttatgcctattggacaacccatttggacatggacattaatgggcacgggcgttaatggacatgtgccttagtggacatgaacactatttgtccaatatcgaaatggacattattggactgggctaatggacatggacagcccgctgtgacagctctaatctgtagcaatccatgtgcaaagctacatccaagattagcaaaattaattgttaaatacacattaccagaagaattgaaaagaaagtatatagttaagataccatttgtatcattagatattcaatctcgttgttgtagtcatatacttggaagcttagaggatcgaaaaacaa

SEQ ID NO: 3849 - DNA, 485 bp, Arabidopsis thaliana
  Intron number 1 from transcript AT5G48945.1 (locus AT5G489 45) derived from phytozome v7.0 (chr-ID Chr5; pos 19844850 to 19845334)
atttcaggtaacacatctattatctattaaaatttggtttgtaatgttatgataaataattctactttaaatatgaaagttaccgtgtgtttctatgaaaaacaaaacctaacctaattttttgttgaaggttttaattagctcatgggtgttaaacataaactatcaaaaaatataaccaaaaaaataaagtttttaagttgtatatttacttttatgtgaaaatatttctactccactacgacaaaatgtcacttttgtaggttttttgtgaaggtcacaaattttagattacgagtgcaattagagtaacacaaatatttgattttgaactaaacagtcgtggttttaaaaatagtgttcaaaatcagaagaagaaaattgcactatgtagtaagaaaatagtcgtttattgaaattgatcaatttttattttagagtcgtttaatttgtttgtttataaactaaacaggacaaatcataac

SEQ ID NO: 3850 - DNA, 595 bp, Arabidopsis thaliana
  Intron number 1 from transcript AT5G49015.2 (locus AT5G490 15) derived from phytozome v7.0 (chr-ID Chr5; pos 19869043 to 19869637)
aaaaacaaatcttctgctcagtcttggattgagaggtaagagatccccaaaacttcgcttttcaatctctgaagctgcttttgaattctcatgttgatttctttgaatttgcatcgatcaagtttaggttttttggatttgggtttctcctaaatatcttctttgaccagtgtgtgtgtggtttggatttatccttttggatctttgtttctccagaataagtacagaaattgtaatctttgtcaaattttgtttattttgagtttcttagtgaactcagttggataacagtgacacatatgagatttgagatgaatttattttctggtaaatgcatagagattattaatgtttcttactgatttgagaattgcaaggcattgtcctttgagtttggtgttaaagttagcaaattggtgactatctctattgagtttacatgttttcttggttgttattgtgaggatttaagatttgcctgcttttgtatttctctttggtcttgtaatgtcagaattgtttctttcttaaagttgatttctttgtcaatctttaaacagagatcgaggtgtttttgacgcaatagaagatcgtt

SEQ ID NO: 3851 - DNA, 846 bp, Arabidopsis thaliana
  Intron number 2 from transcript AT5G49210.1 (locus AT5G492 10) derived from phytozome v7.0 (chr-ID Chr5; pos 19950475 to 19951320)
gtaagattgctgacgaagagttcaggcaaactctggtgagttcactttctctcttctccgttctttgtttattgtatagaaaccatggtggatgtttgatcaagtagttggattagtgtgagatgattcttgagtaaataggagaatgggtttgtctggataaggttcatctagcatgtggagaatcaaattgttgttttcctcttgaaaatttggaaccttttcctagttatgcatcagggtgtagtagtattatatagaagagaacttcaaggtatagtattatgtttgtgattggaagagaactttagattagagctgatggagatgtatgactaagagctttgataaacgttgcttagcatcaagtggaggttttgatgaatcctgtagttatcattgtctccttacattagctgttgttgttctggttacagctttagcatcgtacctaacaatcaaaaataagatggattttgatgctggatcttgatgcttttaatgggaattcttttgagggcagtgaaacttgttagttagaagcttcctttgttcgggctgtaggtagatgagacatcgcacacacacacactgaccaaagcagtattcactgattcattaattgatttcacgtacttatgtctgcaaattaattcagaagagtagtaccactcctaggtttctatttctagtttgagttcctcatgtttcttggtcacagcctcagagcagtaatggtcatagtgcttttcttcttaaagttgtaaaactgattcaagcttgattcactgactggtttatgtgtttaataaactgtagataaaagaaagagcagaaaagctagag

SEQ ID NO: 3852 - DNA, 921 bp, Arabidopsis thaliana
  Intron number 2 from transcript AT5G49330.1 (locus AT5G493 30) derived from phytozome v7.0 (chr-ID Chr5; pos 19999913 to 20000833 reverse strand)
ataatcgtcaagttgcattcccttctcggcaacaggtattaaaccaaaattaatcaatttcccaatcgttcatttatatgtgattcagaatttcgtttttatatttacaattttgccactatgtgaatagtgactgttaatgctggggtcacgtacacagtacaattatatgcatgtcttgtcaacttaagaaacatatagaaatggtcagactccgttccaaccgtccaaaaataaataagaaacaaaatttatcaaatgtattgccatgtaacatttcagcggttgatcactgttggaatggtccagcctttgaaaaaatatatatatatatatatatatacgagaatatccaatttgactttttgtcaataagaagctttggcattatgttgctatatatctaagcgaattgacctctctaattagtcttgtctcatgtgtgttttgtgtacggccctgattgttactggctctattgccagttggtcactgtaacaatgagtggcaaagtggtcatgagtctatagagttaatgcattgttaaagctccaaatttgaattttactgtgcctaaacttctaatcttcttcattgagtttcggtatttttagttgcaataaaatttagaaacttatttaccaataaatcaactcatttctagaattaaggtgtttctacgaaatctgaatatattcagtgctaactcttataaaaaaatgaggaacagtccaaccatttttaaagaaaaattagttacacataactaaaccatgcaatttttctgacgtcatacattttgttgtagtattggtattgaattaatgagaagccaacttgtaaagagtgtgtacacataattaattgatttgtctaaatttatgttgtctcacgtgtgtgcatgtgactattttcttatag

SEQ ID NO: 3853 - DNA, 483 bp, Arabidopsis thaliana
  Intron number 1 from transcript AT5G49410.2 (locus AT5G494 10) derived from phytozome v7.0 (chr-ID Chr5; pos 20033079 to 20033561)
ctctaaccattgctgaaacttgggatcgtgtcaaggtatagactttttacattaccatatgcatttttcatttcttttgttagaggttttagattgactttgacaagtagaatgattgtttctcaaatctgttccaaaggtagagagagtgatatctcaaaatcgattttgatataatactcttcttctacattactagatggtttcactttctttgttagaggttttggacctgaaattttataactataggtagagaatgttaaggttcatagacactgtctcaaaaccaattggtgatgtgttaagtaacgataactcttagagaagtggaatcgttgttggttagctttcaaacagagattatgcaagtatcatcaccattgatagtcagcacaaaactgtagttttcaatttgataataattggtataaatgtttttgaacaggaagtgggattaagagggctgacgagcaagcgtca

SEQ ID NO: 3854 - DNA, 665 bp, Arabidopsis thaliana
  Intron number 3 from transcript AT5G49510.1 (locus AT5G495 10) derived from phytozome v7.0 (chr-ID Chr5; pos 20081218 to 20081882)
ttgctactttggaagcaaagaagggtactggtgaggttcgtcgttgttcattttcattttgtttagctttgatgttatgatcagtgtcttgctactgtttttgagatggattgtgagtatatataaatgtagaaacattgttatttaaacttttgaatccagaatccagagtttttattccataatgttgaactttgttgtgctttgatttcttaccaatctttgaatgcaagcttttgtgttcatgtgaagatattttcttttctcttctgcgcgagtcagtcttacttgcaacatttccttagaatctcataagcctacttgcatttgaaagtctgtttttgaagatcgagattgattggttgaaaagacaatgtcgaaatcactaatcagagttcttatttattcctatggccccttaaattagtgttaagtggtgtttgatggtgacagcagaacatgttgagttcttgcttcactggaagaatcagtgaatcgctgacacagagattgtagtgggcacgatgttttgtctttcctatatgaaagtgtctttggtttttagacttactgttgattcttgtgttcttcatcattattttctcacatggaattcttcttacaatgcaggcgctcttagctgattttgaggtgtctgaaggaat

SEQ ID NO: 3855 - DNA, 460 bp, Arabidopsis thaliana
  Intron number 1 from transcript AT5G49590.1 (locus AT5G495 90) derived from phytozome v7.0 (chr-ID Chr5; pos 20128809 to 20129268)
gacaatctacgaaaacgcggaataaactgtgagataggatgtagcagatgtggtgctctagaagaaaccattaaccacacgcttttcttatgcaatcatgctcgtcagatttaggcactttcacagatacctacggtcccaggaaaatttccttatgcatctatatatgcaaatttggatcatttattttggcgcatacctttggaatttgattcatcttcatttccatggataatttggtatatttggaaagcacggaatgaaaaaatctttgataatgtggataaagatcctctagagatcttacatttggcggaaaaagagtaagagtcagacttgtggaagtctgctcaacttgagcttcacaacaaaaaatttggttctttcaatttggaagatcgtaatcgagtgcggcatttttctttagacaacaattattctggatatcgttgttttgtag

SEQ ID NO: 3856 - DNA, 819 bp, Arabidopsis thaliana
  Intron number 1 from transcript AT5G49620.2 (locus AT5G496 20) derived from phytozome v7.0 (chr-ID Chr5; pos 20138414 to 20139232 reverse strand)
gaactctctcgctcgttgcgccggtatgatactctaacatctacttacacatatacacacttagattaatataggcatagacggtgtgtataaatgtgctccttgattgaaaacaaataaaaataagtaacaaaccatatattatacacaagttgtttcgatctccatatgtgtcttttttaatttactcagtgcgccactttttctgttaatcatatctttttgtttcgaaagttctttttttttttttggataaaagtttgttgtgaaagttcaagaaatggattttgccttgtatgcacacaaaaaaaaaaggaaaaaacaaatcatggggataaaacaaaaagagtgtcatgcttttgtgttccgttctctcattatttttcttctttctgaattgttaaaattatctatgatcattcctaatgaaatcgtgttttgctattcggactcaattattataacttttaggaaatggattcaattatttaaccctctaggttttgaatagagtaactctattcgtgttgaaataaatgaaataattgatcaacatctatatgggaagagcactaacgcaatggaagaaagttttcaggagacaaagaccctttttgagagtttgcctcatagcaacggtccctataatttctagagtaaatttgataactttaccaaatatatatgatcattatcatgagtttcttgcgtatgaaatcatcatacaatatacgtgtacacgatgatgtctaattaaataatagtaacttccaatataaaacagaactcaaaaggaccggaaaaagctgcagacttcgg

SEQ ID NO: 3857 - DNA, 875 bp, Arabidopsis thaliana
  Intron number 2 from transcript AT5G49630.1 (locus AT5G496 30) derived from phytozome v7.0 (chr-ID Chr5; pos 20144846 to 20145720 reverse strand)
gaagttgtccgatcctatctaggtcagattcgctatctatcttcttcttcttttttgttggtcaatcactctgaagaacctttatgacaagtagtattaagtttcatgaacttctagtttaaactcgctctaaaaatactaaaagattacatttcaatatatattcctgtgttatatatacacatgctgttttgtagtaaatattatgtgaagttggtcttaaaattgacatgatgtaaatatcacgtcagtttttataaccgattcaaattaaacatcagttataacaagcgatgcaaatattatgtgaagttgcatcagttgttaataaatcgatgtaaattatttgcatcaacaagatacgaatcgtttatttaagtgatgtaaaatttctttacatcaattataagtaatacaaatattcaatataagtgatttaaaatgatattttttttgtagtgatcccatgtgaagttataattcattctttcagcatcatagtctcttggagttttctctttgtcctcaccacacttattattctcttcccttttaactatcaaaagataccctccccttaactttaagattttaaattaagaaatcgtagacacgaaaaatctaagaactaacaaatattttgataaagacagcttctaaaattcaatatctgaatagtatctcttggaaaatgtcgtgttgtggtcggtcacatttcaacactcttgtacaaaagcgtcaacttgacttcatgtgacagtttttgtttattagagatgtttagttgtagaattgatgatttatgtatataacaacgatattctatagatatatattgatgttaaaagataaacaggaggaagaaaagtgcaatt

SEQ ID NO: 3858 - DNA, 428 bp, Arabidopsis thaliana
  Intron number 1 from transcript AT5G49630.1 (locus AT5G496 30) derived from phytozome v7.0 (chr-ID Chr5; pos 20145929 to 20146356 reverse strand)
gccgcgacaaaagaactggtaactcatcgttatctctctaaatcttatatacgctatgattcagacagcatgatcacatagatgtgtatatataacgggcaagtaaataagtctcagctagtccattgtattgtatgtgttggcatgcaaaattatgattatgtttcaaagaagatttattttagcacgttaaacaattctagacgcaagcgtgaaacattaataaaagacgagaatttgtttccgtttgacgtttaagtgtacactgaaaatattttttagtaattgcgaatattctatcttttataggcgtaaacttgttttttttttctacgtgttaatgcggacataaacgcaaaattagcgtttgcagtaattgcatcctaaataacatagagtttgtgtggttaattgaattgtatagggac

SEQ ID NO: 3859 - DNA, 737 bp, Arabidopsis thaliana
  Intron number 1 from transcript AT5G49830.1 (locus AT5G498 30) derived from phytozome v7.0 (chr-ID Chr5; pos 20253905 to 20254641 reverse strand)
ttctatcaacgagaaggtttttttctgttcttttatcatttcgtgttcttattctcgttgatttgttgttatcacgagtgagaattttctaggactgagtctgtggggacttgttcgtagatttgggattgtatcatcgcagtgttcttgttttgttgcatttcgttttagctgtaggaaatcgtaattgtggaatggatattaggtagcagcagattttatacgctcgagaagatgatgagcaatgtaacaatactcattgcttgtatggttgttcttgtgatcttctggagtttgaaggcagtttgtgaattatgattatgtaaaaatgttactcttaagaaatgctgataggtttagtacccatttataagcttttagcttgccaaatgatgtgttcagtgtaatacagaatgtagctcatgtgaatatacatggatgactatgtcttgtatcagagacagaatctgttgttctcgttttctgttacagaaaagattcaattcggttatggtattgggtataaagggtgtctcgtctgtgtagtcactttctgtgatggtgtgagagagctgagggaaaagttagtttaggccttctagagtttactacaaaaagagtagtgtttgatttggttaacatagattgttggattacttggctggactctttgttttttctcagttattttgggatgatgacatatttctgttcggttcacaggatataaagcagtt

SEQ ID NO: 3860 - DNA, 487 bp, Arabidopsis thaliana
  Intron number 2 from transcript AT5G49830.3 (locus AT5G498 30) derived from phytozome v7.0 (chr-ID Chr5; pos 20253905 to 20254391 reverse strand)
taacaatactcattgcttgtgttgttcttgtgatcttctggagtttgaaggcagtttgtgaattatgattatgtaaaaatgttactcttaagaaatgctgataggtttagtacccatttataagcttttagcttgccaaatgatgtgttcagtgtaatacagaatgtagctcatgtgaatatacatggatgactatgtcttgtatcagagacagaatctgttgttctcgttttctgttacagaaaagattcaattcggttatggtattgggtataaagggtgtctcgtctgtgtagtcactttctgtgatggtgtgagagagctgagggaaaagttagtttaggccttctagagtttactacaaaaagagtagtgtttgatttggttaacatagattgttggattacttggctggactctttgttttttctcagttattttgggatgatgacatatttctgttcggttcacaggatataaagcagtt

SEQ ID NO: 3861 - DNA, 915 bp, Arabidopsis thaliana
  Intron number 2 from transcript AT5G49940.2 (locus AT5G499 40) derived from phytozome v7.0 (chr-ID Chr5; pos 20315754 to 20316668)
tttatcaagtcgacagcttttccgacgatccaaaggtcagactacgaatatctccgtttagaaagatgtctcgatgttgattcgattactcatcgttgccgtcgttattgtatccttctgagcgcatgggcaaattctatgaccaaagatcaaatagttcaaaaattgtccttgaatcttggacttctaatgaattcatagagagtttgatgtagattatactcgtaagaatattttacaggtaaattatcaacggtctcgtttatcatctgaactttggaagctttgtgattgaattgttttactcaatctcaaaagggctctgacatgacaatttcttcattttcctatggctgtcttctgtttttatttgggttgcattagggaaatattatttcaactctagtttttgttagaatcttgaatttgtaatgaactatcagagattttgatgtatatagttggttagtgctcagaagaactttcacagatttgaaaaccaactgttctagtttagaatcagatgcttttcttgtcttactagtctccgtgaaacttgggaagctcgaatttggtgttgtgattgcattgcgctgtgacgtgacaaattttgtttcatatggctatcatcggttattgggttgctttaggggtatataatttcatatgtagtttgtgaacgaatggtttctggtcccatctctctatcagacattatatggttacaacgtttccctaaagttacagtaaaggttctcctttcctaagtttgatatccatttccattgatttgaaacgttatcattgcttcttctgtgtgtatcttctcctggagagatatgtatttaggtttttatggttgatttctggatttttgcagttgtcaaggcagtagcaaccccagaccccatcttg

SEQ ID NO: 3862 - DNA, 466 bp, Arabidopsis thaliana
  Intron number 2 from transcript AT5G49990.1 (locus AT5G499 90) derived from phytozome v7.0 (chr-ID Chr5; pos 20340627 to 20341092 reverse strand)
gcgttagtttctctcttcttttccttttcccttaacgtttgacttctagcttttgttctaggcatatccctggttttgaagccttgtgattgattagcttcttccatttttactttttctgattttggtatcatttactttttgctttttgttgcaacgtgaggattggattcttacttttctctttaagaaatattcgtttttaccttgagaatctcctactaggtgttttgaggatcattctttgctaacaaaggaaattaaacttaatccaccccttggttttgctatatgttcaatctaacttttatttttagtgttactgtatgtttctaatttggtagttggtttttgaataattcttgtttgaatatgaggttttaagcttcttaattagtaaatgtgagactgagtttattcttgtcttacagctgaggctgttctgcttgggtttcaacactacctt

SEQ ID NO: 3863 - DNA, 460 bp, Arabidopsis thaliana
  Intron number 2 from transcript AT5G50020.1 (locus AT5G500 20) derived from phytozome v7.0 (chr-ID Chr5; pos 20352417 to 20352876)
tgttcttagtggcaggagttctatttactgtctttgtaagttttctccaatgcccatttgatatttgatttcttgttcacatgtatcttgtataccttataatcttatcatgggatattataggatcttatcaactcttttataagttttgaatgttgattatatacatgcattatagtatgattcacttgtaattatacgacaataagttaaaaatcttaccaaaattttgaaatcacacctcaataacatgtatcttactgtgtttcttgttatgttctttcctctagcttagatataaagtttgaagtattattttgaatgttgtcactttttgtgtggcttttggattatgctttttttgggcaggtttattattcttccttcatttatgttttttttaaaatcatgtaaatacttaataggtactgatccttctcttcctcacttctgcgcggga

SEQ ID NO: 3864 - DNA, 524 bp, Arabidopsis thaliana
  Intron number 1 from transcript AT5G50040.1 (locus AT5G500 40) derived from phytozome v7.0 (chr-ID Chr5; pos 20357268 to 20357791)
acgcataccctgccgcgggctctgccaccagccaggtactaatatatatcttccaaaaccaatagatataacacttgtggttgggaaaaataaaaaatatatcatttgttactttccaaaggttatagaaaacaaaaaaaaggttatagtttcgtgatcagttacattttttcttaaacgaaatctttttatttttttgaaagaatgtaaaaattaaaaaaaaattgttttaaggtttttttttcttatttcttagattatttgttttttcctccttaaattataatcaacagtttggagttatggttttaagttgaatcaaacatatggtgttatcataaaggtgttttgaaaaacctaaagatcaggattgaaaatgcatttaggattccaaaatcacaattttgtaatatcaagtactcatgtctctttctcaatcatagagtcatagacagatgattcctttttcttctttctttcaatttgtagtttcaagcagctacggccacgctcaacctagccat

SEQ ID NO: 3865 - DNA, 481 bp, Arabidopsis thaliana
  Intron number 1 from transcript AT5G50060.1 (locus AT5G500 60) derived from phytozome v7.0 (chr-ID Chr5; pos 20362665 to 20363145)
gagcctatcctcccgcggttactgccaccgatttggtactaatctttaagacacatctattaaatttctcatgtttctgttttaaccttaagaaaaaaaggtactgtattacgttttctcttctttctttgatatcacaccaaaagtttacatgcaaaagtttcagttgagttcttaaacttatgatttgatttatcattacacaattattctttcgctcttttggaattaaaaaaatattgtttagattgttaattcacctttgcaaagttgatcatttttctgcaagcacttggacacttgtaggcaaaagttttgcaagatgtaacataaactttttattttgcaattgtagttatctttataatttattttcagttcattaacatcaaatttgtatgattttgtttagtaaaccatcaataactgtattttctaatctatagttttccctggctaacatcgtgatcaacctcggcat

SEQ ID NO: 3866 - DNA, 779 bp, Arabidopsis thaliana
  Intron number 1 from transcript AT5G50140.1 (locus AT5G501 40) derived from phytozome v7.0 (chr-ID Chr5; pos 20396412 to 20397190)
ctgccgcctctgtaggctttctctccgtaagtcttctccttcgtctttaaatttttccttttttctgtgttttctatttgtagcaaaaacaaattctgtgtgctgatttttataactagcaaaaaaaattcctcttcaaatttgaatcgggattctcttgtgggtgacatgcaagagtagtacatagtttctacaaagcccagtctagatgaaatagtaagcataacataagccctaagaaacccagagcagaaacaatcttgaacaaggctaataaaaagcgaagcccaagaggcctagaagatgaaggatttttcaattttttgaaaaatcttttgttaatctatcggcaaactgttatttctcaaattcatcatcatcatcaattcatcatcacctgttatgtttaaggagtttttttgttcaatgactatgtaaacagattctgatctaataaaatgacgttaagaaaaagaaaaagaaaactatttgatttaaataaaatatagaactacagaagcaaataaatatccttactttattttcaaaaacacaacgttaatttaaaatatcatcgattgcaatcttgcatatttgattaatcatcatttcagttttaaggatccatttcattaaaaatatttcatgtacaaagattataaaccgaccatctgcagttctgcaatctttgatagattccttacatattacatatctggtattttcatctgaaattctctaatatattaatgtattacagctggtaagttacatagttc

SEQ ID NO: 3867 - DNA, 573 bp, Arabidopsis thaliana
  Intron number 1 from transcript AT5G50170.1 (locus AT5G501 70) derived from phytozome v7.0 (chr-ID Chr5; pos 20421503 to 20422075)
tggttagtaatctgattctgtcaactttgttgttatcgattttgtttttcgttggattttgattctgtaatcacttgtggaagaactattagagtacgaatgtttagcattagaggaaatgtcatgtttgtgttcatgaattgagtggcttgtagattcatttgaagttgtgttttctggtgtttaggtgagaatttaagtctctgtatatggaggtgttggtttatctatggatatgaactttaccttcgtctatcaggaaaactgattccatagagtatgaatgtttaagcatgagaagaaatggcatgtttgtgtcttctttggtgattcatgctttgagcattggttaagtaacttgtagattcatttgaaatggtgttttctggtgttaggtgagaattttaagtctctagttagtgaatcaattgtgtgtgtgtgtgtgtgtgtgttatcattagtgaattaggaattgggctctgtatctgtgtgtgtgtatatggaggttttggatatgaactttacctttgtattgtagggaaaattcttctgagtttgtctttgcaagggaaa

SEQ ID NO: 3868 - DNA, 477 bp, Arabidopsis thaliana
  Intron number 2 from transcript AT5G50230.1 (locus AT5G502 30) derived from phytozome v7.0 (chr-ID Chr5; pos 20450198 to 20450674 reverse strand)
cgatttctgctctctctaagcctttaatctctcaggtaatcttgttttgttcctttcttcattgcttcagatttcaccagtttcaactttataccttgttatcgaagtatacaaattgctagtaaacattgaaagatttgcactatggaataagtagttagatggaacaaaggctcttttaatccttgtagattcttgtaatgcgtttcattggatttcagaaaaaaaaacaattgtagctctcagtatgtttgttcagtgcattttgtgagttcatgtgtcacagagaagtataaaagtatatgtagtttagttaagtttatacttgcttcaattatatagtatgcctcaaagtttgtattgaatccttttgttttggttcagcgtctctgtagatttggttctttctacttttatgctctggaatatttgacacatgtcttgatctggtttgagtatctgtatgcagggttcaga

SEQ ID NO: 3869 - DNA, 585 bp, Arabidopsis thaliana
  Intron number 1 from transcript AT5G50320.1 (locus AT5G503 20) derived from phytozome v7.0 (chr-ID Chr5; pos 20483768 to 20484352 reverse strand)
cgagctattcgagccaggtgaagagtgtcttctgtgttatggaattgaaacttgtattacagcttctggattgatctagtaaagggtttggggtttaggtagttttgggtgaaatttgtgatttctgacccaatctaccaccggagtttgaacttagtttcagttgctgacaataggtggtagatagttttggggactatgttgtgtggatagcttcatgaaaacttcaattgagaactttgcttagggtcatagttagtttgtttgtgctttgatatttaggactcaaaatgattgctagaattcaaacattgtagattacaagaaatgtttatgaaatgagaaaaagatctagattatagatgagaatgtagacttgcttgataacacagctgctaaaaaatccataaggaaaatgctataagctggaaagtttgttcttctttatgagtgaattaaaaagacatagaattcttagattgaaattatggactcagtttgctgttcatgtgatgagaaggatgcacgtttcatgtttaaattgattttgctaaagccctgtttatggtcttaggtacaatccat

SEQ ID NO: 3870 - DNA, 580 bp, Arabidopsis thaliana; identical to SEQ ID NO: 754
  Intron number 1 from transcript AT5G50670.1 (locus AT5G506 70) derived from phytozome v7.0 (chr-ID Chr5; pos 20617134 to 20617713 reverse strand)

SEQ ID NO: 3871 - DNA, 175 bp, Arabidopsis thaliana
  Intron number 1 from transcript AT5G50970.1 (locus AT5G509 70) derived from phytozome v7.0 (chr-ID Chr5; pos 20736516 to 20736690)
gtctcaacaatcacatatctaattaccaaaccaaggtctctctctctctcttcaaagttttgatttttctctgtttctattttgcttttcttgatttattcaaagtgcaatgatttgaatgattggtgggtttttttcagcttattgaagcagagagaagtttgcagaattcaaa

SEQ ID NO: 3872 - DNA, 684 bp, Arabidopsis thaliana
  Intron number 4 from transcript AT5G50970.1 (locus AT5G509 70) derived from phytozome v7.0 (chr-ID Chr5; pos 20737331 to 20738014)
gcaactgcagcctggaaggtgagttttttcccattatagttattctcttgtctctgtggattgtttatagatgtacctgcttgtttgttttcatagcaagtttgttataaacagacttcttctgttgatgttagtttggactagtctcttattggagatgatattaagtactaggaagctgacggtgtttgataaaaatgatgactttaggttacttgttttagattctttggtttagggcctcaaatttggaaagaatcatttacattgacgtatgtaactcaaacccagtcctttggtttaacagaattgaaagaggaaacactaatgacttagtatctttgctcagtttgtttttgtttatggtatagtattattctttttgttgtctataatattactacaccaaacaaggattaaacaaacggaagaagcttgttaaaagtacgagtatatttaataaccagaacacatggaacactttttagatatctagctaaatcaagacagggattcaaattcaatggtcctatcacaataaggaagaaacattataaacctcttagagccaaattagctcatagatatttattgtgtctttccatttgttgtgatttcttatatttttgtgtggtctatttaatttcagattggttgcatcattgcttagtactaccgactgtt

SEQ ID NO: 3873 - DNA, 628 bp, Arabidopsis thaliana
  Intron number 1 from transcript AT5G51050.1 (locus AT5G510 50) derived from phytozome v7.0 (chr-ID Chr5; pos 20753752 to 20754379)
tcctgagggactttgggattcactcgttaaagctggtatagtttcatttacatgctctgagcttattttggtcaagaatcaaacttgcagatcatattgttgttagatcattataagtctatagcaggaatgtcttagattgtgacttggtgagaagtttgaagtttgtacaatctttggggatgcaatcttggaaagtggagaatgagagtgatagttaggcgtttacttgcagtgtaggttgataagattgtgctaatctttttgctatatatgtatgatcattagtgaagatgagactcttgtgaatctgagtggttaaataaataatagacgaatttgtttgttgttttttggttctttgagactgtatataattatctaaaacatctatgaagtttaagtatgaagacttcctatggatgtgtattggtttcatttggtgtaccatagttaatacctttcagttctttgattttaagaataaggcttgttaattttcattcatatgttcaaattttatatgagttctatgtgtagaaatagtgtcaattgcaacttttgtttatgctctgttttcgtcctataagccacaacagtttctattttgcagggattgagataaaag

SEQ ID NO: 3874 - DNA, 435 bp, Arabidopsis thaliana
  Intron number 1 from transcript AT5G51280.1 (locus AT5G512 80) derived from phytozome v7.0 (chr-ID Chr5; pos 20842360 to 20842794)
cttgcaggtatgatttctttggttcttttcaatatgattaatcaacctgattgtaatatatgtttgcgtctactgtcttggctgccttgtttgatcttatatcctcgttttctgagttttgcacttggctagattcttggggatatctgcttattgtgcctgttttgttgtttctggttaacgggatagatcaataggattgtctagtgtctgttagctacttagcgcttcattgctatatatgttctttattgtgtgattctatcggattttttctctctgaataaattttccgcactggtgtttctttctgaatgcatctttcttgtctttggagtcttgagactgtgtcatttaatttcaaaatcttgagaatgttagatggcaatgatgtttaccttcctttttttcctttttttaggtacctgacactag

SEQ ID NO: 3875 - DNA, 517 bp, Arabidopsis thaliana
  Intron number 1 from transcript AT5G51590.1 (locus AT5G515 90) derived from phytozome v7.0 (chr-ID Chr5; pos 20957948 to 20958464 reverse strand)
ttcgaatttaacaacaacactcctacttctggtaatgtctttttctcctttcctgttcgaatttaggaatctctgtgtgtgtacattggcctctctgtataagaatcaatagatagcttttaatagatctatttgacttgcaaaaattttggaataaggacaaaggttttgtcttataaagctagtgaatgttactgtccagtaaactggaggattctgtgtgaaaaaagagttgaatttaaaggaaaagtcccagaagaagaaggcaatttagggaaactagttcggattctttgatgatagtgacataagcagtgtgattaagagtatatatatcgaggaatctgtaggctttggtcttattacttaaggatttaacttgaactctttactgttttggttttagcaatttgttagttttcttgatcagatttcgtttgttttatctgttaagcttgattcatttgatgattaatttgcaggtggaggaggacctgctgaaattgtcagtccaagt

SEQ ID NO: 3876 - DNA, 751 bp, Arabidopsis thaliana
  Intron number 1 from transcript AT5G51700.1 (locus AT5G517 00) derived from phytozome v7.0 (chr-ID Chr5; pos 21002290 to 21003040 reverse strand)
cttccgtacgtcttcttctctccccatctttaatcgattcttctctttcttttctaagtcttcgatagtttctgataaacccatagagtagcttttgaatttgattttatgatgtgaggttacgaatttcgatttttgatcatgagaagatgattacgcaagtgtttaattaggttttggattagctgattgattacatgtagatttcatttagttgtaagtaagtaagctttgaacacagctttgattgtctaattgtcaaattttaactaagttgtttgcttgcaacctatgaattctgtgagactgtgagcttattagaacacttgatggaagaaagcaaaagtatattgcgtaaaattgaataatccaagtattagatcttttgccaccgtttatggctatgtgagggagagtgtacgtacatgcagcgacttttgaattgtttgcttccaacttttgccaccggttatggctatgtgagggagagagctcgttaagactgtccctggaagtgtaattagaacaattgtgtatagaaagaaggctttatctcaatattcatcttaacatttggccttgtatactagtgtttctttcatattcatctattgctttgagctttttattgtaattcatcttcttttattatcttttctttttccggtgtggctggggctggtctttgcactgactactggtttttgttcaagcagggagtaagtcaaatttactcttcaaatactgtttt

SEQ ID NO: 3877 - DNA, 323 bp, Arabidopsis thaliana
  Intron number 1 from transcript AT5G51720.1 (locus AT5G517 20) derived from phytozome v7.0 (chr-ID Chr5; pos 21009834 to 21010156)
accgagctttccaagaacataactccctattgcaggttcacattctcttattaattaggaaagaaaagaacatagttagctactatttgaatcatgttttaattaaaatcatgcatagtagtgatttatacattaatgtatcttcatactaatccatatgttttgccaaagcttctgctcgtaagatttttcttaattagtagtctttttacaaacgaacaaatgtacgaataagtatttttgtgcatgtatataaaatcatggtcatgcatggatttgatttgactttaggtgttggaggtcggggacgtttccattgtgtg

SEQ ID NO: 3878 - DNA, 310 bp, Arabidopsis thaliana
  Intron number 1 from transcript AT5G51780.1 (locus AT5G517 80) derived from phytozome v7.0 (chr-ID Chr5; pos 21034946 to 21035255)
ctcttcgttctcttctccctcttcacttcatcaaggtctcacactcccctaaaaaccctaatcctgatttcggttcttcatgacttcttagatctacttaatctttgtccttttatttagtcttccatgtaagaaaatgaaaaagggatatagtaacaagtgttttgactttgtgatgttacttaactatagtgtttttcttaaaaggttcctaaatagatctattgctttcttggtttgttttgtttcttggcggattcttttgctctctctagggtaagcgttcgacgtcagatcaagtcaacgaggc

SEQ ID NO: 3879 - DNA, 1024 bp, Arabidopsis thaliana
  Intron number 1 from transcript AT5G51870.3 (locus AT5G518 70) derived from phytozome v7.0 (chr-ID Chr5; pos 21086753 to 21087776 reverse strand)
cagagcggaagattacacgaatactctagctcccagtaagatattctttcatcaaattatttcaaaatatttacacatgtctatttccaaaatctttctctagctacacatagatttgttgagtatctagaacttctgtagtgaatagtataatatatctctggttaaatcgtactagagattttgcaataatataggcgctaaagatttggccccctttcttttggtgctagctagttcctgactttgcccaacaatgccttgtcacattctaattttagaatttaagttttgtaagtacttagcttctggattttatttaagcaaacttaagaatttttactacttaagagagtttcttcaagcacgagcaagtggattgtattagggttttcagaaaaaaagtttcttgaacagtgaacctcgtattccttggaacttaaactgttacccacacacccacttggcatctggttttattagaatatccagcataaatgaatatccgaaaatgtagttacattaagtacagaaattgtaaatataatgcatgatgagaagatttaaaaaatatctcgggcatccaaactttttcactagatttacaatcatgaggtcggtacattgttcattttataaatcccttttgttttgtggttaatagaattggtttaaagattagtactatacaatctttacagagtataatttattttgtataacttccctttgtttcatttttcatttcatgtttaacaatctttgtgcagcaaaaaccttccttcactaggtttggtgattgcaaaaattaaaagtattcgattgtatgagtgttatctaaattatagacatctacattaatcaaaatattggtggacaaatctatcatagaagctaagtcggtataaaagataacatgtagatatatatatattaagaatattcgtccataatatttcaatcttatgatccgtcatcatcattcatcactgacaaatatcttcttgtgaattaacttttcagg

SEQ ID NO: 3880 - DNA, 367 bp, Arabidopsis thaliana
  Intron number 3 from transcript AT5G52210.2 (locus AT5G522 10) derived from phytozome v7.0 (chr-ID Chr5; pos 21205860 to 21206226)
ctaaaattgtgttctgggatctgggaggtcaggtgagttagagatgccttagctcatatcattgatctctcttctttgtacctaattatgtgttcctacaagtcacctataccaccaaagagaatatgcttgtaagttgatatgagaaatataggatacaaggaagatccctttgaactccttccctctctaagtttatgcgtgagccttttttgctttatagattgtttcgtcctgttgaaaactactatcggttgttttgatttacaaaccctaattgtgaacaaggatcagtctttctaatcaaataactgtggcttttcccctttatggcagcctggtttgcggtctatttgggagaaatact

SEQ ID NO: 3881 - DNA, 679 bp, Arabidopsis thaliana
  Intron number 1 from transcript AT5G52430.1 (locus AT5G524 30) derived from phytozome v7.0 (chr-ID Chr5; pos 21284306 to 21284984 reverse strand)
ccgccgagtctcgagtacagccgtcttcttctcaggtaaactactaagcttcttcttccagattttccgtgattgaaatgtgtttttcttctgctcatagatcagtattgttacttgcttgatttagatcgtgattccgagatttatagcttttgtttgaatgattgctctgaaaatttgatctgttcttagttttgaatttcgcgattttgctgttttgatttagctcatagttacgaaactgtagtgaatgtgatttgaatttgcgattttggtgttttgattttgattacgattctagatcagagctaatggtgagcttagttcttgatttcacgactttgatttgttctctctggattacaattgtggtctcaaaaaggtaaaaagatgcgttgttgctttttcaatctttttgtggattggctttacaagtcataatagcatccatgattaaaaaggttaaaagcgtttctatttcatgtttggttaattttccacggatagtataaatttctccaaaagtgaattacaaacgtttagctacttattagaaactaaacaagattaactttattatcaaaagcttttactttgagaaagttttgttgaaacagttctctctaaaggggatcaagatgagtctaattttgtgtgtttaatttgtacagaagggaag

SEQ ID NO: 3882 - DNA, 422 bp, Arabidopsis thaliana
  Intron number 2 from transcript AT5G52440.1 (locus AT5G524 40) derived from phytozome v7.0 (chr-ID Chr5; pos 21287287 to 21287708)
ctttgttagtctttggtcctaaaggtcttgctgaggttagtgtctttgtgtgtgtaaaatttcttgatgattgatttggaatcatatctttttagggtttaagcaacttatgaattagtactgtttagtttctcttatgagaattggagtatggtgtatagttgaggctagagatagatgaccttttggcttaatagtgtttgattctctgtggatttaaaatcttaacttggagaaagttcgacgtctatacggagccatttgagagtctgagtttgggaatgagaagagaaaagagctcaagatatcactgttgcttctccatatagtcttttagagttgttttagctctttgaagaagtgttttacttgctatgatccgtgcaggtagctcggaatcttggaaaaactctgcgtacatt

SEQ ID NO: 3883 - DNA, 161 bp, Arabidopsis thaliana
  Intron number 2 from transcript AT5G52460.1 (locus AT5G524 60) derived from phytozome v7.0 (chr-ID Chr5; pos 21292887 to 21293047 reverse strand)
tcacgtatcttgtgttacctttggaagatccagtatctatcctttttattattattgttttttttcttcttggctgttaggtttgatcacattgatttatattggcttttgatttagtcattgaaggctctggattttcgtggctttaccttcactcgact

SEQ ID NO: 3884 - DNA, 983 bp, Arabidopsis thaliana
  Intron number 1 from transcript AT5G52550.1 (locus AT5G525 50) derived from phytozome v7.0 (chr-ID Chr5; pos 21328997 to 21329979 reverse strand)
ccattttgccgaggttaggatccaattccttttcataattgcttcgattcaatcttcttcaatttccatagatcaatccaatttgagtcgattttgtaatactttatgattgccttaggttttgatctctgaatcgacctactcgtttcgtgtttgctttgatttgattttggtgtatgcattagtttctgaatgataattataggttgattcatccgatcgcagtttgtcccggatttagtgtgcgcagtatgaatttcgttaaatttggcttatgatttgtttcaaattgactttttatgtccatgtttcgtggattactttgtgtagtttgtggctagctttccgaatttgggtttcaatgttgatcgagagtatgtacattcaactttggttgatttatcttggtttgttgaccagtgttagttcttttgaatcactgtatcttctaggtcccttgtgcaattgtgtttataggttggtaacctgagtgagtaattaagtaatcagctgggtaacatctggttgtgaaaaagctttcttgtttaatgtttttgcatatagccatatagaaaatagaactgtgtggtcgtgcagctttcattaggttaagaaagcagatgggttggtttggtttggtatattatttttgagatccctgttaacgcaagtctaatctagtattgttttcttttgtagaaaatgggagaagttaagggatgttggaaattaggacgaatgctttcaaaggataactctgcaaactcctacaacgtctcccttctcttatctcctgttgtttctgtttgggattgtattgtccgtaaaatgaggtatacctacatacctgagtgggtgtagtagtcattgagatcatcgcgccttggtgtagtgagtttggtagaatcaaagtaaaaggaaacaaccaactaaaagaagaagccagttaacaaaagcaaggcaaacaaagacttgtagcaatc

SEQ ID NO: 3885 - DNA, 842 bp, Arabidopsis thaliana
  Intron number 1 from transcript AT5G52660.2 (locus AT5G526 60) derived from phytozome v7.0 (chr-ID Chr5; pos 21360955 to 21361796 reverse strand)
ataaattccttgaagctcttcaattgtgagttttgttcattttgtgctttaccatttctcgttaatggctatttggagatttgatttgggaagaattagcatcaattttggttgattagggtttgtggtggactttatagaatcatgtgaatatgcgtggagtttcgattaggataatgtgcaactttatgtttcagtaggtttctgaattgtactgtgttgaaccagtggaattagattggatttgggacatagaattggaatcgagagttggatttaggcagatggatttggctatgtatgcacattttgttgaattaggcgtctgataagaattgagaagatcaggatgtcgaaaaatgagtatagactgtattgaatttgtgtagtagctattgaaattggatgagctaaatgttcttctaagacctgtatgatcattgatagtgaagaacgaaacaggcaagaaattgagctgagattatgaggaaatagcgacgcaaactatatgtatcttagtaaaaagaggatttagtgaaaactattagagctgcgttttttttttttttggttacaatagtgtctataaacactggtaagtgagtaattgtagtactaaggttggtatgtagtgggaaagtccttggggtaggttctaggggaggcgatgatgattgtactgttcattgcttattcttctgtgtattgtgatgcgtacaatcttaggcaaggattagacacatgctatatccaggttgtttggtggtggatctgatatctcttatgtttgtgttttgattattttaggtttgatagagactggaagaagattgaagctttta

SEQ ID NO: 3886 - DNA, 597 bp, Arabidopsis thaliana
  Intron number 1 from transcript AT5G52880.1 (locus AT5G528 80) derived from phytozome v7.0 (chr-ID Chr5; pos 21432961 to 21433557 reverse strand)
caagataccctctccgcttttcgtcttcttcccgagtaagtacttcaaaatttcatctcaattgcgagtatttagagttttttgaggctttaatttagggttttctgtgttgagattctgttcatgttgtagttgaattcttagggttgttagaatcgattaaaaagtcaataaagttgggaactttcagctaattatgaagcagaggattgatctttgaatggctttactttgtaccaatcaaattagcttgagtttgaatctgcatatacaatttgcaaacaaatttgaatatgtagaatgttgtgtttcatttatacgagattttagtaatgtaaacgtaaaggcaagttttttcttagattggaataatcgaatttgaaacccttaatgtgacaatatggctactcaagagtacataattcatatagcacacaaatctcttagattgttgttatctctctgtttctgctattgcaaatctatgtttcttcttcttaagtcttttaagaataatactacaaacagttttcagattctgtatttttttgctttcatttagcatcaatacatcagctgctgtttcagccgctaacc

SEQ ID NO: 3887 - DNA, 814 bp, Arabidopsis thaliana
  Intron number 1 from transcript AT5G52882.1 (locus AT5G528 82) derived from phytozome v7.0 (chr-ID Chr5; pos 21437369 to 21438182 reverse strand)
actgtcacttttgaagagtttccgtatttcttaaggtacctcagaaaacaaaagctctgttctttgtgttttttcagatttatatagttttactatgacttgaacttaatcaaggattcaatgttccttagggatttttttcagatctatggatttttagataagagtgtgattgatataccaacttggcaagttggttatgattttttacatctgccagctgttaaaaagattgaatctttggggaaaaaataacttggcaagttggttatgttttcactatgaggatttgttttatcttttattgttttgtggtgaaagaatcttagaatctgtgagtatatttgggttaagagaaatgatagagatgggaaattctgtgaatacaaaagttttctttctaagaaagtgaagaaattaaagaaattgatggaaagtggggtaggttagttgcacaataagcatgtggatgatttggcaaagacagtgagagagagagagagagagagagagagagagagaaatagaaagattctcacatgtgattctactaatttagttaatccttttctgctacactgttttttggatactattgaatccagtctgtaatatactagtttgtttagtaaactaaaactatagcaagttcttgcatttctaagaatgtgaatgagattgaattcaaaagtgtcataaatcagtataagtagtgaattatacattgtctatttttttaatgttttctaataagaagaatacattttttcaaatggcagcaagagaactcgagaattgttgacaagtgttgcat

SEQ ID NO: 3888 - DNA, 554 bp, Arabidopsis thaliana
  Intron number 1 from transcript AT5G52980.1 (locus AT5G529 80) derived from phytozome v7.0 (chr-ID Chr5; pos 21482857 to 21483410 reverse strand)
atttcgtcttcaccagtcccaaacccagagaaaaggtacacgaacctccatttctacatcaagtttctttgctggggaatttcgctatcaggctcatttaatctggaatccggcgaaattggacctaattagattctgtttctgctcactaatctgctgttaatagtttccactgaaagatagatgatactgaacttgcttgaacaatccagcaacaaaagagatttgtcttttggtatagtttagagaaatttatggaagatttctagttatctcttggtcaaaactagcacaaaattgtggtttcatagttttgttcgattcatattcaaatccaatatgcacaattctgttgaattgattggaaaagttgagcataatcgaagaaacgtcgccgcggttctattgagtgtaattcaaggatgcttctgggtttctttctttgaagttttccttatctatgtttaaacctcttcatgtctcgccatgtttgatttgatctgatttttcgattgatagagcgaagaactgaaactgagattagtgaagctcag

SEQ ID NO: 3889 - DNA, 500 bp, Arabidopsis thaliana
  Intron number 2 from transcript AT5G53100.1 (locus AT5G531 00) derived from phytozome v7.0 (chr-ID Chr5; pos 21526645 to 21527144)
ctgctagtggtgagggactcccacttaatattcaggtaaaatttttgattaatatttatataatcatggcgattttcaatttttttttggataaaaaatatttaaataatccatcaaatttatcaaaagtattaaataaaaaattatatgaagagaacttttgttttgttcgtgaatctataagaaaatattttcaacctcttgttaaattttctggaaagtgtcaaaacgaaactatttgtgaacggatggataaagttgtataggtcatgaaattatgataactaattaatagcttagttaagaactaaaagatttcatttcgttaagattcatgtgcattcacgttctagagaaaatgcatgttataacttataagaactataagctattagtaatccctctctaactgattggataaaagacaataagttttacgatatcttacacaacatccgaattgttaacattgatactatgttttttgtttcctcaaggca

SEQ ID NO: 3890 - DNA, 671 bp, Arabidopsis thaliana
  Intron number 1 from transcript AT5G53120.6 (locus AT5G531 20) derived from phytozome v7.0 (chr-ID Chr5; pos 21534755 to 21535425)
gctttcttcccatacgtctctccgtttacgaccaggtaggtctctcattacctctccctctttctcagtctctctcttgttcgcatttgagcttttgattcttccgatgtttgatgaagcttgattgttggggttttgtatccggtttgatttttctctgttgcgtctcttgatgattgataaaggttcgattttgggatgattctggattttacaaaccctattttactgttctttctacaatttaaacagaaaagtcgtcttttttagtctacaaaatagaaccattggctggtgcaatactaaaaatttcgtcgtttttttggtagatgaatttcctaagtgatacacttctataatcggaccaaccgttctctataaagtcttcacctttccaatttgtaagattcgctaattaatgttgtgaagattagcttagtgagtaactttcttgttgatttggttctagggttaaatactaaacctttattagttcttctcttctgcagacgaatgtttttggtttcgagaatttgctgaaatctattcaacggtgttagttttttaagtctttttgatttttgtgccttcaagttgtgtgtggattctcatggtttgctgtttttgtttgtgtagtatacagaggctggagctggggaagaaaaggattg

SEQ ID NO: 3891 - DNA, 674 bp, Arabidopsis thaliana
  Intron number 1 from transcript AT5G53120.2 (locus AT5G531 20) derived from phytozome v7.0 (chr-ID Chr5; pos 21534755 to 21535428)
gctttcttcccatacgtctctccgtttacgaccaggtaggtctctcattacctctccctctttctcagtctctctcttgttcgcatttgagcttttgattcttccgatgtttgatgaagcttgattgttggggttttgtatccggtttgatttttctctgttgcgtctcttgatgattgataaaggttcgattttgggatgattctggattttacaaaccctattttactgttctttctacaatttaaacagaaaagtcgtcttttttagtctacaaaatagaaccattggctggtgcaatactaaaaatttcgtcgtttttttggtagatgaatttcctaagtgatacacttctataatcggaccaaccgttctctataaagtcttcacctttccaatttgtaagattcgctaattaatgttgtgaagattagcttagtgagtaactttcttgttgatttggttctagggttaaatactaaacctttattagttcttctcttctgcagacgaatgtttttggtttcgagaatttgctgaaatctattcaacggtgttagttttttaagtctttttgatttttgtgccttcaagttgtgtgtggattctcatggtttgctgtttttgtttgtgtagtatacagaggctggagctggggaagaaaaggattgtct

SEQ ID NO: 3892 - DNA, 861 bp, Arabidopsis thaliana
  Intron number 3 from transcript AT5G53180.1 (locus AT5G531 80) derived from phytozome v7.0 (chr-ID Chr5; pos 21570194 to 21571054 reverse strand)
tcttgcatctggtaagtggatcacacacctaattggtttcgttagatgatgtaaataataaatatattgctaaaagatgttttggagaaatgccgatgattaggttgtaggttgtcgtgcttttgagaattttcttttgacgtgaatgtaaatggatcagcagggccatgtcaaggcaatatcttcagtggcagcctaatgcattaggagaaagagcacatgtgtgtttgtttcctttctcctttccctgacactgcctctcttttccctactctctccctcacacttccctttatcagatatatattctaggatttgtgagatatggtcttacataggtgtagttagtgtttttgtttgatatcataggcaggggccagctctaccttacataggtgtagttagtatttttgtttgatatgataggatgctactctatctgtatctgcacatcttttgtgatataggactgtgtcatagtttatgtgactgatgaatctatctagaggttcatcaatctgctaaccttttgggctgttccttgtgtctaatgtgattgtttgatatgttggaagacaaatcttatgccttccagagagcgtaacctgaaatcaagcttgtcacgtcatattatgttggtttaatttgctatcttaacttttgtcatgctgtatgaattttatacttagagagttggcattaactaaagttttcttggaatgttgctgaagggcaaaataattacagatgctacactggagtctttatagttaactcttctggctctttttttctttgttgttctaattgctggtttgccatgcaggtattctcagcatttgggtttgtccacaagattac

SEQ ID NO: 3893 - DNA, 660 bp, Arabidopsis thaliana
  Intron number 4 from transcript AT5G53180.2 (locus AT5G531 80) derived from phytozome v7.0 (chr-ID Chr5; pos 21570194 to 21570853 reverse strand)
cattaggagaaagagcacatgtgtgtttgtttcctttctcctttccctgacactgcctctcttttccctactctctccctcacacttccctttatcagatatatattctaggatttgtgagatatggtcttacataggtgtagttagtgtttttgtttgatatcataggcaggggccagctctaccttacataggtgtagttagtatttttgtttgatatgataggatgctactctatctgtatctgcacatcttttgtgatataggactgtgtcatagtttatgtgactgatgaatctatctagaggttcatcaatctgctaaccttttgggctgttccttgtgtctaatgtgattgtttgatatgttggaagacaaatcttatgccttccagagagcgtaacctgaaatcaagcttgtcacgtcatattatgttggtttaatttgctatcttaacttttgtcatgctgtatgaattttatacttagagagttggcattaactaaagttttcttggaatgttgctgaagggcaaaataattacagatgctacactggagtctttatagttaactcttctggctctttttttctttgttgttctaattgctggtttgccatgcaggtattctcagcatttgggtttgtccacaagattac

SEQ ID NO: 3894 - DNA, 552 bp, Arabidopsis thaliana
  Intron number 1 from transcript AT5G53260.1 (locus AT5G532 60) derived from phytozome v7.0 (chr-ID Chr5; pos 21605071 to 21605622 reverse strand)
actttagcgtctctcagtctagccccggtggacaggtatagattttgggttctttctttgtactacgtttatatttaatgcataataaccaactaacaagcgtgtggtagtggtagactagtggcggtagatttgatcattttgaaaggatgtttcttctagtacacgcttaaagtggattattttacattcaaaatgagtatcatcaagagttggcttggacgaagaaagattgtgaatattaacttggcccaactttgtagttaattattatggctgtgtaaagttaaatccgtacactgcatggtgttgaaaacacaaaggaaattaatattttgtttgatatacttctttcaaaaaaaatttatgttgaatttttattttgtagtctcactttctcatgttaacgcaacgtaaaacgcaaatatgaaataacgaaaaacgtaaaaacacatactggttttgaacaattgtgaccacaatataataccgaatgatgtgaaacgttttgaaaaagtttgtaggcccaacagaagagatttccaccgcagc

SEQ ID NO: 3895 - DNA, 742 bp, Arabidopsis thaliana
  Intron number 1 from transcript AT5G53280.1 (locus AT5G532 80) derived from phytozome v7.0 (chr-ID Chr5; pos 21607857 to 21608598)
ttgagaaccttgaagaccagctcgagtttttccatgtaagtctcgtgtttctccgattgattttgtggttttcgcttccttgatatgaagcgaaattgggagattagcttgttatctcctttgttttgtgctaatttttgaagattgttaagcaaatccttctactagatgactattcaagtccgaaataggttgtatctgcttctgaagaaagtgactcatgattaagccgatttgaggcaatttagggtaaaaattgattgaggtgtgtttagttagggtttagatttacgaattaggaatttaggttctgaactggatagtaattatcagattcttacgaaaattctgagcaacaattttagacagaaaatcatcatacaatgtagttctgagagcattgtttattgcaaactctttgatcatggaattaaagcagggagaggaatctagattcaggtgttgtatgtgcatgaagaatgatatggtcttatttaagatcagaagaagtagagatagataagcagaatccatttcgcaatacattatagacgcatgtgttttatcattgccatagataatagaccaacgaagaagaatatacaagctattttgcatatacactcattggttctggtcagtcgcatatgtctcgtttactatctgaacctgaaagacaagatgtaaaacttctttctctttgctctgcagactatacatacacagcagcgaacagagaaag

SEQ ID NO: 3896 - DNA, 540 bp, Arabidopsis thaliana
  Intron number 2 from transcript AT5G53310.1 (locus AT5G533 10) derived from phytozome v7.0 (chr-ID Chr5; pos 21635386 to 21635925)
aacttgaagtgcttctctctaacaggtaactatgaccgcaatttttggtttttgatgtctcctctttgaatgctaataccatgcacatgagaattgtttattttcatctcatttcctgatattgacactacaggtattgtgttactgagaactgatgtgggtctttttagtctctgaaacttagtgagctctgtttcttaagtgacttggctattagttagtggtgagaccagaggatccacttgtacctattaatcatatctatatttatggaagaagataaagaattaacacttttaggagataactactgaaattagtacgttgagatacaaatggttacaactatattttaaatactgttagatgacatattctagttttgattgaaactgttctcaaatggcaatcacgataatagtccgtagaaacattttgtatatctcccatatcgtaaaactcagctattggtttatatgtgcagtttgtgttttatactgataatggtttctccttgtgttcattccagatttgagtaca

SEQ ID NO: 3897 - DNA, 228 bp, Arabidopsis thaliana
  Intron number 1 from transcript AT5G53360.1 (locus AT5G533 60) derived from phytozome v7.0 (chr-ID Chr5; pos 21648257 to 21648484)
tacccaccaatccatcaggttcgtatctcatcatctcctaacattggagggttgagaaagatcttattgcttcttacgaatataaagttccaatttttatgatcgttatcttcaaatgatctgatttgtttatcattgctatggtatgttactattgagtttcttgagggtttatggatgttttgatatatgtatgagtgaaaaagtttcttcttttgtagtgtcata

SEQ ID NO: 3898 - DNA, 1018 bp, Arabidopsis thaliana
  Intron number 1 from transcript AT5G53780.1 (locus AT5G537 80) derived from phytozome v7.0 (chr-ID Chr5; pos 21840929 to 21841946 reverse strand)
aagacaaatttggttttaaatctaagtaagcctggcctgctaaaacaatataattgggcttgaaaccttatactacttgggctttttgtcactatggtaactaatgcgaccggattaaagaagtggttaagtggtcaaacgaacaatatcttgtaaaatcttgctaataaacaaggctgaaggctgacccacgtgacataagcaacataagctatgaattcggactttaaagtatggttcacctagttgggcctcgaagaaatgcaagatgttatatatgggctctaatatctaaaactaaattataatgtcaaaaccttgaatgatcactatcattttcaagtcagcaacgacacatgttatatagactttttcagatttccttttctcttaatttttgagattcttatcctgatcactggatatgtgttcttgaacaatacgtctgaaattaacactaacaaattttatttaacatgtgtcaaaattttatgaattataacttttacacatgtcgtgttgttagggtcttcaacttataaaatatacactttcaaaatgcccataaatactattaatttagaaaagtgtatatatttttttggtgagtatatagtttacatatttgtttctgtttttttttcttctgttttttgttatatgtttccttaacgaatcatatgatgtattttgtcaattactttcttttctgttgatttctttttgatagtatttgatatgtttcttggaaagtacgtcaaaaatagtatataacacgtgaatgtgaaaacataaacacatgagatcacaaccttatggttgttacgaatttagaacaaatcaagtgagtttggggttgttttctaggataacaatgtctctgcttttcaatctagtcgcaaatctctctgtaagcttttactagtcgttatcaacaaaatatataagtgttttgctgtgtttctttatgatgatttttctagttccttccacgaacaatcacaggttgaagaagaag

SEQ ID NO: 3899 - DNA, 938 bp, Arabidopsis thaliana
  Intron number 1 from transcript AT5G53810.1 (locus AT5G538 10) derived from phytozome v7.0 (chr-ID Chr5; pos 21851393 to 21852330 reverse strand)
cttgacctcagcgacgtatttatcaagacgtacttatttgcatataacacaaaaacaatactgtagttaactcttcaaatacattaaaccggttattgatagagaacatgaatcaaagaatccttgttggtttaagaatccacgatttcaccatactattgcatctactccatatgcggaaactcaaatcatcctcagaaggtctcaataacgatccatcaactaaacctagcttgttctttgcatctaagctaatcttcatcgcaatcgaccaactgttgtaattagttccatcaagaatatgagatacaattgttaaacctggatgatccgatgaatggagaaccaatggattgtcgaacgaatcagtgttcttcaacatcgatccacggacctcagaagcttcgaatcttcgattgagttgttgttgagctctcgcaacttcaagatcttcagcgatcatcgagtttcgagtagatctagcaacagaaccaccatcgtcaggagtaacattgagattcttcattttcccacctttcttcaccattttcaccaaaatcgaatgcgcggaagaacaatcgacaccaagaggagtgaataatcgaagaaactgagcaagaattgaagattgaagatgaaatcaactggaaaaacgcaaaaaatgctctgataccatgatagagaacatgaatcaaagagatttgtgaatcgttttctatctttctcaaataacagaatgtacatgtatgaagtttatatactctactctaaaccgaataaaccaattacatagtaagttaaccggctaaaccggactatctatatacacactctattagttatcattaaccatctcactaattaaaccttaatgtttacgtttgtacacgaagtgaccatttaatgattttttttgtttcataggacacatctcgaag

SEQ ID NO: 3900 - DNA, 967 bp, Arabidopsis thaliana
  Intron number 2 from transcript AT5G53850.2 (locus AT5G538 50) derived from phytozome v7.0 (chr-ID Chr5; pos 21863125 to 21864091 reverse strand)
aaggtatggttttgtcgctttcaaggtagtaatacttgattctgcgttagggatttctgtatacgtagcttgattatcactttgctattggccttctttatcttatggtattttctttgatgattgtgcattttttgttttctcaaattgttgagcaatgttggatttcgtcaaagtgttgagcagcagttacggatttcaagttataatgttttctgttaagaaggatttttcttagagcacatggttatgaacgaaatatgttaagagctcgtcgctcttttctagtggtattttgtccttcctcccatttagctagtgatcttttactggaatggcaaatacgttgtttgctaatgactgttggattacaatccaaaaaaaagtgcagaacaggcgactttctttggggaaacgcttgcgaaaactcggttacaaggtaaaacttgtccaatttgagcaataatcccctcgttggatgtgtcaagtgggtttcttcgacccatagaatacccactaggttgcactggttgagatggattcagtagtgaagtgttagaactaaacacaatgggctcagaaaaatgaattgatatttagagcgtattgatgtttacacaaacactcttgaaaatggagttttggttgtaacttctctttacttattaaagaaccaccttagactatcaaatatatctttcctgggttcagttgatcagtgaggttgcatgatcattgcttgtaatgtgtaaacttatatatgatttgcatgtatgttaagacaatctctttttccttcagtgagttgtgtttcgacaagttgtatgtgggttgttttaatgccaaattgacttgctttgtttgtatgatttcccttctcattttatagatgtccaatctctaataacattgagatagtgacgttatcaataagtttcatagcaaaaccttgttgtggtgcaggcat

SEQ ID NO: 3901 - DNA, 828 bp, Arabidopsis thaliana
  Intron number 1 from transcript AT5G54160.1 (locus AT5G541 60) derived from phytozome v7.0 (chr-ID Chr5; pos 21982480 to 21983307)
gaaagctggtgagttttcttcatattactcgtatgagttctgacttttaatagatcgttatggtaaatcaagctagacaagacaaattcttttttgataatgttgtttcataagttatggatcttggttaatggattaaaaatgaaattgtgcaaaggtaaaggtgagagagaggcacaaagtgtcaaagacaatcagacaaatacagacaatacgacacgtatagtctaaacctgctctctccactagaaaactatattatatgcaattcttttagttagtggttataacgagctacttaaatgaattttgttgctgtgccaagattatacaaataataaggagaaacttcagaaacatttatgttagttggtccaatcaaaagaaacactctttttttttttgcagaaaaaacactctttgtttctatgttttagttcatggctttaaatagagaagctgtaatcgttcttcctattattgagtaacaaaataaggagatagaatagcaacatgattaggaagagaattgttcttttcatgatctagaaaacttcaaatctggttttggttttcttcaatcgaaccggctggttctctatgcaaaccggctgctctttatcaaactgtacaatcaacttgccgtggatctagttcaatcttgtggtcgaattcaaaaactttattatagttagtggtaatcaaaagttgatggtatcgaatttgaaaaaacaaaagaaagttgagggtttaagttaagctaaaagagtgtatatgtgttttcttaaactaatgccaaagagtcatgttttaggtaccatttgaagg

SEQ ID NO: 3902 - DNA, 325 bp, Arabidopsis thaliana
  Intron number 3 from transcript AT5G54290.1 (locus AT5G542 90) derived from phytozome v7.0 (chr-ID Chr5; pos 22051887 to 22052211)
attgtcttggtaaggtttaatcatagattttgatattattgtttatatacttgtgtgctttcttcttttgtttctgttactgtagactagttcaattatgttccacatcttaacctgaatagtttattgagattatgtcaataagtgtttttttttccttttctccttagaccttggttagggattatatctcaatatttttgtttggaacgaatttgtgcctatgcttttctgccttgagatacgtccgattgcttgtaaaatcagaaactaatttccccttaagacaggatcaagccacttccatttacatcttggctgaagg

SEQ ID NO: 3903 - DNA, 385 bp, Arabidopsis thaliana
  Intron number 1 from transcript AT5G54500.1 (locus AT5G545 00) derived from phytozome v7.0 (chr-ID Chr5; pos 22124677 to 22125061)
gcgactaaagtatatatcgtgtatgtcaaagtttccatttttttattatattttttttgggtgattaaagttacgatttttttccaagctaatcgatgggtttcgctgtaaaaatcgtaactttttttctctctgattcacttcaatgacttgacttgatcagtgttgatcgaagaatttttctatggtttattgattttttatctgattttatgtaaatttacttactttgtgattgtttgattggtcttttgattaaagtttggatctttgatacttctgtttgtcaatatgagattgaatggattgtgatttagctacttggtggtgggtttgattccaattttgactttttaagttctttgacatttgtaggtactactct

SEQ ID NO: 3904 - DNA, 514 bp, Arabidopsis thaliana
  Intron number 1 from transcript AT5G54660.1 (locus AT5G546 60) derived from phytozome v7.0 (chr-ID Chr5; pos 22204245 to 22204758)
tccttaaatccgatatccccggtgcgtacgtctttcttacaccacaattctcttatttattttcattcggaaacgtttatttctgctttagtaaaaaataaaaatacaatagatcgaactttaaaaaagaaaactaaatcttcgttcaaatgatttgttatacatcataacgatcaaaactgaatatgtgaactgatgaatggttgatatagtacaaatatgaacagaacctaagtttctttaaaagtgaacgtgaaccaatctcaaaacgtaactcattcaaatttaggatttcttttgtcaattttactttaaatatcaaaatgatcgaaccacaacttgaattggacactagttataatgatggtaacgagaaagatgaaatggttcgcaaaattttcaaataataatgtatcttttaaaatggtataaaataaggaaaaaaaaaactgattaaatttttggtacttgtatgttagtggtggggaaaaataacgtgcaggtgtacgtggac

SEQ ID NO: 3905 - DNA, 509 bp, Arabidopsis thaliana
  Intron number 2 from transcript AT5G54670.1 (locus AT5G546 70) derived from phytozome v7.0 (chr-ID Chr5; pos 22210072 to 22210580)
aacgaatcaagtacaagagcaaattcaactacaaggtttctactttttcacccacctcattaaatttatcaactttttattttttttacctgaatctaaaattcttcttgtgttttagtttagttggtgaagttttgaattttaagtagcttttttactggcttttctcgttggatccgttgtgttttttttttctgaagaagaagatttgattgttgttgtttataagacaatttgtgggacctttatatttaggcaatagcattgaagacattgtttatgtgtgttgattgatctttgtggtagaatctggagcttttaatttcagttagctttactggcttttatcgttggatctgttgtgtgtttttttttttgaagatttgattgttgttataagacaatttgtgggaccaaaatagttttgtctatttgataagcattaaaggactttgtttatgtgtttttggtcttttggtttgaatttgaatgttgattttgcaggagag

SEQ ID NO: 3906 - DNA, 507 bp, Arabidopsis thaliana
  Intron number 2 from transcript AT5G54700.1 (locus AT5G547 00) derived from phytozome v7.0 (chr-ID Chr5; pos 22224439 to 22224945 reverse strand)
tacttcacactgccgcctctttaggctctacttccgtgagtttttcctcgatctcattcattttccattttgtgtttgtatcgatcttttcgaaatctcgatgttgagtcgttttttccaaagttcaaaattagggttttagagataacgtgttttagatactattataatcacacattgaaaattgagatatatatttctataactgtataaaagatttatggattaatcaactcattgataattggttttgagcctactctccgattcctaaaagagattgctccttccaaactcaattgaatttagatttcagcttattttttcgtttcaaagtattacataagtaagagttagcatatacactatttaaatacataaaaataatggagtttgtttgaacataacaattaatacagctagcggagtacatcatcaatgaaacaaaaatacataccaaagccaagaacatacagggtcttgcagcggttgatcttctcgataaag

SEQ ID NO: 3907 - DNA, 720 bp, Arabidopsis thaliana
  Intron number 1 from transcript AT5G54780.1 (locus AT5G547 80) derived from phytozome v7.0 (chr-ID Chr5; pos 22250909 to 22251628 reverse strand)
tccccaataccaaattcaagatcaaagtttgttcctttccctgatactttcatctttgttattgacttttattggattttggtcagcattggattcgttatcaatgagattggcgtttgcgattctctctgagctttcagattcttttactgggtttatgttcaaaatgtgttcttttggtgttgcttagattcttcattctaaaattttcagctaatttttagcattatttatattattatcggcgtgatgtctctttggatttggaacttttaccattggtagatatgaacaaataagcgatgagagcatttactagttatgatttaggctatgacatgtttatgtcttatgatgctgatttataatgggattattgatcttagtgctctttctagatttgatattctcatggtttcgtttagagaaatgcagaatcctccttggaatttggagattttgtttgccattgttattcattgttttgatgtgatcaaaccagagaagagagcagtactagttatggtttaatgggttgggtatatcaatgtttatgatttctgatgctgattgtttagggtcacatatctagcattgatcttgctttgtagcatcacatgattatgttttagagaatggcagagtctcaatttgctgacaagacctaccttgtttcttaattatgtttgtgcagcctggtaaaactctaagtgtaagaaa

SEQ ID NO: 3908 - DNA, 492 bp, Arabidopsis thaliana
  Intron number 2 from transcript AT5G54940.1 (locus AT5G549 40) derived from phytozome v7.0 (chr-ID Chr5; pos 22308759 to 22309250 reverse strand)
ctctttgttcgttgtttcgttttcgaatcggattggtatgattttgcgttctgtttttcttatcttatggttttgatgtgtgatttggatataatctctgcataaactatcgaatctcatattaaagcgaattgatttacttgattgttatggttttgagaagtttgatctaaattttggattgtctcctctcaaatcattttattggtcagctttagggtttggattgagattgaattcgaatatatccatgatccagtaattgatctatatagggacttttcgtatgttataatctagttatatgttgaacatcatgatgacatgatctatttggttaagtcatgctctgttcttgattaattgttgttgataaagactagatttgtttattgttgattggagtctaaaacttgggttttctcaatttgttttgcagagagaatcaaacagcttaagggcagtttcttagttaaaagtaaccaagtttac

SEQ ID NO: 3909 - DNA, 633 bp, Arabidopsis thaliana
  Intron number 1 from transcript AT5G54940.2 (locus AT5G549 40) derived from phytozome v7.0 (chr-ID Chr5; pos 22308759 to 22309391 reverse strand)
aaaactccaaagactccatcgaacaaaaccttcaggtacgatttgttctttcttttgtagatttgatcgtttcgttgtttgttgttctctgtttgattgattgctctctagttttaattcgatttagggttttgaagctttctctttgttcgttgtttcgttttcgaatcggattggtatgattttgcgttctgtttttcttatcttatggttttgatgtgtgatttggatataatctctgcataaactatcgaatctcatattaaagcgaattgatttacttgattgttatggttttgagaagtttgatctaaattttggattgtctcctctcaaatcattttattggtcagctttagggtttggattgagattgaattcgaatatatccatgatccagtaattgatctatatagggacttttcgtatgttataatctagttatatgttgaacatcatgatgacatgatctatttggttaagtcatgctctgttcttgattaattgttgttgataaagactagatttgtttattgttgattggagtctaaaacttgggttttctcaatttgttttgcagagagaatcaaacagcttaagggcagtttcttagttaaaagtaaccaagtttac

SEQ ID NO: 3910 - DNA, 487 bp, Arabidopsis thaliana
  Intron number 1 from transcript AT5G55250.1 (locus AT5G552 50) derived from phytozome v7.0 (chr-ID Chr5; pos 22410292 to 22410778 reverse strand)
gacaagacagctacgccaataactctcaagctcaggtctgtacatcttattttttttttctaattacttaaaagttccattaaaaagccttcttattattctattttctatatctcgagtgataaatttgggaattttaagtgaagggactgtgctcaagattggcaagatctgtttttaaaatttcatttcttcgtaagtgtattttcgttacgataagatttagttatcaagaggactatttaaatcgaataatttactcttctatttcgtattttagataattactctgatttgatttggtttagattgtattgatttcctaaataataaatcgcaaaaaaaagaagctattttgttgagactaataagatcaccgactcagcgtctacgtgcatgggaatgtatatatgtagtaaatcacgagaaaaaaaagatatcgacaatatagactcatgaaaagataaatatttaacatatgcaggca

SEQ ID NO: 3911 - DNA, 285 bp, Arabidopsis thaliana
  Intron number 1 from transcript AT5G55560.1 (locus AT5G555 60) derived from phytozome v7.0 (chr-ID Chr5; pos 22507502 to 22507786 reverse strand)
ataattctctcctccgattcaagcgatttttagtatgtgttcttcaatctctttatgtgtgtgtgtatatgtgttatgttctagttggagtttttttttttcttcttacgtttatttagggttcttatatacatgttaccgatctagtttttttttaaattagttatcaatcttcaatttgattctagtacatggaaaactgaatttcaaactggttttatctgaaatcttctttgttgttgtgaaattcgtgtaatcagaattttgagtctgttttactagcag

SEQ ID NO: 3912 - DNA, 436 bp, Arabidopsis thaliana
  Intron number 1 from transcript AT5G55590.1 (locus AT5G555 90) derived from phytozome v7.0 (chr-ID Chr5; pos 22520235 to 22520670)
agagttaaaatcttcattcttcctgggatttacaggtaacttacaaaaaaagatttaagacataaaccgtgtttgtttttttctttgtatgttattaatctttgagaaacgtctttgggagtgtggggttttgtttccgaagatttcgtttttttttttgtttttttttggtgtgataaaagcagttgaagctaaattcttgggttagtgggataatctaagcataagctgcttacgtaaataaaatcgtgggtctcaagaatctttgtctgtaaaaccgtagaataagaatctttgtctttgttatatactctgttctttttttgtcagaatctttgtctttgttatctactcttgttttttttcttcagaatctcttctctgctatgtgttgtttgcagggagaaggtgattgtgccgaaatcaaaaccgtata

SEQ ID NO: 3913 - DNA, 374 bp, Arabidopsis thaliana
  Intron number 1 from transcript AT5G55940.1 (locus AT5G559 40) derived from phytozome v7.0 (chr-ID Chr5; pos 22657331 to 22657704 reverse strand)
ctctccttcctcctctcgagatctccctcatcgttcgtatctcttcttattcgaatcgatttgattttacgagctttgaaattgaattttgaaagagattatgatctgattgcattggtatgtatattgaattacgaattctggaaatttttagttcgtgtactaagcttgagctgcatatgttattattagcttgttcttagttttctatatgtttgcttgattctcagtgaagtcttattgttgtttctatattaacatagaaatttcagatctttatgtgtttgttctgtagctttgtttgtacctatatcctttaaagaaaaacttacggattcaggtatattttttgttgtggtagatagaggagcatt

SEQ ID NO: 3914 - DNA, 282 bp, Arabidopsis thaliana
  Intron number 1 from transcript AT5G55970.2 (locus AT5G559 70) derived from phytozome v7.0 (chr-ID Chr5; pos 22667737 to 22668018)
gttgcagataaggtatttgattatattcctcagtgaagtttcatgtgtgttattcttttgttattgttgttgggtcatggaaatttcatgactttaattcttttttttctttcatgtgtgtttcatgatcatttcgtgtatatagttaaggttccatgtgtgtgtgctcataacttataaacctttgttgcagaatctcatttaattcttctctctatgcaatctttttttgtttgtttgtcctgtgaaggtctaaaatcttgaaggattcaaaaatttccg

SEQ ID NO: 3915 - DNA, 329 bp, Arabidopsis thaliana
  Intron number 1 from transcript AT5G56000.1 (locus AT5G560 00) derived from phytozome v7.0 (chr-ID Chr5; pos 22679651 to 22679979 reverse strand)
tcttcctccgtgaactcatcagtaactcctccgatgtacgatctctccctctctgtctttctatgtttatctttaagcttaatgtgtttgtgtatctccttcgattgatttgacggatctatgtgtagatttaggttttattagggtttagtgttcttttcgatttgagattttcgtttgttaattgatggaaccttttcatgttcaaatttgttagattacttagtttttgattgtatatatgttgtgtgtattttgttacttatgattgagctttttattctggtgaaacaggctttggacaagattaggttcgagtccttgacgga

SEQ ID NO: 3916 - DNA, 584 bp, Arabidopsis thaliana
  Intron number 1 from transcript AT5G56140.1 (locus AT5G561 40) derived from phytozome v7.0 (chr-ID Chr5; pos 22725618 to 22726201)
cgatcacagtcttctgtcttcgttgagcaagagaagtaatcgaatcttagtttttcatcttcttttatatttttgttttttattgtttggtgatcttttataattagctgatgtatctgatgaagtatgttgatctttgctttgctgattttgatttttagatcttaatagtgtatctcgaatctggatttttgtcttttttgttttcttttgattatattaggatctatgtttcggaactagctcagtctatttcagatttgtctcaatccagttcattttttgtaaagcataagtctttagtgtgtgaggatcatttcattggttgtgttcgtttctgttattgttgatttctgttcttggctgatgaaactgttaaaaaaaatacgatttttggaagattgactagatccacttcacaaaagaatggaaatttgaatctggttgtatcgatttagagtgaatttgagtgtatctgtttgtaagtttgatgtgtctttgaggcttttttactaatttggatactctgcacaatttctgttttggcaggtatctttcagagttacttgcagagcgtcataagc

SEQ ID NO: 3917 - DNA, 517 bp, Arabidopsis thaliana
  Intron number 1 from transcript AT5G56610.2 (locus AT5G566 10) derived from phytozome v7.0 (chr-ID Chr5; pos 22916952 to 22917468)
aggtttcttacttatttgttatttattcctgttaacttagtgctaatgggatttaaaggagataactttttagcattaggaatctgaattttgactagaatgttttgatccgaaagtggaggcaatgtgatgtttaaagatcagttttttcagactctttaaagtcagaattttttctgtctgtatagttatgcagtagactatcgaaattttgagctctttactaaaatctctgagtatcaatttggtagtgattttgagtctatgcagaaagtctgatacagaaagtctctatcttttcagtatcttttgatgggagcggttccatttcgtaaggatgttccgagactaaaaaagttaggtgttggtggggtaatcactcttaatgaaccttatgagactttggtaccatcttctttgtacagtgtaggttcaatgccaccaaacttgtgtttctaattttgttgtctacttgtggagtagtttgatgattgtaagttgtttttaggcttacgaa

SEQ ID NO: 3918 - DNA, 885 bp, Arabidopsis thaliana
  Intron number 2 from transcript AT5G56940.1 (locus AT5G569 40) derived from phytozome v7.0 (chr-ID Chr5; pos 23031122 to 23032006)
ggtctcaagttcgatcgaattaagtatgtttcttctcatctaattctctagtttcttatgtttttttcggtaaaatcaggtaggttttgggttgaatttactcagaaagaggtctctgaatgcttcactagatgattaaggcttttctgcatttgaagtgttttggttaattgctaaagttagcttctagccgcctctagatatcttaatgcattgttgtatagtcaacattgtgttatagttaactatctttcgatctgatacaaaggagctgagttcagtctttgaatggtttttgttatcgaaaggcgaatgaatctacatgtttcccatggttggttttgatcactttctttctcttcatggtattgaaccattagttgaagcaattttctacctcatttaatcactaacttatgaaaggaaaaactgaaatatttgtggaaattcatcaacaagttttgttatataacaaatgaaacttctccgccagtcttgagtctttctatggaacttctgctctgagttctggaattgtttcttattagtgtaagatgaagaacctgttgattatctattcgtatacacacttacttacattcttaattgttcaccatatacaacctcttttgcataattgtatggtcatgtagctttagaatcttgtcatgctctttatcatcatctaaaattaagattataatgtccggatattagaagaacacatgtcaagactacttaaaagttagatcctggtctgtctttcttttgttctgaatgactagtttcaacagaggatgcatatagtttgattaatggacattttgtttgattctcttgttctgtacaggtactggttatctgttggtgctcagccatcagacc

SEQ ID NO: 3919 - DNA, 401 bp, Arabidopsis thaliana
  Intron number 2 from transcript AT5G57090.1 (locus AT5G570 90) derived from phytozome v7.0 (chr-ID Chr5; pos 23101569 to 23101969)
gccgtgaacccctccaggtatgaatttttcactgatgacctttttcatatgtttgttcaaattaacggaccggttaactcaagtaaactagaaaatgggtagttactagttacgacatgactacatgtcattttgggattcctttttgcctatgtaaatctataacaaattttgagttttgtctgagttcctttttcagaagtcaaaaataatcttcaaagtgacgtgttacattattcacgcagaatttaataattagtacaatataagaaatatcaagttattaactatagtctagttgaattttcattctttttgtaccgattcggttatatccggtttaaatcacatcgactcgaaattcatcacctaaaaatatggatttatctttcattagaccg

SEQ ID NO: 3920 - DNA, 240 bp, Arabidopsis thaliana
  Intron number 2 from transcript AT5G57270.2 (locus AT5G572 70) derived from phytozome v7.0 (chr-ID Chr5; pos 23203143 to 23203382 reverse strand)
tttgcagtgaagcataattgctctcgtacgtgggggtgagtatctttctcaatcacaagaacaacgtgaatttcttttctcctttaaattaggttttcttttctttaaatccgttgattttgattcaccaaacgtgtgggagacttcgaattatactcccttgtttctcaagagtgttggtaagtgacaaagattcaagctttaatgttctttgattggaattttttcaggttttgctca

SEQ ID NO: 3921 - DNA, 494 bp, Arabidopsis thaliana
  Intron number 1 from transcript AT5G57290.2 (locus AT5G572 90) derived from phytozome v7.0 (chr-ID Chr5; pos 23207179 to 23207672 reverse strand)
tctctcttgtctctcctacctccgccgtcttcgtggtatctctcagtctcatctctttcatttctggatcgtgataaagttgtgtgtttactcgtagatagctagatcttatagatttagctcgaatctagtgatgcttgtgatcacttaattttgttgcgatcataatttgtttagctaactagttgtgatagaatcttcaattatgattccattggtgaagaagaatctgaaaatttgatttgtattttaatgtatattgttttttagctacattgtattgtgtgtgtcattttgctctaatctcattttcaatttggtgaagcatacatgatacttgtttcattgttgaattgtatgatgagttgttgaaatgaatgatacgaagcttaattattgaaatgtatgatacacatttatcgaaactcattttttctattgtttgtgttatatgagtaggtggtcattggtggtggtggtggtggaggatttgc

SEQ ID NO: 3922 - DNA, 497 bp, Arabidopsis thaliana
  Intron number 1 from transcript AT5G57290.3 (locus AT5G572 90) derived from phytozome v7.0 (chr-ID Chr5; pos 23207179 to 23207675 reverse strand)
ctttctctcttgtctctcctacctccgccgtcttcgtggtatctctcagtctcatctctttcatttctggatcgtgataaagttgtgtgtttactcgtagatagctagatcttatagatttagctcgaatctagtgatgcttgtgatcacttaattttgttgcgatcataatttgtttagctaactagttgtgatagaatcttcaattatgattccattggtgaagaagaatctgaaaatttgatttgtattttaatgtatattgttttttagctacattgtattgtgtgtgtcattttgctctaatctcattttcaatttggtgaagcatacatgatacttgtttcattgttgaattgtatgatgagttgttgaaatgaatgatacgaagcttaattattgaaatgtatgatacacatttatcgaaactcattttttctattgtttgtgttatatgagtaggtggtcattggtggtggtggtggtggaggatttgc

SEQ ID NO: 3923 - DNA, 444 bp, Arabidopsis thaliana
  Intron number 1 from transcript AT5G57330.1 (locus AT5G573 30) derived from phytozome v7.0 (chr-ID Chr5; pos 23218450 to 23218893)
tcgttctccgcgagtctcgcggccgctctgcagaggtaaattttcacgcggcgtcgtgctctatctctagttgatctgagatttagatcaatttgattggagatcgatttttgtagtatgattacgatttgcaaatctcttagatccttgggttttagctctagtgttattgagttctgtatttgtttatgcaatttgtgttaatggaagaaccggatctgcgtgtttatcttcgacgaagaatgtgtaaaattaatgtttagtgtaatctatgaatctgttgatgctttctcagaggtgaattgttttttttgaataattgatcatcttattagttattaagtgtgagctctctgcaaatttattgatctccatctttgtctgttctgtatcattacgttttttgtttaatttgagttggtgaacgaatgcaggtatacttgt

SEQ ID NO: 3924 - DNA, 877 bp, Arabidopsis thaliana
  Intron number 1 from transcript AT5G57360.2 (locus AT5G573 60) derived from phytozome v7.0 (chr-ID Chr5; pos 23241807 to 23242683)
gggtatcgtgctgaggaagttctcggaggaaattggttagttgtttttttgttatctttgtgattagtgttctaattgatgcgaggaatttctatttttggttattggctcactttaccaaattttggctacttggtggagtttgattaaggtccgtttagtttgaggataggtgaggaatgtttgtgatgatggtaatctgaaggacactctattgatcactagatttagtatggatggatactttggtggagagaaaacaaagatatgtctattgttagataatcattagagtctctgccaaatggcagagaagactcagtggagtctctgtgtgtgcctaagtattctctgccttcagatgtttattcagtgattgtagttttcatattaatcgagctctcatggctgtttttgagctgtttcagctgctccgcatgttaaggaaacttgaaagtgtatatagatgccgagataaagcgagctatccctgtgtagtttctcggggtcgtagcgaacacaataaattctttacaatgttgatgtgcagtgaaccagtgaaaaggctaagtccaatgcgtttagttgtgtgttagttttccatgagagaagtgctagtagcttcctttattaataagctttgatcttacaggaggagctgatcagttcaaatagttgttattcttgaacagaatgaaaatctggttaggttataattatgcttgtttggtgtatttgttttttttttcagtctctacatgcacggccaaatattttgtctattgcttttccgcatcagtaagttggagataaattttgtttttggtcttatattgtttcttaattaatttctcggattctgcagccgcttcttgca

SEQ ID NO: 3925 - DNA, 751 bp, Arabidopsis thaliana
  Intron number 1 from transcript AT5G57370.1 (locus AT5G573 70) derived from phytozome v7.0 (chr-ID Chr5; pos 23245436 to 23246186)
ttaaccgtcctctaccggccgagcgtaatcgctagtcttctcaaggttaggctttccactaagcttcccaagtttttgttctatcaattggaagataggtttagctcctatgtgtagtatgattaaattagataggacttagttcttagacttgttggctgcattagaaaatgaactcatcagcatcttttcagataatggattctaagtactcatcaggttcagcattttgctttctctatattactcacttgttttgcttctcaatctagttcactggtggttgtttagttagatctataccagagatctttgtttcaggtgatatcctcacaagctctatatacagatagttcactcggttagttttgttatctgcatgaagaactattttagttaatccagaggaaatggaaccagtcttgtgttttttagttttcttgccttggcacatttgaatctgcatcttacaagatcaagttgtgcgagttactgcgtaaaaccgatcattccacctatgtgctggtatttaccaataggtctcaactctcaacagctgaatttagaatttacttgcccttggatcatttactctgatgagattaagcagtttcggtttttctgattattaactagaatctttcgtgtctctgcatccagtttttgttttcgcattgatcgatttctgctcaccaacctttgaatatatcttgcaggtccctctaacgctgtcttgaacactagtcaaaaa

SEQ ID NO: 3926 - DNA, 709 bp, Arabidopsis thaliana
  Intron number 1 from transcript AT5G57870.1 (locus AT5G578 70) derived from phytozome v7.0 (chr-ID Chr5; pos 23439897 to 23440605)
gtggtgctcctgcttcctcttttcccttcaaggtaccctcatttctgggtcccctctctaaatttggatctaactccctcttcttcctctgatttagaatttgttttatctctcttgtcttagcttgagctaaaaatttatccttttttacgggtttgtcgcaatcagcagcctttttgtttggaattataatctttggtatattgctgatttgattctctcaaatgtctgaattggctaatatctttctgatttgcgagttttaatgctttgtgtttgtaataactactgagctcatgttggattttgataggtgtctgcaacatacataattgaacttcataggtttatatgtcaatacgagtaatgcaagcagtttgtttgtcctgattcttagtggcgcacgcaagtatgtgtttctgctgtaaatatggacgtataatgatatgtaggcttttaggtgggcattttgttagctgctatttgctcataaaggacctactgacatttcttctagtttttctttagttcatcactcatttcggccttatggttaaagaattattcctctctttcttttgtactgagtactcgtggttccttgtctcctttatacgttatttcttatatgattttgtgtattgggtgttagttaatgaagatttatcctgggttgtgcttttgtttcagggtggagactcgaggttcg

SEQ ID NO: 3927 - DNA, 693 bp, Arabidopsis thaliana
  Intron number 2 from transcript AT5G57890.1 (locus AT5G578 90) derived from phytozome v7.0 (chr-ID Chr5; pos 23448628 to 23449320 reverse strand)
ataattacgacagcttcacttacaatctctgccaggtttcatttcgaacacaatctcctatcatcactacctctgtgaatgtttttgaatcttttttggtgtaaaagcagctgcatttgcatttttattagaaatgtattcaggtatgtgcattgtgattgattgttagaatctcattgtttcacaatccaatctagtttctacatgctaatagatattagactacctagtgtagattctctcttgttaatgtgatcagagtcgttatgtcgaaatactctacttctctggagaattgtgtttttgttttatttggaaaagctcctcgttgcttgtttgcccttgtaacgagtaattgttagatccagcaaaacctaatacattacttcttttctgcctaaagactggtcttttaagtagaatctttattcgcgttcaaagtttgaattggtgattttgtgagttgctatgtttgactttagattggttattcgtagttgaaatatatcactttatcatgaaattttggctgctctgaatatcccacatagatcccaaatttacaatttgatcatgtcttacttctagttctctatgtaagcctatgaggtgcatactattaatttctcttgatgtggtttcttctgcttcagtataaacaaaattttgaattgtatatattttctacagtat

SEQ ID NO: 3928 - DNA, 323 bp, Arabidopsis thaliana
  Intron number 3 from transcript AT5G57960.1 (locus AT5G579 60) derived from phytozome v7.0 (chr-ID Chr5; pos 23465225 to 23465547 reverse strand)
aactttcaccagggtaatgtttctgtgtaacttttgtttttagtggaaacatatgctcttgaagtttcctaacacccaaagttataagtttaaaattttccatctatgtttcttctttctatatagtgtagcttgtctcggtcattcagctgaataatatctactaaagtagccatcggattgttggagtctgttggagtttcattactcttgtttgtttcaaaactagtttgtcgacttgtgaattgagtatgtgttacattttcttatttatatgttatatttcaggcaattgcgtaacctggaaaaggcctttggtgggg

SEQ ID NO: 3929 - DNA, 344 bp, Arabidopsis thaliana
  Intron number 1 from transcript AT5G58060.1 (locus AT5G580 60) derived from phytozome v7.0 (chr-ID Chr5; pos 23498435 to 23498778)
ccctccttcccaacgccagtctgttcaacacgaaggttcttctccttcttcttctacctctctagatcgattgttttcaaatcttctttctcccggatctaatgcaatctcctttcctctttgatttttattcgatttctaaattcggatcggcttttcgattttgaaacttttatgatttaggatgtgcaccgtttctgattctagatcttcctggactatgccccggctttaatttcttgcgattctatcttattgttctagtcctcgaatttgggataattagggttcgtgtttttattttgtttttggtttagagtacaaggttcacgcttacaatagaa

SEQ ID NO: 3930 - DNA, 786 bp, Arabidopsis thaliana
  Intron number 1 from transcript AT5G58300.1 (locus AT5G583 00) derived from phytozome v7.0 (chr-ID Chr5; pos 23572035 to 23572820)
tttcttacttcgctagcttacctctctactcccaggttctctttctctcttcttcttctttttggtttttgtatttttccttttaactttctgtaattgtctgtctctcattgttgggaattatacttaaaaatcgccattttctccggctaggtgggtaggaaactttcaagactttagatacaggctagtgacgtggtatattagttccaattcgctggctacacgttgtttgttcaacaactccgataaaaatcagacactcaaaactcatctttatttacttagtgacattgtccacatgatggacagacctctgcttctttctctagtgacaatatcttttggcaaaaggagtctgcttttctttgctcatcaaagttttgtgttaaagtttggctctttagctttattccttttgcttttttttttgtgctggatgcttcaatctcttatcttagcctcttggattgtttaatctcccaatgataaagataaagataggcaatggcatactttttcttgaagatctaactagtatctttatttgttttttcttcccatctgtagttttttatataactgatatgcttttttctttcacaaccgaatattagttatcaactttcaatgttgtgatccaataaatgaagcttgcttggccagttccttagagatacctgattagcttagctttccttgctgctgcatactggcttgtgtagtggaagtcattgcttatcatcttctgcttttcttttggagcagggtcaagaagtcaagctg

SEQ ID NO: 3931 - DNA, 573 bp, Arabidopsis thaliana
  Intron number 1 from transcript AT5G58700.1 (locus AT5G587 00) derived from phytozome v7.0 (chr-ID Chr5; pos 23715187 to 23715759 reverse strand)
tttctactgatcttaatcctcctatcgccgatcaggtttataaatttttcaagtcaaactcttttttttttttttgttcctgggaagaaaagtctgagactttttggaatctgggatttgatggtgtttgtttcttgataaagattgagattgaaagattacgactttagattcttctctctgttggttttaccggaaaatctcagaatgttttctctctcatcgctatttgactcttttctctttttgctattttctggcctaaatttagtttgatcaaagagaaaataaaaatcatcacttttggtagcttcttcttaatgcttatgaataattcatcaaatcccaataaaagggtgaaacttttctcgatgatatgttcttggtgtgtactctgcagctgctgctgaaattctggaatctgactgtttgattaacctgtctaaatttagaagtttctattttggatactttctattctagtagttgcttacttctgcagagagaagattctcaattcttcagtgatataactaaaacattgttggttgtttatttcaggtccatcaaaac

SEQ ID NO: 3932 - DNA, 652 bp, Arabidopsis thaliana
  Intron number 1 from transcript AT5G58730.1 (locus AT5G587 30) derived from phytozome v7.0 (chr-ID Chr5; pos 23723794 to 23724445 reverse strand)
cttcaggtttgttttttggtctcgtattagcttactgaattgcatgctgtgagagatttgcaaatctaatagacagtagtaagaacttttagagccgatgatagtgatatgcaaatgtctttaacataatcctagcaaaagaactctgttacatcttgcagcttactttcaatacagccaaacctatatcttgcgggtgaactagaatctgtatttgatgttgataggtttccaatctgaaaatgtgtcaaatcttcacagttgttgtttgagattctgtcgagtcacagctgctgagagagtcttttcttgttttacttcattgttaatctaggagcagtttcattcaacatagggtagatgcaggaaaaagtgttgtttaagcattcaccgaacaatgtggttaagcaattagagaattcaaaagtatggatctcttgatgtatttgcgagtgtttctgtgtatctcttgtagttgtatctgttgaaatgagggcgttattggataataattgaaccattggctagtgcaagtgaacattaagcaaattagaagatttatagcgtttgtgtttgcactgcacaaggattcatccctttcatcggttatttctatgtgacatatgtctttgtgatttgcagaaagtcaagg

SEQ ID NO: 3933 - DNA, 571 bp, Arabidopsis thaliana
  Intron number 1 from transcript AT5G58900.1 (locus AT5G589 00) derived from phytozome v7.0 (chr-ID Chr5; pos 23783686 to 23784256 reverse strand)
aagaaaggcgttccttggacggaggaagaacacaagtaagtctctgtttcttcttttacacaaaaaagaaagaaaaaatctctgttcttttccggtttattgggaattgacattaaaccggaattagatggttttataccggaatggtgaaatttaaatctacttaaaaatcagctcagtcagtggtgaaattgacataaatgttggtcactaatcatgcaaggtagtaaaatagttaaacataaatcagtgacatgattgattggaaaaatatccaatatttaaattactagttaatgacaatttgatagtataaatgtataacactgtggttgtatataactttatgaaaatatcttagattagatatttctcacaatcgggctatttctaatttgtttgaacaaatgcattgcataatcgtagtatgatttatgcaacactgtttagctgcaaaatcttgcctaatcacatatataacgcatcaaacctacaaagaacaatttatttgggtcaagattgtatgtagatatatttgattccatatttgtcacaattcaggctatttcta

SEQ ID NO: 3934 - DNA, 406 bp, Arabidopsis thaliana
  Intron number 1 from transcript AT5G58970.2 (locus AT5G589 70) derived from phytozome v7.0 (chr-ID Chr5; pos 23810567 to 23810972 reverse strand)
tcatttgcagcgctttcgctgcttgttttgctgaggtatctctctttagtgcgagatgagattattattcctcttttgggtttttgttcatttttcatttgagtctgtcaatattcttaaattcgatcaatcactgtcactggtgaacaatccagagaaatgctatcttagatttaccgttattctactgaatcttcgaaattgagctttagaagctaatctatgatggtctagtctacgactttaaagtccattacttgtgattttttgtgatacttattgaaatgagcttacatagactctatagatttagtgtttacgaaatttgagttttcgtgtgttatgtgtttgttgtattagtctttagtcaaattctaattcatggtttatgagtgatgttgtagtt

SEQ ID NO: 3935 - DNA, 593 bp, Arabidopsis thaliana
  Intron number 2 from transcript AT5G59000.1 (locus AT5G590 00) derived from phytozome v7.0 (chr-ID Chr5; pos 23819206 to 23819798)
tgtgctgagacttggtttaagatcaaaggaaacatgtaagtttctcttcaagactacttttgttttttttctgcaaaattctacagattctgtgagaaccaaagtagtaaagaatgaaactttataaggaaaaaatgtatttcctttttatgtactttgagtcttttttcttgtctgaattctagagatccatatcattacttcttagaaagattgtctgctgaagctggaatctacagtttttgttttgtggccatcaattgttgtctacttgtgtctcatgttcttatgttcctgcacatttttggatatttattgtttgtagtctcaattaaagccagtttctgtgatttgcctcaaaacattcagtttcaaaggcttgattttgcagctgcattgagagaatcttgcagtcccttttgctgagaaagtttgatttttaccaatcaagattgtactcatagctctgtttagcttctgtttctgtgtctttgcattttcctagcttcttatatgtttacaagatgaagcaagtcccctaagatttttactgactagcatttatcatattgttgtatgaatctgagcaggac

SEQ ID NO: 3936 - DNA, 645 bp, Arabidopsis thaliana
  Intron number 1 from transcript AT5G59070.1 (locus AT5G590 70) derived from phytozome v7.0 (chr-ID Chr5; pos 23845688 to 23846332)
atcttgatcaagcttctgtctcgcaacagcttcaggtaaacagaaaattcaaatggttgctgcgattgaccgcgtttgctggttttgacgctgctattttgcgttttctccggttggcgtttaagtgcatctgcggaaaatttgttttaattagtttagtttagattaacttaagaaatggcgaaattctacacatatttaatttagattaacttaagattaaaattatgttggttttattaatatacacactttaatatttttcaacttttttttttgcaacacaaaagttgattttgttaattagtatttataaatcataaattttaaaatgttataattaaatatatcaaattactgttataattattaaaaagtatttattattgaaataatcaaataataataattattaatatatttacaatctttataaaattattattttaggaacagaggaattactaaattttggttaccaaaagttttagtcaaccgctgactaacggctttgactaggcaaaggctcataattagtcaatggtcagtgtctggattttagttgaagaaacggaatttaactaacgcaattttcctccggaaatcgcagacgcagaacgctagtggaagaccgtttgacgtaat

SEQ ID NO: 3937 - DNA, 354 bp, Arabidopsis thaliana
  Intron number 3 from transcript AT5G59130.2 (locus AT5G591 30) derived from phytozome v7.0 (chr-ID Chr5; pos 23872918 to 23873271 reverse strand)
ccgactcaccgagtcagaacgagaacgagtagccggtgagtgttcttccacacataaatagtctttaacgatgaacaaacttgcttgtatttacttttagtgtgtatcttttcaagtgatccatatatcatctgaagccatatttatgttagttttcaacgtaaatatcatacacaaacggaagcaagtgtttgcatttgcatcttcaaaactaatttcatgaaaatgtgcatgaaactcttttttatttaaatgatttagaacctctttgatttttttaacatgtaaacatgaaacaaaaagaaattgactcgatcggtgaagcctaaaacccttcctgttatattgttagat

SEQ ID NO: 3938 - DNA, 399 bp, Arabidopsis thaliana
  Intron number 3 from transcript AT5G59130.1 (locus AT5G591 30) derived from phytozome v7.0 (chr-ID Chr5; pos 23872873 to 23873271 reverse strand)
ccgactcaccgagtcagaacgagaacgagtagccggtgagtgttcttccacacataaatagtctttaacgatgaacaaacttgcttgtatttacttttagtgtgtatcttttcaagtgatccatatatcatctgaagccatatttatgttagttttcaacgtaaatatcatacacaaacggaagcaagtgtttgcatttgcatcttcaaaactaatttcatgaaaatgtgcatgaaactcttttttatttaaatgatttagaacctctttgatttttttaacatgtaaacatgaaacaaaaagaaattgactcgatcggtgaagcctaaaacccttcctgttatattgttagatatggagggagttgtttctgtgtttccaaacaagaaattaaaactc

SEQ ID NO: 3939 - DNA, 797 bp, Arabidopsis thaliana
  Intron number 2 from transcript AT5G59150.1 (locus AT5G591 50) derived from phytozome v7.0 (chr-ID Chr5; pos 23876988 to 23877784)
ctattggtgttgaattcgccaccagaactcttcaggtgatttctaattttgtagctttttttttcctttactttgggagaatgagcagaaaggatagtcttaaattcacaagtggtaatattcagagaaatttgaacaagtatcttgttttctgaatgcgtctgtgatcttgacatatgtcaatttcaagctatttcttcatttttaacgtgatctctatcttaggatctaagatttgtgccttttggttggctagctgcttcatgatctcatatttaggtcaacgatagttcatttgatgcagttgtgttcttatttttactcttcttacttgtaaagttgcatcctttacatatcctttttggtcagtctaaggaacatgcttatgttaggtaccatgtaagtgaaatgatcctgtggtgtcttgcgcattgaatagttttaactttttaaactattccgtgcattgttctctcatctttttgaatttggttttttattgcttagagattttaatatcaagagagaatcttagaatgtgctggccatgagtcatgaggaattgcttttgtatagatggtggagaaacccaatggacaaaaagcttcccacaacttgtccctaattatgattttttttccttatcattaaagtcaactctccatccctggagaagtcaacgcatcaaaacattaacataatcagctgatgtattgaaaaatgttgatggcttaactattactttttgtgtgttttatgtttatacaggttgaaggaaagactgttaaggcccagat

SEQ ID NO: 3940 - DNA, 479 bp, Arabidopsis thaliana
  Intron number 1 from transcript AT5G59380.1 (locus AT5G593 80) derived from phytozome v7.0 (chr-ID Chr5; pos 23952595 to 23953073)
gaacttccggtgccacagctggttcggtggataaggtaaagaatctcagcttgactctgcttttctctatgaagttttgagctgcgttgttgcttgaagactacaaattgaggattctttgattgctgttgttttgttctctttggtttaaaaatcttgcctttaaagtagtgacaagtgtaatgatgtagtaaaatgatgtggttggttctgcttaagcattaatgagtttgtttagattatgttaatggtgtattgggacttgaatcatacactttatcagtgtgattagtgttactttgatttatcaggtggatttagatggtttggtttggtatatattgtgattgaagagatgaagttttggtgttgttatactcgatgctaatatgggtgtagatattgatgtgtagacttgtgacattttcttatctggttttgcagtactattacgaaccaaatacaggacgtaagtttcg

SEQ ID NO: 3941 - DNA, 577 bp, Arabidopsis thaliana
  Intron number 1 from transcript AT5G59890.1 (locus AT5G598 90) derived from phytozome v7.0 (chr-ID Chr5; pos 24122516 to 24123092)
gaaattgtctctgacaccgttttgattcagccgtgatactacattttcacttcttcttgttctctttttgtttatttcagttcttcaatttttaggctcgattctcgatttttgctttcgtctcggattttgaataacgattttggctcactagatctggtatatggatttgttttctccgatttagatctttgagattttgtgttgatgtgatcagagttagtgatccacttgtgcttcgtaagttagaatcgaaatcatgaaggaatctgctaattttgtgtgtgtgctttcgaagtttcattaactattgaacgtttctacgaccttattcgattgtttgatccatcaggcttgttgtgtgttgaagttgcaattgaagtctaaatcgttgctagagatgtattaacgagtttatgtgtgagctattctagttttagaggtttcaggaaatttctaagattcctaaataagagattcttggcttttagtattgtgtggattcaattataggctagctttgtgggatctgggatgtgaatcttagtgcttctgttgttttattgaaatcaggcta

SEQ ID NO: 3942 - DNA, 297 bp, Arabidopsis thaliana
  Intron number 1 from transcript AT5G60010.1 (locus AT5G600 10) derived from phytozome v7.0 (chr-ID Chr5; pos 24160875 to 24161171)
caagttgcctaaagagaaattcggcgtctgcattggtaactaacaaaaatactaatatttattacgtacggttccgaagattatcctttagatccacttccatttggtattcgtagtgattttgatctagaacgaaaacttaaatatttcgtttttttttgtatacaataattctttttatattgtatgtttattatcagagatgcatgtgaagcctaaaaaataattcaggacgaaaagaaaattcattgtttgtttaggacgaaaatttaacatggatggtatatataactagga

SEQ ID NO: 3943 - DNA, 701 bp, Arabidopsis thaliana
  Intron number 2 from transcript AT5G60470.1 (locus AT5G604 70) derived from phytozome v7.0 (chr-ID Chr5; pos 24321305 to 24322005)
tgattgtggtactcttttctccaggtcattactactctttctacgtcttcgtctgcagcattatcgtttgccttaacatgttcatatatcaaacatttttaaaaattgtaacaacggaaaaaacgttttcaaatcttcaggtttgcatttatttgaagtgtttgataaaaatataaatataaacgtaaaacacaaaacatatttgaattatatttgaaacaaaccgggtcttataattggacatcgaaacagatgcatgcatacataaaagcatgatattgcctatgctagaaaaataaaaagttattgagtttactttatgtatagcgagtacgttggtctttggctcgtagcttgtcatttggataccactaccgttaattatttcttggcttctctgtgtcttggtccagtttgtagttttatagagacaccaatatcgaggagaaaaaaggctgcatgactaggacatgatgtggtcatgtctccatagccttgagtcttttttttttcaccttactacacatatcgattataagcttgcatcgaataaagagttgcatatataccatatacaagaagacctattttaatttaatttatatgttaccaattagcctatattaacatagttactttattgaatgatttggttgattgtaccaggaaggacagtttcatctcacatagatccttctgtg

SEQ ID NO: 3944 - DNA, 547 bp, Arabidopsis thaliana
  Intron number 1 from transcript AT5G60540.1 (locus AT5G605 40) derived from phytozome v7.0 (chr-ID Chr5; pos 24337948 to 24338494 reverse strand)
gccaaactcgccgagtatcataacttggtccgctcctctctctctagaatctaaagttattgtttgcgaggacccacttgaagaaactagttaaaggttccttttttatgtgtgttttgacacgaatctggcgttattcaccaaaattctccagaatttcagtcaaaacgtctcttatacctgaataattcagttagtactgttgaaagtaattagctttgagattgaaaatgaaggaactttgggattagttagccttcaagtacatgaagtaatgttttgtatctgaaacctttaaacattgtggaccaaactactcgttgatcttatggatgatattttctgtctttaatggaagctgtgataagtgtaggaaagggagagctatcatttacttttatctttaccaaactccttgtttagatttggttgtttttacagttttagtggtgaggacgaagaatagtgtaaaatgtctcttctctgttctaattttctttcatttgttgctcttttgaagtttccggctctacgtgagtttgttaag

SEQ ID NO: 3945 - DNA, 422 bp, Arabidopsis thaliana
  Intron number 2 from transcript AT5G60750.1 (locus AT5G607 50) derived from phytozome v7.0 (chr-ID Chr5; pos 24431671 to 24432092)
cagataaaacagattggaaggcaacttttcaaaaggtaaagatctatggacgttactggatacttgtacagttgaagaagaactaccttctgtctctgttttagtctgacaaaccggttttgatattagggtctagactctagaggttaggactgcagcagaatcttatatttgtcaataaactgttatgtatatatccattatccactctttgtttttttttgtttactagtgaaaaataagaatttgaggtttcttttgatctggaaatgtgccatacaaattgatgaggctttctatttactaaatgtgatggcaaaaatgcaaataaggaaactctcacaaaggcttatcgatcttgtgttcaacctattattattgggtctaaaaagcactttgtttcgttggttttcaggctgcag

SEQ ID NO: 3946 - DNA, 300 bp, Arabidopsis thaliana
  Intron number 1 from transcript AT5G60970.1 (locus AT5G609 70) derived from phytozome v7.0 (chr-ID Chr5; pos 24536673 to 24536972 reverse strand)
gaaataggactcaagcttaccagtattcaatcaacgtaagaacatataaccttcaacatgtttgaatttcaaattcttatgagctttcttttctttgatgcaaactcaagaaagagatattattgctttgttttcatgtgaatctcgctccaaaaacatatttaaaatcaacaatttcattcaattgaaagctaacaacaactaattcttgtcttcttgatttattttctattaaattggtcaatttattcccttcttgtttcagatctgttctttacaccaaattgagtactgaagatc

SEQ ID NO: 3947 - DNA, 531 bp, Arabidopsis thaliana
  Intron number 1 from transcript AT5G61060.2 (locus AT5G610 60) derived from phytozome v7.0 (chr-ID Chr5; pos 24570219 to 24570749 reverse strand)
tgggagaagcttcagctcgccggagtttctcaaaggttcatactttctctcttcttcgtgcggctttgttgtttgtttgataatataagccctagaaaatgctcaaatttagtcaaattgggtactttctgatcctgtcagctgagaaactggtctcaatttgttcttccttgttcggtatgaaatttacttttctcaatttgaattgtgcatttcatagaatcaaaaggtttgtatgctgctcaattttaacggtaacccttcataaatttgctaccttttcgttatgttcggtcttgtgttcgagttatttcctccatgtctgttttataaccctctctgatatcaattttatatttttcatatttgtttgaatttcactcataacattattaattagagtaatgtggcagcacattagttagggaaggtggaatctagtctttgaggtgtgtatccatcacgatttgtttttcgattcggatgaattggcctgctatgtattgacgatcttggtcttttcttttgcag

SEQ ID NO: 3948 - DNA, 383 bp, Arabidopsis thaliana
  Intron number 1 from transcript AT5G61070.1 (locus AT5G610 70) derived from phytozome v7.0 (chr-ID Chr5; pos 24573723 to 24574105 reverse strand)
tgggagaagcttcagctcgccggagtcactcaaaggttcatactttcctcttctcgtgcgcctttgttgtcttttttgggcgataaagccctagaaaaggctgaaattttaggctaattgggtgttttgatgattatctcctctgagaaaacaggtctcgttttgtttttccttatttgacttgacgtttgactttctcaatctgaattgtgtaattcatagattggaaagattctgctgattttatcctatataggtgtttcctagcttggttaactgtttctttatcctatataggtgtttcctagcttggttaactgtttcgttatcctatataggtgtttcataaattgttaacaatgttggtctttccttttttgcag

SEQ ID NO: 3949 - DNA, 632 bp, Arabidopsis thaliana
  Intron number 1 from transcript AT5G61120.1 (locus AT5G611 20) derived from phytozome v7.0 (chr-ID Chr5; pos 24585043 to 24585674 reverse strand)
ggacttcattcggcaagaagcattaccgtagtgtatgttgaagctccatctctgtttttttctttcatcgtctgctctgttttcgtagctttcttcttgtttttttttataccatgtttgctactttggttccgtaattcacaagcaagggtgtttcagatccttagctggggattttgtgaaagtttggttcttcattggaagagctgattttcgggtgtaccatctgcattttggtatcacgcgttttgtactgtactcaaaatggggttttggagctgtgtagggtttttaatttagggtttccattttcggaactttttattaacttgcaatttcaatgagaatccttggctttcgcagcttcggtgattacttgttttcgattgtttttattattggaggttgctaatgtctttaatgaagtgtaaatgggagattagtgttgaaagatgttctttttgacttaagttctggcttgatcaagtcgatcatggaattttctttgatttgagttgcaatcatgttcgcatcactgtcttgttcaactatttttctttttgatttccctgaggattgattttttgttctgacctttcctctcttatttttgaagtcggatttgatttaag

SEQ ID NO: 3950 - DNA, 180 bp, Arabidopsis thaliana
  Intron number 2 from transcript AT5G61390.1 (locus AT5G613 90) derived from phytozome v7.0 (chr-ID Chr5; pos 24680101 to 24680280 reverse strand)
aaggtaacaattttgctctctggtcctgacttgtttattgttttgagatggtttcttctcgtatactcaaagagtcatgattgatattcatctgtgtattttgaatttgcttgatggaattcgaatttggcggttttgatggttccttattctgttttcctgtggcctttgtttgaacag

SEQ ID NO: 3951 - DNA, 542 bp, Arabidopsis thaliana
  Intron number 1 from transcript AT5G61780.1 (locus AT5G617 80) derived from phytozome v7.0 (chr-ID Chr5; pos 24821470 to 24822011)
cagatctagtttttaccaataacggataaattcaggtatgttcatcatcgtagatctatctctgtctattgattcaaattggatgtatttagattcaatcctgatctgatcttttggctttttgcgatcgcaagttttgattggtgagaattcgtttttttctagctcgatcgaactctgtagtgtagatcgagacgaatgtagagtttcgtgattcgtttttggttatatgatgttatgttttaattgatgcatgtgagttttttttgttttttttttgtgtgtgtgttgtgattcattgatctgtgagaaaagttttctgaatcatggttgtgtttattgatttgttggagtatgaatcatagaagaaccaatgcaatcattttgaaaaggaaaacaaccttttttaaaaaactttattctcatttcgcgagtgtttttagtgattgtggtaagtgggtaacctttttgatgttaggattactattgtttgatgttttttttttcattgtttatcgtgcaggtcttagccaatcaccaac

SEQ ID NO: 3952 - DNA, 482 bp, Arabidopsis thaliana
  Intron number 3 from transcript AT5G62050.1 (locus AT5G620 50) derived from phytozome v7.0 (chr-ID Chr5; pos 24925558 to 24926039 reverse strand)
aaagacacaaccaagttagcggtatgtgtctcccttttgtccctttttcacaccttgcagatcatttaggatggtgcatatataaagtaatttcaaatatagagactgactgtagttagagaattagacatgcttctttcggttataaaaatatgaatatgttatatgtagactttgatctctgtatagaataggaagttgagatccacatcactgtagtcaataacacaagtctacataaatcataaactactgcaaaggatgtatttgtgaacttcatgaaaaaatttctactttccaaccgttacagtttcttcttgctttttgtgtttttacatactcaggttgtgaaacaaatttgacatacaaaaggaaagcaatgtctatgcacattaacttataacttctgtcatttatacttggttatttttttctgccttatgctacatccatcagtagtctattctgtgatcatgcagctg

SEQ ID NO: 3953 - DNA, 778 bp, Arabidopsis thaliana
  Intron number 1 from transcript AT5G62120.1 (locus AT5G621 20) derived from phytozome v7.0 (chr-ID Chr5; pos 24947324 to 24948101 reverse strand)
aagaatttgggaatttgcctgttattggtatgtgcaatttttttccacttatttgacaattacttattcttcttccctttttttaaattaatttaaaatatcatagtataatattgctgtaaaagaaaaattcctatataaacaaggataagtgatgagcggtgacagattaaacaggataactattggtcattgttatttttaattaaaaagggaagtaatgagtgttgacacagaaatcgaataaaatttattcttgtaattatgattggatatttagtatgaaaccttattagttaaaaatgacctgtcttttaaaaatattagcaaatattgcctagaagcaaaatgagaattcgttttttcctattaaatgttgacctgtaataaaacgggtaatatcttaaaaggaataaaaaatttctcattccatattctgtttttagattaaaaattacagctaagcagtggtattctagtctttagagtataattgtcactcttatcacatagataaaatgatataagaaaaatcttgtgaagaaaatttgagtttttcaagcaagaagaatccaagaggtcagtgtcgtagaagaagaaaataacactagctagaagcaaaaaacaaaagaattctttatgcaatgttattctaattaagattcttaactgatgttaacgatagtttttttccgattttgtttgtgtgtgtttttgaatgattatgactgtgatatcagcagatctatacaggaacattgagcacgaggagttgttt

SEQ ID NO: 3954 - DNA, 998 bp, Arabidopsis thaliana
  Intron number 1 from transcript AT5G62130.1 (locus AT5G621 30) derived from phytozome v7.0 (chr-ID Chr5; pos 24951858 to 24952855 reverse strand)
gaagctagtgaaggagattctgattctctttacaagtaaaaagtcttctcctttctccttttctaagatcgcttctttcaattcacggctcttctctgctttattcatatctttggagaagtaaaaatacaaactttatttcttaattagctttctgttattgcttactgacattataaatgctgagctatgttttgatttaactgtcagagtcgaccgttagattcattgattgcataactctggcagttgattctcaaattctcggtttagctttaatgatctttctgttttaggatacaagttcagatttttttacttgtaaggtatggattgagtttcacaggtttggtggaaatttagagccactaacaaaggagtgactcaagtaggaggagcttattagaactatgtggttgacttttccaaatgaatttctttagtcttgtgtgtggtgagagttgggacacgttagagatgagatctttgtgtgtttccacaagcccttcattttcactgtagtagggtcattgcttttgttggaaagattataaaggcaaaaaactagatagggacttatgctgcaagtggcttttgaggagttaggtgtttcttttttgttgggtggaagcttgtctttctctctgtctctctgttgtttgctttgtaggccatctaaacagcttaatctatcttgagcctaattagaaatgaaaaagctcagaaatttgtttcaaggcagcttactacgatttagctagaccggttgatgttgcattagagacagggtttgttgtaataaggtcttatgggtgtgtgttagtgtaatgctacatagcgtggcaaaggtttagttcgagaaattagttggatgttagtgtcatagagtggctatggttaaagttttgttgttagagtatcctcggttgctttatacttttggcttttgctgagtttaagaagagactagtgttaatgtgctaattggtttccaggtc

SEQ ID NO: 3955 - DNA, 324 bp, Arabidopsis thaliana
  Intron number 1 from transcript AT5G62470.2 (locus AT5G624 70) derived from phytozome v7.0 (chr-ID Chr5; pos 25080437 to 25080760 reverse strand)
tcctggaaactggagatctgtcccaacacacacaggtttgttttgtttcttaatcaaattaactaattaatagattaattaaacttttgatccacctcttaaaccctttttatgtatttatcttgaaagtgtactaggggttgtgatttcttctcttttttatttctttctctggcttggttggtatgaacatttaataaaagtgtaataaatagctaataagttatgtcaccgactctttcgtccacatatctctaattaccatttaatccctttttccttgagttaattgttttgttaatatggtgttttaggtttgagaag

SEQ ID NO: 3956 - DNA, 320 bp, Arabidopsis thaliana
  Intron number 1 from transcript AT5G62470.1 (locus AT5G624 70) derived from phytozome v7.0 (chr-ID Chr5; pos 25080437 to 25080756 reverse strand)
ggaaactggagatctgtcccaacacacacaggtttgttttgtttcttaatcaaattaactaattaatagattaattaaacttttgatccacctcttaaaccctttttatgtatttatcttgaaagtgtactaggggttgtgatttcttctcttttttatttctttctctggcttggttggtatgaacatttaataaaagtgtaataaatagctaataagttatgtcaccgactctttcgtccacatatctctaattaccatttaatccctttttccttgagttaattgttttgttaatatggtgttttaggtttgagaag

SEQ ID NO: 3957 - DNA, 578 bp, Arabidopsis thaliana
  Intron number 1 from transcript AT5G62570.1 (locus AT5G625 70) derived from phytozome v7.0 (chr-ID Chr5; pos 25114410 to 25114987)
ggctcatccgaagacaagcgtagaagattcaaaaggtataaattttgtttcagcttctagggtttacgatgttgttgtagcttgaatcagtcttcgatagttcgattcattcaattgggtttatgtattagctaataaggatgaattcgagtctaaaagttgtgatctatatgttggaacaagtataaatagtgaagtgatcgtttcgttaggataaaattgagcttctatgattaggttttgacacgattttctatagcttgcggagttctttagatgatcactgtcttgtcgtggaattaataaaaaggtttagttttgtttataatcaaagagtgatacttcttgggaagataaaattctattgacacacaaaagtactcatactagatagtatgacaccacgtagtcaccatggttggattccttaataagaagctttatttgtttttcccagtcacttactgttgacaaatcaacaatgtttatgaagttcagattttctaaattgatttttagtgttaatgagaattcctacatatgactttggatcaaaatttagtgtggttcaggaggta

SEQ ID NO: 3958 - DNA, 384 bp, Arabidopsis thaliana
  Intron number 1 from transcript AT5G62680.1 (locus AT5G626 80) derived from phytozome v7.0 (chr-ID Chr5; pos 25167289 to 25167672 reverse strand)
ccctttattattggtaacactaatttgatcatttgcttttcttttttgtgtccaagaagctgttttttctgttggtttcatgaagtttgggaatatccagaaaaactgtttaaaaaataaatctataagaaaaacataagtcttgctcgaagacttgtttctctgagcaaggagagttttgttagattctctgtgttgtctgaaagtttgacttagtcaacggtaatttaagacaaaaaagagtgagatgtcgaattttgtctaagattttagaacatatttggtcaacgatcaataagaaagtagaaacacaaatttcatctagttcttgattcttggtatggtgtctgattatgatcttgtacatgttgttgttatcaggaa

SEQ ID NO: 3959 - DNA, 568 bp, Arabidopsis thaliana
  Intron number 2 from transcript AT5G62690.1 (locus AT5G626 90) derived from phytozome v7.0 (chr-ID Chr5; pos 25182277 to 25182844)
ttgcttcaggactctcaaactcactacccccagctgtaagatttcatttcccaattatgctctccaccaatgttaagatgagttaaactatgcttgaaatgcttggtctacatggtgtttatgttaataattggtatcaagttcagatctgcaagcatctatgtaaagcttatagtattgttactgtttccattggtttgctctttgactatgtcactgttttatatcagaattctgatttgcaagtctctgtgcagaacttatacttttgttactgtttccagtcgttttgtacatatctttagcctcttgttttgtgtgatattgcttctgtttacctattttgatctcatcaccgaagtaggtccttaaactactcttattggaacaatactttctggttaagttgcaagtagaaatctgatacttgatgatcatcagtttgttgagtttactgtctgctttgattcttttctcatcgtactgtttggatatgtctaaagcttacacatacttggattttcttctgtgtgcagttggtgatttgaaccacttgatttctgctact

SEQ ID NO: 3960 - DNA, 356 bp, Arabidopsis thaliana
  Intron number 1 from transcript AT5G62840.1 (locus AT5G628 40) derived from phytozome v7.0 (chr-ID Chr5; pos 25229110 to 25229465 reverse strand)
ccgcctctccggctctctaatcggtaatttactttttcaaaaccctagttttgagtttctgtgcatacaaccagatgtgcatcaatgtatacgtatcttcgtccttttgattggaactaagtttaaaggatcttgtaaagctttagtagattagtgagattccaaattcttcacattgaactgttaagagtgaatctctgacttttaacattttgattcttgttcttgattcgtttccggagttatttagcctggttatcttagaaaatggagctaataatacacaatgtgtttttggttgttgttttttcttggatcaagttattaccttgtgagagctggggaatcagattacg

SEQ ID NO: 3961 - DNA, 599 bp, Arabidopsis thaliana
  Intron number 1 from transcript AT5G62960.1 (locus AT5G629 60) derived from phytozome v7.0 (chr-ID Chr5; pos 25269820 to 25270418)
gacctaccatcttcttctactacacacagtatgctttctctctttctttttagatttcatttttggaaaaaattgatacttttcttgaatcgtttagtggggtgattaaagactttgtaggttcttgataatgttattttgtttttgttttggtttagggtcttagaaacgttttgtatataattgaagatttttggaggttcaaaagcatagattcaagagtgtgatattcttggtttagaaaaaattaaaacttttcttgaattttgaattgggaaattgaagattttgcaggtccactagcatagatagtagatacattcttgattaagagtcaaattctcacattctttgttcaagatttctggtgggttttagaaacattattgaatcaagtagtgggagattaaagttttttcagctttaccaagcatataggggcaagaatgtgacattctgataatgatatagggtagcaactattctttaatccaatctttagactagtttctctctaactgtctctaatgtttttttccttgtctctgttgttttgatttgcaggtggacttttggtctgatcactctctatttcggag

SEQ ID NO: 3962 - DNA, 445 bp, Arabidopsis thaliana
  Intron number 1 from transcript AT5G63110.1 (locus AT5G631 10) derived from phytozome v7.0 (chr-ID Chr5; pos 25317249 to 25317693 reverse strand)
tttaaggtaaatgctccattccttctttatgatctcatcatagagaacttcttcatgttcttctgaaatttttagggtttaagcttatcttgagtggtttttcttaaatctacctgaaaccttgaagccttgtgtgattatcgaatgagctttgatcctttcatgttcctaaactgcatattacctttagaatctcatgttaggtcaagtgcatcaggtgtttctgataaggatgttgatttgtttgagaatggttttctacattgcctctttgttttcatcgtctggttctttaagtttctctaattaggattccgttgctttgttaatgtattctgatagcatcattcaaaatgttgattgagtgtggaacgatgtttccattgcttacatcttaatgctttcatcaaattttgtttgcagcgggttctctacatagatattg

SEQ ID NO: 3963 - DNA, 491 bp, Arabidopsis thaliana
  Intron number 1 from transcript AT5G63400.2 (locus AT5G634 00) derived from phytozome v7.0 (chr-ID Chr5; pos 25394244 to 25394734 reverse strand)
ttctcagaagcccgacaaacgcctcatcttcattggtaatctcactaaatcggtcctctttttttatttctcggatacgactaaattcgcacacgcttcgttttagtatcgttggatccagaattttcattgttttatgtgttcaatttactgtatttatggtgaaaatcgaaacttttgggtgcgtcattttagatctgagaggttgtatcagtgagcttgaacttgagttgtgtttcgtattattggaatttataagagattcttctcaattttgttctgtttgattttaagaacacagactttttcgatctaagcaaagatacttggcatattactggtgaaatttagggttcttgtgttttgttttgaaagtgtgaatctttcaaggtgcacacctgcgtgtgaatgcttggatggaatgttgataatgctttgtttttggtgaatttgcaggacctccagggtcagggaaaggtactcaatctcca

SEQ ID NO: 3964 - DNA, 729 bp, Arabidopsis thaliana
  Intron number 1 from transcript AT5G63460.2 (locus AT5G634 60) derived from phytozome v7.0 (chr-ID Chr5; pos 25414592 to 25415320 reverse strand)
gtttcttgtcttctaccgtcgtctcttccaatccggtaacttttctaacccattcccgccttttttgttttctaaggtctattatggattccgaattttgaaattttgggtttttcaaagtgattagctttttgtatgcgtcttcaattcttcaaagtgatcttgattgtagttccagatcgttgaaatttgggtagaattaaatcagagaaaatcttgtctgaattgtaattttgattttaggtttaggttccacactttgtgcctataggctcaaagtttctgctttttactttgaattttaccatttactataaatgcttgaagctttgagatttgtgatcaaattgtgtaatgataattacaagagttcacttataatatactgcttcagttcatgacaattgatcttgttaattactttagtaacgttggcaagcgactgctttgaatccatgtgttgctgtcaaaagctggatttagtaatgcgtagctcttatttccaatcatattggagttttattacaatttattttcttataagatcattcagttctagttttcctgtgaatgtggcagactggcaggatctcagagtgtttctttccttttgaagttgtttcatctatctgtgtagtaatagcttctttgttaaagcttaatcatacattttagtaactttcttttgtgtaagatttcagggaagcttgcgggtctacatttgtgagc

SEQ ID NO: 3965 - DNA, 381 bp, Arabidopsis thaliana
  Intron number 2 from transcript AT5G63480.1 (locus AT5G634 80) derived from phytozome v7.0 (chr-ID Chr5; pos 25418010 to 25418390)
aaaaattggaggagcaagccttaagtctcagagtaaagctttctgcaatttctacatctctttgttttcaatctgatgttactacattgatacactattcagtctcgaattctctgtacatttcaactcacatagcattgaatttgattcatattttcttgtataaagtgttctttcccactgtctagtgtaagtgtttgtatcattatagcttaagcggttctagaaccatggaaatgttgataattttttgaatacatttcagccatctggtcattttgatttctatgttaataaccttatgggaagtgattatattgttcttctctgttggcattaataaacggaagcttttgttcatgcaggagattgcaaagaaga

SEQ ID NO: 3966 - DNA, 555 bp, Arabidopsis thaliana
  Intron number 1 from transcript AT5G63510.2 (locus AT5G635 10) derived from phytozome v7.0 (chr-ID Chr5; pos 25424415 to 25424969)
ccgcctggtcttccccaacaggttattgcttccttccttccattttcaaaaaaaattgtgttctgattatccaattttttgtatggaatcaagacaatgttgattgggatttaggggttttcattgtccattttcagttatgaaaagcttattgaagagtcgagaacttatatggacaattaagtaaattggttctgcataatagtgttctctcgagtacagattttcttgcttgaagaatcgtccagtgaactgtggctgtggctattgttcttactcttttgagcataatgagttttaacttcgccgattatgtgtgtggaaacgtgttgttctttaggtgattagcattacaggaatcaagaaactaactgaagattgagcttaatattgagagttgaatagattagcgtagtaccacacacgatcatcttgtgtagtagtaggaagtttcttagcagaaatttgggaacaatgtctcgataaaaggattttggtttttttaatgacttatgcaaggatttggttttctggtcactcgtgactggaagtggg

SEQ ID NO: 3967 - DNA, 851 bp, Arabidopsis thaliana
  Intron number 1 from transcript AT5G63510.1 (locus AT5G635 10) derived from phytozome v7.0 (chr-ID Chr5; pos 25424415 to 25425265)
ccgcctggtcttccccaacaggttattgcttccttccttccattttcaaaaaaaattgtgttctgattatccaattttttgtatggaatcaagacaatgttgattgggatttaggggttttcattgtccattttcagttatgaaaagcttattgaagagtcgagaacttatatggacaattaagtaaattggttctgcataatagtgttctctcgagtacagattttcttgcttgaagaatcgtccagtgaactgtggctgtggctattgttcttactcttttgagcataatgagttttaacttcgccgattatgtgtgtggaaacgtgttgttctttaggtgattagcattacaggaatcaagaaactaactgaagattgagcttaatattgagagttgaatagattagcgtagtaccacacacgatcatcttgtgtagtagtaggaagtttcttagcagaaatttgggaacaatgtctcgataaaaggattttggtttttttaatgacttatgcaaggatttggttttctggtcactcgtgactggaagtgggatgcaatggtgataaagctgtatcacatggatgtgaacttgtttttgctccaaggtttagacaagggaagttttcaagtaaaaacatttgaagagtgaccattctggtttgatagggtctgctgaattttatttgacccggaacagtatctattcaacttgtcacattgatgaaactatttgtttatctttcaaggctaaatttatatcttggttctttttttacatcacaaatttgattctggggtatctattttaaaatttcaggattaccagcagcgacaataatcgacaggt

SEQ ID NO: 3968 - DNA, 569 bp, Arabidopsis thaliana
  Intron number 2 from transcript AT5G63550.1 (locus AT5G635 50) derived from phytozome v7.0 (chr-ID Chr5; pos 25445275 to 25445843)
gggtcgtggaacacctctcagagaaattccaagtatgtatgagaatcaatttcgatttgtggttgttttgattgaagtcttgtgaatttgtgatgtgtagatctaattgttgttaatcagaacgatgaacaatcttggctggttggcacatcttagatctagaagatgagatagctattgtgagatttttcctgtctgtgttggcatgattatagatagaaccatttcattagaaaagcttgggcttttggtctacttggatactattacttctaccaatttgatacctatagtctgactttctgatggaatatcactattagtctattaacttgctgtctgtgatttgcttaattttgctgtggagaaatactcatactctgcactgttgttgataagaagatgagattttttttttctttctttctttctcttgtttgtttgtttagcttgagggtgaaaattttagttattttgataaagacttgtttacatttatttttgattagaaagttgtctgataatttttgctgtttcagtggctcataaactatcgaagagaaaagctg

SEQ ID NO: 3969 - DNA, 507 bp, Arabidopsis thaliana
  Intron number 1 from transcript AT5G63560.1 (locus AT5G635 60) derived from phytozome v7.0 (chr-ID Chr5; pos 25449917 to 25450423)
ggaatattctcgagattcctccagtggttgttcaggtgaggggttgatcgattgatattatgttttgcttgctgttttgtgtgagtgaacgaacatgacctatactggatttggtccgatattggtttcaaataactatattatatagtagaattagattaatattgattttttaattatgcatgtacgtataaatacgctaattagtaagaaagaaaaagatccatactattattcactacaaaatacataaatttcataacttttaattcaaaagtatttatattggaacatatcctaattgacgtttttccaagattgttgtgtgattgtcgacaaaataaattttggacatactcgtttttttttgggcagtacattcgagtaaatacgattgaagaaatcatgcatttttagttgatcgaatacattgtatacgatgcttccatacaaattttggtttgtttgttaggtgacaaatttcaagtgtggagggttcgtgctagg

SEQ ID NO: 3970 - DNA, 749 bp, Arabidopsis thaliana
  Intron number 1 from transcript AT5G63640.1 (locus AT5G636 40) derived from phytozome v7.0 (chr-ID Chr5; pos 25477885 to 25478633)
tgttatctccttcgttatcctctctgtcttctcaggtgactaatcactcactctatcgttatccacttgattgttttgtttcctgtttgctttttgatttgagatctatttttgggttcagattgttgtcgacagctaaattctttgatgtatttggatcaaagtatccgtttttatttgatttgttccgtcttcttcgtgatcgtgtttgtgtctgtctctctcctagatttgggttttggggatttgggtatgcgttgttgtgatcagaagggacctttatcgtttagtgatctctttgatacagagagacactaaaaatggtgaaaaaatgacaaaacttcttattggatgagggaagaaacgttctaacgtgttccatcttctatcattttcttcttagatattttaagattgactgttttctgaacatttcatgctttaggaagtgttaagttgaaacctttttctcttagctctccaattgctaagtgttttttctgttgtctttcttaattatcttttgggattctcatgggatttgattgaggtagagggaagaagagagagagacaaaaagagctttaggctattgtctagacttgcttaatttggaatatatgtgtgctgagtctagtattttcctctgtgaaatccagctgatataatcatgatagtaacattcagtttcttttgtcctttcattgattgcagcttagcagctattgtgcatttgaagctgtactcgg

SEQ ID NO: 3971 - DNA, 452 bp, Arabidopsis thaliana
  Intron number 2 from transcript AT5G63680.1 (locus AT5G636 80) derived from phytozome v7.0 (chr-ID Chr5; pos 25490753 to 25491204)
cttgatacaaaggtttatctttctcttcttttgttaaggcttttattcttgaactgttttttcacaagtgtgtaaacattaattgggtgttgatctagattgtgtttcgttatgattttgctcaagactgtttacactctttgtagttgagttgtgaaatgttcaagtttgattttagctccatgcgaaagaacacgacttagaacatcgttgatcttaagagtgtcgttgttttacattaggcatttagtgttttcatattgtttatggatccctaggtctcagaaacatgtgtttattgatgacgttggctcaaactagcaactgatagatcttatgtgttacttagagaaacattatagttggagtctatgtctatgttagaaccatttcagtaaataatatgagtgttacatcacaggggcctgagattcgtaccggtttcttgaaag

SEQ ID NO: 3972 - DNA, 564 bp, Arabidopsis thaliana
  Intron number 1 from transcript AT5G63710.1 (locus AT5G637 10) derived from phytozome v7.0 (chr-ID Chr5; pos 25499478 to 25500041)
gctcactcgggtatttaaaagctttgttttacttatactttaatgcctatctttctccattgtatattaattaggtttcttggtttttgttgtttattttacataactttattgtttcttttagtttcgagttacaaaatatttggtacatatttaggtgaaacggagaggtttttgatcatcaaagcaaagagtcaaagacagaattataaattttgttgttcttgatacttataagctttcatttttcttaatgttttcggttcaaatgagctctgatagaggagttatggattgatctgacaatgtttcacatcagaaagcaatcaaagctgttagtttttaagacataattagacccacaaatcggtcttttcttttctttgctttcttatgtttagttaacatagtttgatcacacaagttatgtgtttcttgtatagtaagttaactttctccatcgatttgctgcaatttagactatagattctgcagcagaaaagaaaagctgtttaaactgagattgactgatttaataaactgcagggaacggtgaaagtttcc

SEQ ID NO: 3973 - DNA, 925 bp, Arabidopsis thaliana
  Intron number 1 from transcript AT5G63780.1 (locus AT5G637 80) derived from phytozome v7.0 (chr-ID Chr5; pos 25524009 to 25524933)
aggctctagctttctcaaatccagattttgctgaggtttgtttactctaaaccctatagattcgttttccttttcttctacgtttatgaaaattcgtttgctttctttccaaaattcattgacgcataatgttctcagattcgcacatgcttgatctctcattttacagatcgtttaaatcttgatctcgtgatttttgtctctgtttttagtcggtgacccatgagttcatgagagaacgaaattgtttgattttgtcttttaatgagttcatgttttatcagaatctgtgtggtgggaatttggtggagtgcttaaaaataaattgaattaattagttgcttaattttgcttgtgttaaaaaaaattaagagtaatggctgctttaatctgcttctggttaaaaaatttggagtgatggctacttaatttgcttatggttaataaaatttggtgtaatggctgctttcatctgcttagatatgtatattttatacactttttagtggtttcttgtgtttggatttggtgaaaaatctttcctgctcagttacaacctgaagcatgatcttattgctttcagacatcattttgttcactttcttttgttttgatcgatctcagcatgtttttgactcttctgacatctgaaaggttgagtgggatctatgatctaattgtttataaatgatacattcttttcacattcatactactataagccttttttataactagatcacagaatccagatttagcttgcttcatcaccattagtttatgtatagtcccttttacatgtaagcttaggttccgtttatatatattgttttgttaaaagtggtatgttaccgtatgctttcatgttgagagtcttgtgtttatgatatctttattgttttcgctgcaggagctcgttgaaaga

SEQ ID NO: 3974 - DNA, 525 bp, Arabidopsis thaliana
  Intron number 1 from transcript AT5G64140.1 (locus AT5G641 40) derived from phytozome v7.0 (chr-ID Chr5; pos 25667724 to 25668248 reverse strand)
agcttcttctgagcatccgccgcttccgtctacaggttcgttccattgttccgtcgctctgttaatatcgtcgtgcttcagccgcttcttcttctcttttaggattctcatcctaaacatgttcgtagaatcattgcgtggtgtttctggagtttgaatttcttagatctctccttgtggttttgtatatagttgtccgttctacattttttaattaacacgttgctcgattatcgatcgtactagcataagattaggttgagttagagaatccacaaatcgagaaagatctgtcgaactactctgtgttgtgagttatagagccttttttgtgtaatttcagattgttttgtgttgaacataagcattggttttagtgatttgatctgtggaacagtaacaatcatgtattctacaacttttttcttagataaaagatttagccttcttaatacaatcacatatttcaatttgagctctggttggtatgaagatcttgacattctacatttgtgaaaatgcaga

SEQ ID NO: 3975 - DNA, 304 bp, Arabidopsis thaliana
  Intron number 1 from transcript AT5G64470.2 (locus AT5G644 70) derived from phytozome v7.0 (chr-ID Chr5; pos 25776545 to 25776848)
gcttatcacagagctgttcttctcgctaaatatcagtaagattgcttacttccatagtttaaaatcttgtaattagctcttcaaggatcaaacttttgatgaatcttaggattttgggttataggcttgttaggtggttttagaatcgtataaggaacatcaactcctttctccagtttatgttaagagttgaaactgaaagaataatgtttttgtgtatatgttgagttttttccagccttgttttttctaaactgacatgttaaaaggtggcaggcgagatcttctgctgaagctaatcaag

SEQ ID NO: 3976 - DNA, 441 bp, Arabidopsis thaliana
  Intron number 1 from transcript AT5G64570.1 (locus AT5G645 70) derived from phytozome v7.0 (chr-ID Chr5; pos 25812454 to 25812894 reverse strand)
ctttcaacgtatctctgtttcaagccattggcaaggtaattaattttttatccacttttgatttttgttttcaaaattttattttcgtcctttgcttttattctctttttggataatgggaatatcttacttattatgaaactgggcctctcctttttttttgatctttcgtttggtacaagtaaacactttacaacacgttatactacgtcgttttcgtacctgtaaccaataatgaatttctccccacacctgttttcagtgccatgattaatatgattatgattcatggttaagtttcagctcatttcttctaagaaatataataaaccgaatatggttttgtcaatacaatttcaaaccggattggatacacatggcttttttgaatgacattggtatcacttatttgttaaggtcgtctcaacggaagcgagggca

SEQ ID NO: 3977 - DNA, 431 bp, Arabidopsis thaliana
  Intron number 1 from transcript AT5G64740.1 (locus AT5G647 40) derived from phytozome v7.0 (chr-ID Chr5; pos 25881631 to 25882061)
cccgagtatgtttctcctcttcttttgtttccaattctctgtcttttgatctgtgtttctctatctctgttcaaaagtctctgactttttttacttttcttgtggatctggctcttaccactgcaaatcaattaagatttagggtttttagtactagtattaagattacgtacccttgtagctaattttatcaagaattgattgtgtcggtgggatggatttttccggatttgacttgtcttaattctccaatttaagagatttcttcaattgcaattatgaatctatcaatgtgaagagtaataattatgttattgggttactttgatctggtgtgagatccagtctgatagtgtcactactatgatctgatgtatttaactctactgttttgtgcagataagatcagtccaagagctgagtggacagac

SEQ ID NO: 3978 - DNA, 857 bp, Arabidopsis thaliana
  Intron number 1 from transcript AT5G64750.1 (locus AT5G647 50) derived from phytozome v7.0 (chr-ID Chr5; pos 25892083 to 25892939)
tcaatatttctccggtggtagctctacttctaaaggttagttttgttgggtttttattttgtcctctataaacacacgtaccctgtttcggatttaaaccacattagtacacaccattttgataaaattttacatatttcggttgtgtatccacaaaacataaaacatttaaattataagatcattctatttgataaatgttttcaataattttatgatgtagtatatacatcaaggtatgagtcacatcaaatgtttgtaacacaaaatctaaatacagttgcacttttgttgtcctcacgcaatctacaaagcaacatgtcttatatttagtttttttattcttttcttttatcgttttctaaaatatggcgaagttagatatactttataataatttaaatataaagaaaaatgaggaataaaaaatagtaattagcgtaaagatgtaaataaatatttcgaagtgttgacaaaaataaatataataacgaaactgtacttgattatcttaagacatatactttagaattgttgtaaaaaggttggatatttaattaagaaaatgatgatgatgatgatgatatgccaaaagaatttatctccctccaattgcatcaagagtcgttttccacttcctttttttttctacttgttcattccttttgtcacccatttgcctcatcactttctcatactcgctcttaaaaaaaaaactttataatatctttattggagacattaatattatcgattctttttcttatgtaagaaagtgttaattcacgagtgacaacaaaagtgtgaaattttacatgtttgtttgtttatttgcagtgagagaagcttcgagtaac

SEQ ID NO: 3979 - DNA, 369 bp, Arabidopsis thaliana
  Intron number 2 from transcript AT5G64910.1 (locus AT5G649 10) derived from phytozome v7.0 (chr-ID Chr5; pos 25941423 to 25941791)
ctgagcctgagtacttcgaagagaagcgtaatctggtattctattttcctcatcttctggtttggatttgctactcgcctttcgctgacttgttgtgtgtgtgtgtttaacgattacgaagttagatctgagatattttcttacgttttgttgttcttgcagaatgttataattatagcgtcttggatagaaacttttcttgaagatttgtgtgatgtttctttcatagaattataatttcttgtcgtccccatgatgttttgctcagaaattttggaacattttgagttttatgaacctttgttttggttttcatgtttgttttgtataacaggaggatttgtggaaggctacattttcagtgggaac

SEQ ID NO: 3980 - DNA, 437 bp, Arabidopsis thaliana
  Intron number 1 from transcript AT5G65020.1 (locus AT5G650 20) derived from phytozome v7.0 (chr-ID Chr5; pos 25973961 to 25974397)
acgccgagcaactccacaaggctttttcaggtctctctctttttttttcatcacttgatcgggatttagtttcttcttatacgatctctaatctgtaatcggtttcgttaatcacaagattaatcatttttgatatcttaagtactctcctatactcatcgttgagtattatttagtttgttgatttaatcacaactacattggtgattcgggatttactcttgtttgacctgatctgtgttctgtgtcccaccacaagatcaggatcatgtcttcttatattagatacagtccgatgatgtcctaattgattgattataatgaaaatatgtttctttttgttctttagtgaaccaagattatgcttgttttgtgttctccttgggagatttgtgacatgacaaaatgtttgttttttgggtttggtctgaaacagg

SEQ ID NO: 3981 - DNA, 616 bp, Arabidopsis thaliana
  Intron number 2 from transcript AT5G65430.3 (locus AT5G654 30) derived from phytozome v7.0 (chr-ID Chr5; pos 26148769 to 26149384 reverse strand)
gcgaaacaggtactctttcttcatccactatactgcatgtttgtttcaagtagagtttctctgtctgatcatcattgtcttaagtttggttagggagagtgtaatttgcattttgagttactaacttgaccacttgttttactattcctattggccccatcttgtattcattgtgttgggttgatttgaaggaattttgaaacctttaccagaaatagacaagttgtttataaaaagtaactctttcttctttctgaacggacccacttctttttaataaacagagattctaaagaaaaagacattctgcaaagtcctcttttgatataacttttttgactaacgcttcacattaaccaaattattccttttgtcagtagaatctcttaaaatgacaagactttagaaccacaatatctcatacattatgcatacgagattgtgtagaatctgatcggggttttggtgcatattgaatccggaacatctcatgcatcacatatacaagattctataagactattaaagctcatcttatcatcgcatttctaacttgttcttgttggattcatcacctctaggcttttgaagaagccattgctgagctggacacatt

SEQ ID NO: 3982 - DNA, 570 bp, Arabidopsis thaliana
  Intron number 1 from transcript AT5G66270.1 (locus AT5G662 70) derived from phytozome v7.0 (chr-ID Chr5; pos 26474946 to 26475515 reverse strand)
ctttgtcaggtatagccaacccgtcgtcttcttcgtcgacccaatcttgttccttattcttctcttacctgcaaatttgtaattgttcggttcggacttaccagttatcaaagttggaatcggacagttaacaaacgaattgattttgattgattgcttttgattaattattcttaattttaaatttacacaaagataaaaccttttccataagtcaccgtcaaagcaacaaactttaataagatgacgttttttttttttttttttctggtaatggcgaatctaattaattaattttgtgtgcctgaatgttgatgacttgatgttatgaaatcttctttacatagtagggacataaacagcaagaaatcccaaaaaaaaagaagaacaatgtaccaatgtggtcactaattttagaaagattgtgttcctcctgaaatagtgaaacatgtaggactccccttatatatataactcatgtaaaaaaaaggactttgtggctgctgagtacacacgcatttggttactaactaagtaaaggatttggacaggtaaagttgtttcttagtg

SEQ ID NO: 3983 - DNA, 504 bp, Arabidopsis thaliana
  Intron number 1 from transcript AT5G66350.1 (locus AT5G663 50) derived from phytozome v7.0 (chr-ID Chr5; pos 26505053 to 26505556 reverse strand)
ggcctacactcgtataccttctaacaacacttcaggtatttcataatatctctttatggttattcacccctgaatgaaaattaaagtaatgagctttgaataacttgagttattagtttcaattgcagaaacagaaaccctattttgatcagctttttttgttcttcttttttcattttcaagaaaaaaaaaaggtgaacgattttcttcttcctattttttttttttaatatggaaatactgtagatcagtaagactgactcttggaatgacaggaagaaactgttctcactgatcttgatatttgtgtttatatcctgtaattattaagtttttgtttatttgtttgttaatgctgtaattattaatttgagttaagataaaaacaaacaaacaaatcatacgttgaaaatactcctacgattttttcttataattaacaataattaattaaatgttttctatctagggttggaggttgggaattttccgccggaagttagc

SEQ ID NO: 3984 - DNA, 366 bp, Arabidopsis thaliana
  Intron number 1 from transcript AT5G66570.1 (locus AT5G665 70) derived from phytozome v7.0 (chr-ID Chr5; pos 26568952 to 26569317)
gattcgctcttgccacctctgctctcgtcgtctcggtaactttctttaatctccgactctcctttaaaactatagattaatcaagaaaaaaaaggagaattgagtaacagagaagaagagtattttgttgtgtttgtgataacatgtttatgatttgcattactatgtatcgaagttggcacttgagaacacctaaaccaataacagactcggatagtataatagaaggagaaaccgctattccaattctgtaatcttcgattcatgtagatacaatcttcttggatcagtgagtttgatttaaagttgcttgtttctcgtgtaatgaaagggagcaagtgcggagggagctccaaagagattgac

SEQ ID NO: 3985 - DNA, 615 bp, Arabidopsis thaliana
  Intron number 1 from transcript AT5G66620.1 (locus AT5G666 20) derived from phytozome v7.0 (chr-ID Chr5; pos 26588616 to 26589230)
aagggtttgggtaagtgttgactttttttaataattatctcaatttcggtcgagtcgttagttattaactttgacggctcggaaaaagaataatcctttgtaaaaggttcatccatcattaatgtgtcgtcgttcagaaccgtgtctgcacaaaaattggggaattttagaaaaacacatgtgaacactttttatcattatagtctctgcattctactttcagctcaaattcgtccaaggttagatcatgtcccgtttcagatattttcaatcttctgtagacatagattcttctttcttttgtttcatactaagctgtgtttcatacctgtatcaggttgttgttgttgtctttgtgtctgtcttgttctttatctaatgtcgatgtcttagtttgctgagatgatcgtcaacatgtttcctaactatgctgtgaactttcttaacctagttttcgtttatttgattatagttcaagcattttgcctttctgatgtaaattgagatgtttggcttggaaaagtgaaatcttttaatgttctcccgatccttgggttctcaatgattgattcgtttgcagggaaaaggttggtctgatcggtgaaaaggttggtt

SEQ ID NO: 3986 - DNA, 762 bp, Arabidopsis thaliana
  Intron number 2 from transcript AT5G66870.1 (locus AT5G668 70) derived from phytozome v7.0 (chr-ID Chr5; pos 26707552 to 26708313)
tcattggttaatctcgctaattgaggaataataaaaaagagggatactaaaaacaaagatacggcctttgaccttctcgcttgctcgataaactctcaaaacaatccctaaggtacgtggcaaaaaactcgattttaagtttcaaccggataaataattagggtttcgatatttgtttcatatagttttttcttttcattttctctgcattttgaatgttctttatttatggtatagtacagttacagtggtacagaggaggttttgctctttatatataacatttaatgaaaaagccttgtcatttcttcaataactctcctgctcttatagccatagcccatatttttaaactacttcctttttgttggattctctgaacaataatgcattaactaacctagttattattaataatttagggtttaaaagaaaataaatcgtggtgggtcacatcacttcaccaattcttgatatggtaattatttgatatatgttggctttgttctacctactagagatgaaaaagagaatttgtgtgtatcagagtctaagatttgcttacacctttctgtctggaaatcttttaagtgttgtcccagaagatgcactttatacttgcatgtattatcaatttagcatcaatcgcatcgatcaagttctttatattaataatattgtttcttaagtctctcttttggttttacttatatttcctcgacttttcttgcagttggaaactctgactttgctcaaggcatt

SEQ ID NO: 3987 - DNA, 563 bp, Arabidopsis thaliana
  Intron number 1 from transcript AT1G03010.1 (locus AT1G030 10) derived from phytozome v7.0 (chr-ID Chr1; pos 693565 t o 694127)
cctctgagtaatatatactctgtttcaaaaaccagttttgtaactattatcaccaaatgaaatccaaatttagtaacaacgattcttgtttttttttttgcattcacatctttgtttttgataaaactgtcagaaaaagactaaaaaatttgttctttctgaagaattatagcaatcttgtatgtgatgtgaatctgtagccaaaagtcatttcttgttaaagtcttactgttcatcgaaaccaataatttctccatcttattttgtatatatgtggaacatatccgtacattaacacttcatctggttctagttctgtcttcatttgaaaaagcttgatgtagacataatcttttacatgtcccctgtgaatctttaaatgtctctaaaaccaggaataaataacactatttttggcgataaattcactgtttcgttatcctagaatcttagcgtcggagtcatggaattcaagtacacaaaagatcttttgattcataattcagaaatcctttcgcttaatcttgatggtttttttatctgttttcgcaggccgatatccg

SEQ ID NO: 3988 - DNA, 463 bp, Arabidopsis thaliana
  Intron number 1 from transcript AT1G05200.2 (locus AT1G052 00) derived from phytozome v7.0 (chr-ID Chr1; pos 1505119 to 1505581)
tctgattaaagtttgtttctcgtatttattccaaggttgcttcttctttttctcaattggatcttttaatttttgtttttctttatgttcttacatatataatctttagttatttgttcattgaattatttattacactttttgcttctttctctgcgaaccatctttaagacggccctcttacacttcattattttcagttcttacttgcacatgtaaagcaccagtttctagaatcaaagggcctcatataaatacattattttatacactataaataaatatacagacacaaaaatctgtatacaccaatctctctacagaatctaactcccgatttcttggttggttttgccttctttcaccagatttctggaccatcttttttgtcttttgttataatctcaattttgattcaggttgggcattgtttatttcgcaggtgttactccaaataaatcaa

SEQ ID NO: 3989 - DNA, 720 bp, Arabidopsis thaliana
  Intron number 2 from transcript AT1G06180.1 (locus AT1G061 80) derived from phytozome v7.0 (chr-ID Chr1; pos 1889892 to 1890611)
actatcatcagcttacatcaactcttaggcaacaggtttctcctccttttccattttctgtttttttacttcttcctttgattatatgcgaaattttagattttttggtcctatattctttgaaaccagaaattaaacaagaatttgagaaatcactcacaaatttttctttatttttaatctttgagaagtcaaatcacaagtttttttctttcttttaaagtaagtcaatgcaatttctgtttagtccataactccatatatattacagtgaaaatgatataatgttcatttgtagatgaaggattttgggacatcaaattgtgaaaagtatcattattttggaagtttagtttgttttaactgtggagactagctagctagattacttcacaattttctctttgtatatgtgttgcttttgtcaatatgcgaaattttatatctttgtggggcagagaactgagaagattccaacccgtgattgcctttgtccattaaataatttcaattttttactttcctctaattatactttttattcactagtagacaaagataggcactgtgatcagtgtaagacatgtgcaaattcttttaaccatacgcatgaacttcaataactttccttttgttttactcgctctttgttctcataacaatgtagacgacgtattatgatgattgatgagtcattcatgtgacatttgttttgagtag

SEQ ID NO: 3990 - DNA, 933 bp, Arabidopsis thaliana
  Intron number 1 from transcript AT1G09040.1 (locus AT1G090 40) derived from phytozome v7.0 (chr-ID Chr1; pos 2911429 to 2912361)
attgcaaagttgagacatctcataaactaactcaggttatcaaatctatctccttttgccgtgtttggcaattcatgttttcgggtttgctttcctctttctggggtttcttgtgtcgcaacgctactgctttactagaaatcgagagaactaacaatcggggatgcttttgatatcaagtacccaacttttgttttagaatttgtgtgttccatgtttttgtctcttgcgtaaagatttcgacttttcctgcttttcttgcttaccattgtcatatgttcgtctcttggttaatcctttacgagatcattgagaattacatacaactttttcatgttcgggatcgatgcctatgggttttgctttgatcaggtctgattatgaatctgggtcagttgttctacggaacttggctctgaaaatactagattttatctctttcctaggcttcgtgcttttgtgggttttgctttaattcctgtgtctgtgtttgtttcaatgatcaagtcttttgattgaatcgaatgtatttggtatccctcaacaacttctttcacgatctgaggtagttgaatcttcagtttggtaccgtgatcttaaatatctgagctttattactttaccccgtcgtgttgctctgtacaatgtatgtatttgagctccttgcggttttgtttgtatctttcatagttaatttcaatgttcatacttagggtagtgaatttccaagttgggtcttttatcttcgtgtttttgcttcttagtagtatctatttgcaaggaaactaggattgatttccctttgctgtttgatttagatgatgttcacagtttttatgttcttgaaaggttacattttttcagcagtttgagattcctatgatgttgaaaatgcagttcttttgtgcttgttcaggtttcactacgttgagg

SEQ ID NO: 3991 - DNA, 444 bp, Arabidopsis thaliana
  Intron number 1 from transcript AT1G11130.1 (locus AT1G111 30) derived from phytozome v7.0 (chr-ID Chr1; pos 3723194 to 3723637)
gcctttctcagctggagttactaatctacgaggtaataatctttctctgcaaagttttttttatttggattttgctttgactctccttcttttggtttagtgaacactctagattttttttagacttgtgtctagtgaaaatgacttacatcagttttagggtaaactaggtaagcaatatagctgtttgggaagctccagattggcaaagttctatgattttgaggctacctcaaaaaccctaaaaagtttaggtttttgacacataagctcttgttagggttttagttcaagaccaagaaatttgttcttattgttcttcattaaatggttatcataagaaagattctttaatctctagaaattttactttttgatgtgtttgtctgttgtttaataacttctgcagtttcggcgattaataacttgtatatcactttggga

SEQ ID NO: 3992 - DNA, 595 bp, Arabidopsis thaliana
  Intron number 1 from transcript AT1G11730.1 (locus AT1G117 30) derived from phytozome v7.0 (chr-ID Chr1; pos 3957575 to 3958169)
ttcttcactaacaggtaaatctattacatgagccccatttttattatgttcgacgatttcttattaaagtttggatatctcactgttcgtgtttgattctagcttctttttctttctggatttttaagtattttgttgtttctaatttcatcttcttgggactgaatctatcttgtgtttctcaaaatttaagtagatttcttaagctttgagttttgtcggtgaaggcatgtttttgttttttatcaagactactggtctatttgtgtccttgtagctttagtgaggaggaatcaagagacacacacaaaaaaaactatatcttatactgcttatcagatagatttgatcaaatagtggaacattgtaacttttgtagtatttgatcaatctctttgcttaatgtatcgtcggaagaggaacaattgaataatttgaatggcacattgtccacaaagtatgaaaataacatagagattacttctttttgtttcaaaaatctgtatcactgagatagatagtgacttgatctgaattttggttcggatttgtgtttgttttgatctcatgggataatgatcatcattatatcagg

SEQ ID NO: 3993 - DNA, 543 bp, Arabidopsis thaliana
  Intron number 1 from transcript AT1G13230.1 (locus AT1G132 30) derived from phytozome v7.0 (chr-ID Chr1; pos 4520860 to 4521402)
tctatcctgatccttgtggttggactccaattcaggtttttcttacaagtctctctttccttaaaaaacttgctttatagtttctctagagttatgttttgtacggtcaagtaagtccttaattgtcatagactcttgaagatagtgaagagcttgagcttataatgatgtagaaacttttgagctttagatgttgttgaatcaatcaaacttaacttcgaaaaagcctttgaaatgatgtgtaaagacttttttgttttctagctgtctcaaataattcttcaaaatgctttgtcctctttgaaaatttccataatcggatagtgaagtttaaagcttcaaagcaacaaagtgaatcctattttcatataacatctctttttgggggtttctttaaatgtttcaatggttgttacaattatatgctcattggcccaccaatcattcctttatcttgcagctaagtgctcttcagaaaatccaaacattgaaaaataaaacttttttgtttttggtttcagggtgtttcttgtgacatctaca

SEQ ID NO: 3994 - DNA, 683 bp, Arabidopsis thaliana
  Intron number 1 from transcript AT1G15460.1 (locus AT1G154 60) derived from phytozome v7.0 (chr-ID Chr1; pos 5313400 to 5314082 reverse strand)
ggctccggctattctccttttctctttcgtcgccggtagtttgctcctccttacgcctcaaatttccgagttattgcatgttaactcctttgtctgattttgtttaatcctttcttttgtctgattatgtttttgtgagatgtgaaaggatttgttactgctaatttcgttgtcaaaactatgaaaaaggtgtagattcaatatacgacggatattaattaatggattttattgaaaaagttggattctttttttttttttttttttttgggtgcatatgcaatttcaaatttcactttatgagagaggagacgaggagacttagatctttgtcataagaagaaattttgcattacgttttgctttgttttatgtgctttgtgatgtttctctatttgagttgggcacattgcgttttcttattcatataaaagcatagaaaattgacattactagtaagtaacaaaagataaaacagctataagcttctttttctattgagaggtggaaaaagactggaatcgtcacaaatttagaaaaatataatatgaagattattttgtattaaatgtagtcagcaaaatgctagatttaaagtcattgctagatgtcatacataatatatagcttcctgtttttgtggtttaggtcatataaagagtagaccagaggcgacgagttct

SEQ ID NO: 3995 - DNA, 596 bp, Arabidopsis thaliana
  Intron number 1 from transcript AT1G16310.1 (locus AT1G163 10) derived from phytozome v7.0 (chr-ID Chr1; pos 5578674 to 5579269)
acgtactcgcttttctcgctattttcgtactccaagtaatttttttattcttcttcatgtttttgttatctgctctcaatccgtaaagtgtgcatagagacgtgtacgtaaaatgatcagcgaccatgacttgtgaattgtggatatgaactttgatcatgtgtatgaaaaaaaaaaaagtagttatacaaatgtgtagttgttgaaatttttttgggaaaataaatttagaaattcagtctagaaggaaaaaaattagagtgaatgattctctctgtttaaaaccccttgctattgatttgattcagtataaaactttttctttttgttgattcaaagtttttgatgggatctttagcttctcttttggagtttgtatatacccatattctttgttttaaagttatgtggatgctgaatcagattaatctctacagaggttataaggcgttttagagtgatttgagaaactgttatacccatcaaaggtcgactatcaaattgttaaatcttgaaaatggactttaactttgaacccttttctctgttgtctcaatgcaggaaaggaacgtagagtctctgaatactacaagaag

SEQ ID NO: 3996 - DNA, 822 bp, Arabidopsis thaliana
  Intron number 1 from transcript AT1G24260.2 (locus AT1G242 60) derived from phytozome v7.0 (chr-ID Chr1; pos 8594891 to 8595712 reverse strand)
agaggaaagctgtacgagttttgcagtagttcgaggtatatatctacttttgtatatatattacttataacataaacattttatatacatattaagtaacacaaaaatgtcttgtatgtatgggtctctctgtgatgtgttgttgtgtcgtacgtacgtgttctatcatatccttttaaaagaagcaaagaggaaaaaaaatttgggataccccaaatctgtatcattttataacaagtttgcttttttgatgttcttttgtgtttctctttgatttccatttttgtttttgattttttttctatttctctttacatctatcaaagttttttttcttatattttattgcttatttgtttgtctacttaattcacattatctgagagaagaacaatctatctgatatgaaattagggttaatttctcttgtgagtactctttaattcacataagcttaaagtttccaccttttgattctgggggtcgtccaattcgatcaaatcactcaattttgttgtcagattgatataagttcatagggggatattgtttccacgacaatccattttagtaacccttaggggtttccaattttgggttttgaattgacgctaatgtcaaattcatctaaagtccgttggatatgtatacttggggatgggattcatccttttttctgggttctttagatcttctcttaaaagactaacagattttgttgtaaaccctaggaaacagttaaaaatcccatttttaaaaacatgttttgaacttgatgagtaagattaatggaagaaatgatgtttttgtgtggtgtgaagc

SEQ ID NO: 3997 - DNA, 798 bp, Arabidopsis thaliana
  Intron number 1 from transcript AT1G25540.2 (locus AT1G255 40) derived from phytozome v7.0 (chr-ID Chr1; pos 8973580 to 8974377 reverse strand)
accatcgtctccgactatctcgagaaaatcatcaggtttttctttttatgaaccttgtatctcttttaatcctcgttatttgattttcattcggagttagggtttagctgataccgttcgaatcaggctttaatttcaattggttagatcaaacctttgtttatcctctgattccacaatgttttgttgttcgttgttagtactgtgtttatgtatttgattgttctgtgtttcatattgagcaatcactttacgttaccttatggttcctacattctttttttgtgttaggacattgttttcgatacaacgcattcataaagcaatgaatttgtagtttctcacttcgatcacgtaaaattgatattaatatgtgattacagagaatttagtatataattgcctgtatagtttgtaactaatcacattgttggctattcttaatatccactcaacatagtattgtatttcaaagtagcgtttttgtatgttaaaatttcaattacataatctgtctatgcattctttgcatttgtccaggtctttctgtggcagtgagttaaatggagaggtactatatctgacttatcctcgtttttaagtttactcaagttttcattcttgagcaaacagttaatcaatgtttttgaccaaactcatatacattcgttatctgtcaaatcattgcgacacaaaaaataacagagcaaattggtagtttgatgtgtctgatcgagtctttatatattcactaaacttgcagaggaaccctgtttctactgttgagctatcactggt

SEQ ID NO: 3998 - DNA, 563 bp, Arabidopsis thaliana
  Intron number 1 from transcript AT1G25540.1 (locus AT1G255 40) derived from phytozome v7.0 (chr-ID Chr1; pos 8973815 to 8974377 reverse strand)
accatcgtctccgactatctcgagaaaatcatcaggtttttctttttatgaaccttgtatctcttttaatcctcgttatttgattttcattcggagttagggtttagctgataccgttcgaatcaggctttaatttcaattggttagatcaaacctttgtttatcctctgattccacaatgttttgttgttcgttgttagtactgtgtttatgtatttgattgttctgtgtttcatattgagcaatcactttacgttaccttatggttcctacattctttttttgtgttaggacattgttttcgatacaacgcattcataaagcaatgaatttgtagtttctcacttcgatcacgtaaaattgatattaatatgtgattacagagaatttagtatataattgcctgtatagtttgtaactaatcacattgttggctattcttaatatccactcaacatagtattgtatttcaaagtagcgtttttgtatgttaaaatttcaattacataatctgtctatgcattctttgcatttgtccaggtctttctgtggcagtgagttaa

SEQ ID NO: 3999 - DNA, 930 bp, Arabidopsis thaliana
  Intron number 2 from transcript AT1G28300.1 (locus AT1G283 00) derived from phytozome v7.0 (chr-ID Chr1; pos 9898214 to 9899143 reverse strand)
ttgggtcactcgggaggatagttctaccaaaggtatgtgaattcttaaaattctttttaatttctcgaaccaatacttggtaaaaaattctgtttgttttcatgatttttcttctttttctgttattgtataatgataaatgaaatgcattgatgaaaatgataatcatcaatcacgtacgtcattgaaaatttaaaacacaatcccataaaaaaattcttagaagaataaagttattttatgaggattagacttccgtcattttatacaagagatttgtggaacacaagcacaaaaatcgttgcggccacatattatctcattattcaatttcactgagtttttcttgcacatttcattttactttcaaattttacataatatgtttatctaactgttttctgtttaaccaataaaaagttttaagtctttaaaataagtatccacacgaaaacaagatgaataagaaacatgagaagaaaatgtggactgaagtaaagttagtttaatcaaattttgtttggtttctgtacgaacttttatgtttttgattttttatttatttagcaagtagtatatgaattaatttaattttttatagttttaaacttgatttttttaaagatagcttataattattgaatatatggaatgctacttcttccttcaatgttgttatttgtatttgttaaatttgaaattgggttgaagaaaatgaaaggtcgtttatatgcctttcctaattaattgtccattgaatggtttaccactttacctcgaaaaagtgaataaataaaaatcattagggaaaaagattctacatatcttggggttttatcaaacttttaatcaattttattttaatgatatcgttcttatttttcttagcaagacactaatacgtgaatcatggctttggaatgcagagag

SEQ ID NO: 4000 - DNA, 794 bp, Arabidopsis thaliana
  Intron number 2 from transcript AT1G31740.1 (locus AT1G317 40) derived from phytozome v7.0 (chr-ID Chr1; pos 11368605 to 11369398 reverse strand)
tttgcgcagagtggaactacgggtactaaactaatcttgcttaattttacttattaatatcatcaatacattcttagtgatattagtttatatatatatatatgttagtctatccatttgataatgattaaatttggaaaaataatctcttcatgatttttcatttgaaaaataccctatcatttttcttttttaaaaattgacttttaatatagaaattattcaaatagcctcattaaaatttagcaagaataaaaagtattttgaacttaaaataaaaagaaatccataaatttaaagttgatgcaacttacgattttaaagataattcttatcttaaatatttttaaataaaataaataaatgaaccttattacgtgatagactaaaaaaatattttagatatcatttttaatataaaaataaaaataaactttttttatctcaaaaacgatttgaaaaataaacaagatattgaatttattttattttatttttcttctaaatttcgagtttttaatttattaaaaaaacagcttttattttaaatccagaaaaactgttattttatatattaaaattataatatttgttaaaaataatgaaagttttttttcaactaaaaactcaaaaacaaggtagttttcagaatctcactttgcttatagtgatattatgtttttatctttttttttgcatttttttgtttttttgttaatatctttcttcactaattttgatattttatttatataatcattttcaatagaggatttccagtgtggcttcacaac

SEQ ID NO: 4001 - DNA, 762 bp, Arabidopsis thaliana
  Intron number 1 from transcript AT1G31750.1 (locus AT1G317 50) derived from phytozome v7.0 (chr-ID Chr1; pos 11371064 to 11371825 reverse strand)
cgccgggtatcccggaccatccggtcctcgtccaggttattatttaatcaaaaatgttgtcttatgtggttatgtctcttagtcttagttaaacgcccttgctattaacaaattagtccgattggtgtttgttttgagtggtgttttatatagtatagttctcaaaaatattatgagaagacaaaatgtttctttaaagggatgcatatagttaatcttggttcattcaaaagccaaaataggttctttaaccaaatcttgcgttatgcgatgtgcaattccaaaaagtaaagcttggttttaacgaaaatgataataaatgatttatgctttgattttctaagtttttcaaattcgaacaagaatttaaagaaagtttcttgcgggttatatcaaccaaaaagaaaccaatagtaaaataattaatgtcttgatgaataattgattaaattctttttatgatataatatatgtggctttttgttcagttaaaaatgtttttttgttttgtttaatttagaaacatagaagaatgtggcttttgttcagtgttttttttttgtcaacatggctttggttcagtttagtatggattataaataatgctacaatgttttaatatggattataaataatgttggtctagttttataagcccaatttggtttgataggttcacatgccaagtaacctttgattgaatgctctcctcatgtgaatataacagggtttggaggaggagttgggggattgatagcagga

SEQ ID NO: 4002 - DNA, 950 bp, Arabidopsis thaliana
  Intron number 3 from transcript AT1G36675.1 (locus AT1G366 75) derived from phytozome v7.0 (chr-ID Chr1; pos 13868254 to 13869203)
gagtgatattgctaagaaaaaaacaaaaaagaaaggtaagggcgcagccgtagaagtaatcaacgaagaatggaatgaattcaaacaattaaagacttaagagttggatcgattgaacaacatatccatgttgcaaaatgagacaaacgaattgattaaggaaacgacccaaactaaaaagatgaagatgtatctcaacctaactgaaaaggaacatctcgatgacaagggcaaagagttgtttcagaagttgagccacaatttattttgaaaataattgttgtcaagtggctatttgtattttgtcacttcgtgctttaataatttgtgtttgtcactttctcattttgtaatgattgtttgtcattttctcctttaataatttgtattaattccttatgctttaataatgtgtgtttgtcactttctgcctttaataatttgtattgtcatgttatgatttaataatgtaatctgtcagttttggcttttaataacagaattttatccttatccttgtcttttgtgttttaaccactcaatttgaatccaatcctctagccattttttaaatataaatagggactctttcttccattgatgtaccaataccacaaatctcttcttactaaaaaatattcaatggatccatcaaaatatccttttgatattgaaccttaccaatagcagtctaaaattgaagagaagtatattatcaactggtttagggagcgccgaaacaaaataaaggaagactattcatctcatagcaagagaaaatacttcaagagagatcatgcagcagcaaatcaaagactaattgacgaatactttgcaattcaaccaacatatgaagatacaatgttttgtaagcgctccgagtgcgaaaacatgttttacttgggatcgttgcagacctatcaagcagcgacaactacttcaccaaacga

SEQ ID NO: 4003 - DNA, 563 bp, Arabidopsis thaliana
  Intron number 1 from transcript AT1G53390.1 (locus AT1G533 90) derived from phytozome v7.0 (chr-ID Chr1; pos 19918200 to 19918762)
aacttcaatacttcactagtcataatgtacgtttttttttctttcatttccattgatcctggttccactcttttagtctctgtaatttagggttctttgaattctgcaatctaagaaagaaatattaaaactttctctgttttgtttgatgtgatctggagaaaaagaaagcacttttatgtttctgggttatcaaattcttgaaattagattgtcttggagtttgtgatgtgatgtaataagaccaataaaaactcaacctttatgtagctaaacccaagtcaagcttaacaattgattaatataatgtatggaattagatggatcgtttttcacattgctcctcacgttcctcacacacagtgaagaccactatcgtttctccaactcccttcacgttttttccctctccactcacaaatcacaatgtctcaaacattccatttaaagagaattgaaaaagcttctctttttgataaatcaagaaagtttttttttttatgtgtagcatctgatttagcaactttctcttttgtgttcttttaaggcttttgaatctcaag

SEQ ID NO: 4004 - DNA, 551 bp, Arabidopsis thaliana
  Intron number 2 from transcript AT1G53920.1 (locus AT1G539 20) derived from phytozome v7.0 (chr-ID Chr1; pos 20138205 to 20138755)
gtgctggtgctcttgtggaaacgttccaaggttcggtacgttttttttatcttttactttattttattttaatttctgtgggatttttttagtaatagttttgcattataatgtatcttaaaatagatatatcatttgattgagtttcgtaactttcgtttgcttaattgatccatgagtttgattgaatgtagttaacttttctatacctaaattgttgattaaatgattgcatatggaagtgggttttgagttttgacccgattattgtggctaaattaattgaacaatcttctttaaaatgtagttttttggtcccacctacgatttgttgtatccttttacatgctttatttatttataaagatagtagaattccttttcaattttattaaattgcaaaatatgtagtacccacttacttatttaggacaattagatttttaaatttaaggttaggtcagatatattattctatgttgttcaacgtggtaaccaattcctaataattgtaaggttataaatttgagaacacaattggatcactacaa

SEQ ID NO: 4005 - DNA, 866 bp, Arabidopsis thaliana
  Intron number 1 from transcript AT1G54170.1 (locus AT1G541 70) derived from phytozome v7.0 (chr-ID Chr1; pos 20224920 to 20225785 reverse strand)
ggatttttaaagctgttgattccagctttgttgaggtaaatattatcttcccagatatctatcttctgattctgattttattgaggtaaatattattaatttgattcaaattttgagaagttggtgattcagttggttgatttagggtttcatttgggtactctgtctaggccaaattcgttttgtattgaaaattttattctttggattgcaaaaagttgtcttgtttattattatttggtaaatttgaatttttgtggtttgtcatgttatttgttctttagagctgtgattatgatttgttatttgatttgatgtatgaagcctgcgcaagtttgtgtctttcgtaacattgaatcacgttcaatgtaacatatttcattgcaaaatagttatgggattcaaatccttggttagtggatagaacaccaatcttctaattttacgttttgttgtatgcctattgtgctggaaaatggctagcaatatacatcttattggcagtttttggttgttcttcccatggctcataatcagagttactttatggtttcagttctatagttcattgataattcatagcatacttttttccctcggaatgtgcagaacattcaggttacttctctgtatagggtttagttgacgaacccctagtaatatggaattgactgtgacattctatctaaaaaatataacttttacatcgcattaagaaatctaaaagaagttttgatgccagcaagaatgcgaattggagggccagtttgcatattaggctcatcgtaccgtgagacggttatctttatcatcttattgaataacccgtttattgatattttcgttttcttcaggttaaagcaact

SEQ ID NO: 4006 - DNA, 818 bp, Arabidopsis thaliana
  Intron number 1 from transcript AT1G54490.1 (locus AT1G544 90) derived from phytozome v7.0 (chr-ID Chr1; pos 20350472 to 20351289)
gtatcattcatccttgtttccatcctgaaggaaaggtatgttgtagctcagaaatgtttggttagggtttgagttgatttgttgtatgagaaatgaaatcaatgagtttagtagtttggtggtggagaagattattgttgtctgtattcgtagtttagtacagttatgagagaaggagaagtatactagttgttgcttttcctcgattttgcttcctgcacgtcaatggaagcgatggccaacttggtgatactagacgtagggtatctaacttttctgaagtgtatgattagagtttgagttgattgtattaggcagtaacaagtagacatggatcgtatgagaaatgaaatcactaagtttggtattttggtgagaagatgatttttttttggtgttcataatttagctcttttattggggaagggaggagtgtactagttgttgctttccgactatttttgcttaccgaaagtcaatagaagcaatggccatttttgtgatactagattttgggatctaaagttcagttcagaaagtgatttagatatattatttgggaaattggatgcttatggctgtgtgtattttgttcatgtatcacttatgcgagtctaaagtcagtttttttataaaaatagttgactagaaaattaaaagacactgatgttattagtttttcattatagttgaggagatattatcgaagggagtgagtttgcatagcaatacgtgttatggtgatacttgatttccattaaagattttactagctaatcgtactttgattacaatgcagcctgcacctgccacgtacg

SEQ ID NO: 4007 - DNA, 598 bp, Arabidopsis thaliana
  Intron number 1 from transcript AT1G56650.1 (locus AT1G566 50) derived from phytozome v7.0 (chr-ID Chr1; pos 21234394 to 21234991 reverse strand)
gcaccaagttcctgtaagagctggtatgttatttacgaacacacacacactaaccgacacacacacacacaaatatgaatatctataatcactaccaatagtcttcgttctctctattttctattcagaaaattgattaatacccggtattaaaaaaaaaaaaaaaaatttgtttaaatgagtacaaatcattgttacaacttctttatgctgtttttacatgctattaaaggttgtgcatgaaaatttcttttgctgttcgtatttgttttacacctaaacgaagatttttacttaaaattaaagaaaaaaaattatactaattttagttacgttgcgtattgctagcttctcctataaagtcgttcaaatttttacacgcttgtcttcttgtaaatgaattcgtgggaaaattttgtatgaacacgtgtttctgtgttggaacagttctttatttttattggtgtgcatagattcttcctgataaaatatatagaaggagacaaataaaaaacagtcttagtatgtaggtataatcaaagaatcaattattggttttgtagggctaaaccggtgcaggaaaagttgtagattaaga

SEQ ID NO: 4008 - DNA, 653 bp, Arabidopsis thaliana
  Intron number 1 from transcript AT1G59700.1 (locus AT1G597 00) derived from phytozome v7.0 (chr-ID Chr1; pos 21936751 to 21937403)
ttgctcgcttttggtctgacttcgttgataacaaggtttggtttctttcttttcctttatccaacaatttcaatttcttattatttctttcagttttcttttgatggaattttttggaacttttttattattattgttacattccaatgaatttatctttcgtgcatggattatcttggggatatatacttagatcgtcctatttgagtgatttatatatgacaaaaataaaagagtaatgttgtattacataatacgtggatataaactcggatgaagacacattaccaatactatcacaagctagtcaactcaggtctaatgaaatccagtaaatacttcttctagtagtagcatataagtttgttctggtatacattattagtcctagataatcatacattatttctaacataaaaatgtcctaattcttatccataaatttaaataagaatcatcaggcttacaagagaacgacatttgtttgattactctgacactagaccacatttgtttgtttgcgtctccgttggtgtttctatgctacggtgaataggattttatgatatagggacgcaattcaaacataaataaacaattgtagcttatatattattcaaaaactaaaaatgcagtggtttccggcgttgaga

SEQ ID NO: 4009 - DNA, 970 bp, Arabidopsis thaliana
  Intron number 1 from transcript AT1G61120.1 (locus AT1G611 20) derived from phytozome v7.0 (chr-ID Chr1; pos 22524045 to 22525014)
gaatattgggtgttttcatctccacaaaggtgtgtaaagactttgactttgtatttttgtactctttgactaacgttcgtgcatgtaaaacgtatcactacgtaaccagactccgataactcactacgtaagccactgacatgcatggcccatatcatgtgcaaatatatacaaattacgaatttggttttatagttctacccaaaagcatatatgtaccccttccacacacacaaaaaagcatatatatatatatatatatatatattcacatgaccttttttttttcttttttggtcaaaggttgttcacatgacttgcatgcattttttataatgaaaatgcaacagtactttaagctatacatttcaggtacaattttcatttagcaaaacaaatacaaactcaaaaaaatatatatatgtttaaaagttacaaacacacgctaaaaaaacggacatgtctttttacgttatggtgttgaatgaattattgtttaaaagtttaaagcatctacattcatgagataacctttgactttttgagtttcctaaaaaaagaaaagaatataaatatttaataaatttgactgtaaattttaatttagaaaagaacattgaacattcacaacaagacaactgtcttaaaaatctctcataattagtatctcaaataagaacttctcatttctctttgcattttctattttgtttcattttttatactgtgagatactcatgtaagaacttcccaatagatgtgctttttaggttgtggccttgtaggtatatacatatataagcacaaatgttaatactcaatattataaacaaatagactcttactcattccactttacttgcttctttatcttgtaaataaaacaatttttgtttcttttataatacattttttccattttataatttttgtttctaaagggacgagatatatcgaaagaaatacggag

SEQ ID NO: 4010 - DNA, 509 bp, Arabidopsis thaliana
  Intron number 1 from transcript AT1G62360.1 (locus AT1G623 60) derived from phytozome v7.0 (chr-ID Chr1; pos 23060799 to 23061307 reverse strand)
tcaattgtcagaaggtgatgagagaaagaaacttgaaaaaattactttgaaagtttcttcgtaactctaatgattcttatttgattttcttgcacaaaaaagaagagaaagattctagaaaccctaattaccaaactttaccttttatttcctttttacataaccctttacttgatgtctgagtttgattttgatatctacttttgtttactagttacttaacccagctaagtatatacaaatcaaaggatacaatttttcctatattgagaaagtttcaagaaacaatttgtaaaaaccctacttgcaagagattatccaaaatattgtatgtaggcttgaagattaggacatatataattatttcatttttttctttactatattatatatccacaataaacgtgaggatccttatcttagttcaattaacgtttttatgtctatcatttactaattacacaatttcttaaggttggagcaccaccggaggttgtggcgaggctaga

SEQ ID NO: 4011 - DNA, 859 bp, Arabidopsis thaliana
  Intron number 1 from transcript AT1G63750.3 (locus AT1G637 50) derived from phytozome v7.0 (chr-ID Chr1; pos 23651393 to 23652251)
gtgagcaatattgctggagaagacttcaagaagtttgtgttcaatcgatcaactaagtaattttataaaaataccattaaaaaaccacagtattaagtctttattccataagtactatcactagtttattttcccaataataccaaaaattcagtattatgtcaaaaaaaacttaaaaatgtggtatttcaaagaattgcccataagtttatttcttaggtggtgttattcaattatggagttaaagtcaattctttaagctttagacttgttttctgatattgattttaagaatatgtttgtatgaatttcaaaatctctgcaatatgtcttggattttgattctagtgatttactcatgaaactccaaagaggtttcatttcaaatgaattaatatacaaagattttacaagtcttttagtttttaataacgctggattttaatgaaatatttaaaatcttaattgaataacatcaaactttaaaatctattaagcatgatttacaaagatgagttccaataacactaaattttaaagttggatatagaatcattagttgaataacagtggattcggcttggatttcaattctattaaaatccattaacgaataacacccccttaggttctattacgtggtaatcacatgataaaagaaacgaatggttaatggtgttttatgatgcatatggtaaaaataaggaatgttaatttttatagattaagggaatgtttttgttgaataaatattagaaatagatgtaataaattattggaaatagtgggaatgttgtcactgcagtgactatttgatggaaacactgctttttcttttctttctattttgttagggata

SEQ ID NO: 4012 - DNA, 513 bp, Arabidopsis thaliana
  Intron number 1 from transcript AT1G66670.1 (locus AT1G666 70) derived from phytozome v7.0 (chr-ID Chr1; pos 24864866 to 24865378 reverse strand)
tgctccgtcaaagaatcgtctttttgggttctcaggtttcttctcaaaaatttcccctttctcttcaaatcctgtgttatgttagaattggttcttcatagataatcaaattggtgatatcacaatgaaattgaatttgctttagtcttgtgtaatcaaagcatctatagagattgatcttgtaaaaccatgaacttgtttcattgaagttcttgattctgaaagaactgttttttggttgattagaatgatttatgcatggaggatttgatgtagtttaagctgttttattgtttgatgagagtcagagagagtagagattttgtgttacttcgattcagctctcttgaatttgaggttttgtggttattggaatgattaattgagcatttgatgttagtttaagcttgtttctagcatttcatcaactcggataaatttttcgatcaattcgatatattcttagttctaccgtgacacagcttttgttgaatttgatatttctttaggttg

SEQ ID NO: 4013 - DNA, 522 bp, Arabidopsis thaliana
  Intron number 1 from transcript AT1G68660.2 (locus AT1G686 60) derived from phytozome v7.0 (chr-ID Chr1; pos 25778533 to 25779054 reverse strand)
tctcgcaccatcctctctcttcaattctaaatcaggttttcttattctctctctgattccgtatcaaacatctctttgttctgttcggtgtctttgaatcaaaaagttcgaaacttgaattagtaatcaaattccggagctttctgtatataatcagctcatgacagttgatttacatacatattttctttgttgatattgatttgtgagatgattaggtgcagaaagaaataggctttttagctttttaccttgtctgaaactgaaactcttctgtctgaagcaaagtgaattgaataaacaaaaacagaacagaactatagggtttttgatgtttgatacctatttcttacatacagataattttagtgaagtttgataaagataagttttatgaaaggcatggtgatgtttagctctttctaaaaagattatctttgtggcttgtctagttgtgatttggtttgctcttctctctaacttggtgtgtgcaggggacaaacatttagtctcaaaaggacc

SEQ ID NO: 4014 - DNA, 799 bp, Arabidopsis thaliana
  Intron number 1 from transcript AT1G69640.1 (locus AT1G696 40) derived from phytozome v7.0 (chr-ID Chr1; pos 26194475 to 26195273 reverse strand)
ttgttcaagctgttgtcgctatccttttgttcacggtaccgtttttctcttttcccatttttgagttgttttgcttttgtgaaattgaagtgaaaagttaggtaaaacatattggggaattttgatatctgacgctgactttttatgtgtggaattggatggttaagatttttgtttttaaaaaggttaactttttgggttgatgttgtctttcgacccataaagagaaatgggttatgtattaatgatcttaaagttggatcatatattgactgttctaacaatagttaagagctttagaggaaagtatcaatagggattgttctgtgatttggcaatagggtttagacttggcagaccttattaggctgctctagaattcaaccaaggactctatcttaggctccgttggtcctctgttccttacttgtgttagattcagagaggactggttcttatcagcttatctgatgagaaaaccaacaaacatagtaaaccttgctaattgtgatctttaagcttaagcaagttcttttgttgaactggaatgttgttttgttgaactggaatgactacatcatcggttcttttgttgaactggaatgaagcggcatcatcggttcttggtttgaattcgtctgatcctgagtacttgtaatgtatggatttgcttagacatgccgctgatagaattgactcatcaatatcatggaatatcttcttttctgtttgtactagtttttgcttttaaccttcttctaatatgcttcttcattgtctatacaggtgacgggaagtg

SEQ ID NO: 4015 - DNA, 900 bp, Arabidopsis thaliana
  Intron number 1 from transcript AT1G73530.1 (locus AT1G735 30) derived from phytozome v7.0 (chr-ID Chr1; pos 27644246 to 27645145 reverse strand)
tcagtggtaagttagttcccttccttgtttctgtttccaattcttcatcttgcatatatcccagttggtgaatgatgttactgtattttggaactttttggttatacaactgtgattcttcactatttcttcgagtattatgtatgacattagatgtagttttttttttaccgtggatacgttgagagctacatgtcattgtgttactataagcttaggatatctccaaaatattcggagcaaacacatttgtggtcaccaatttatgtagttaacaatgttagatgttagaacttgcggtatagttttaaatgttagagagaatggaatgataaatttgtttgtggggttctagagccttgtggaatagcttcactcggttagggaatgtctctgtttggttactttcagaactggtgagattattgggtatttgttacaccgctgtaatggtacctaagacattgccggatttgttgtaaaggtagataatgattttggttggtgtatagtgttgtgtgtgagctctgatatactggggagatagatatctttctgctgttaattgtggttaattttaattcattactagcaacacactgttataagcttgttttctaagtaaaagggattggtgcaagttgaatagtggggaattagagccttagacatggccataagcaaaagcagtgttaatgctcttctatggtttcctttttttgtttcacttttcagctttctgcaacctttttgatgcctcatcgtctcttctttcactcagacactcattatatgagacttgaactctaatgaaatggattgagggtttgattggtattgacttgactttgatggtttatcacagggctttctttccgcacaactgaagataccttacgg

SEQ ID NO: 4016 - DNA, 356 bp, Arabidopsis thaliana
  Intron number 1 from transcript AT1G75880.2 (locus AT1G758 80) derived from phytozome v7.0 (chr-ID Chr1; pos 28490850 to 28491205)
gcaaagtccctggtgatattgtaggttagtttgcctgtaattttattttcattaaaattttcattgtagtcttacaccttgcattctttttattggatagctatatctatcgaatgcatgaacttgattaatgatttgcagtccgtgactagtttgattttcttgctctataaaatggtgtacaataaagttaagcacacaaagttgccactttataataattcaaaaatagtaaaacacttaaacaaaacaaaaaaagaagaatatcagaagtgatctaataattatattataattttcataactcatttgtttttacagcggaagagctagggattaaacccaatataccggca

SEQ ID NO: 4017 - DNA, 813 bp, Arabidopsis thaliana
  Intron number 1 from transcript AT1G79510.2 (locus AT1G795 10) derived from phytozome v7.0 (chr-ID Chr1; pos 29909176 to 29909988 reverse strand)
ttgacaaaaaaaaaaaaaaaaaaaacatcacgcgcttactttttcgaactatacaaaaatagctaatttcgaaagggggttaaacctacagatttgaggtgcgtgctgataactcgcatatagtgcgcgtggttattttattttcaaacggatacaaatatcgctagtgtgggctttcttaataccggtctttttattttttgggcttaggcccagtttacacgtgtcttatcattttatttttttatgtttttctatgcattaaaaaattccttatggcaaggacaataacaaaaaaaattcattaaagatcacatagtattgtaaatgtgagattaaacatgaaaattttattttccaaaattactgctttttaatgcataagattatacttttacggtactaatgtacaaatattttccttgaaaaatcatttactaaaaataattaaataaattcgtacgtcttttctttttggtcggaattagtacgtcttttctttcttttttggtggctatttattttgttcatattagatcaaacttaggagaaatataaatatatatagatatcaaataaaaagtaagaaacataaaaatattagaagtcaaaataaagaaaagaaaaaatacaacgcgaaggtttgattaccactcaaaaaacgagcagctgtttatcttccaacaaagcttcttcgtgcatcttcgctcttctcaactcgtcatcctctccctctgattctcttaagtcgccttgaaaaattaagacaaaacaacaacaaaagaacaagagaagctctaaaatccagcagct

SEQ ID NO: 4018 - DNA, 817 bp, Arabidopsis thaliana
  Intron number 2 from transcript AT2G16990.1 (locus AT2G169 90) derived from phytozome v7.0 (chr-ID Chr2; pos 7383330 to 7384146)
ctcttgccgtttacctcactggttttcaacaagtggtaccaacctagtctctctttgatttccatttcttgattgttagaagatttttttgtttgttttctttacttgaaacgaaatttggcatatgcttccaaatgtctgaaatcgaaaacttgcttttaaagatgatcggattttgcttttcttaagcaaaaaaagattataaagaacgggaaaaaaagttttatagaatatcatcctattttgttttcaaatctaatcaagttttttgactagtaacttttaacagagtaaattttctttgtatttaggtttactctgcatttgtgttttcacctataaatagaaaatagaaagaaaaaaatccagttttaaatatatttttctctctactttctttcttgtatttttatttactagcccggacattttaccagtaacggtctaagttgccgaccaaaaaaaagtaacggtctaagtttttttcttactaccattttatcacgagtttaattatattatgcaattctaagaaaaaagtaattattaatttcctttagatggttttggagaacaaaaatttctatgtagtttttttccgatcaaaacttgttttccaattaaggttttctatacaaaataaaaggttaaaaccatataatataaattagtatataatttgatgtaattaatatgctaaagtttttttaaagattttattactaaaaacaagctaaaaacaatttaaaataaataaatttgtttgttatgatactgatgaattttatttatgaactattaaatgaaggcaataggg

SEQ ID NO: 4019 - DNA, 907 bp, Arabidopsis thaliana
  Intron number 2 from transcript AT2G19150.1 (locus AT2G191 50) derived from phytozome v7.0 (chr-ID Chr2; pos 8305590 to 8306496)
ctagcaatatcatcattactggaatcaccttcaaagtacgtctttttatctatatatcaactgcattagagtaccatgtattggaaataaagttagatcgtcaaacatactattgaaaaacataaaccaattcattcattttcaattgatttgatttggaaatgcctaaaaatccgatttcatgtagctatttttattagcagtccgtttataatagtttatgatgaatatgcatatatatttaaaagttgagaaattcctaaaaatagcacgaaaacaagttttatggacaataatagcatatacttcataaacttccaaacatagcactacttgacttatgaagttttaattttgttctaaaagtattaacactaattatttttttcaataataccacaattttaatataaatctattcaaccaaaataaattagaaataaatttaaaatattatatttgggttcttcatttccaatttagggtatatatttcaaccatttaaaagaaatttcgattcattttaatattagtttatggtattatatttgggttctctattttccagtttagggtatatatttgtaccatttaaaagagatttttattttaatattactttgtggtattatatttgagttctttattttcaatttagggtatatatttttataatttaatatttatattagtgtttgctctcatttttcttttctatcttatatttaatttaagtttaattgaaatttatagtgttatttgttaaattttagaaatgttgtgttaattttggaagaatttttttgtttggtgctatttttgtcaattgttcttaaaaaaaagtttgattaatggattttcattttgtctagaataaatataatattgcatcgagtagctcaccaac

SEQ ID NO: 4020 - DNA, 584 bp, Arabidopsis thaliana
  Intron number 1 from transcript AT2G25690.1 (locus AT2G256 90) derived from phytozome v7.0 (chr-ID Chr2; pos 10941650 to 10942233 reverse strand)
cggtacagattgagagaagagattacaagatccatgtaagaaaacacatctcagaaattgatttctattcacaaaaaaagctactctttcaaaacctagaaagttaatttcacattctcagtcagaaaaatggttttgatttatagtactttttatgtatatgggtcaaatttggtttctttagaaaatttattggtctaatgtttaccaaagttataatctttgcatgttgtttcttcaaagttcattttttttttaataattacattttaataaggatgaaaaattaacattttcttttgtctgttacaaatatttctccgctgatttgaagctgaggaatttaattaaggaatattttggcatattctttgaaaatctctcattctttggttctttctaagataatttgcttttgttgtataaaaaaagagtaactagaataccaaaatgtacggtacttatgatttaaaaacttatctgatgctaattagtcggcttaatctatatttatgaatctctctgatgtttgttttttgatatcatgaaacagattgaagaagaagaaacatcataaccgtaaa

SEQ ID NO: 4021 - DNA, 723 bp, Arabidopsis thaliana
  Intron number 1 from transcript AT2G36190.1 (locus AT2G361 90) derived from phytozome v7.0 (chr-ID Chr2; pos 15176908 to 15177630 reverse strand)
ttttcactttcaacctccaaagcattggattaacggtacatttgatctctccctctcttcaaaatttagttggaaatatttgtttcttttagttttcaatgattttggttttggtgttagtttttatttttcttgtgaaatgaaagttgattccacactaagaagttatttgcattgcccgataagagatctccaaattcttcaaatccttttttttgttggttatagtttgtgcgatacaacaattaatacaacttcttcaccgatctaggtcaaaaaaaaaaaaaaaacttctccgttccttaataatctcacgtatgataattacgtcatgaaagtgcaggggagaaactaatttttgcatgggctatttatattattccttgttgcctatgtataatttttttgtatatagaatattaattaaagttatatctttagacattcacatttcaccaatataaaacacagcatatataacgtgagaacactgctatgtttgtttttttctatggaaaaatcacatgaaattaatttcatcttcaacttgttctaccaaagacttcaatttcatgtgatttttatgtattctcgaatcctcttgtcttatcttatttccctcgaaatcataatctaattatgatgaactcaaactaaactaacctcgtttttgtttttgtttgtttccatgtggcattctcaacaatccttatatagatccaa

SEQ ID NO: 4022 - DNA, 886 bp, Arabidopsis thaliana
  Intron number 2 from transcript AT2G38710.2 (locus AT2G387 10) derived from phytozome v7.0 (chr-ID Chr2; pos 16185239 to 16186124 reverse strand)
ccttgacaaggtacgtactcgtcctcattcagttttttttttctgattctcatattattttcttggccatattcatgatgtgcttttcgtctgctttgcttttttttcatggttgaaattgttctgcctcaactttgcttatcatatatctgtgttcttaagtcttagatagtatctcttaacaactttgttgaatttttcttttgtctgtctgctttacttctcttctttctcatttttctcttgttgtaatgtacttgtgttgcttgatactaagagcggtttaagatagactacaaattgataaccataaggtgacaaacaacaaactaatggataagtacacatgtacagatatacttttacatatgtaaataggcagttctttgtctaatttatcaaacagacataaatggcattcccctattgttttgagctaacagatttcatatcaagtatcaaaattttcagctgtttttgtactgtgtttggtgtgtaatttatatttttgttgcaacccatctgctgcagttgattaaaattttttgctgtatctttttcgaaactttgtgtatatcgatagcatgaatagcaatagtattacagtgaaagctaatcaggcttcaacctctgtaaaggaactgagtaattcagttttagagattttaggcttgacaccacaaatgaagcacatatatgtaggtgtttattgtgcagagagagcctctattcattagcatttcccatagcttatctgccttttatgtcatgtggttggtcgtaaatgcttgtgatatctttcttttgttgtcagttttaaacgacattagttttcttatataatattgcagtgccttgagggatcgcaggttcccacctatacagg

SEQ ID NO: 4023 - DNA, 817 bp, Arabidopsis thaliana
  Intron number 2 from transcript AT2G39830.1 (locus AT2G398 30) derived from phytozome v7.0 (chr-ID Chr2; pos 16622517 to 16623333 reverse strand)
gtctttcctctacctccttcttctttggtaattattttcttaattatactcgtttaatttgaaacatcttttctttgaaaaaatatttctattttaatctacacacaaatactatagacatgtgatttttcatattaaaagcaatatacagaagacatgtgaacatacactactgttttactttttttttttttgctcgagttgtttgaaacaaataacatgggtcatgtacattctgtaaaattgtcacatctttgaatgagtcggtccattttgtattttattgttgtcatgagtctcgttgggttttgatgctcaaattgagatgatgtgacaatgtggccttgagcactattagggataacaaaaataggtagaaaatggtttataaggttggttcaataaggagtatttattagtggccgaagttgagatattttcgattcattttcatgtattattcgattagattccaaagttacataattactatattattatatgctttaatttgattgtttattaagatttatttcttaattctgtataatcaaaatatttcaacttttaaaagttaaaatgaactacctagctcattgtggttaggaatataattttaatccatgaatgaaatagataaactgaggtggcctattttgatacctttttttttttgtcaacctgttttgatacccttatgcatggtggtggaaaattatttttatctgaaatatgctaatttgtttcatcaactattttcttgatgccatttcaatatttttttaatggtcatgtcaacgaataaacgaatcacagg

SEQ ID NO: 4024 - DNA, 803 bp, Arabidopsis thaliana
  Intron number 1 from transcript AT2G42430.1 (locus AT2G424 30) derived from phytozome v7.0 (chr-ID Chr2; pos 17663940 to 17664742)
tgtctctcatatctttgccctccaacaacaggtaattgaccgagtaaatcggtagtgctccatcggtctttatagactttttgtttagttactaacggaatttatgtggtggttgactcgtatgatatttcctgcatgagatcgaatgttctctgaatcttgatgaattagctaggaacaacttcttttcccatcatttcttttgttttcacattagggcttttcttcctttttgctttgcctaatttttttttaaaattaaagtttgagattttaataatttagttttaagaaaacgttacaacgataaataatcagttttccaataaatatttgtcatgatgttttcatttcttatgtttgtcattttcgattcgccaaaatcttgagtaaacgacactgtacatgttctttccgtttcatgaaaattgatgttttgaatattttttgcatattaatgaaacgcttacaaaagtaaacatatttatactgatgcatttactattctaggaatatgaaattatatatgtgctaacatttagatataccaaatagacttacataaaaacatttcattttcttttggcacaaaacatcaatttcaatgaagaaaaatagactataaaacatacatattcacaataaacgaagaagcctttactaattcgtctacatatgatcttacaacttttttttttctttttagtaaatgatcttacaacttatgaatagaattggaatcaatcttgtttaacttagcgtttgatgcgtttatataggtggctttcttgcaatcacaagtc

SEQ ID NO: 4025 - DNA, 604 bp, Arabidopsis thaliana
  Intron number 1 from transcript AT3G03120.1 (locus AT3G031 20) derived from phytozome v7.0 (chr-ID Chr3; pos 717399 t o 718002)
agggtactctccttctctccatcttctgtatttgatttctgtatttgatcgtttactggacggaatcgcgtgttacccatcgttaatcgttatactcgctttcattgttttgacgacactcggattttgaaataatatgaaaaagtgtttgatttgtgctaatcattgatgtatcctgggatttattatatgttcaaagagttactttttaggtccggtatatatgcttgtaatctaaactcttgctagtacttttaggtaccctgaagattcaagttcccttctactatagtatagtacctacactgtttagaatcttgatgtagccaatccactttcatagacagttgggttacttgtgtatccatgaaatcattcacacaagttagctagtccagcttttgttttgtgtattgacccagcttattagctatcaagtgcaataactctagatattaagtgctgttacagattatgtggtgttcttgttgatatattactaatctatgtggtgtggtttctcactgtgcatgatatgatgaatacatttttcagatttggtgatttttttcttgtgttttttgttttgagatgccaggtcgtt

SEQ ID NO: 4026 - DNA, 531 bp, Arabidopsis thaliana
  Intron number 1 from transcript AT3G03620.1 (locus AT3G036 20) derived from phytozome v7.0 (chr-ID Chr3; pos 876270 t o 876800 reverse strand)
cgctttgagtctttccccttgaactaaggtaactaatcactctgtacttcgtagattcagtatatataacaaaagtgcatctgtgtgttatgttttgatgaatcttttgaggtaagaaatgagtttaaacaaactttattagctcatttcttgatatataactttctcctggctgacaatttctataagaaagggattgggaagaaaaaaaaaaaagagaaataaataggattaaaaaaaaaaaaactgtttggaattgcatatactcgtgaaaacttaaaaaacagatttttttttttgtttttgttttgttgcttttttttttccaatgaaactcgttgtaaatatatgtgtgtgattttatgaattactaatatgattaatatttatccgcctaataaaacacattccattatttcgttgattaactaaacaatttttttttttaaagttcgaaagcttataaacctttatttctttcttttttttttgttagtgaaattatcagattagagttaaagaacggaagaa

(The sequence listing continues in the following parts.)
